United States Patent Application Publication US 2019/0348154 A1 - sequence listing, part 44

SEQ ID NO: 164027 - DNA, 450 bp, Enterobacter cloacae
atgaaaatagtctctattacgctggcagcgctggtgctttattctgcacctgcctggtccgcttttcaggagcgggaatataatacctggtatatgaaaaatgcggtgctttatgatatgacgcagacctcggaaggttttcccgtcatggtgagcgtatcccagcctgggagaaaatccgctaatttgctggtgtcatatattacggaaggccgctgtggtgagaataatctaccgcttaatgtgaatggtaaagtgctgcccgccaaatataattgtgtccaaataggaaagaacagaattgaacatttttcagtggtggatgcggacagcgttaatggcatggtgacgcatctaaaatctgatttcactattctcctgcaaaacgatatcaaaatttgggcagcaaatatcaaagcgccaaaatacgggctaaccccgcgcttttaa

SEQ ID NO: 164028 - DNA, 276 bp, Enterobacter cloacae
atgtggtttctgctcatcaatatgctgacgttggtcatgtatggtgccgacaaaatggcggcgcggaaaggcatgcgcagggttccggaagccacgctgctggtatttggcgtaacgggcggctggcctggcgcgattgtgggccaacagctctttcgccataaaacacaaaagcagccgtttaaaacctactttttcttaagcattgtcgtcagcatcaccgtaatggcggcggtttaccatttctcgcctgtttcttctttatggccgttttga

SEQ ID NO: 164029 - DNA, 1524 bp, Enterobacter cloacae
atgcgccacgcgcctatctccatagctgcagccacggcaatttttgtgctgggcgtttttatcatcaatatccaggtctggtactcggcgcgggctgacagccttgccggggcgcactacgtcgtcaggaatatgcacgtcattcttacagaagcgcatcatgcgacccaggttgcaatgcggcttgctgagaatgagtgtgatgctgaaggacagtatcggctcggcactgaagcggcattacaaccccatctgagaacgatcgttattctgaaaaaagatgcggtctggtgttcctccttgccgggaaaccgcgtgttgttggttaacggctcagcgctgcctgaagtgccattgctacttgttccatcgaaaagtacagtcaacggcctgccggttctcttataccagacaaaccatgccggaagccgaatcatggtgagcatcagcgacagccatatccgggatgcgctgaatatgccactacgtggcgtggcgtattcgctgctggtcggcaatcgtcgtttaggccaatctggcgatgtcttgacggcagcccattcaaacaacgatgttctgacggtaaaagacgttgattatgccttcgcgattcaatttaacgctccgcctatttttagcctaacgcgattattcgaccaggccggtggagtggtgttatttctgctgctcgtttcctcgctttctgcttatcttctgcagcgatatctgtctaaggatatttcgccggaagaatcgctgcgtaccgccatctacagaaatgaaattattccctattaccagcccgtcgtgagcggaaaagagggcaccttgcgcggtgtagaggtgctggccagatggaagcattcgcaatccgggtttatttctccctcgtcatttattcctcttgctgagaaaacagggctaatcattcccttaacccaaagcttaatgcgtcaggttgcaacgcagatgaatgcaatttctacgctgctgccggaaggatttcatgtcgggattaatttcagcgcgtctcatatcgttgcctctaccttttttgaagagtgtctgaattacaagcgcagctttgtgcaacaggatcttaacctcgttgtggaggtgaccgagcgtgaacctctccacgtagatgaacatctcgttaagaccctgaatgcgctacatgaaatagggtttgccattgccctggatgattttggaacgggatattccggcctgtcctacctgcaggacctgcacattgattacatcaaaatcgaccaaagctttgttgccagggttaatgagaatgaggattccaccctgattctggattcagtactggaactggcaaaaaaactgtcaatccgtattgtggcggaaggggttgaaacccaggaacagcttgattacctcatgcgcaataacatcacgtttttacagggctacttcttctacaaacccgttccttttaaggagttgataaaaattctgttatcgaagccaaaggttaaagtgagggtggagtga

SEQ ID NO: 164030 - DNA, 387 bp, Enterobacter cloacae
atgaaatacccaggcgcagcggcctggcaaatgggtgacagcccggaactggcgaacgcgcttgcggacctgattaaaaaagggctcaaaacggccacctgcggatcttttgcctcgtactcgcaggatgtgtctgctccacggataggaagctacaacataatccttgatggtcagaatgtcccggtctgtgtgatccggctggtttccatgggactggtgcgtttttgcgatgttaatgaggaattcgctcgcaaagagggtgaaggtgatttaagccttgaatactggcggaaagagcatcagcgatttttcttccgcgaaggccatttttctgaagatatggaactgatcgcagaagaatttgatttggttgaggtgctgtaa

SEQ ID NO: 164031 - DNA, 516 bp, Enterobacter cloacae
atgaatatagaaacggtccgcttaatcctggaaccctttaatgattcacattatgaaggcttaagggtaatggatagtgatgctgaggtgatgcgctatatcaataagggtatcgttaaaacgcctgaagaaacctgggagggcatcagaagggtgcaggctcgctgggataagtatcacttctcgtggtgggctatcagagagaaatcttctggtgcgatcgttggtgcagcatgcctccagcacctggcgaacgtggagggggcaccattagagattggctggcgcctcgtgcctgaacacaatggcaaaggctatgctacagaggcagcgaaagcgatcgttgattacgctgtagagcgggtgggagcatcttatctggtggccgtggccgatccagaaaatatcgcatcgcagcgtgtaatgaaaaggttaggcatgtcttataaagccttagagcggcattacgatacggaatgcgtagtgtatgagcttaacatgagtaagcctgcttaa

SEQ ID NO: 164032 - DNA, 369 bp, Enterobacter cloacae
atgttcccctttctgaacacatttaagcgattaataagcaaacagcaagaaacacataccgctcctcagaaatattcaaatgaacagcttatccagtgggctaccggttgcatgctggaagggctcccggatgacttctaccaggccagactgctatgcactcgccaatccgatcctgaaaaccccgatggatggatagtcaacgttaatcatgatgtgatgcttaaccctgactccgaatatgagcggttccagccagccgatgacctctaccctacccagtgtgtggaaatgttacttgatggcaaggaatggagtaatgcatcaataacattcaataaagaaaacgcatcgtttaaatggagttag

SEQ ID NO: 164033 - DNA, 171 bp, Enterobacter cloacae
atgaggacgctcgctgttgtattcattcagccagcgttcagtgatttcccgggcttcattcagcgttcagaacaggtaaaaatccaggatttctgtccggtacgtccggttgaaccgttcgataaacgcattctgcgtcggcttaccctgcttgacttgcttatcggataa

SEQ ID NO: 164034 - DNA, 735 bp, Enterobacter cloacae
ttgagcttagaattaaaaatgataaaaacttctactcttttcctttgtactttcttattttcaagtatggcttttgcagaaaatcactacatacctctactttataacttatcgactatgtttgatttcaatccagttaagggggctgttaaatccttagatactgatgttgaggagaatggaaaaatcacttataaaatctccatcagactgaataaaaatggttgtgttgatagcttaaaccttgataatgtttcttctgggcatgaaaccattctaaaatatacaaatggaagtcttattggccatagagatggcaagcctttctcaatacaacttgatgaaaaatgtcacattttgagtaaaaatgaaaatggtgacgagttgcgttacactctttacccgaatggattaattaaagacacctattttttaggcaaaaaaatatctgaacatttttatgatgaagacgataatttgacgcgctctgaattttatagttcagaaagcgttatgtctaaaaatgaaatatcttatgttgataaaaaaaggaagcctcttgattataaactaataaactcatcagttttctcggagggatatacagcaaccagttcttgtcattataacgaaatgcttgtgcctgaaatatgtaatgccacagtacagaacgcaggtaatccggcgccgaaaccagtttcaatgacagcgcatacgaaagttgaattctactag

SEQ ID NO: 164035 - DNA, 936 bp, Enterobacter cloacae
atgcaacagaatcaagagattaacaaaaaagagcaatacaacctgaataaactgcaaaagcgactgcgccgtaacgtgggcgaagccattgcagacttcaacatgattgaagaaggcgaccgcatcatggtttgcctgtcagggggtaaagacagctacaccatgctggagatcctgcgtaatcttcagcaaagcgcgccggtgaatttttccctggtggcggtcaaccttgaccagaaacagccgggcttcccggagcacattctgccggaatacctcgaaaatctgggcgttgagtacaaaatcgtcgaagaaaatacctacggtattgtgaaagagaaaattcctgaagggaaaaccacctgctctctgtgctctcgtctgcgccgcggtattctgtatcgcaccgcgaccgagctgggcgcgaccaaaattgccctgggccatcaccgcgacgatatcctgcaaacgctgttcctcaatatgttctacggcggcaagatgaaaggtatgccgcctaagctgatgagtgatgacggtaaacatattgtgatccgcccgcttgcctactgccgtgaaaaagacattgagcgtttctctcaggcgaaagggttcccgatcattccatgtaacctctgcggctctcagccgaacctgcagcgtcaggtgattggcgacatgctgcgcgactgggataagcgctatccgggacgtatcgaaaccatgttcagcgccatgcagaacgtcgtcccttcccatctcgcggatgtggaactgttcgactttaaaggcatcaatcacgagtcagaagtcgtgaacggcggagatttggcgtttgaccgggaagagatcccgatgcagccagcaggctggcagccggaagacgatgacaatcagtttgaagcgttgcgtctgaacgtgcttgaagtgaagtaa

SEQ ID NO: 164036 - DNA, 1374 bp, Enterobacter cloacae
gtgaccgctttttctaccctgaatgttctgcccgatgcccaactcgctaacctcaacgagttgggatacctcacgatgacgcctgttcaggcggccgccttacccgccattcttgagggccgtgacgtgcgcgtgcaggcgaaaacgggcagtgggaaaacggcggcctttggccttggcctgttgcagcatatcgatgcggcgctttttcagacccagtctttggtgctgtgtccgacccgcgagctggcagaccaggttgcgggtgaactgcgtcgcctggcacgtttcctgccaaacaccaagattttaaccctctgcggcgggcagccgttcggtgcccagcgtgattcgcttcagcatgcgccgcacattattgtcgcgacgccgggacgcctgctcgatcacctgcaaaaaggcacggtctcactggatgcgctacaaacgctggtgatggatgaggccgatcggatgctggatatgggcttcagcgaggccattgacgaagtgatccgtttcgcaccggccgatcgccagacgcttctgttctccgcaacctggccggaagctatcgccgccatcagcgggcgcgtgcagaaaaatcctcttaccattgaaatcgacagcgtagatgcgctgcccgccatcgaacaacagttctttgaaacctcgcagcaggggaagatcccgctcctgcagaaattactgagccagcatcagcctgcctcctgcgtggtgttctgtaacaccaaaaaagactgtcagtcggtttgtaatgctctgaatgccgccgggcagagcgcgctgtcgctgcatggcgatcttgaacagcgcgatcgcgatcagacgctggtccgtttcgcgaacggcagcgcccgcgtgctggtggcgaccgacgtcgctgcgcgcggtctggatatcaaatcgcttgagctggtcgtgaactttgaactggcatgggatccggaagtgcacgtgcaccgtattggccgcaccgcgcgcgcaggaaacagcggtctggcgatcagcttctgcgcacctgaagaggcgcagcgcgccaatattctctctgagatgctgcagattaagctgaactggatgaatcccccagccggcgtcagccttgtgccgctggaggccgaaatggcgaccctgtgcattgatggcggtaaaaaagccaagatgcgtcctggtgatgtactcggtgcactgaccggggatgtggggctggacggggcggatatcggtaagattgctgtccatccggcgcatgtctacgtcgcggttcgccaggcggttgcccataaggcatggaagcagctgcaaaacgggaaaattaagggtaaaacctgccgcgtacgtctgctgaaataa

SEQ ID NO: 164037 - DNA, 984 bp, Enterobacter cloacae
gtggaaagcattaaaggatctgaacttaacgttcctgacgcagtttttgcgtgggtgctggacggccgcggcggtgcccgaccgctggaagataatgatgtgatcgacagtgcgcatccctgctggctgcatctgaactatacccatccggacagcgctgactggctggcgtcgaccccgctcttgcccaataacgtgcgcgatgcgctggcgggtgaaagcctgcggccccgcgtaagccgcatgggtgacgggacgctgattaccctccgctgtattaacggcagcacggatgaacgtccggatcagctggtggcgatgcgggtctatatggacgatgggctgattgtctccacccgacagcgtaaggtcctggcgctggatgacatcgtcaacgatctgaaagagggcaccgggccgatcgactgcggcagctggctggtggacgtctgtgacgcgcttaccgatcacgccagtgagtttattgaagagctgcacgacaaaatcatcgacctggaagataacctgctcgatcagcagatcccgccgcgtggttttctggccttattgcgcaagcagctgattgttatgcgccgctacatgacgccgcagcgcgacgtgtatgcgcggctggccagcgaaaggctcgcctggatgaacgacgaccatcgacgcagaatgcaggatattgccgacaggctgggccgcgggctggatgaaattgattcctgtattgccagaacggcggtgatggcggacgaaatcgcgcaggtgatgcaggagtcgctggcgcgaagaacctatacgatgtccctgatggcgatggtgtttttaccgagcacgtttctgaccgggttgtttggcgtcaacctgggcggaattccgggtggcgcttatcgctacggttttacggcgttttgcgtgatgttagttgttttgattgggggtgttgcatggtggttgcatcgtagtaaatggctgtaa

SEQ ID NO: 164038 - DNA, 1143 bp, Enterobacter cloacae
atgctaagaaatattagtgtcagaacctttattatcgggttccttttatcgctatttttggtaaacgcaggtgtcgttgttctaatttccagcaagccctctctatttatttcccttaacgctatcaatttcgttgcgctatttttgctttgggtctatatgacccggtatcttgtgacgccgatcaatacggtgaagaaaagtattgaagaggtgactgccggcaacctgggggtttctatcccggagtttggcaataactgtgcggggcgactcattcccgggatcaacagcctgtccggcaacattgcgacgctggtgcgcgagatcagggcgtcatcgcaaaccgccatgaccttatcggatcagctctcaacacgtagcgctcagctctcggtcaaaaccgaacagcagtctgcgtctttagtgcaaaccgcagccagcatggagcaaatggcggcgagcactaaaaataacgccgataacacccgcctggcgagcgaacaggcgaatatggcgacgctgcaggcgcgtaagggcggggagctgatggggcaggttgccaacaatatgcagtccataaccgaatgcgcccagcagatgacggagattatttcgctgattgacggcattgcgttccagaccaatattctggcgctcaacgcggccgttgaggcggcaagagcgggcgaccatggaaaaggtttttctgtcgttgcggaagaggtcagaaacctggcgcaccgcagcgcagaggccgcgaagaatatcaaagcgctgattgaagtcaccagcagtaacgtcacgcagggcgcgaccgtggtgtcgcaggcagagaagaatatgcatgaaatcgtgacgggctcgggaaacgtcagtcgcttaatggatgaaatctccgcgtcgacgtctgagcaggagaaaggtatttcccagatcacgctggcgctatcggagctggagcgggtcacgcaaagcaacgtggcgatggcggaggaactcaacggctcctcggatgtactgcgcaatcaggtgattgaactccaggcccgcacgcggaattttagattggatcacgggtcttcgtccccattaccgaccggctccccctccttcctccagcagccagaacactctctctga

SEQ ID NO: 164039 - DNA, 2124 bp, Enterobacter cloacae
atgctcaatatatcgtgggaccctgtgttaatcgctatctcttatctggtggcctttatcgcctcctttgtggcgctggacagtgccggaaagatccccctttccagccgaaaggctgccctgttctggcgcattgccgggggtatgacgctggggatcggcatctggtcgatgcactttatcggcatgctgtcgatgcagatgccgatgatgatgcgctatgacctctggttaacccttgcgtctctgggcgtcgcgattattgcgtcgaccacggcccttgatattgccgtcgcgggaaaaaaacgttcttcgtttcgaccgatcgttgccacggctatcctgagcgcaggcgtggtatctatgcactatatcggtatggctgccctgatgctggatggcagcattatctgggatcgccgtattgtggggttgtcggtggtcattgccgtggtggcgtccggcacggcgctgtggctggctttccgcctgcgagacaaaggggtttttatcgagcgccttctcgccgccctggtcatgggtgccgccatttgtgcgatgcactataccggcatgagcgctgcgcattacccggaaatgtcgcataccctccccggcgggatcggcgagctggggttatccatctgggtttctgtcaccacgctctgcctgcttggcgtgatgttaattatttcccttatcgattctcaccgtcgcaccggccggctgacggataatcttcgacaactcaatcggcagcttgagctccaggcgcgctttgatgcgctcaccggactcgcgaatcgccatcagatggatctccgcatgcaggactgcctgcgcagcgcgttgctgagcaacaggcaatttgccgttattttcctgaacgtcgatcacttcaaacgcgtcaacgatacctggggtcacagcgtcggcgatgagttattgatcaccgtcgcacaacgcatcacttcccggctctcgcgtgaaatgaccctggcaaggctgggaggagacgcttttatcctgctggtgccggaatgtgacgacgacaaactcaacgccctgctcgcgtcgctgctcgaggatgtgcgacgtcctctttcgatctgtggtcatacgcttaacacgacaatgagtgcgggcgtcagcctctatcctcaggatggcgaaacgctgcatgaactgaaactcaaagcagatgcagccctgcatcacgtcaaagacgacggccgcaacggctgggcgcgttacagaaccgagatgtcgacagcaatcccggcaaaacccggttttcttcaggagctctctcaggcgcttgagcgcgatcagtttgaactgtggtaccagccaacctggtatgcgcaagagaagactatccatggttttgaagccctattgcgctggcggcaccctgagcaaggcgttgtgctgcctggtctgtttatcccctcgctggagcaaaccggcttaattattccggtgggcaactgggccattgaagcggcatgtcgacagctgcatttctggactgaacaagggttcagccagtggacgttatcgctcaacttatcccccgtccagttcgagcagccggacattttccacatcgtatcgtcgatgctggaaaaatataacttgtccccgtccaggctgatccttgaggtcacggagagcaccgcgctgaaaaatctcgatcgcagcattgagttgctcaacgcctttaatcatgcggggatcaccgtctcgattgatgattttggtacgggctactccaacctgctgatgctgagcgtgctgccggcaaaagagctcaagatcgacaaaagctttgtaacgtcgatgctggaaaatgaaaaaacctacaagctggttgaaaccattatgagtatcgcccgcaccatggagatgaacgtggtggcagaagggattgaaacggaagaacagcaggcggttctcacccgtctcggctgcgactacctgcagggttacctcttctcccgccccttacctgccgaacaggtgccgtggctgcttctgcagataaactcagaaaggcaaattatcccccttaataaaattcaaacggacgccgcatttatttcacaaaaaaaccatgcctga

SEQ ID NO: 164040 - DNA, 1236 bp, Enterobacter cloacae
atgtcgcaaaacggttttgaagcgctgaacgttattaaaacacccgtgtggcttatttcacccgtttcggaagagatcgtttttgcgaacgtggtcgcaacgcagcttatgggagataagacgctcgatcagctgcgtaaaggcatctattccgcgaatgcacaagctctcctgtcgatgtatgtacctgaactgaaaaccgagcaggagatcgtcgaaatctggacaataagaagccgggatgggctggatacgccgttaagctgtcgtctctcgcttgcccgttacgccccctggggggatgtgattgtcttcgaggggatcgcccaacatatcctctcaggactgaaggccagccgctccgcaacctaccggcgaaaaaaacaggggttttacgcccgtttttttcagaccaacagcgcgccgatgctgttaatcgatcctgcccgcgatggtcagattgttgatgccaacctggctgcgctcaatttttacggttactcgcatgatggtatgtgcagcaagcatacctgggaaatcaataccctggggcgagacgtgatgcccattatgaccgcgattgccgcgctgcccggcggccataagccgctcaactttgttcaccgccttgccgatggttccacccgccatgttcagacgtatgccggacccattgagatctacggtgacaagctgatgctgtgcatcatccacgatatcaccgagcaaaaaagactggagcaagagctggaacatgccgcgttacgtgactccatgaccgggttactcaaccgacgccagttctacgcgattaccgaccccaacaatctgaataatcgacctgcccagcagcagtttagcctgctgctggtggacaccgatcacttcaaaaacatcaacgacctgtttggtcatttgaagggcgatgaggtgcttattgccctctcccgaacgctggaagcctgtagtcgggagaacgacatggtgttccgctgggggggcgaagagttcgtcatcctgctgccgcatacctctctcgacaccgcgttgcagattgccgagtcgatccgtgcagccgttgcccgcattacgattccgggcttaccacggtttaccgtcagcattggcgtcgcgcgacataacccgggggagacgattgatgagctgtttaagcgtgtagacgatgcgctgtatcgcgctaaaaatgatgggcgcaataaagtccttgcagcatga

SEQ ID NO: 164041 - DNA, 564 bp, Enterobacter cloacae
atgagcaagaagatcctgatgctggtgggcgattacgccgaagattacgaaaccatggtgccttttcaggcgttacagatggttggtcatcaggtggatgccgtctgccccgacaaaccgaagggcgactacatcataacggcaatccatgatttcgacggcgcccagacctatagcgaaaaacccggtcaccgctttaccctcaatgccgatttttccgccgtaaaggagcaggactacgacgcgctgctcatccccggcgggagagcgcccgagtatctgcggttaaatgaggatgtgttaaagctggtacaggcgtttgacgccgcgcgcaaaccgattgccgcggtgtgccacggccctcaactgctcgccgccgcgggcatcctgaaaggccgtacctgtagcgcctacccggcctgtgctcctgaggtccgtctcgcggggggacactatgccacgatcggcatcgatcaggcacatgtcgacggcaacctggtgacggctcccgcgtggcccgcccatccgcagtggctggcgaagtttaatgcgttgttagaataa

SEQ ID NO: 164042 - DNA, 1617 bp, Enterobacter cloacae
atgaagcatcctgtttcgcgtctttttgccgcactgtgcctgtgcggactctcttcactctcatacgctgccgatgtgccacagggcacggtgctggcgcaaaaacaggagctggtcagacacattaaagacgaaccggcttcgctcgatcccgcaaaagcggtggggttgccagagattcaggtgattcgcgatcttttcgaagggctggtgaatcagaatgagaaaggggaactgactccgggcgtggcgacgcgctggcagagcaacgataaccgaatctggacgttcaccctgcgcgataacgcaaaatggtctgacggtacgccggttaccgcgcaggattttgtctacagctggcagcgtctggttgatccgaaaacgacctctccgtttgcctggtttgcggcgctggcaggcatcagcaacgcgcaggccattattgatggtaaagcggcgccagataccctgggcgtgacggcggtggatgccagaacgttgcgcgtccagctggataaaccgctaccgtggtttagcaacctgacggcgaacttcgccttctatccggtgcaaaaagccaatgttgaaagcgggaaagagtggacgcgtccgggagcgctggtcggtaacggggcctacgttctgaacgcgcgcgtggtgaatgaaaaactggttgtcgtgccgaacacccactactgggacaatgcgaaaactgtcctgcaaaaagtgacctttattccgattaatcaggaatcgtccgccacgaaacgctatctggcaggggatatcgatattaccgaatcgttcccgaaaaacatgtatcagaagctcctgaaggatattcctggccaggtgtatacgccgcctcagctcgggacctattactacgcgtttaacacgcaaaaggggccgacggccgatgccagggtccgtcttgcgctgagcatgactatcgatcgccgcatcatggcggaaaaggtactgggtaccggcgaaaaaccggcctggcatttcacccctgacgtgacggcgggcttcacgcctgaaccttcgccgtttgagcagatgtcccagcaggagctgaacgctcaggccaaaaccttgctccaggccgcaggctacggcccccagcgtccgctgaagctgaacctgctgtacaacacgtcggaaaaccaccagaaaatcgccattgcggtggcgtccatgtggaagaaaaacctcggtgtggatgtcaagctgcaaaatcaggagtggaaaacctacatcgacagccgcaacaccggcaattttgatgtgatccgcgcgtcatgggtgggggattacaacgagccctcgaccttcctgtccctgctgacctcaacccacagcggcaatatctcgcgtttcaacgacccggcttacgataaaattatccaccaggcgacgctcgaaaccacggcgaaagcgcgtaacacggactacaacatggcggagaaaatcctcatggagaaagcgccgatcgcgcctatttaccagtacaccaacggtcgtctgattaagccgtgggtgaaagggtatccgattaataacccggaagacgtggcgtatagccggacgatgtatattgagaagcactga

SEQ ID NO: 164043 - DNA, 714 bp, Enterobacter cloacae
atggcaaccacccgaccccgcgcggaacgcggcgccttccctccgggcgctgaacaatatggccgctcatttttaggcgcatcgctgatctggttcccggcccccgatgccgatcgcgacagcggtttggttattgccggcacgcacggagatgagaactcgtctgtcgtcacgctctcgtgcgcgctgcggacgctgaccccggcattgcgacgtcaccacgtgattcttgccgtgaatccggacggctgtcagcttggattacgggcgaatgcgcgaggaatcgacctgaaccgtaatttccctgcggcaaactggcgcgcaggggaaacggtatatcgctggaacagctccgccgaggagcgggacgtggtgctgctcacgggcgataaacccggatcggagccggaaacgcaggcgctgtgccagcttatccataagatccaccccgcctgggttgtctccttccacgatccgctggcctgtattgaagatccgcgccactctgacctgggcgcgtggctggcccaggcgttcgccctcccgctcgtcaccagcgtgggctatgagacacccggttcattcggcagctggtgcgccgacttgagcctgccctgcatcaccgctgagttcccggcgatctcctccgacgaagccagcgaaaaatacttaaaggcaatgatggatctgttgcgctggcagcctcagaggtga

SEQ ID NO: 164044 - DNA, 966 bp, Enterobacter cloacae
atgagaagcgttaaggtctatgaagaagcctggccattgcataccccgtttgtgatctctcgcggcagccgaagtgaagccagcgtggtcgtggtcgaaatcgaagaagaggggtttaaaggcgtcggggaatgtacgccttacccgcgttatggggaaagtctgccatccgtgatggcgcagatcatgaccctggtacctgacctgcaaaaaggcctcacgcgcgacgcgttacagcagcgtttatccgccggggcggcgcgcaacgccatcgactgtgcgctctggagccttgaagccgctaagcagcaaaaatcgctgacgtcactgctgggcgtggccgtgccggaatcgatcgtgaccgcgcaaacggtcgtgattggggagcccgagcagatggccgccagtgcgaaagcgctctatgacgccggggccacgctgttaaaagtgaagctcgacgatcgtctgatcagcgagcggatggtcgccattcgctcggcggtgccgtcagccacgctcattgttgacgccaacgagtcgtggcatcccgaagggctggccgcgcgatgccagctgctggccgatctgggcgtggcgatgctggagcagcctctgccggcaaaagaggatgcggcgctgaagaattttatccatccgttgcccgtctgtgcggatgaaagctgtcatacccgtgagaatttgagcgcgcttaagggcagctatgacatggtcaatatcaagctcgacaaggcaggcggactgactgaagccctggctctggcggcggacgcccgggcgcaggggttcgacctgatgttgggatgcatgctttgcacttcccgggcgatcggcgcggcgctgccgctggtcaatcaggttcgtttcgccgatctggatggcccgacgtggctggccgttgacgtttcaccggcgcttaattttaccagcggcgtacttcacctctga

SEQ ID NO: 164045 - DNA, 507 bp, Enterobacter cloacae
atgtcacaactcgttcatttccagggcaacccggttgctgtagcaggttccattccgcaggctggcagcaaagcgcaggcttttactctggtggctaaagatctgtctgacgtcacactggctcagtttgcgggcaaacgcaaagtactgaacattttcccaagcattgataccggcgtttgtgccgcatccgtgcgtaaattcaaccagctggcgactgaaatggacaacaccgtggtgctgtgcatttccgctgacctgccgtttgcccagtcccgattctgcggtgccgaaggcctgagcaacgttatcaccctttccaccctgcgcagcgctgatttcctcgagaactacggcgtcagcatcgcggaaggcccactgaaaggtctggcagcacgtgctgtactggttcttgatgaaaacgacactgtcgttttcagcgaactggttaacgaaatcaccaccgagccggactacactgccgcgctggacgtgctgaaagcataa

SEQ ID NO: 164046 - DNA, 1209 bp, Enterobacter cloacae
atgaagatcaaattcgcttttacgctcctggcggtcctggtttctggccatgccgcggctaaaacctgggtgctgacaagtgctgaaagcagcgtagagaaaggaaactggaacatttccagtgatgagctgaaagttaaagatcagacgttcagcattgagcaaaaagtcttgcacggcggcaagcaggaaggcagtaaagtcatcattattagcagtaaagatggcctgacgattacgctgagcccgacccgcggcatgaaccttctgcacgttgaagggtttggcacccgactgggatggaattcacccgtcaaagaggtcgtcaatcctgcctatatcaatcttgaaagccgcaacggtctcggctggctggatggtttcaacgagatgatggtgcgctgtggctacgagtggacaggtcaccctgtcacggcggacgggcaaatttacaccctgcatggcagggccgggaataccccggtatcacaggtggaagttgaggtggcggatgccgccccgcatgagatccgcgttcggggtttgatcaaagagagcacgttcaaaaaagcggatctgcagaccatgaccgaactgcgctacgttcccggaaccaaccagttcagcctgcatgatgttctcactaaccatgccgattaccctcacgattaccaaatcatctatcacagcaacttcggcacgccgatccttgaagaaggcgcacgtttccttgcgccagcggcgagcgtaagcccattcaatgactacgccaaagcgggcgttaacgactggcaaacctatgccgggccgacaaaaggctttgatgagatggtctttaacattcagccgctcgccgacaacaaccacgacacgctcgcggcggtggtcaataaagccggcgataaaggcgcatccatccagtttgatacgcgccagctgcccgtgctgaccttatggaaaaacaccgatacgctgaagcagggttatgtcacgggcattgaaccgggcaccagctacgcctaccccgtgacgattgaacgccaacagaagcgggttaagcagctggagccgggtgccagcgcgcggtttgatctgacctataccctgctccacagcccgcagcaggtgaaagaggtcgaaagcaggattgcgtcgatacagggcgagacaaaaacagacatcgttaacacgccgctggcgaaggaataa

SEQ ID NO: 164047 - DNA, 1542 bp, Enterobacter cloacae
atgcgtcttgaagtcttctgtgaagaccgtctcggtctgacccgcgaattactcgatcttcttgttttacgtagcattgatttacgtggcattgagatcgatcctgtcgggcgaatttacctcaattttgccgaaattgaatttaataccttcagcagcctgatggcggaaatccgccgtatcgctggcgttacggatgtacgcaccattccctggatgccgtccgagcgtgagcacctggcgctgagcgcgctgctggaagccatgcctgaaccgttcctctctctggatttgaaaagcaaagttgagcgcgttaaccacgcgagctgccagcttttcgcgcagagccaggagaagctcagcaatcatcacgccgcgcagctgatccccggttttaacttccagcgctggctggacagcaatccgcagaacacgcacagcgagcatgtggtgattaacgggcagaatttcctgatggagatcacgccggtctatctgaaaggggaagggaatacccgcgtgttgaccggggcggtgatcatgctgcgctcgacgctacgcatgggtcgtcagctgcaaaacctctccagtcaggatgttggcgcgttcagccagattattgccgtcagcccgaaaatgcgccatgtggttgatcaggcgcgtaagctcgcaagcctgaccgcgccactgctgattaccggcgataccggcaccgggaaagacctgctggctcacgccgtgcatctggcgagcccgcgtgcggctaagccttatctggcacttaactgtgcctctatcccggaagatgccgttgaaagcgagctgtttggtcacgcgccggagggcaagaaagggttcttcgagcaggctaacggcggttccgtactgctggacgagatcggcgaaatgtcgccgcgtatgcaggctaagctgctgcgtttcctgaacgacggcacgttccgccgcgtcggtgaggatcacgaagtgcatgtggacgtgcgcgtcatttgcgccacccagaagaacctggtggaactggtgcaaaaggggatcttccgcgaagatctctattaccgccttaacgtcctgacgctgaatattccgccgctgcgcgattgtccgcaggacatcatgccgcttacggagctgttcgtcgcccgctttgccgatgagcagggggttcctcgtccgaagctgtctgccgatctgggcacggtgcttatgcgctacggctggccggggaacattcgtcagctcaaaaacgccgtatatcgcgcgctgacccagcttgaagggtatgagctgcgcccgcaggatatcctgttgccggattacgacgccggaacggtatcggtaggggaagaggcgatggaagggtcgcttgatgacatcaccagccgtttcgagcgttctgtgctgacgcagctgtaccgcagctatcccagcacccgcaaactggcaaaacgcctgggcgtctcgcacaccgcgatcgccaataagctacgtgagtatggtttgaatcataagaaaggtgacgaataa

SEQ ID NO: 164048 - DNA, 1053 bp, Enterobacter cloacae
atgacggaaccgttaaaaccgcgcattgactttaccggaacgcttgagcagaaccctcaggaggcgttcaaaacggcgcagacgttcagcggtacccaggccgataactttgccccggcgctgcaggacgagccggttgttgaggatggtccggcggaggcggtcgtggacgccgcgctgcgtccaaaacgcagcctgtggcgcaggatggtcaccgccggtctggcgctgtttggcgtaagcgtggtgggtcagggcgtgcagtggacgatgaatgcctggaacacgcaggactgggtggcgctgggcggatgtgccgcaggcgcgctgatagtgggggctggcgtcgggtcggttgccaccgaatggcgtcgactctggcgtctgcgacagcgcgcgcacgagcgtgatgaagcgcgggatctgctccacagtcacggcaccgggaaagggcgcgcgttctgtgaaaagctggccagccaggccggaatcgatcagtcgcatccggcgcttcagcgctggtatgccgccatccatgagacccagaatgaccgggaagtggtgacgctctattcccacatggtacagccggtgctggatgctcaggcgcggcgcgagatcagccgttctgcggcggaatccacattgatgattgccgtcagcccgctggcgctggtcgatatggcttttatcgcctggcgtaacctgcgcctgatcaaccgtattgcgaacctttacggcatagagctgggttactacagtcggatcagactgtttaagctggtcctgctcaatatcgcgtttgccggggcgagtgagctggtgcgcgaagtgggcatggactggatgtcgcaggatctggcggcgcgtctttctgcccgtgcggctcagggcatcggtgcgggattattaaccgcacgcctggggattaaagcgatggaagtctgccgtccgctgccctggattgacggcgataagccccggctgggggatttcaggcgtgaactgatcggccagctcaaagagacgctcaataaaaaaccttcgccgtga

SEQ ID NO: 164049 - DNA, 1398 bp, Enterobacter cloacae
atgaagcgacttaaaaacgaaatcaattcactggtaaaccgcggcgttgaccgtcatctgcgactggcggtgacggggttgagccgaagcggtaagacggcgtttatcaccgcgatggtgaaccagctcctgaacctgcacgccggggcgcgtctgccgttgcttggcgcggtgcgggaagagcgtctgctgggcgttaagcgcgttccacagcgtgattttggcattccccgttttacctatgacgaagggctgacacagctgtatggcgacccgcccgcgtggccgacgccgacgcgaggggtcagtgaaattcgtcttgcgctgcgtttccgctcgaatgaatccctgatgcgccatttcaaggatacctccacgctataccttgaaatcgtcgattaccccggcgaatggctgctcgacctgccgatgctggcgcaggattacctcagctggtcacgccagatgacgggattgctgcaggggcaacgcgccgggtggtcggccaaatggcgacagctgtgcgaagggctggacccgcttgccccagcagatgaaaaccgtctggcggccattgccgacgcctggacggcgtatttacaccagtgtaaacaggaagggttacacttcattcagccggggcgctttgttctgccgggtgatttagcgggcgcgcctgcgcttcagtttttcccctggccggatgtggacggggttggcgagtcgacgctggcgcaggcggataagcatactaacgccggtatgctgcgcgagcgttaccattactactgtgagaaggtggtcaagggattctataagaaccactttttacgatttgaccgccagattgtgctggtggattgtctgcagccgctcaacagcgggccacaggcattcaacgacatgcgccttgccctgacgcagctgatgcaaagttttcactacgggcagcgtacgctgttccgccgtcttttctcaccggtgatcgacaaactgctctttgcggccacaaaagccgatcacgtcaccgtcgaccagcatgccaatatggtgtcgctgctacagcagctggtacaggacgcctggcaaaacgccgccttcgaagggatcggcatggattgccttgggctcgcgtccgtgcaggcgacgcaaagcgggcaaattgaccttaacggcgagaaaataccggcattacgcggcaaccggctcagcgacggtgaaccgcttactgtctacccaggcgaagtgcctgcgcggctgccgggccaggccttctggcagaaacagggctttcagtttgaagccttccgcccgcaggccatgagcgtcgacaggcctttaccgcacatccgtctggatgcggcgctggagtttttgattggagataaattgcgatga

SEQ ID NO: 164050 - DNA, 1011 bp, Enterobacter cloacae
atgtcacccaccatttatgatatcgcacgggttgcgggcgtatcgaaatcaaccgtttcccgcgttctgaataaacaaacgaatatttctcctgaagcgcgtgacaaagtgctgaaggcgattgacgaattaaattatcagcccaacaaactggcccgtgccctgacctcttcaggattcgatgccattatggttatttcgacccgttcaaccaaaaccactgccggcaatccttttttctccgatgttcttcatgccattacggcaaaagcggaagaagaaggattcgatgttattttacaaacctcaaaaagcagtgaagacgatctcctgaaatgcgtgagtaaaataaaacagaagatgatcaaagggatcatcatgctgagttcacccgcaaatgaatcctttttcaccacgctggacgcgtatggcgtaccggtagtggttatcggcaaagtggaaggtgagtatcagaatatttattccgtcgacacggataattttcatgacagcgccacgctgacggaaacctttatcaaaaacggccgccggaaaattgcctgcctgcatgcgccgcttgaatatcatgtttcgatcgatcgcctggcgggttataaagccagcctggaaaagcaccatattgcgattaacccggactggatcatggatggtggttatacccatgagagtgcgcttaaggcggctctggaactgctctcttcacccacgccgcctgatgccgtatttgctaccgacagcatgaagttactcggcctttatcgcgcggcggatgagttaaatctgatgataccggaacaggtggtgatagccggatacagtgacccgatgctgtctctcattttaacgcccgcacctggcggctttgatatcccgacccgcaaactgggggaagagagctgcgatcttctcttcaggcgtatcgcgggtcatcccgccccgcaaaaagtgcttgttgatacgcattttttactggcggcctcgctgcgctaa

SEQ ID NO: 164051 - DNA, 1083 bp, Enterobacter cloacae
atggcacaactgtcactgaaacatattcagaaaatttacgataaccaggtccacgtggtgaaggattttaacctcgaaatcgaggacaaggagtttatcgtttttgtcggcccgtctggctgcggtaaatcgacgacgctgcgcatgattgccgggctggaggagatttccgccggtgaactggtgatcgacggcgtttgtatgaacgatgtgcccgccaagtcacgcgacatcgccatggtgttccagaactatgcgctttatccgcatatgacggtctacgacaacatggcgtttggcctgaagatgcagaaaatcgctccggcggttatcgaagagcgcgtcaactgggccgcacaaatcctcggcttacgggagtacctcaagcgtaaacccggcgcgctgtccggtggtcagcgtcagcgcgtggcgttgggcagggcgatcgttcgggaagcgggcgtgttcctgatggatgaaccgctctccaacctcgatgccaagcttcgcgtgcagatgcgggctgaaatcagcaagctccaccagaagctcaataccacgatgatttacgtgacccacgatcagacggaagccatgacgatggcgacccgcattgtgatcttaaaagacggcattattcagcaggtcggtgcaccgaagcaggtatacaacgagccggcaaacatgtttgtcgcggggttcattggctcgccagccatgaactttgttcgtggtgccatcgacgaccgctatttcgtcacggaaacgctgcgcctggcgatcccggaagacaagctcgctgcactgcaagccgctggatatcagcgtaaagctgtggtctttgggatccgcccggaagatattctcacccagcagagtagcggtgaaaatatcgcggcgaaagtcagcgtagccgaactgaccggtgcggagttcatgctctacgccaccgttggcggccatgagctggtggttcgcgcgggagccgcgaatgattatgccgcaggggataatatcggtatccagttcgatatgaataagtgccatttcttcgacgccgataccgaagcggctattagataa

SEQ ID NO: 164052 - DNA, 666 bp, Enterobacter cloacae
atgaagcctgaagctgttgtattcgatcttgatggggtcatcaccgatacggcgcatctccattttctcgcctggcgttcggtcgcacaggagatcggcatcactatcgatgaggtgttcaacgaggagctgaagggaattagccgcatggaatccctgcagcggatcctgcgacacggtgggaaagagggggcgtttgacgacaaacaatgcctggcgctggcggggaagaaaaatgcgctctacgtcgcatcgctgtcgtcgttgaccgaggcgtcgctgctgccgggcatccgggaggtgctggcggacattcgggcggcagaggtgaaaattgggctcgcctccgtttccctcaacgctcctggaatactgcatgccctgggtattcatcgcgcctttgatttttgcgccgatgcttcccgtatcgtctgttcaaaaccggacccggagatcttcctcgccgcgtgtgcaggcctggacgtccgccccgaggcggccattggggtcgaagatgcgcccgcgggcgtggcggcgatcaacgcggcgggcatgctgtcggtcgggattggctcaggcctggcccatgcgggactacagcttcattcgacgcaggaactgacctggaaatgcctgaccgatttctgggcctcccgggcgtattga

SEQ ID NO: 164053 - DNA, 1056 bp, Enterobacter cloacae
atgagtgcttcaacaacgtcgccactgcgcgtcgccatcattggcgccgggcaggttgcggacaaagtgcatgcctcgtattacgccacgcgcagtgatgttcagatggtggctgtcatggacagccgcctcgaacaggcacaggcttttgcggagcgtcatgccataccgtcggcgtggcaggacgcgtgcgccatgctggaggcggttaagccggacgtggtgagcgtttgttcgccaaaccgatttcattttgagcatgtgatggcggcgctggaggctggctgtcatgtgatgtgcgaaaaaccgcccgccatgacgccgcaagaggccgatgagatgcggatggccgcacgcaaggcggggaaggtgctggcatatgattttcatcaccgcttcgcgctcgacacgcagctgctgcgcgaggccgtgatgaacggaacgctgggcgaaatctacttcacctcggcgcaggcgctgcggcgctgcggcgtgccgggctggggcgtcttcaccaataaagcgctgcagggcggtgggccgctgattgacatcggtattcacatgctggatgccgcgatgtacgtgctgggtttcccggcggtcaaaagggtcacggcgcacggtttccagaggctgggaacccggaaaagcagcggccagtttggcgagtgggatcctgctcagtttacggtggaagatgccctgtttggcaccatcgaattctgcaacggcggcattttgcgtctggacacctcgtttgcgctgaatatccgcgagcagtcgatcatgaatgtcgcgttttgcggtgaaaaggcgggggcgacgcttttcccggcacatatttatcaggatgacgccggggcgttacagaccctgattcagcgtgaagaggctgacgatcagcgccatttacgcagcatggaggcctttgtccgccacgtgcagggagagcccgtaatgattgcagatgctgaacaggggctggtgattcagcagcttgtcgcggcgctttatcagtcggcagaaacaggagaaagcgtaacattatgctga

SEQ ID NO: 164054 - DNA, 789 bp, Enterobacter cloacae
atgaaaatcgcaacacaaaatcaggcctttttcccgtccaacatcctggaaaaattcgagtacatcaaggcgatgggttttgatggctatgagattgacggcaagctgctggtggaaaatctcgccgaggtgaaagcggcgattaaggccaccggcctgccggtcacgaccgcctgcggcggatacgatggctggattggtgactttatcgaagagcgtcgtctgaacggtttagcgcagattgaacgcattctggaagccctggccgaagtgggcggcaagggcattatcgtgcctgcagcctggggaatgtttaccttccgtttgccgccgatgacctctccacgcagcctggaaggcgaccgcaaagcggtgagtgcgtcgctgcgctggctggatgaggtggccgcgcgcaccggaaccaccgtctacctggagccgctaaaccgctatcaggatcatatgatcaacaccctggctgacgcacgacgctatatcgaagagaacgccctcaagcacgtgcagatcatcggcgatttctatcatatgaacattgaagaagattcgctgacggaggcgctgcatcagcaccgcgatctgctgggccatgtgcacatcgccgataatcaccgttaccagccgggaagcggtagcctcgattttgccagcctgttcaatcagctgcgtgcggataattaccagggctatgtggtttacgagtgccgcgtacgtgctgaagatcccgctcaggcttaccgggattctctcacttatttacgcgaatgctaa

SEQ ID NO: 164055 - DNA, 1053 bp, Enterobacter cloacae
atgaaaaaattagttgcgacagcgccacgcgtggcggcgctggtggaatatgaagatcgtgctgtggaagctcatgaagtgaaaattcgtgcccgctttggtgccccgaagcacggcactgaagtggtcgatttccgcgccgcaagcccgtttatcgatgaagagtttaacgctgagtggcagatgttcacgccgcgtgaagagggcgcagcgcgcggtatcgagttcggtaagttccagctgggcaacatgattgttggcgacatcatcgaatgcggtgcggacgtcacggaataccagactggcgatcgcgtttgctgctacggtccgctgcaggagacggttatcgtgaatgccgtcaacaactacaagctgcgcaaaatgccgcagggcgcctcgtggaagaacgccgtctgctacgatccggcacagtttgccatgagcggcgtgcgtgatgccaacgtccgcgtgggcgactttgttgtcgtggtcggcctgggtgccatcggacagattgcgattcagctggcgaaaaaagctggcgcgtcagttgttatcggcgttgatccgatcgaacaccgctgcgagatcgcccgtcgtcacggtgcggaccactgcctgaacccaatcggcacagacgttggtctggaaattaaaaagctgaccgggaagcagggcgcggacgtgatcatcgagaccagcggctttgccgatgcgctgcagtccgcgctgcgcggcctcgcctacggcggcaccatctcctacgttgcgttcgctaaaccgttctcagcaggctttaacctggggcgtgaagcgcatttcaacaacgcgaagattgtcttctcccgcgcctgcagtgagccaaacccggattacccgcgctggagccgcaagcgtattgaagagacctgctgggaactgctgatgaacggttatctgaattgtgaagatctgatcgacccggtcgtgaccttcaccaccagcgctgaaagctacatgaaatatgtggatcagcatccggaactgagcatcaaaatgggcgtcactttttaa

SEQ ID NO: 164056 - DNA, 882 bp, Enterobacter cloacae
atgaagacgttgttttctggtcgttcagatatgcctttcgccatgctgctgttggcccccagcctgattctgctggggggcctggtggcctggccaatgatttccaatattgaaatcagttttttacgcttgccgctcaatccgcgcattagcgccgtgtttgtcggactggacaattacattcgcatcctcggcgatgccgctttctggcactcgctgtggatgaccttctggtacaccgcgctggtggtgattggcagcacggtgctggggctggccgtcgccatcttctttaatcgtgagtttcgcctgcgtaagacggcacgttcactggtgattttatcctacgtcacgccgtctatttcgctggtgtttgcctggaaatacatgttcaacaacggctacggcattgtgaactatctgggcgtagacctgttgcacctgtatgaccaggcgccgctgtggttcgacaacccgaacagcagcttcgtactggtggtgctgttcgcgatctggcgttacttcccgtacgcgtttatctcattcctggcgattttacagaccattgataaatccctgtatgaagcggcggaaatggacggcgcgaatgcctggcagcgttttcggatcgtcacgctgcccgcgattatgccggtgctggccacggtggtcacgcttcgcaccatctggatgttctacatgtttgctgacgtctacctgctgaccacgaaggtcgatattctgggcgtctatctttacaaaaccgctttcgctttcaacgacttgggtaaagcagcggccatctccgtggtgctgttcgtgatcatcttcgctgtgattctgctgaccagaaaaagggtgaacctcaatggcaacaaataa

SEQ ID NO: 164057 - DNA, 1293 bp, Enterobacter cloacae
atgaaaatacccagaattgtgctgatatcagcactggtttcgtgcgccctgttatcaggctgtaaggatgacaaagcgtcctctgtcaccattgagtttatgcactcgtcggtagagcaggagcgtcaggccgttattacgaaactgatcgaaaaattcgagaaagagaacccgggcatcacgataaaacaggtaccggtagaagaggatgcctacaacaccaaggtgattacgctggcgcgaaccggcgcgctgcctgaagtgattgaggtcagccatgactatgcaaaagtgatggataaagaacagcttctggatcgtgacgcaatcgctgaagcaattaaggcggtgggggaaaacaccttctatgacggcattttgcgcgttgtccgcacggaagatggcgcagcctggacgggcgtgccgatcagcgcctggctctccggcgtgtggtaccacaaagatgtgctggccgcggcgggcattgaggagccgcataactgggaacagcttctgcaagccagccagcgcctgaacgacccggctaaaaaacattacggcatcgcgttaccgactgcggaaagcgtgatgacagaacagtcgttctctcagtttgccctttccggtggcgcgaacgtgtttgatgcaaaagggaatgtcgacatcgataccccggaaatggccaaagcgctggcgttttataaagcgctggctgcgaacaccatgccgggttcgaacgatgttatggagatcaaagacgccttcatgaacggttctgcgccgatggcggtttactccacctacatcctgcccgccgtctacaaggacggaaaccctgccaacctgggcttcgttgtcccgactgaaaactcatcggcggtgtacggcatgatcacctcgctgacgatcaccaccggacaaaccgaagaggagaccaaagcggccgagaagtttgttacctggatggaacgggctcaaaacgcgacggactgggtcatgatgtcgccgggcgcggcgctgccggtaaacaaaggggtggtgggcacggatacctggaaaaacaacgacgtgattaaagcgtttgggcagttgccttatgagctgattgcacagttcccgaacgtgcaggtgtttggcgcggttggggataaaaacttcacccgcatgggcgacgtgacgggctccggcattatcagctccatggtgcataacgtcacggtggggcagaaggaccttaacacaacgttaagcagcagccagaagcgactgactgatctcattacacaacgatag

SEQ ID NO: 164058 - DNA, 1698 bp, Enterobacter cloacae
atggaaaatcaagtgaacgaaaaaattaaagaactcattaatcttgtttatggaaaaacgttttctgaagcacatcttcatatgctgctggaaaatattgaaaaggccgcctcttttattactgaaaggcgtaaaatgggctgggatgaaaaagatatcgttctgataacctatgccgatcagttttccgagaaaggggagaaagcactccctgtttttacacgtttttataacaaatggctttcgcattctttttctcatgtccatcttttgcctttttatccgtggtcttcggacgatggcttttctgttattgattatcatgaagttgcgcctgaaacgggaacatggcaagacgttgctgaattaaaacagtcaaccagtttgatgtttgatttcgtctgcaatcatatgtcggccaaaagtgcctggtttgctaattatctgaagcaaatgccgggatatgatgatttcttcatttctgtcgatcctgagacagatttatccgcggtgacgcgtccgcgcgccttaccgcttctcacgcctttcacacttcatgatggcagcgtgcgacatctgtggaccaccttcagtgaggaccagatcgatctcaacttcgcctctccgcaggtactgattgcgatggtcgacgtgctgctgcattaccttattgaaggggcgcggtatattcgactggatgccgtagggttcatgtggaaaataccgggaacgcgctgcattcaccttgagcaaacccaccagctcatccagcttttccgcgccattaccgaggcggttgcccccggcacggtgattatcaccgagaccaacgttccgcataaagataacgtctcttacttcggtaacggcgaaaatgaagcgcagatggtttatcagttctcgttgcctccgctggtgctgcatgcggtgcacagccaggatgtcagcacgctgagccagtgggctgcgtcgctggcgttgccttccaccaaaaccacctggttcaacttcctggcctcgcatgacggcattggtcttaacccattgcgcggaattttaccggagtcggagatcctttcgcttgtagaaaagctccagaccgaaggtgcgttggttaactggaaaaataacccggatggcacacgaagcccgtatgaaattaacgtgacctatctggatgccttaagtacgcgagaaagtcatgatagcgaacgcattgcccggtttattctggcccatgctgtcctgttaagcttccccggcgtgcctgcggtttatattcaaagtattctcggctcccgtaatgattatgatggcgtagagcgtcttggatataaccgtgcgataaatcgtgaaaaatatgccgcgggtcaaattgattgcgcgcttgaagataaaaatagtctccgttatcaggtttacagtgcgttaagtcagttaatcgtattgcgccgggcggaaaaagcattccatcctgacagtgaggcttatttcagtgcgtcagggaagcatgttttaaaaattgtccgcgtggcggattgtggtgagaaaataacagcgttgtttaatttcagtgataattctcaaacggttgagtccgatattcactcgggaagggaattgattagcggaaaagatattaccgacacgactctgatcctaaatccatggcaggtattgtggattaaagaaaactaa

SEQ ID NO: 164059 - DNA, 225 bp, Enterobacter cloacae
atgaaacaacactggcaacaggccggtcagaaggtaaaacccggcctgaaaatcgcaggtaagctggtcctgatgaccgcgttacgttacggtccggctggggtagcggggtgggcgattaaatcggttgcccgcaagccggtcagaatggtactggccgtggcgctcgaaccgctgttgcaaaaggtggcgaaacggctgtcacgccgctacttatcccagtag

SEQ ID NO: 164060 - DNA, 360 bp, Enterobacter cloacae
atgtctggactgaatctgaacaaaaagctgtggcgaattccacagcagggcatggtgcgcggcgtctgcgccgggctggctcactatcttgacgtcccggttaagctggtacgcgtggtgacggtgctgtcgatcttcttcggtctggcatttattaccctggttgcgtacatcgtgttgtcgtttgtgcttgacccgatgccggaaggagaactggcggcggaaggcgctcccaccagcagcgatctcctcaatgctgtggatgcgcaactcgccgccggtgagaagcggttacgggaaatggaacgttatgtcacatccgatacctttacgctgagaagtcgtttccgtcagctttaa

SEQ ID NO: 164061 - DNA, 225 bp, Enterobacter cloacae
atgagcgcgctttttctggctattcccctgacgattttcgtgctgttcgttttgccgatttggttatggcttcactacagcaaccgttcctcacggggcgaactttcccagagtgaacaacagcgtctgatacagctctccgatgaggcgaacaaaatgcgtgaacgcattcaggcgctggaagccatcctggatgctgaacatccaaactggagggaccgttaa

SEQ ID NO: 164062 - DNA, 669 bp, Enterobacter cloacae
atgggtattttttctcgttttgccgacatcgtgaacgccaacatcaactcactgctggagaaagcggaagatccgcagaagctggtgcgtctgatgattcaggagatggaagacacgctggttgaagtccgctctacctccgcccgcgcgctggctgagaaaaaacagcttacgcgtcgtattgaacaggccaccgctcagatgaatgaatggcaggaaaaagcagaactcgcgctgcgcaaagacaaagaggatctggcccgtgcggcgctgatcgaaaaacagaagctggcagagttggttgcgacgctcgagcatgaagtgaccctggtggatgacacgctcacccgcatgaagaaagagattggcgagctggaaaacaagctgagcgaaacccgcgcgcgccagcaggcgctgaccctgcgtcaccaggcggcgagctcttcccgcgacgtgcgtcgccagcttgacagcggtaagctggatgaagcgatggcccgttttgagtcgtttgagcgtcgtatcgaccagatggaagcggaagccgaaagtcacggcatcggtaagcagaagtcgctggatcagcagtttgctgacctcaaggccgatgatgaaatcagcgagcagctggcggcactgaaagccaaaatgaagcaagataacaaataa

SEQ ID NO: 164063 - DNA, 975 bp, Enterobacter cloacae
atgcccggatacaaagacaatttactcggcgaagcaaacagttttcttgaggtgctggaacaggtttctcgcctggcgccgctcaataaaccggtgctgattatcggcgagcgcggtacgggtaaggaactcatcgccaaccgtctgcactacttatccgggcgctgggacggccccttcatttcccttaactgcgcggcgctgaatgaaaacctgctcgacaccgagctcttcggccatgaagcgggcgcgtttaccggcgcccagaaacgccatcccggacgctttgagcgcgccgacggcggtacgctgtttcttgatgagctggccaccgcgcccatgctggtgcaggagaaactgctgcgcgtgattgaatacggcgagctggagcgcgtcggcggtagccagccgctccaggtgaacgtgcgcctggtgtgcgccacgaatgccaacctgccggagagggtggcagaggataaattccgtgccgacctgctcgaccgcctggcctttgacgtcgtgcagcttcctccgctgcgcgagcgaagaagcgacattatgctgctggcagaccagtttgcgattcagatgtgccgcgagctcggactgccgctgttccccggcttcagcgattatgctcgggagacgctgctcgcgtaccactggccgggcaatatccgcgagctgaaaaacgtcgtggagcgttccgtctatcgccacggcagcagcgagacagagctggacaacatcattatcgatccttttcagcgcagcgccccgccgtccgcaccaacgtctccaggcgacgcccctgctcttccccttgatctgcgccagttccagcacgaccaggagaaacagctgctggagcaaagcctgaagatggcgaaatacaaccagaaacgggcggctgaactgctgggtttgacctaccatcagttaagggcattgctcaaaaagcatcaaatgcgatga

SEQ ID NO: 164064 - DNA, 276 bp, Enterobacter cloacae
atggctattttagattttttgatttctctcgcattctgcttaggcggtattttctacatctggcatacaagtaaagctctgaggacaggagtttttattggctggctcaacggaacctatgagaagtattatgtttattgctctaaacacccctggaaattctattttaaccttttaaccatggcgagcggtggttcgttacttttagctgtcggcatcatttctcttgatcaaaaaaactttattttcaagacactaagctcactattccagtga

SEQ ID NO: 164065 - DNA, 192 bp, Enterobacter cloacae
atgcgcttgcttctgggcactcttattattcattatgtagctatctcaggacactcttttgaattagtgaattgcctcatggcttattattttaccgccgtgagcattgacttttttgaccacacgaatagagtctgtgtagaaaaaagacgaagcgtcatcccactggcagaattcaatttcacgctttaa

SEQ ID NO: 164066 - DNA, 1641 bp, Enterobacter cloacae
atgcgtctggttttatcgtccttttttgcacttggtctgtttagcagccaggcctttgccgcgcccgggcaaacgccgcagcctgacattcgtgacagcggcttcgtctattgcgtaagcggccaggtggataccttcaacccgcaaaaagcgggcagcggcctgattgtggatacccttgccgcgcagctttacgatcgtctgcttgatgtagacccgtacacttaccgtctcgtgcccgagcttgcggaaagctgggaagtgctggataacggcgcaacctaccgttttcacctgcgcgatgatgttgcgtttcagcgcacgccgtggtttaccccctcgcgcaagctgaatgcggatgacgtggtcttcaccttccagcgtatcttcaaccgcaatcacccgtggcataacgttaacggcagcaatttcccctatttcgacagcctgcagtttgccgacaccgtgaaaagcgtgcgcaagctggacaaccgcacggttgaattcacgctgacgcgcccggatgcctcattcctgtggcatctggcaacccactatgcgtccgtcatgtcggccgaatacgcggcgaagctgacgaaaaaagatcgtcaggaactgcttgatcgtcagccggtcggcaccggtccgttccagctggccgaataccgcgccgggcaatatattcgtctgcagcgccacgagcatttctggcggggtacgccgctgatgccgcaggtggtggtcgatctcggctctggcgggacgggacgtctgtcaaaactgctcaccggggaatgtgatgtgcttgcctggcctgccgccagccagctcacgattttgcgcgacgatccgcgcctgcgtctgacgctacgcccggggatgaacatcgcgtatctggcctttaacaccgataagccgccgttgaataaccctgccgttcgtcacgcccttgcgctggccatcaacaaccagcgcctgatgcagtcgatttattacggtacggcggaaaccgccgcctcaattttaccgcgcgcctcgtgggcctacgacggtgaggctaaaattacggaatacaatccggcaaaagcacgtgaacagctgaaagcgctgggcgcagaaaacctcacgctgcagctttgggtgccgaccagctcccaggcgtggaacccgagcccgctcaagaccgccgaactgctgcaggcggatatggcgcaggtgggcgtaaaagtgatcatcgtaccggtagagggccgtttccaggaggcgcgcctgatggacatgaatcatgatttaaccctcaccggctgggccaccgacagcaacgacccggacagcttcttccggccgctgctgagctgtgcggcgataaactcgcagaccaactacgcccactggtgtaaccgggagtttgacgccgtgctgcaaaaagcgctggcttcccaacagctggcctcgcgcatcgacgcctatgatgaagcgcagaagatcttagcccaggaactcccggtgctgccgctggcctcttccctgcgccttcaggcgtatcgctatgatattaaaggcctggtgctgagcccgtttggcaacgcctcgttcgccggcgtgtcgcgtgaaaaagaacaagaggtgaaaaaaccatga

SEQ ID NO: 164067 - DNA, 966 bp, Enterobacter cloacae
atgattatttttaccttgcgccggctcctgttgctgctggtgacgctctttctcctgaactttgtcggctttagcctgagctatttcacgccccacgccccgctccagggatcgtcgctgtgggatgcctggctcttctggtttaacgggctgctgcactgggatttcggcgtgtccagcattaacgggcagctgatttccgagcagttgaaagaggttttcccggccacgatggagctgtgcattctggccttcgggtttgccctgatggtcgggatccccgtgggcatgctggccgggatatatcgcaacaaatggcaggataagtttattagcgccctcgccctgctcggcttctccattccggtcttctggctggcgctgctgctgacgcttttcttctcgctgacgatgggctggctcccggtttctggccgttttgacctgctctatacggttaaatcggtgacgggctttgccattatcgacgcgtggctgtccgattccgtgtggcggcatgagatgatcgtcagtgccctgcgccatatggtgctgccggtgctgacgctggcggttgcgccaacaaccgaagtgatccgcctgatgcgcctgagcaccatcgaggtctttgaccagaactatgtcaaagccgccgccacgcgcggactgtcgcgcctgaccatcctgcgccgcaacgtcctgcacaacgccctgccgccggttattccgcgtctgggattacagttttccaccatgctgacgctggccatgatcaccgagatggtctttagctggccgggcctcggacggtggttgattaacgctatccgccagcaggactatgccgcgatttccgcaggggtgatggtgattggttcgctggtgattattgttaacgtgttgtccgatattctgggtgccatggctaacccgttgaagcataaggaatggtatgccctacgataa

SEQ ID NO: 164068 - DNA, 891 bp, Enterobacter cloacae
atgccctacgataacgtatacagtgaaaagcgcacgcccggtgtgctgcgtaccgtgtggcgtaaattctatggtgataccacggcgatgatcggcctttatggctgcgccggtctggtgttgctgtgcgtctttggctcctggtttgcgccgtacggcattgaccagcagttccttggctatcagctgctgccgccgtcctggtcccgctacggggaagtctccttcttcctgggaacggacgacctcggacgtgacgtgttgagccgcctgctgagcggtgcggccccgacggtgggcggcgcgtttgtggtgacgctcgcggccacgatctgcgggctggcgctgggtatttttgcgggatccacgcatggcctgcgctcggcggtgcttaaccacattctggatacgctgctgtcgattccgtctctgctgctggcgatcgttgtggttgcctttgccggtccgcacctgtcgcatgccatgttcgccgtctggctggctatcctgccccgcatcgtacgctcggtttacagcatggtgcatgacgagctggaaaaagagtatgtcgtcgctgcgcgcctggacggcgcgaccaccttcaacatcctgtggtttgccgtgctgcctaacatcgcgtccgggctggtcaccgagatcacccgcgccctgtcgatggcgattctggacatcgcggcgctcggcttcctcgacctcggcgcgcagctgccgtcgcctgaatggggcgcgatgctcggtgacgcgctggagttaatttacgtggcgccgtggacggttatgctgccgggtgcggccatcatggtgagcgtgctgctgatcaacctgctgggcgacggtattcgccgtgcaattaacgcgggggtgcaataa

SEQ ID NO: 164069 - DNA, 993 bp, Enterobacter cloacae
atgccgcttcttgatattcgcaacctcaccattgaattcaaaaccggtgaaggctgggttaaagccgtcgatcgcatcagcatcaccctcgcggagggtgaaattcgcgggctggtgggggaatccggctcaggcaaaagcctgatcgccaaagccatctgcggcgtggcgaaagataactggcgcgtcaccgcagaccgtatgcggtttgatgatatcgacctgctgcgcctctctccccgcgagcggcgtaagctggtcgggcacaacgtctccatgattttccaggagccgcagtcctgtctcgacccgtccgagcgcgtgggcaaacagctgatgcaaaacatccccggctggacctataaaggccgctggtggcaacgcgtgggctggcgcaagcgtcgcgccattgagcttttacaccgcgtcgggatcaaagatcacaaagatgcgatgcgcagcttcccgtacgagctgaccgacggtgaatgtcagaaagtgatgattgccatcgcgctggccaatcagccgcgactgctgattgcggatgaaccgacgaacgcgatggaacccaccacgcaggcgcaaatcttccgcctgctgtcgcgtcttaaccagaacaacaacaccaccattttgctgatcagccatgacctgcaaatgctcagcaaatgggcggataagattgacgtgatgtactgcggacaaacggtcgaaaccgcgccgagtgaagacctgatcaccgcgccgcaccacccgtatacgcaggcgctaatccgcgctattcccgattttggcagcgccatgccgcataagagccgcctgaataccctgcccggagcgattccactgctggaatcgttgccgataggctgtcgtctggggccgcgttgcccgtatgcgcagcgtaaatgtatcgagacgccacgcctgaccggggccaaaaatcatctttacgcctgtcatttcccgctgaacatggagagagagtga

SEQ ID NO: 164070 - DNA, 807 bp, Enterobacter cloacae
atggtcgaaaccttgctggaagtccgcaacctgagtaagacctttcgctaccgcacggggctgtttcatcgtcaaactgtcgacgcggtaaaaccgctcagctttaccctgcgtgaaaaacagaccctggcaatcatcggcgagaacggttccgggaaatccaccctggcgaaaatgctcgccggcatggttgaacctacggctggggaagtattgattgacgatcaccctctcacgttcggggattactctttccgcagccagcgcatccgcatgatcttccaggatccgtcgacctcgctcaacccgcgccagcgcatttcgcagatcctcgattttccgctgcgtctgaacaccgacctggagcccgaggcgcgccgcaagcgtatcttcgaaaccctgcgcatggttggcctattaccggatcacgaaagctactacccgcacatgctggcccccggccagaaacagcgtctgggtctggcgcgtgcgttgattttgcgcccgaaagtgattattgctgacgaagcgcttgcctcgctggatatgtcgatgcgttcgcagctgattaacctgatgctggagctgcaggaaaaacagggcatctcgtatatctacgtcacccagcatctggggatgatgaagcacatcagcgatcaggtgatggttatgcaccagggtgaagtggttgaacgcggcagcacggcggatgtgatggcctccccgcttcacgagctgacaaaacggctgatagccggtcatttcggtgaagcactgacggccgatgcgtggcgcaaagatcggtaa

SEQ ID NO: 164071 - DNA, 942 bp, Enterobacter cloacae
atgaacaacgccacttacgttctcaaatataccgagtacctcatcagaaaatgtcgttcatttttaatgacggacctgtactttcatactgtgaggctcaagaaaacatcggggaagcaccctgacattaaatcccccacgacgttgagtgaaaaaatatgtcatcgtctggtttatgaccacaataacgtctataccctgcttgccgataaactcgccgttcgggaatacgtaatctccagaacaacgcgtgcgaaaacggtgccattacttggcgtgtacagcaaggtgtcccagattgatttttcgacgctccctgaaaaatttgtccttaagtgcaatcatgacagtggcagcacaataatatgtacgaacaaagcgcaatttaacgccagggaggcgtgtaaaaaactcagtctcgcgttaaagaaaaatatgtactacaccacgcgcgaatggcagtacaaaaacattacgccaaaaatactttgcgaaccgtatgtcgatctcttcgatgatgcagacaggaacacagcgcccgaaatgctaaggatccattgctttcatggcgttgcccactatgttgaagcggattttacggatgacagcggcaaaggtttcatcaacgtttacgacaggtactggaacttacaaccctttcagatggaatatccgaatacaccgttggcgccaggcgaaccggccttgttccgacaagcgttgctggcatcccaggagctggcggatggcattgactactgccgcgttgacctcatgctaaaaaaagatgaaatctatttcagtgaaataaccttaagcccgagacgcggtaaactgtcgattaccccgcaggaatgggatgctaagctaggaaaaatatggcatttaccgccggcagacacatttgacctgccgctgacgctcacgagtcgggccaggtga

SEQ ID NO: 164072 - DNA, 1065 bp, Enterobacter cloacae
atgaataaagagtctgtcctgagtcgtcagatcttaacgtatatgctgttgctgacgtttacgataattgccatcgccatactgggctcctggtttttttactcctttattctggatcatcttcccggcggccctgctgcgggcgatgacgagcagatgacgatgtgggactgggtatggattgggaccgcgacgacgatcagcctgatcattgccgtattctttacggtcaaactttcatcgcgaatactcaccccgctaaacgcggtcgcgtccagcctgaaaaaaatttctcagggcgatctggacgccagggcattctgtgccagttcccggctgggagagatcaatcacctggttacggatttcaatgaaatggcagaaaagctgcaaacgctggatatccagcggaaatcctggaatgctgcgattgcgcatgaactcaggaccccggtcaccattttacgcggaaggcttcaggggctggttgacggggtgtttaccccggacccggtgctgtttactaacctcctcaaacagacggaaggattaacccgtctgattgaagatctccgggttatcagttcggatggcggggcaggatacacgttataccgggccagaacggatctgaaagggacactacaggacgcgctcgataccttcatgcccgagttcaaccgtaaggcatttaccgtccatactgaactgagggagcagcagtgcgcattcgatcccttacgcatcaatcaatgtctgaccgttttatttgacaatgccttacactattcaacttcgcgcaagctcacggttaaaaatggtgtttcggataaaggcaattttatcctgattcaggatgggggaccgggtattcccagggagtttcatgacttcctgtttcagccctttcagcgcgataacggcgccagacagttgaaccctgaaggctgtggtttgggcttgtcggtggtaaaagccatcatgctggcgcatggtggcgatgttacctataccttatcaacgcaaaaccattcgatatttaaactcacctggcccgactcgtga

SEQ ID NO: 164073 - DNA, 705 bp, Enterobacter cloacae
atgaacaaaaatacgctgatccttgttgttgaagatgaagacgaaatcgccgatatactgatgagctacttagagcgttcgggaatgaaaacgctcagggccaggcagggcgagcaggcgataacgctcaatcgcctccataaaccggatctcatcttgctggacattcacctgcccgtgtgtgacggctggagcgtgcttaccacgctccgccatgaaagtactgtccccgtcattatggtttccgctctcgatcaggacgtcgataaacttatgggtctgaggctcggcgcggatgattacgtcatcaaacccttcaacccttcggaagttgtcgcgcgggttgaggcggtgctgcgtagaacaaagcctgcgcttcagcaggcgggggccctgccgctcagaacgccattcattacggtctatccggatgatttctacgtggaggttactgcggggcccgaggttatctccccggtcttaacgacgaccgaatttaagttgctttcttacctggtgcggtatccgcgcaaggtctgttcccgtgaagagttgctcaacgcgtgtttgccggaaggcgatacgctcgacagaaccgtcgacagccatatgagcaagctgcgaaaaaaactggagctggccggtctttatggcgttcccgagagcatcaggggcatgggttaccggcttggggaaaagaaatga

SEQ ID NO: 164074 - DNA, 456 bp, Enterobacter cloacae
ttgtacattgcgggctgcaaattaccactgtttcttaaagattttatgaagttggctgaaataattaacatggaactttctaaatatttttcccctaaaaaactgggcatatattctctgtttctgctgctgtcgtggggattactttatacctggctggtgctggtacacagaatggatgagaaagtcgcctcgacgctgctctcttcaccccttatctatggctgcatcgcattgtcagtggtttctctggtcatacaaaataaagccggcgcgttcattgagcttcttatcatcgccttctggctgatggtgatttttgtttatctcattattacgttcaccgtgctgttaaacgcgatgcccgatactgaggatctgatcttttactatgaatgttatttgatcattttttttggtggagcaccgctgtacctcattatgagaatgatctga

SEQ ID NO: 164075 - DNA, 3096 bp, Enterobacter cloacae
atgcctcatttttttatcgaacgtcccattttcgcctgggttgtggcgctgtttatcgtcctgacgggtctcctgtctattcctcgtttgccggttgcgcagtatccggcggtggcaccgccgggcatcattatttccgtcagttacccgggggccagccccgatatcatgaatacgtcggtgatatcgttaatcgagcgcgaaatctctggcgtagataatttgctctacttcgaatcatccagcgacacaaccggttcggcgtctattaccgtcacgtttaaacccggcacggacatcaagctggcacagatggatctgcagaaccagattaagatcgtcgagcctcgtcttcctcaggcggtaagacaaaacggcattaacgtcgaggccgctaattctggatttttaatgatggtggggttgaagtccaccagcggtcaattcgaggaagccgacttaagcgactattttgcccgaaacgtcagtgacgagcttcgtcgcgtgcccggcgtagggaaagttcagctgtttggcggcgaaaaagcgctgcgtatctggctggctccgatgaagctccacagctacggcctctcggtgagcgatgttctcaccgctgttggccagcaaaatgccctggtttcgcccggcaaaacgggagatgaaccagcatctgcgggacaaggcgtaacgtatcccatcaccgtgaaggggcaactcacttcggtagaggcgttcagaaacattacactgaaatcagatgcatcgggcgcgaggttgaaactgaccgacgtcgcgcgcgttgagtccggcctgcaaagttacgctttcggtatccgcgaaaatggcgtgcccgcaacggcggcggcaatccagctgtcgccgggtgccaacgcaatgagtacagcttcaggcgtacgcgcgcgcatcgacgagctttcccaggtgttaccggaaggtatggcgtttacggttcccttcgataccgcgccgtttgtgaaactgtctatcatgaaggtggttcagacctttgtcgaagcgatggtcctggtcttcctggtgatgcttctgtttctgcacaagatacgctgtacgcttatcccggcgattgttgctcccgtcgcacttcttggcaccttcacggtgatgttattgagcggatactccatcaatattctgacgatgttcggcatggtgctggcgatagggattatcgttgatgacgccattgtggttgtggagaacgtcgaacgactgatggcggaaaaaagcctctccccacgggacgctacccggcaggccatgcaggagatcgccccggcgattattgggatcacgctggtgctcactgccgtctttatccccatggggtttgctgagggttcggtcgggattatctatcgacaattttgtatttctatggcggtctccatactgctgtccgcgtttctggccctgacgctaacgcctgccctgtgcgcaacgttactcaagccgcacaaggcaggaaagagcggaagtggaaggttcgcggccaggtttaacgcgcgcttccgtttgctcaccgtctgttacgaagccgggctgggtgccgttctgaagcgaaccgggcgtatgctgctcctgtacgttgcgctctgcacggcgctgtttgttggattgtcttcgctaccgacgtcctttctgccggatgaagatcagggctactttatgtcctctatccagctgccttctgatgccacgatgcagcgcaccctcaacgtggttaaaaaatttgaagcggaaattgcggcccggccggacattgaaagcaacattatgatcctggggtttggcttttcaggttcaggaccgaattcggctatggccttcaccacgctgaaggactggaaaaatcggcagggctcgacggctcaggatgaagccgaccacatgcaggccagcatgacgaacgtctctgatgccgtcacgatgagcctgctcccgccggccatttcggatatgggcacctcctcgggcttcacatggtacgttcaggacagagcgggagcgggctatgacgctctaaagagggccgccgacgcgctggttctgcaggctaatcaacgccctgaactcagcgatgtctatatagacggtctgccggaaggaaccagccttgcgctccaggttgaccgggaaaaggcggaagcgatgggcgtctcattcgatgatatcaaccagacgctctccgtcaccctgggctcaaattacgtcaacgactataccaacaacggccgcgttcaacaggtgattattcaggccgatgccccctatcgaatgcagcccgagcagatactgaaactatcagtgaaaaaccggatgggtgagatggtgccggtatcaacgtttgcgacgatctcctggaacgttgcgccgcagcagctgacgcgctaccagggttattctgctatacggataaccggaaatgcggcgtcaggcgtatccagcggcaccgcaatgaaggccatggagggcttgtccaggagcctgcctcagggcatggcgggtgagtgggccgggagttcgctacaggagataaaatcggaatcgcagcttccgggcctgatcgccctgtcgatactggtcgtgtttatggtgctcgccgccctgtatgagagctggtctattccttttgcggtcatgctggttgttccactgggccttatcggcgcggtgatagcggtgtttgttgccggtatgaccaatgacgtgttctttaaggtcggtctgattacgctcatcggcctgtcggccaagaacgccattctgattgtggagtttgccaggcagctgcatcgcgaagggcaacccctgctggcggcgaccattcatgccgccagtcagcgtctgcgccccattctgatgacatcgttagcctttaccttaggagttgttcctctgatgctggccaccggtgcgagcgacagtacgcagcatgccatcggtaccggcgtatttggcggcatgattagcggtacgcttctcgcgatcttcttcgtaccggttttctttatcgttattgcgcgcttcatcggcaacatcaggaaagcgtga

SEQ ID NO: 164076 - DNA, 789 bp, Enterobacter cloacae
atgggttttctttccggtaagcgcattctggtgactggcgttgccagcaaactgtccatcgcatacggcatcgcacaggcaatgcatcgcgaaggcgctgagctggcgttcacctaccagaacgacaagctgaaaggccgtgttgaagagtttgccgcgcagctgggttccagcattgttctggaatgtgacgttgcacaagacgaaagcatcgacggcatgtttgctgaactggcaaaagcatggccgaaattcgacggtttcgttcactccatcggcttcgcgcctggcgaccagctggacggcgactacgtgaacgcggtaacccgtgatggcttcaaaatcgcgcacgacatcagctcctacagcttcgttgcgatggcgaaatcctgccgcgcgatgctgaacccgggcgcagccctgctgaccctgtcctacctgggcgctgaacgtgctatccctaactacaacgttatgggtctggctaaagcgtctctggaagccaacgtacgctacatggcgaacgcaatgggtcctgaaggcgtgcgcgttaacgccatctctgcgggtcctatccgcaccctggccgcttccggtattaaagatttccgtaaaatgctggcacactgcgaagcggttaccccgattcgtcgtaccgttaccattgaagatgtgggtaactctgcagcattcctgtgctctgacctttccgcaggtatctccggcgaagtggttcacgttgacggcggcttcaacatcgctgcaatgaacgagctggaaattaaataa

SEQ ID NO: 164077 - DNA, 987 bp, Enterobacter cloacae
atggaacaacgccgtttttccggcaaaggccactggtatcatgaaacccagtcaaaccacgcgcagacggatgttctgcccctggtgcccgaagccgctaacgtcgacgatcgttttttgctcgatttagccctgcctgatgagattgtcgccgcctgttctggctggcttactcctgccagagccttatgccaccagctgtttccgctctcaattcccgtgaaccgcctgcatacgctcagcgcttacgatcggctcagtaccgcgttaacggtcgctcaggcctgcggcgttcagcggctctgtaaccactacgccgccctcctcgccccgcttcccggcccggactcctcgcgcgaaagcaaccgccgcctggcgcaaatcacccagtatgcccgccagctcgccagctctcctgatgtcattgatgataaagcccggaaccagcttgatgaggtgggcctgtccacgtacgacatcgtggtgattaaccagattatcggctttatcggttttcaggcgcgcgtggtcgcgatttttcaggccctgctgggacatcctgttcgctggttgccggggcatcatattcagccgcacacgatccccgcgagccacgatgcgtggatgccgcttttacccgtcgtcgagctgcgctacgcgaatgcgcatcagctggagtccctgtcccgctggcaggccgaacccgcgctcgaggcgttgacgccggtgctttgtcatgagccgacgctgctcgacctgaccggagaactcctgttaaacagccgggcggagatcccgcagacgtcacccgcactttcggcagcggtcgaactgctgacccgctcgccggaccgcttcagcgccgcgcagtttaccccgctcacggatcaaggactccagggcgaatatgccatcacgctgcttacccaaagtgcgtttgatggctggcttaatcgtctgaaagtggcgtttggtaaagaggaataa

SEQ ID NO: 164078 - DNA, 1935 bp, Enterobacter cloacae
atgtttcaggacaacccgctgctagcgcagcttaaacagcaactgcattcccagacgccgcgtgcagaaggggtcgtaaaagccacggaaaagggctttggcttccttgaagttgacgcgcagaaaagctacttcattccgccaccgcagatgaagaaagtgatgcatggcgaccgcgtcatggccgtcattcataccgaaaaggaacgtgagtccgccgagccggaagaactgatcgaaccgttcctgacccgctttgtgggcaaggtgcagcgaaaagacgatcgtctttctatcgtgccggatcatcctctgctgaaagatgccattccctgccgcgccgcccgtggcgttgagcatgattttaaagaaggtgactgggccgtagcagaaatgcgccgtcatcctctgaagggcgatcgcggtttttatgcggaactgacccagttcattacctttggcgccgatcatttcgtgccatggtgggttacgctggcacgccacaatcttgaaaaagaagcgccgaacggcgtggcaaccgagatgcaggacgaaggtctgacgcgtcgcgatctcaccgcgctggagtttgtcaccatcgacagcgccagcaccgaagatatggacgatgcgctctacgctgaagaaagcgccgacggcaaactgcacctgaccgttgccattgccgatcccaccgcctggattgttgaaggcagcaagcttgacgaaacggcgaaaatccgtgcgttcacgaactacctgccgggcttcaacatcccaatgctgccgcgtgaactgtcagacgatctctgctcgctgcgcccaaatgaagtgcgcccggtccttgcctgccgcatgaccattgccgcagatggcgcgattgaagacgatatcgagttctttgccgccaccatcgagtcgaaagccaagctggcctacgataacgtctccgactggctggaaaataccggtagctggaaaccggaatcagaggccattgccgcgcagatccgtctgctgcatcgcatctgtctgaaccgcggcgagtggcgtcaaacccatgcgctggtgttcaaagatcgcccggattatcgctttgttctgggtgagaaaggcgaagtgctggatatcgtggccgagccgcgacgcattgcgaaccgcatcgttgaagaagcgatgatttccgccaacatctgtgccgcacgcgtgctgcgcgacaagctgggctttggtatttacaacgtccataccggcttcgatccggcgaataccgaagcgctggcggccctgctgaagaatcacgacgtgcacgtcgatccggaagaagtgctgaccctgccgggcttctgcaagcttcgccgcgaactggacgcacagccatcgggcttcctggacagccgcattcgtcgcttccagtccttcgctgaaatcagcaccgagcctggcccacactttggtctcggcctcgaagcctacgcgacctggacgtcaccgatccgtaagtatggcgatatggttaaccaccgtctgctgaaagcaattatcaaaggcgaaaccgttgcccgccctcaggaggagaccacgctgcagatggccgatcgtcgccgtctgaaccgcatggcagaacgtgacgttggcgactggctgtacgcgcgcttcctgcaggataaagccggtacggatacccgtttcgccgccgagatcattgatatcagccgcggggggatgcgcgtccgtctggtcgataacggtgctgtcgcgtttattccggcgccattcctgcatgctgttcgcgatgaaatggtctgtagtcaggaaaacggtacggtgcaaattaaaggtgaaacagtttacaaagtcaccgacgtgattgacgtcactatcgctgaagtccgtatggaaacccgcagtattatcgcgcgtcctgtcgcctga

SEQ ID NO: 164079 - DNA, 1992 bp, Enterobacter cloacae
atgatggacgatctggagcagaatttgctgtttcgctacatgggaacccacagcccatggtggcgcttgtcagctgacagcaacgctctgcaccttgccaccagtgaaaatgccgatgtcactcaggtgattgcgctggacgacgatcaggccgatctcatccgtcatttaaccgttattacctccagcatttccatgacgctctcgttattcggggaagatgtcccggttcaccttgtgggccgtaaaatcacccgtaacgagtgggccggtacggcttccgcctggaacgatacgccctccgtggcgcgcgacctggctcagggactctcttttgcggaacaggtggtgtcagaggctaactccgtgattgttattctcgatcagaacggcaatattcagcgttttaaccgattgagcgaagagtataccggcctcaaagagcaagaagtgattggccagaacgtgtttaagctctttatgagccgcagcgaagcggctgcctcaaagcgcaatattaccggtttcttccgcaacggcagttcctacgaagtcgagcgctggatcaaaacacgtaaagggcaacgactgtttctgttcagaaacaaattcgttcacagcggcagcggtaaaaatgaaattttccttatctgttccggtacagatattaccgaggaacgccgcgctcaggaacggctgcgcgtgctggccaataccgataccatcaccggcttaccaaaccgcaatgcgatccacgacctgatctctgacgccatcagtcaccgcggcgacacgcaggttggcgtggtgtatctcgacctggataactttaaaaaggtcaacgacgcttacgggcatatgtttggcgatcagctgttacaggctgtcgcactcgccattttgagctgtctggatgagggacaggtgctggcacgacttggcggagatgagtttatcgtcatggccacccatacctctcagggctctctggaagcgatggcgtcgcgcattttaacccgcctgcgccagccgttccgaatcggcctgatcgaaatttacaccggctgttcccttggcatcgccctcgccccgcagcacggcaacgaccgggaaagcgtcattcgtaacgccgataccgccatgtacaccgctaaagagaacggccggggcaagttctgcgtcttctcgcccgagatgaaccagcgcgtgtttgagtatctctggctggataccaacctgcgtaaggcgctggataacgaccagctcctgatccactaccagcctaaaatcacctggcgcggagaggtcagaagtcttgaagcgttggtccgctggcaatcgcccgaacgcgggttgatcccaccgctggagtttatctcttatgccgaggagtcagggttgattgtgccgctgggccgctgggtgatgctggatgtggttcgccaggtggcgaaatggcgcgataagggaattaacctgcgcgtggccgtgaacgtctctgcgcgtcagctggccgaccagactatctttagcgacttaaagcaggcgctgaaggatctgaactttgaatactgcccggtcgacgtcgaattaaccgaaagctgtctcatcgagaacgaagagctggcgctctccgtgatccagcagttcagcaggctgggggcgcaaattcatctcgacgattttggtaccggctactcctccctttctcagctggcccgcttccctattgatgccataaaactcgatcaatcgttcgtcagggatattcataagcagtccatctcccagtctctggtgcgcgccatcgtcgcggtggcgcaggcgttaaacctgcaggtgattgccgaaggggtggaaaacgcaaaagaagacgcctttctgactaagaacggcgtcaacgaacggcagggttttctgtttgctaagccgatgcccgctgccgcattcgagcgatggctaaaacgctatcaggcgcggaaacagcattaa

SEQ ID NO: 164080 - DNA, 870 bp, Enterobacter cloacae
atgacagttatcaatcagcctacctgcacactgtttaccgatactgaacggttcacccagctgtcaggctattacgaggcagagcgacatacagtctggatgatgttgcgggctcagccacgtccttgcttcaaccatgcgttaatagaggagatcatgaacctttcatggctcgtccgccagtctggttttgcggtcgatttttgggtgaccggatcgctggtgcctgagatgtacaatgtgggcggtgacctgcagttttttgtcgagtgcattcagcacggtcgacgtgaagcgttacgggcctatgcgcgcgcctgtgtcgattgcgtgcatgcggcctcccgggggtttgatacgggggccatctcgctggccatggtcgaaggcagcgcgttagggggcgggtttgaggccgctcttgcgcaccatttcgttctggcgcagcgcgatgcacgtttaggttttcccgagattgcttttaacctgttcccgggcatggggggatattccctggtagctcgccgttcaggaatgaagctggctgaggaactcatctacaagggggaatcccatacggcggagtggtatgaacagcacggcctggtggatctcctgttcgaacctggacaaagctacgtttccacccgaaccttcatcgacacgctgcggccaaaactgaatggcgtaagagcgatgctgcgcgcccgcacgcgcgtactgcaattgccgcggagtgaactgatggatatcacggaagactgggtagacgcggctttctgcctggaaccaaaagatatcgcctacatggagcgtctggtcatgctgcaaaaccgccatcacgcggcgggcttgcgtaaagccagttaa

SEQ ID NO: 164081 - DNA, 723 bp, Enterobacter cloacae
atggtcatcgatcagggacgcgtaagcgtagtcgatctcgctaaaaccactggcgtttctgaagtcaccatccgtcaggatcttaatctgctggaaaaacagagctacctgcgtcgcgcgcacggctatgcggtcccgctggacagtgatgacgttgagacgcgcatgatgaacaactacgcgctcaaacgtgaactggcggaatttgctgcgtccctggtgaacaacggcgagaccgtctttattgaaaacggcagcagtaatgcccttctggcgcgaacgcttgccgatcaaaaagacgttaccatcatcaccgtcagcagctatatcgcgcatttacttaaagagacgcgctgcgaggtgattctgctgggcggcatctatcagaaaaaaagtgaaagcatggttggcccgctgacccgtcagtacgtccagcaggtccatttcagtaaggcctttatcgggattgacggctggcagccggagacaggctttaccggccgggatatgatgcgctctgacgtggtgaatgccgtactggaaaaagagtgcgaagccattgtgctcaccgacagctctaaatttggtgccgttcacccttacacgatgggtcccgctgcacgctttagccgcgtgattaccgatgaccgtttgagcgaagcgcatcacaataaactcgaagagagcggtttgatcgtcaatattattaaagccagcgcctga

SEQ ID NO: 164082 - DNA, 219 bp, Enterobacter cloacae
atgaccttaaccagcaaaaaattagccgccgctgttctggcaatcactgtcgctatgtccctgagcgcatgctctaactggtctaaacgtgaccgtaacaccgcgattggtgccggtgccggtgctctcggtggtgcagtattaacggatggtagtacgctgggtacattaggtggcgctgctgtcggtggtattatcggtcaccaggttggcaaataa

SEQ ID NO: 164083 - DNA, 327 bp, Enterobacter cloacae
atgaccgattccaacagtcgtctggtctactcaaccgagagcgggcgtatcgacgaaccgaaagccaaagtggaacgtccgaagggggacggtatcgtgcgcattcagcgtcagaccagcggacgtaaggggaaaggggtctgccttatttccggtattgatctggatgatgctgaactgacaaagctggctgccgaactgaaaaagaaatgtggatgtggcggggccgtgaaggacggcattatcgaaatccagggtgataaacgtgatttaattaaatcactgctcgaagccaaaggcatgaaagtcaaactggcaggcggctaa

SEQ ID NO: 164084 - DNA, 738 bp, Enterobacter cloacae
atgacgtctgttacatcctccacttcccgcgtaattacggattctcctgttgttgttgcgcttgattacaataagcgtgacgctgcactggcgtttgtcgacggtatcgaccctcgcgattgccgcctgaaagttggcaaagagatgttcacgctgtttggaccgcaaatcgttcgcgatctgcaacagcgcggctttgacgttttcctcgacctcaaattccatgatattccgaacaccacggcccacgccgttgctgcagccgccgagctgggcgtatggatggtcaacgtccatgcgtcgggtgggacaagaatgatgaccgctgcccgtgaggcgctcctgccgttcggtaacgatgcgccgctgcttatcgccgtcaccgtgctgaccagtatggacgaaaatgatttacgcgaccttggcgtgacgttgtcacctgcggaacatgccgaacgtctcgcgcgtctgacgcagcagtgcggcctggatggcgtagtctgctccgcgcaggaagcggtacgtttcaaatcagcgctgggccaggattttaaactcgttacgccggggatccgtcctgcgggcagcgacgtgggcgatcagcgtcgcatcatgacgcctgagcaggcgctggcggcgggcgttgactatatggttatcgggcgtccggtgacgcagtctgcaaatccggctgagacgcttaaggctatcaatgcatcgctgaaaaagggggcgtaa

SEQ ID NO: 164085 - DNA, 1170 bp, Enterobacter cloacae
atgctggagttgttgtttctgcttttgcctgtcgccgcagcctatggctggtatatgggccgcagaagtgcgcaacaaacaaaacaggatgaggccaaccggctctcccgcgactacgttgcgggggtgaacttcctcctgagcaatcagcaggacaaagcggtagacctgttcctcgacatgctgaaagaggatacggggaccgttgaagcccatcttaccctggggaacctgttccgctcgcgcggcgaggttgaccgcgccattcgcattcaccagaccctgatggaaagcgcctcgctgacctacgatcaacgactgctggccgtacagcagttgggacgagattacatggctgcggggctgtacgatcgcgcggaagatatgttcgcacagctggtggatgaaacagatttccgcatcggcgcgctgcaacagctcctgcagatatatcaggccaccagcgactggcagaaagccattgatacggctgaacgtctggtgaagctgggtaaagataagcagcgcgttgagatcgcccatttctactgtgagcttgcccttcagcagatgggcaatgacgacatggacaaagccatggcgttgctgaagaaaggtgccgccgcggaccgcaacagcgcccgtatctccatcatgatggggcgcgtttttatggcgaatggcgactacgccaaagccgttgaaagcctgctgcgggttatcgaccaggacaaagagctggtcagtgaaacgctggaaatgctgcaaacctgctatcaacagctggacaagcgggaagagtgggtggccttcctgcgtcgctgcgtggaagagaataccggcgcaaccgcggaactgatgcttgctgacgttgttgagcagtatgaggggggcgacaccgcgcaggtctatatcacccgacagcttcagcgtcatccgaccatgcgggtcttccataagctgatggattaccacctgaacgacgcggaagaagggcgcgccaaagagagcctgatggtgctgcgcgacatggttggcgagcaggtgcgcagcaaaccgcgctaccgttgccagaagtgtggttttaccgcctacacgctctactggcattgtccgtcctgccgggcctggtccaccatcaagcccatccgcggcctggacgggcagtga

SEQ ID NO: 164086 - DNA, 309 bp, Enterobacter cloacae
gtgaaatatttactcattttcttactggtattggcgatttttgtcatttcagtcacattgggtgcacaaaacgatcagcaggtgacgtttaactatctgctggctcagggcgagtatcgcgtgtcgagcctgctcgcggtcttatttgctgcaggctttgccattggctggctggtttgcggtttgttctggttaaaagtccgtgtttcgcttgcgcgcgctgaacgtaaaatcaaacgactcgaacatcacattgcgcctgcgtccgacatgccggaaagctctggcgtgccggtcgtgaaggaataa

SEQ ID NO: 164087 - DNA, 768 bp, Enterobacter cloacae
atgcattcaatcgccagacgtacggcagcaggtgcggccattttactgattatgcctttggccgtatggctttcagggtggatgtggcagcccgggcagaacgccacgtggctgaaaacgttatactggattacggaaacggtcacccagccctggggaattatcacccacgtcctcctgtgcgcctggtttctgtggtgcctgcgctttcgtctgcgcgcggcgctaatgctctttgcgatcctcggcggcgctatccttatcggtcagggcgtaaaatcctgggtgaaagatcgcgttcaggagccgcgtccttttgtcgtctggctggaaaaaacgcaccatgttccggtggatgagttctacactttaaagcgtaaagatcgtggcgcactggtgaaagaacagcttgcggaacagcaggatatcccgaaattcttgcgtaaacactggcagaaagagaccgggttcgcgtttccctccggccacaccatgtttgcggccagctgggcgctgctgggggttgggctgctttggcctagacgtcgaacggtcaccatcgtgattttactggtctgggcgacgggagtgatgggcagccgcttactgctggggatgcactggccacgggacctggtcgtcgccacgctcatctcgtggatgctggttatgctggcgacctggctggctgaacgattctgcggcccgctaacgccaccgccggaagagaaagaagaaatagccgaaagggaccaaacggacgcctga

SEQ ID NO: 164088 - DNA, 591 bp, Enterobacter cloacae
atgcagcttaaacgtgtggcagaagccaaactgccaaccccatggggcgatttcctgatggtgggttttgaagaactggcaaccggacaggatcatgtcgcactggtgtatggcgacatttcagggcagacgccggtgctgtcccgcgtccattcagagtgtctcaccggcgacgcgctgttcagcctgcgctgtgattgcggtttccagctggaagcggccctttctcatattgctgaagaaggccgcggcgtgctgctttatcaccgtcaggaagggcgtaacattggtttgctgaataaaattcgcgcctacgcgcttcaggaccagggctacgatacggttgaagccaaccatcagctcggttttgccgctgatgaacgtgacttcaccctgtgcgccgatatgttcaagctgctgggcgtagacgaagttcgtctgctcaccaataacccgaaaaaagtggaaatcctgaccgaagccgggatcaacatcgttgaacgtgtaccgctgattgtcggtcgtaacccgaaaaatgcccactaccttgataccaaagccgccaaaatgggccatctgctgaaagagtga

SEQ ID NO: 164089 - DNA, 2676 bp, Enterobacter cloacae
atgtcgttaaccctacgcgaagccagtaaggacacattacaggcagaaaataaaacctggcattactacagcctgccgctggctgccagaacgcttggggacatttcgcgtttacccaagtccttgaaagttttacttgaaaatctcttgcgctggcaggacggtgaatccgtcacgctcgatgatatccaggcgctggcagggtggcttgagaaggcccatgccgacagagaaatcgcctaccgcccggcaagggtgctgatgcaggactttaccggtgttccggccgtggttgatttagccgcgatgcgcgaagccgtgaagcgtctcggcggagatacggcaaaggttaacccgctttcccccgttgacctcgtcattgaccactccgtgaccgttgaccacttcggtgatgacgatgcctttggtgaaaacgttcgtctcgagatggagcgtaaccacgagcgctacgtcttcctgaagtggggacagcaggcgttcagccgatttagcgtggtcccgccaggcaccggcatttgtcaccaggtaaaccttgaatatctgggtaaagccgtctggagcgaattgcaggataaagagtgggtggcttatccggacacgctggtgggcacggattcacataccaccatgatcaacggtctgggcgtgctgggctggggcgtcggcggtattgaagcggaagccgccatgctcggccagccggtatccatgcttattccagatgtggtgggcttcaagctcaccggaaagctctctgaaggcattaccgccaccgacctggtgctgaccgtcacccagatgctgcgcaagcatggtgtggtaggcaagtttgttgaattctacggtgacggtctggattcgctgccgctggccgaccgcgccaccattgccaatatggcgccggaatacggtgccacctgcggctttttccccattgacgacgtcacgctggagtacatgcgcctcagcggccgcagcgaagaacaggtcgcgctggtggaagcgtataccaaagcgcagggcatgtggcgcaatccgggcgatgagcctgttttcaccagcacgcttgaactcgatatgggaagcgtcgaagcgagcctcgcggggccgaaacgcccgcaggacagggttgcgctgaccgatgtgccgaaagcgtttgccgacagcaatgccctggaagtgaacgtggcgcagaaagaccatcgtcccgtcgactatgttctgaacggacatcagtatcagcttccggacggcgcggttgtgattgccgccattacctcctgcaccaacacgtccaaccccagcgtattaatggcagccggtctgctggctaagaaagcggtagagcttgggctaaaacctcaaccgtgggttaaggcctcgctggcgccgggctccaaagtggtgtcggattacctggctcaggccaaactgacgccgtacctggacgagctgggctttaacctcgtgggctacggctgtacgacctgtattggtaattccgggccactgcctgaacctatcgaaacggcgatcaagcagggtgacctgacggtcggcgccgtcctgtccggtaaccgaaactttgaagggcgcattcacccgctggtgaaaaccaactggcttgcttcgccgccgctggtggtggcttatgccctggccgggaacatgaatatcaacctggtgaccgatccgattggtcacgatcgtaagaatgatcctgtctatctgaaagatatctggccttcctcgcgtgaaatcgcgctggccgttgagaaggtctctaccgagatgttccgcaaagagtacgctgaagtctttgaaggcacgccggaatggaaagccatcaacgttgcaggttcggatacctatggctggcaggatgactcgacctatattcgtctgtcgccgttctttgatgagatgctggccgagccggcgccgcttaaggatatccatggcgcgcgtatcctggccatgctgggggattccgtcacgacggatcatatctctccggcggggagcatcaaagccgatagcccggcaggccgttacctgcaaagccggggtgtcgaacgccgcgattttaactcctacggttcgcgccgcggtaaccatgaagtcatgatgcgcgggacctttgccaacatccgcattcgtaatgaaatggtgccgggcgtggaagggggcatgacgcgccatctgccggggacggaagtcgtgtcgatttatgatgcggcggtcaaataccaacaggaagggacgccgctggcggtgattgccgggaaagagtacggttccggctccagccgcgactgggcggcgaaaggcccgcgcctgcttggcgttcgggtggtcatcgccgaatcgttcgaacgtattcaccgttcgaatctgatcggcatggggatcctgccgcttgagttcccgcagggcgtgacgcgtaaaacgctgggcctgaccggggaagagcagattgatattagcggcctgcaaaacctgcagccgggtaaaacggtgccggtaacgttaacgcgggcagacgggaaaaccgaggtgctggattgtcggtgccgtattgatacggcaaccgagctgacctactaccagaacgacggcattttacattacgtgattcgtaagatgctggattga

SEQ ID NO: 164090 - DNA, 975 bp, Enterobacter cloacae
atgaaattacagcagcttcgttatatcgttgaggtggtgaatcataaccttaacgtctcttctaccgccgaggggctatatacctcgcaaccgggcatcagcaaacaagttcgtatgctggaggatgagttaggcattcagatcttcgcccgcagcggtaagcatctcactcaggtgacgcctgcagggcaggaaatcatccgcattgcgcgtgaagtcctctctaaagtcgatgcgattaagtctgtggcgggggagcatacctggccggataaaggctcgctgtatattgccacgacgcatactcaggcgcgctatgcgctgcccggcgtgatcaaaggctttatcgagcgttatcctcgcgtctcgttgcatatgcaccagggctcgccaacgcaaatcgctgaagccgtctctaaggggaatgcagactttgccatcgccaccgaagcgcttcacctgtatgacgatctggtgatgctcccgtgctaccactggaaccgctctattgtggtgacccccgatcaccccctggcgggtaaagggtcggtcactatcgaagagctggcccagtatcctctggtgacctatacgtttggctttaccggccggtccgagcttgatacggcatttaaccgggcagggttaacgccgcgcattgtctttaccgcgaccgatgccgacgtgattaagacctatgtccggcttggattgggcgtgggcgtcatcgccagcatggcggtcgatccggtgtcagaccctgacctggtgcgtcttgatgcgcacgacgttttcagccatagcaccacaaaaattgggttccgccgcagcaccttcctgcgcagctatatgtatgattttattcagcgctttgcccctcatttaacgcgtgacgtggttgataccgccgtggcattacgctcaaatgaagatattgaagagatgtttaaagacatcaaactccccgaaaaataa

SEQ ID NO: 164091 - DNA, 2598 bp, Enterobacter cloacae
atgggtaaagctctcgtcatcgttgagtccccggcaaaagccaaaacgatcaataagtatctgggtaatgactacgtggttaagtccagcgttggtcatatccgcgatttgccgaccagtggctcagccagcaaaaagagcgcagactctacctccaccaaaggggctaaaaagcctaaaaaggatgaacgtagcgcgcttgtcaaccgcatgggtgttaacccatggcataactgggatgcacaatatgaagtgcttccagggaaagaaaaagtcgttaacgagctgaagcagctggctgaaaaagcagaccacatctatctcgcaaccgaccttgaccgcgaaggggaagccattgcgtggcacctgcgggaagtgatcgggggtgatgacaaacgctacagccgcgtagtgtttaacgaaattacgaagaatgcgattcgtcaggcgtttgagaagccgggcgagctaaacatcgaccgtgttaacgcccagcaggcgcgtcgctttatggaccgcgttgtgggctacatggtttctccactgttgtggaaaaagattgcccgtggcctgtccgcaggtcgtgtgcaatccgtcgccgtgcgtctggtcgttgagcgcgagcgcgaaattaaagccttcgtgccggaagagttctgggaagtcgatgccaatgtgaccacgccgggcggtgacgctctgccgctgcaggtaagccaccagaacgataagcctttccgcccggaaaaccgcgaccagaccatggccgccgtggcgctgctggaaaaggcacgctatcaggtgctggaacgtgaagacaagccgaccagcagcaagcctggtgcgccgtttatcacctccaccctgcaacaggcggcgagcacccgtctgggttacggcgtgaagaagaccatgatgatggcccagcgcttgtatgaagcaggttacatcacctacatgcgtaccgactcaaccaacctcagtcaggacgcggtcaacatggtgcgtggctacatcagcgacaacttcggtaagaaatacctgccggaaagcgctaaccagttcgccagcaaagagaattctcaggaagcgcacgaagcgattcgtccttctgacgtctccgtgctggctgaatcgctgaaagatatggaagccgacgcgcagaagctgtatcagctgatctggcgtcagttcgtggcgtgccagatgaccccggcccagtacgactccaccacgctgaccgttggcgcgggtgatttccgtctcaaggcgcgcggtcgtattctgcgtttcgacggctggacgaaagtgatgcctgcgctgcgtaaaggtgatgaagaccgaacgctgcctgcggtgaacaaaggtgatgaactgtctctggttgagctgatcccggctcagcacttcaccaagccaccggcacgcttcagtgaagcctccctggtaaaagagctggaaaaacgcggtattggccgtccgtcgacctacgcgtcaattatctcgacgattcaggatcgtggttacgtccgtgttgaaaaccgtcgtttctatgcagaaaaaatgggtgagatcgtcaccgatcgtctggaagccaacttccgcgagctgatgaactacgatttcaccgcgcaaatggaagacagtctcgaccaggttgccagccaccaggcggaatggaaaaaggtccttgacagcttcttcagcgacttcaccgaccagcttgaaaaagcggagaaagaccctgaagagggcggcatgctgcctaaccagatggtactgaccagcatcgactgcccaacctgtggccgcaagatggggatccgtactgccaccacgggcgtgttcctgggctgctccggctatgcgctgtcgccaaaagagcgctgcaaaaccaccatcaacctggtgccagagaacgaagttctcaacgtgctggaaggtgacgatgcggaaacgaacgctctgcgtgccaagcgccgctgcaaaaaatgcggcacggcaatggacagctacctgatcgatccaaaacgcaagctgcacgtgtgcggtaataacccaacgtgtgacgggtatgagattgaagagggcgagttccgcattaaaggctatgacggcccgattgtggagtgcgagaagtgtggttctgaaatgcacctgaaaatgggacgtttcggtaagtacatggcctgtaccaacgacgaatgtaaaaacacgcgcaaaattctgcgtaacggtgaagtggccccgccgaaggaagatccggttccgctgccagaattgccgtgtgagaaatccgacgcgtacttcgtgctgcgtgacggcgcggcaggtgtcttcctggccgccaacaccttcccgaaatcgcgtgaaacccgcgcgccgctggtggaagagctatatcgcttccgcgatcgtctgccggagaaactgcgttatctggccgatgcgccgcagcaggatccggaaggcaacaaaaccgtggtgcgttttagccgtaaaacaaagcagcagtatgttgcggcagagaaagagggtaaagcgaccggatggtcagccttctttgtcgatggaaaatgggttgaaggcaagaaataa

SEQ ID NO: 164092 - DNA, 252 bp, Enterobacter cloacae
atgcagaatacgacccaacctattgaccgagcctctctgcttatcgaagcaaacaagcttattcgtgaccatgaagatacgctggcaggcattgaagccaccggcgtagagcagcgaaatggcgtgctggttttcagcggcgaatacttccttgatgaacagggcttaccgaccccgaaaagcaccgccgtgtttaacatgtttaaatacctggcacatacgctttccgagaaatatcacctggtcgattaa

SEQ ID NO: 164093 - DNA, 1047 bp, Enterobacter cloacae
gtggaattactttctcaatatgggttgtttttggccaaaatcgcgacggtggtgattgccattgcggtggttgccgttctgattgtcaacctgacgcagcgcaagcgtcagcgaggggagttacgcatcacccgcctgagtgagcagtataaagagatgcaggaagagatgtctctggcgctgcttgatagtcatcaacagaaactctggctgaaagcgcagaagaaaaagcataaacaggaagccaaagcggcaaaggcaaaagcgaagctcaatgcgccgcaggataaggccacgccacgtgtctatgtgctcgattttaaaggcagtatggatgcgcatgaggtttcttctctgcgggaggaagtgactgccgttctggccgtggcgacaccgcaggatcaggttgtcgtgcgtcttgaaagcccgggcggggtggttcacggttacggactggccgcctcacagctgcagcgcctgcgtgaaaaacagatcccgctgaccgtggccgtggataaagtggcggccagcggaggctacatgatggcctgcgtggcggacaaaattgtggccgcaccgttctctatcattggctcgatcggcgtggtcgcgcaaattccgaactttaaccgcttcctgaaaaataaagagattgatatcgaacttcacacggcgggtcagtataaacgtaccctgacgctgctgggagaaaacacggaagaagggcgtcaaaagttccgtgaagatctcaacgaaacgcatcatctctttaaagactttgtgcaccgtatgcgcccgacgctggacattgagcaggtcgcaacgggtgagcactggtacggcgttcaggcgcaggagaaagggctggtggatgaagtcggaaccagcgacgatctgctgctcaacctgatggaaggccgggaactggtgggcgtccgctttgcccagcgcaagcgactccttgaccgctttaccaacagtgcggcagaaagcgcggaccgcctgctgctccgctggctacagcggggacaaaaaccgctgctgtaa

SEQ ID NO: 164094 - DNA, 762 bp, Enterobacter cloacae
gtgcattatcaaccgcaaaaaaatctgctgcaaaaccggattattcttgtcaccggtgccagcgacgggattggccgcgaggcggccctgacatacgccgaatacggcgcgaacgtcattctgatcgggcgcaacgaagaaaaactgaaaaacgtcgctcaggagattgaggctgtatgcggcacaccggccccgtggtatacactcgatttactgacctgcacgcccgaagtatgccaggaattagcccagcgcatcagcgcccactatccgagactcgacggcgtactgcataacgccggtttgttaggcgaagtgcgtccgatggatgaacaggatcctgatatctggctgcaggtgatgcaggtcaacgtcaacgggacgtttttcctgacccaggcactgcttcctttattactcaaatcggattcaggttcactggtgttcacctcctccagcgttggccgtgagggacgcgcaaactggggagcctatgccgtatcaaaattcgcgaccgaaggcatgatgcaggtgctggcggaggagtaccagagccgccatctgcgcgtaaactgcatcaacccgggcggtacgcgcaccaaaatgcgcgccagtgcgttcccgagcgaagatccgcagaagctgaaaaccccggcagacattatgccgctctatctctggctgatgggcgacgacagccgccgcaaaaccgggatgacctttgacgcccagccgggccgtaaaccaggaatttcgcaatga

SEQ ID NO: 164095 - DNA, 591 bp, Enterobacter cloacae
atgagtgaagaacgtcatcagcagcgccagcagcgtctgaaagaacaggtcgatgcgcgcgttgcggcggcacaggacgagcgtgggatcgtcattgtctttaccggcaacggcaaggggaaaaccaccgccgcattcggtacggcgacacgcgccgtcggacacgggcaaaaagtgggcgtgatccagtttattaaaggcacatggcccaacggcgagcgcaatttgctggagcctcacggcgtcgagtttcaggtaatggcaaccgggtttacgtggaatacccagaaccgggaaacggataccgccgcctgtctcgccgtctgggagcatgcaaagagaatgctggccgatccctcgctgaatatggttctgctggatgagataacctatatggtcgcctacgactacctgccgctggaagccatgctggatgctctgaagaaccgtcctgtacaccagacggttatcgtcacggggcgcggatgtcatcgggatattctggagatggccgataccgtcagcgagctgcgtccggtcaaacatgcgtttgatgcgggcatcaaagcgcaaattggcgttgattactaa

SEQ ID NO: 164096 - DNA, 876 bp, Enterobacter cloacae
atgagcgagaagttacagaaagtgctggcgcgtgccggccacggttcacgccgtgaaatcgaagccattattgaagcgggtcgcgtgagtgtggacggtaaaatcgccacgctgggtgaccgcgttgaaatcgtaccggggctgaagatccgcatcgacggtcatcttatctccgtgaaagagtccgctgaacaaatctgtcgcgtgctggcttactacaagccggaaggcgagctgtgcacccgcaacgacccggaaggtcgtccgacggtgtttgaccgtctgcctaaactgcgcggcgctcgctggattgccgttggtcgtctggacgtgaacacctgcggtctgctgctgtttaccaccgatggtgaactggcaaaccgtctgatgcacccaagccgtgaagtagaacgtgaatacgcggtgcgcgtatttggccaggttgatgagaataaactgcgcgatctgtcgcgtggcgttcagctggaagacggtcctgcggcgttcaaaaccatcaaatttaccggtggggaaggcatcaaccagtggtacaacgtgaccctgaccgaaggccgcaaccgcgaggtgcgtcgtctctgggaagcggtaggcgtgcaggttagccgtcttatccgtgtccgttacggcgatatactactgccgaaaggtctgccacgcggtggttataccgaactggatctgacccaaaccaactacctgcgcgagctggtcggcctgacgccggaaaccacctcaaaagtggcggtggaaaaagatcgtcgtcgcatgaaggcgaatcagatccgtcgcgcggtgaagcgccacagccaggtgagcagcagtcgccgctccggcagccgtaataacaacggttaa

SEQ ID NO: 164097 - DNA, 621 bp, Enterobacter cloacae
atgagtcagtttttctatatccatccggataacccgcagccacgcctgattaaccaggccgtggagatcgtccgcaaaggcggcgtgattgtctacccgaccgattccggctacgcgctgggctgcaaaattgaagataaaggagcgatggaacgcatttgccgtattcgccagttgccggacggccataactttaccctgatgtgccgcgatctctctgagctgtccacctatgcttatgtggataacgtggcgtttcgcctgattaagaacaacacgccgggcaactacaccttcatcctgaaaggaacgaaagaggtgccgcgccgtctgctgcaggaaaaacgcaagactattggcatgcgcgtgccgtcgaacccgattgcgcaggcgctgctggaaaccctcggtgaaccgatgctgtctacctcgctgatgctgcccggcagcgagtttaccgagtccgacccggaagagatcaaagatcgtctggagaaggtggtcgagctgattattcacggcggttatctcggccagcagccgaccaccgtggtcgacttaaccgaagatgcaccggaagtgattcgtgaaggcgtgggcgatgtaaagcctttcttgtaa

SEQ ID NO: 164098 - DNA, 894 bp, Enterobacter cloacae
atgggaagtgctttgagcgataccacctacgcgattatttatgatttacacagccatactcaggcctctgatggcctgctgacacccgaagccctggttcatcgtgccgttgaaatgcgcatcggcacgctggcgataaccgatcacgatacgacggatgccattccggcagcgcgcgccgagattgcccgctgcgggctggcactcaatctggtgtccggcgtcgagatttcgaccgtctgggaaaaccatgagattcatatcgttggcctgaacatcgatatagaccatccggcacttattgagtttttgcaagaacaaaaaacgcgtcgcaaccagcgcgcagagatgatcggcgagcgtctggaaaaggcacatattcctggcgcgctggaaggtgcgcaaaagctggcgaacggcggggcggttacgcgcggtcatttcgcccgttttctggtagaggcgggtaaagccacgacgatggcggatgtctttaaaaagtatctggcgcgcgggaaaaccggatacgttccgccacagtggtgtacaataaaacaagctattgatgtgattcatcattctggcggtaaggccgtgctggcccatccggggcggtataatctttctgctaaatggctgaaaaggctgctggcgcactttgccgaaaacggtggagaggcgatggaagtcgcccagtgtcagcaggcacccaatgagcgcgcgcagctcgcgacctatgcccgacagtacggcctgcttggctcacagggttctgatttccatcagccctgcgcctggatcgaactggggcgcaagctctggctgcccgctggcgttgagccggtctggcagctctgggaacagccgcagcaatttgaagagagggaagtatga

SEQ ID NO: 164099 - DNA, 1563 bp, Enterobacter cloacae
atgcaaacagccaaaccccatctcgaattgctgacctgcgaggcggcctatcgccacaacccgaccgcgctgtttcatcaggtgtgcggggctcgcccggcaacgctgctgctggaatctgcggacatcgacagcaaggacgatctgaaaagccttctgctggtcgacagcgcgttgcgcattaccgccttaggtgacactgtcactattaaggctttgtcagacaatggcgcatcgctgctgccgctgctggatgccgccctgccttcaggcatcgaaaatgaacgtcatccggaaatgcgcattctgcatttcccgccggttagccaactgttagatgaagacgcgcgcctctgttccctgtccgtctttgatgccttccgcctgctgcaaaacctggtcaccgttccgcacgatgagcgtgaagcgatgttctttggcgggctgtttgcttacgacctggtcgcgggatttgaagatttgccggaaaccgagcagggcaatcgctgcccggactattgcttctatctggccgaaaccctgctggtgatcgaccatcagaaacaatacacccgcattcaggccagcctgttcacgccttctggcgctgagaaaacccgtctggagcaccgcattgcccaactgcagcagcaaatgacggaagcgccgcctgcgctaccggtgcagcgcgtggaaaaaatgacctgcgatgtgaaccagaccgacgatcagtacggtgccgtggttcgccagatgcaaaaggcgattcgcgccggggaaattttccaggttgtaccgtcccgtcgcttctctctgccctgcccgtccccgctggccgcttacgacgtgctgaaaaagagcaacccaagcccgtacatgttctttatgcaggacaatgacttcacgctgttcggcgcctcgccggaaagctcgctgaagtacgacgccaccagccgccagattgaaatttacccgatcgccggaacccgtccgcgcggacgtcgcgcagacggctcgctggatcgcgatctcgacagccgcatcgagctggaaatgcgtaccgaccataaagaactctccgagcacctgatgctggttgacctggcgcgtaacgatctggcccgtatttgcaccccgggcagccgctacgtggcggacctgactaaagtcgaccgctattcgttcgtgatgcacctggtctcccgcgtggtgggcgagctgcgccacgacctcgacgtgctgcacgcctaccgcgcctgcatgaacatgggcaccctgagcggtgcgccgaaagtgcgcgctatgcagctgattgccgccgccgaagggcgtcgtcgcggcagctacggcggtgcggtgggctattttacggcccacggtgacctcgatacctgcatcgtcatccgctccgcctatgttgaagacggtattgccaccgtccaggcgggtgccgggattgttcttgattctattccgcagtctgaagctgacgaaacgcgcagcaaagcgcgtgcggtccttcgcgccattgctaccgcacaccatgcacaggagattttctga

SEQ ID NO: 164100 - DNA, 1596 bp, Enterobacter cloacae
atggctgacattctgctgctcgataatatcgactcctttacctataacctggcagatcagctgcgtgcgaatggccataacgtcgttatctatcgcaaccacgtcccggcgcagaccctgattgaccgtctggcaaccatgcaaaacccggtgctgatgctctcccccgggccaggcgcaccgagcgaagcgggctgtatgcccgaactgctaacccgcatgcgcggcaagctgccgattatcggtatctgccttggtcaccaggcaatcgtggaagcctacggcggttacgtcggccaggcgggcgagatcctgcacggtaaagcctccagcattgaacatgacggccaggcaatgtttgccgggctgccgaatccgcttccggtcgcgcgctaccactcgctggtcggcagcaacattcccgccgggctgacgatcaacgcctcgtttgaagggatggtgatggcggtacgtcacgacgcggatcgcgtctgcgggatgcagttccatccggaatccatcctgacctcccacggcgcccgcctgctggaacaaaccctggactgggcgttacagaagctggagcagaccaacaccctgcagccgattctggaaaaactgtaccaggcacaaaccctgagccagcaggagagccaccagctcttctccgccgtggttcgcggtgagctgaagccagaacagctggcggccgcgctggtgagcatgaaggtccgcggtgaaagcccacaggagatcgccggtgccgccacggccctgctggaaaatgccgccccgttcccgcgtccggactatccgtttgccgatatcgtcggcaccggcggtgacggcagcaacagtatcaatatttcaaccgccagcgcctttgtggccgcagcgtgtggtttaaaagtggctaagcacggtaaccgcagcgtgtccagccggtcaggctcgtctgatttactcgcggcattcggcattaatctcgatatgaacgccgaacgttcccgtgaagcgctggatgacctgggcgtctgcttcctgtttgcgccgaagtatcacaccggtttccgccacgcaatgccggttcgtcagcagcttaaaacccgcacgctgtttaacgtgctcggcccactgatcaacccggcccatccgccgctggcgctgatcggtgtctacagtccggaactggtcctgccgattgcagagacgctgcgcgtgttgggttaccagcgtgccgccgtggtgcacagcggcggaatggatgaagtgtcactgcatgcgccgacgctggtagccgaactgcgcgacggtgaaatcctgagctaccagctggaagccgctgactttggtttaaccccgtatcaccaggaagcgctggccggcgggacgccggaagaaaaccgtgacattctgacgcgcttattacaaggtaagggagaggttgcccatgaggccgccgttgctgccaacgtcgccatgctgatgcgtttgcacggcgaggaagacctgaaggccaacgttcaaaaagttctggatgtactgcgctccggtgcagcttacgatcgcgttaccgcacttgcggcaagagggtaa

SEQ ID NO: 164101 - DNA, 1359 bp, Enterobacter cloacae
atgcagaccgttttagcgaaaatcgttgccgataaggccatctgggtggaagcccgcaagcaacagcagccgcttgccagttttcagaatgacgtcgtcccgagcagccgtcgtttctatgacgccctgcagggtgcgcgcaccgcgtttattcttgagtgcaaaaaagcgtccccgtccaaaggcgttatccgtgacgatttcgacccggcgcgcattgccggtatttataagcatcatgcctcagccatctccgtgctgacggatgagaaatattttcagggcagcttcgattttctgccgatcgtcagcggcatcgcgccgcagccgatcctgtgcaaagactttattatcgacccttatcagatttggctggcgcgcttttaccaggccgacgcctgcctgctgatgctctcggtgcttgacgacgagcagtaccgccagctctctgccgtcgcgcacagcctgaaaatgggcgtgctgaccgaagtgagtaatgaagaggagctggagcgcgcgattgcgctggaagccaaagtggtcggcattaacaaccgcgatctgcgtgacctgtccattgacctgaaccgcacgcgccagctggcgccgcggctgggctctggcgtcacggtcatcagcgaatccggcattaacagctacgcccaggtgcgcgagctgagccacttcgccaacggtttcctgattggctccgccatgatggaacatgacgatctcaatgcggcagtacgtcgcgtgctgctgggtgagaacaaagtctgcggtttaacccgcgaacaggacgcccaggccgcgtatgaagccggagcgatttatggcgggctgatttttgtggattcctctcctcgcgcggtcagcgaagagcaggcgcgtaaggtcatcgccgcggcaccactcagctatgttggcgtgttccgcaatgcagatatcgccgaggtggttgaaaaagccgacgcgttatccctgagcgcggtgcagcttcacggcgatgaagatcaggcctatatcgatgccctgcgcgccacgctggcgccgcaggtacagatctggaaagcgcaacgcgttgacgatacgttgcccccgcgtaacctgaaccacgtggataaatacgttctcgataacggtcagggcggaaccggccagcgttttgactggtccctgctgaacggcgaaaagctggacaacgttctgctggcgggcggattaagcccggataactgtgtagaagccgcgaaaaccggctgcgcaggcctcgatttcaattcaggcgtagagtcccagccgggtagtaaagatgccagcaaactggcctcggtttttaaaactctgcgtgcatattaa

SEQ ID NO: 164102 - DNA, 1194 bp, Enterobacter cloacae
atgacgacattacttaacccgtattttggtgagttcggcgggatgtacgtcccgcaaatcctgatgcccgcgctgcgccagctggaagaagcgtttgtcagcgcacagaaggatccggcatttcaggcggaatttaccgacctgctgaaaaactatgcaggccgcccaacggccctgaccaaatgccgcaatctgacggaaggcacgaaaaccacgctgtatcttaagcgtgaagacctgctgcacggcggcgcgcacaagactaaccaggtgctgggccaggcgctgcttgcgaagcgtatgggcaaaaccgaaatcatcgccgaaaccggcgcaggccagcacggcgtggcctcggcgctcgccagcgccctgctcggcctgaaatgccgcatctatatgggggcgaaagacgttgagcgtcagtctccgaacgtcttccgtatgcgtctgatgggtgcagaagtgatcccggtgcacagcggctccgcgacgctgaaggatgcctgtaacgaagcgctgcgcgactggtctggcagctacgaaaccgcgcactatatgctcggtaccgcggcgggcccgcacccgttcccgaccatcgtgcgtgaattccagcgcatgatcggggaagagaccaaagcgcagatcctcgaaaaagagggtcgtctgccggatgcggtcatcgcctgcgtcggcggcggatctaacgccatcggcatgttcgcagactttatcgacgacacccgcgtgggtctgattggcgtcgagcctgcgggtcacggcattgaatcgggtgaacacggcgcgccgctgaagcatggccgcgtggggatctacttcggcatgaaatccccgatgatgcagaccgatgaaggccagattgaagagtcttactctatctccgctggcctcgacttcccgtccgtcggaccgcagcacgcctatctgaacagcaccggtcgtgcggactatgtctccattaccgatgacgaagcgctggaagcgttcaaaacgctgtgccgcagcgaagggatcatcccggcgctggaatcttcacacgctctggcccatgcgctgaaaatgatgaaagacaatccggaaaaagagcagctgctggtggtcaacctttccggacgcggtgacaaagatatcttcaccgttcacgatattctgaaagcacgaggggaaatctga

SEQ ID NO: 164103 - DNA, 810 bp, Enterobacter cloacae
atggaacgctacgataacgtatttgcagaactgaaatcccgccaggaaggcgcgttcgttcccttcgtcaccctgggcgatccgggccctgaacagtcgctgaagatcatcgacaccctgattgaatccggtgccgatgcgctggagctggggatcccgttctctgacccgctggcggatggcccgactatccagaatgcgacgctgcgcgcgtttgcttcgggcgtgacgccaacccagtgcttcgaaatgctggcagcgatccgtcagaagcaccccactatcccgattggcctgctgatgtacgccaatctggtgttcaaccgcggtatcgatgaattttacgccgagtgcgcccgcgtgggcgtcgactctgttctggtcgccgacgtgccggtcgaggagtccgcgccgttccgccaggcggcgatgcgtcacaacgtcgccccgattttcatctgcccgccgaacgccgatgacacactgctgcgccagatagcctcttacgggcgcggttacacgtatctgctctcccgcgcaggcgtgaccggtgccgagaataaagcggccctgccgctgcatcatctggtggaaaagctggccgagtaccatgccgcgccgccgctgcagggcttcgggatctcctctccggatcaggtcaccgcggcgattgacgcgaaggctgcgggtgccatttccggctctgcgattgtgaagatcatcgagaagaacgtggacaagcccgagcagatgctggccgagctgaaggcgtttgtgaccgccatgaaggcggcaacgcgtaaagcctga

SEQ ID NO: 164104 - DNA, 1212 bp, Enterobacter cloacae
atgtcatggcaatccttcaaacaggcttacctggttaagttctggtcacccgttccggccgttatcgcggcaggcattctctctacttattattttggcataaccggcaccttctgggccgtgaccggcgagttcacccgctggggtggtcaattgctgcaactcgctggcgtgcatgccgaagagtggggttactttaaactcattcatctggacggcaccccgcttacccgcatcgacgggatgatgattatcggcatgttcggcggctgtttcgcggccgcgctgtgggcaaataacgttaagttgcgtatgcccaaaagccggatccgcattttgcaggcggttgtcggcggcatgattgccggtttcggcgcgcgtctggcgatggggtgtaaccttgccgccttctttaccgggatcccgcagttttcgcttcacgcctggttctttgccgtcgccacggccatcggctcttactttggcgcaaaattcaccctgctgccgctgtttcgtattccagtgaaaatgacaaaagtcagcgcagcgtctccgttgacccagaagccctctcaggcccgccgccgtttccgcctcggaatgctggtctttttcgccatggtggcatgggcgctctgcaccgccctgaaccagcctaagctcggtctggcgatgctgttcggtgtgggttttggtctgctcattgaacgcgcgcagatctgctttacctccgcgtttcgcgatatgtggatcaccgggcgcacgatgatggcgaaggcgattatcgccgggatggcggtcagcgccatcggcatcttcagctatgtccaactgggcgtcgaaccgaaaatcatgtgggccggtcctaacgcggtcattggcggcctgttgttcggcttcgggatcgtgctggctggcgggtgtgaaaccggctggatgtatcgcgccgtcgaaggtcaggtgcactactggtgggtgggtctgggcaatgtgattggctcgacgatcctggcgtactgctgggatgacgtgtctcccgtcctggccacccgctgggataaggtcaacctgctgaataccttcgggcctctcggcggcctgctcgtcacctacgccctgctgttggtcgcttttttactggtcgtcgcacaggagagacgtttcttccgccgtgcgggcgttaaaacagaaacgcaggagaatgcagcatga

SEQ ID NO: 164105 - DNA, 234 bp, Enterobacter cloacae
atgaatgagatcgtgcctgattatcgtctggatatggttggcgagccctgtccatatccggcggtggctacgcttgaagcgctgccgcagcttaagaaaggtgaaattctggaggtggtcagcgactgcccgcagtccatcaacaacataccgctggatgcgaaaaaccacggttatacggtgctggatatccagcaggatggcccaaccattcgctatctgattcaaaaatga

SEQ ID NO: 164106 - DNA, 210 bp, Enterobacter cloacae; identical to SEQ ID NO: 125838

SEQ ID NO: 164107 - DNA, 633 bp, Enterobacter cloacae
atgaaaaaattagcggtggcagcccttgtattaagtagtctctctggcggcgcgtatgcgcatgaagcaggcgaattctttattcgtgccggttcggctacggctcgcccaactgaaggttcggataacgtgctgggaatgggcggttttaacgtcagtaataacacccagttaggtttaactttcacctatatggcgacggataacgtgggcgttgagcttctggctgcaacgccgttccgtcatcgcgtgggcctcgggcctaccggtgatatcgccacggttcaccatttaccgccaacgctgatggcgcagtggtacttcggtgactcaagcagcaaggtgcgtccttatattggcgccggtgtgaactacaccaccttctttgatgagaaattcaacgataccggtaaagaggcgggtctgacggatctcagcctgaaagattcgtggggcatggcggggcaggttggcctggattatctgattaaccgcgactggctgatcaacgcctcggtctggtatatggatattgatacggacgtacgcttcaaggcgggcggccagcagcaaagtatcagcactcgtctggatccgtgggtgtttatgttctctgcgggttatcgtttctga

SEQ ID NO: 164108 - DNA, 405 bp, Enterobacter cloacae
atgagtgatatcaacccgtgcatgacgtgcggagcctgttgtgcgtattttcgagtctctttctactgggccgaagccagcgatggcggtggtgccgttccggttcatcttaccgagccgttaaccccctttttgcgctgcatgagcggcacgaaccaaaagcaggcccgctgtgtggcgctacagggtgagcctggggtctcgacccgatgttccatctatgaggatcgccccagcccgtgccgggaatttgccatgtcgggggaggatggccaggtcaacgaagcctgtaaccgcgcccgcgcgcgggttggattaccgccgctttacaaagatatgcttttccatacaagccttgatgctgccacagcaggtgcatccggtgtacaattgccggctaattaa

SEQ ID NO: 164109 - DNA, 744 bp, Enterobacter cloacae
atgtctatcacggcgaagtctgtctaccgtgacacgggaaactttttccgcaatcagttcattacctttttactgatcgcgttgctttgcgcctttatcacggtggtgctgggccatgccttctcaccgagtgaagaacagattgccagcctgagccagggcgaccatcttgcgggtagcgtgggattgtttgagctggtgcaaaatatgacgccggagcagcagcaaatcctgctgcgcgcctctgccgcgtccacgttctcaggcctgattggtaatgcaattctggcgggcggcgttttgctgatgattcagctggtatcggcgggtcaccgcgtcagcgccttacgcgcgattggtgcgagtgcaccggtcttacctaagctgtttatcctgatctttttaaccacgatgctggtgcaaatggggattatgctggtcgtggtgccgggcgttttactggctatcgtgctcgcatttgcgccggtgatggttgtgcaggataagatgggaatttttaccgcgatgcgcagcagcatcagactggcatgggctaatatgcgtctggtggcgcccgccgtgatcggctggctgctggccaaaacgctcctgttattgtttgcaccgaattttgcggtattaacgcctaacgtcggcgccgtggtggcgaatacgctgagcaatctcatttcagcggtactgctcgtctatctgttccgcctgtacatgttaattcgtcagtaa

SEQ ID NO: 164110 - DNA, 540 bp, Enterobacter cloacae
atgaagcagtttcttgattttttaccgctcgcggtgtttttcgctgtctataagttgtacgacatttttgctgcaacaaaagcgttaatcgtcgtgaccgccgttgtgctgatctacagctggattcgctatcgcaaagtcgaaaaaatggcgcttatcacgttcgttttagtagcggtgttcggtggattgaccattgccttgcatgatgttgaatttattaagtggaaggtgactgttatttatgcgttgtttgcagcagcgctattgttcagtcaatggtttatgaaaaagccccttatccagagcatgttaggtaaagaactaacgctgccgcaggtggtctggtcgcgtctgaatactgcctgggcaatcttctttattctatgcggtctcgctaacatctatattgccttctggctgccgcaggatatctgggtcaactttaaggtctttggcctgaccgcgctgacgcttatcttcacgctgttaagcggcgtatacatctatcgccatatgccccaggacgacaaccactga

SEQ ID NO: 164111 - DNA, 396 bp, Enterobacter cloacae
atgacaacaactaacgcccctcagggcgaactggttttacgcacactggcaatgcccgctgacaccaatgccaatggcgatatttttggcggctggctgatgtcgcagatggatatgggcggcgcaattctggcaaaagagattgcccacgggcgcgtggtcaccgttagagtggacggcatgaccttcctgcgcccggttgcggtgggtgatgtggtttgctgctacgcgcgctgcgtgaagcgcggtaatacctccatttccatcaacatcgaagtctgggtgaagaaagtctcttctgagccgattgggcaacgctataaggccactgaagcgctgtttatttatgttgccgtggacagcgagggtaaacctcgtcaacttccgcaggcctga

SEQ ID NO: 164112 - DNA, 732 bp, Enterobacter cloacae
atgacttcgatgacccttgatttacctcgccgctttccctggccgacgctgctttctgtcgtgattcacggtgctgttgtggcgggtttgctgtatacctcggttcatcaggttattgaaatgcccgcgcccgcgcagccgatctcggtgacgatggtctcgccagcggatcttgaaccgccgcaggttgctcctccgccgccacagccggtggctgaaccggagccagaacccgagcccgttccggagccaccgaaggaagccccggtggtgatccacaaacctgaaccgaagccaaaacctaagccgaagccaaagccggtgaagaaggtcgaggagcgtccgaaacgcgaggaacgtccggtcgaaccgcgcgcgacccagccggtcgaaaatgcagcgccttcacgtccggtgatgaacaatacggcaacgacgtcaaagccaaccgtaaccgcgccagcgggcccgcgcgccgtaagccgcaaccagcctcagtatccggcgcgagctcaggccttgcgtattgaagggcgcgtacgggtgaaatttgacgtaactgcggatggccgcgtggataacgtggaaatcttgtctgcgcaaccttctaatatgtttgagcgcgaagtgaaatctgccatgcgcagatggcgctatgaaccaggcaagccgggcagcggattgatcgtcaatattgttttccgcctgaacggcggggcgcagatggaataa

SEQ ID NO: 164113 - DNA, 297 bp, Enterobacter cloacae
gtgttttacgtgatttactctgaagatgttgctgattcgctcgaaaaacgccagtctgtgcgccctgcgcatctggcacgtttgcagttgcttcaggatgaaggccgattactgaccgctggccccatgcctgcagtagacagcaacgatccgggtgctgccggtttctccggctccacggtcattgctgagtttgaatcccaggaagccgctcaggcctgggctgatgcagacccgtacgttgcagcgggcgtgtatgcaaaagtgacggtgagaccgtataaaaaagtgttctga

SEQ ID NO: 164114 - DNA, 954 bp, Enterobacter cloacae
atgcacagcgaaaccccggtagtcagtgttattcgacgttcctcgcgcctgatggtgcgagagttaggttttatgggttctaccctggcctcaacgaattactcgccttcggccgtccatactctggtcgaaattgccctacgaaaagagatgacggcgagtcagctggtacagctgctgggcctggaaaagtccagcgtcagccggatgctggctcgcctgattgccgcaggcgaactcgaggaggtcatttctaccgaggatgcgagagcaaagagcctcaggctgaccgcgaagggtcacgagacggtcagcaaaattaattccttcagcaatgagcgcgtggtcacagcaataaaacgtcttgctcctgcccagcagcagaccatttctgaggggctctccctttatgccaacgcgctgctggcgtgtcgggaggcgggcaatgatatgcagcccgatgagctgaagatagtgcaggggtatatcccgggcatgattggccgtatcgcggagatgcatggcagttattattcgcgggagcataattttggtcgcttcttcgaggccaaagtggcttcggggctggctgagtttagtgaaagactggagaagccctgtaaccagatttggctggcagtgctcaacgacaaaattgtcggctcggtggcgatcgatggcgaggatctggcgccgggtgaagcccatcttcgctggtttattcttgatgatggctgtcgggggcacggcgtggggaaaaaactgctgaatgaagccatgcggttttgcgacagcgccggtttttcagctatgcacctctggacgttcaataagctgaccgccgccaggcgtctgtacgagtcgtatgggtttacgctggtaaaagagtgggaaggcgatcagtggggaagccttattacagagcagcagtttacccggcacagaggcgcgtaa

SEQ ID NO: 164115 - DNA, 636 bp, Enterobacter cloacae
gtgtttgcggagtttggcgtactgaatttctggacgtatgttgttggcgcgttttttatcgtgctggtaccggggccaaataccctgtttgtgcttaaaactggaattggacacggcgttaaaaaagggtacctagccgccacgggtgtatttatcggcgatgcggtgctgatgtttcttgcctgggcgggcgtcgcggcattaatccagaccacgccggtactgtttaatatcgtgcgctatctcggcgccttctacctgctgtggctgggcggcaaaatgctctggtcggtcattacccgccagaatcacgctcaggaaagcggcaccgagcctgccagcacgatcatgaaacgttcgctggtgctgagcctgacgaatccaaaagcgattctgttctacgtatcgttctttgttcagttcatcgacgtgaatgcgcagaacaccggtacctctttccttatcctcgcgacgacgcttgagttgataagcttcatgtatatgagcttcctgatcttctccggtgcgtttgtcacgcgctatctcaaaacgaaaaagaaactggcaaagctggggaacgggctgatagggctgctgtttgtcgggtttgcggcgaggttagcgtcgctgcactga

SEQ ID NO: 164116 - DNA, 1461 bp, Enterobacter cloacae
atgacaaccttctacaccgtggtgagttggctggtcattttgggatactggctgttaatcgcgggtgtgacgttacgcatcctgatgaagcgcagagccgtaccctctgccatggcctggcttctgatcatctacatcctgccgctggtgggaattatcgcctatctctctttcggtgagcttcatctcggtaaacgccgcgccgagcgggcccgcgccatgtggccctccaccgcgaagtggctgaacgaccttaaagcctgcaagcatatctttgccgaggagaacagcagcgtcgcctcgtcactgtttaagctgtgcgagcgccgtcaggggattggcggcgttaagggtaatcagctccagctgctaacctcgtccgacgacgttatgcaggcgttaatccgcgatatccagctggcgcgtcataatatcgagatggttttctatatctggcagcccggcgggatggctgaccaggtcgcggaatctctgatggccgcggcgcgacgcggcattcactgccgtctgatgcttgactctgcgggcagcgtggcatttttccgcagtccctgggcagggatgatgcgcaatgccggtatcgaagtggtcgaggcgctgaaggttaacctcctgcgcgtgtttctgcgccggatggaccttcgtcagcaccgtaaaatgatcatgatcgataactatattgcctacaccggcagcatgaacatggttgacccgcgcttctttaaacaggactcgggcgtgggtcagtgggtggatttgatggcgcgcatggaggggccgattgccacctcgatgggcatcgtctactcctgcgactgggagatagagaccggcaaacgcatcctgccgccaccgccggacggcaatattatgccgtttgaagaggccagcggtcacactattcataccattgcttccgggccgggcttcccggaggatttgattcatcaggcgctgctgacggcgacctactcggcgcgtgaatatctgatcatgacgacgccctactttgttcccagcgatgacctcctgcacgcgatctgtaccgcggcgcagcgcggcgtcgatgtgagcattattttgccgcgcaaaaatgactcccttctggtgggctgggccagccgggcattctttagcgaactgctggctgcaggggtgaagatctaccagttcgaaggtggattgctccacaccaaaagcgtgcttgtcgacggcgagttaagcctggtgggaacggtgaacctggatatgcgcagcctgtggctcaactttgaaatcacgctggttattgatgatgccggctttggcggcgatctcgcggcggtgcaggatgattatatctcccgctcgcggctgctggatgccagactgtgggtaaaacgtccgctgtggcagagaattgccgaacgactgttttacttctttagtccgttgctgtaa

SEQ ID NO: 164117 - DNA, 330 bp, Enterobacter cloacae
atggaaatggatctgaacaatcgcctgaccgaagacgaaacgctcgagcaggcctatgacatttttctcgaactggcggttgataacctcgatcccgcagacgtgatcctctttaatctgcagttcgaagagcgcggcggtgccgaactgttcgacccttcagaagactgggctgagcatgtggatttcgacctgaaccctgacttcttcgccgaagtggtgatcgggctggccgatgaagacggtggcgaaattaatgatatcttcgctcgcgtcctgctctgccgtgagaaagaccacaagctgtgccatattctctggcgcgaataa

SEQ ID NO: 164118 - DNA, 870 bp, Enterobacter cloacae
atgatgtcagcccttattttttgcgaggtcactgtgtcgcgtttattcacgtcagcccgtcggcggctttatcatgttttattcgatcctgaaacgttatccggacggcgcttcgagggtctttgtggtttatttgcgctcctcagcgtggttatcatctttattgaatcgggtgccggaacgcaataccacctgacgtttgacgaatggcatgtctttgtctggcttgagctggcgattaccctggtgtttaccgctgaatatctcctccgagtgattgcctggcctaacccggcccgatatgttttcagcttctggggatttatcgatttagccaccattctgccgctctacgtcatgtggctgtggccggaaatcagcctgagctatgtctttgcctggcgagcgatgcgcgttattcgcgtattacgtattctgaaattactgcgctttatgccctcactgcgcatattctggagcgcaatcgtcagcgcccgtcatcagcttattctgttctattcgtttattgccattgtcatgattgtttttggcgcactgatgtatctgattgaggggccgaaatatggctttacgacgctcaatgcgtccgtctactgggcgatcgtgaccgtaacgaccgtggggtacggggatatcacgccccatacgccgctggggcgaattgtggcctcagtgctgattttgattggctattcggtcattgccattccgaccgggctgattaccacgcatatgagtagcgcatttcagagccgcaagcagcagcgcaaatgtccgcgatgtcatcagggggaacatgaactcaacgcgcgtttttgtcaccgctgcggaaatccgttgccggagtaa

SEQ ID NO: 164119 - DNA, 1005 bp, Enterobacter cloacae
atgaacgcattagatgaaaaacgcaatgtcctgctcgaaattgctgaccttaaagtgcatttcgacatcaaggacggcaaacagtggttctggcagccgtcgaagaccctgaaagcggtggacggcgtcacgctgcgtctgtacgaaggggaaaccctgggcgtggtgggcgagtccggctgcggtaaatcgacctttgcgcgcgccattatcggcctggtaaaagccaccgacggcaaagtggcctggctgggtaaagatctgctgggcatgaagcccgacgagtggcgagacgtgcgcagcgatatccagatgattttccaggatccgctggcgtcgttaaacccgcgtatgaccatcggtgagatcattgccgagccgctgcggacctatcatccgaagatgtcccgccaggaagtgcgcgatcgtgttaaggcgatgatgctgaaagttgggctgttgcctaacctcatcaaccgctaccctcacgagttctctggcggtcagtgtcagcgtattggtattgcgcgcgccctgatccttgaaccgaagctgattatctgtgatgagccggtttccgcgctcgacgtctccattcaggcgcaggtggttaacctgctgcagaagctgcagcgcgaaatggggctgtcgctgatcttcatcgcgcatgacctggccgtggtgaaacacatctctgaccgcgtgctggtgatgtatctggggcacgccgtggagctgggcacctatgacgaggtgtaccataatccactgcacccttacaccaaagcgctgatgtcggcggtgccgatccccgatcccgatctggaaaagaataagaccatccagcttctggaaggggaattgccttcaccgattaacccgccgtcgggctgtgtcttccgcacgcgctgcccaatggccgggccggaatgtgcgaaaacgcggccggttctggaaggcagtttccgacatgcggtttcctgcctgaaagtagacccgttataa

SEQ ID NO: 164120 - DNA, 1014 bp, Enterobacter cloacae
atgacaatgattgaaacggcaaccgcgccacaggcgcagcagcggagcgaccttctgctggacgtaaaagatcttcgcgtcacctttaagaccccggacggggatgtgaccgccgtgaacgatcttaacttcaacctgcgcgcgggtgaaacgctcggtatcgtgggggaatctggttccggtaaatcccagaccgcctttgcgttaatgggcctgctggccgctaacggtgtgattggcggttccgcgaaattcaacggtcgtgaaatcctcaacctgccggagcacgagctgaacaagctgcgcgccgagcagatctcgatgattttccaggatccgatgacctcgctgaacccgtacatgcgcgtcggtgagcagctgatggaagtgctgatgctgcataaaggtctgggcaaagccgaagcctttgaagagtcggtcaaaatgctcgatgcggtgaaaatgccggaagcgcgcaagcgtatgcgcatgttcccgcacgagttctccggcggtatgcgtcagcgcgtgatgattgcgatggcgctgctgtgccggccaaaactgctgattgccgacgaaccgaccaccgcgctggacgttaccgttcaggcgcaaatcatgaccctgctgaacgagctgaagcgtgagttcaacacggcgattatcatgatcacccacgacctgggcgtggtggcgggcatctgtgacaaagtgctggtgatgtatgccggtcgtaccatggaatacggcaaggcgcgcgacgtgttttatcagccagcgcatccttactcgattggcctgctgaacgcggtgccgcgtctcgatgcggaaggggaatccctgctgaccattccgggcaacccgccaaacctgctgcgcctgccgaaaggctgtccgttccagccgcgctgtccgcacgcgatggaaatctgcaatagcgcaccgccgctggaagagtttgcaccaggccgtctgcgcgcctgctttaagccgcaggaggagctggtatga

SEQ ID NO: 164121 - DNA, 909 bp, Enterobacter cloacae
atgatgttgagtaagaaaaacagcgaggcgctggaaaacttcagtgaaaaactggaagtggaaggtcgtagcctctggcaggacgcgcgtcgtcgttttatgcacaaccgcgcggcggtggcgagtctggtggttctggtgatcatcgcgctgtttgtgaccctggccccgatgctgtcgcaatttacctatttcgacaccgactggggcatgatgtccagcgcgccggatatggagtctggccactattttggcacggactcatccggacgtgacctgctggtgcgcgtcgctatcggcgggcgtatctcgctgatggtcgggattgctgccgcgctggtggcggtgatcgtcgggacgctctatggctcactgtccggctaccttggcggcaaagtggactcggtgatgatgcgtctgctggaaatcctgaactccttcccgtttatgttcttcgtcatcctgctggtgaccttctttggtcagaatatcctgttgatcttcgtggccatcgggatggtgtcatggctggatatggcgcgtattgttcgcggccagacgctgagcctcaaacgcaaagagtttatcgaagccgcgcaggtcggcggtgtctctaccgggaatatcgtggttcgccatatcgttcctaacgtgctgggcgtggtggtggtctatgcctcactgctggtaccaagcatgatcctgtttgaatccttcctgagcttcctcggtctgggtacgcaagagccgctgagcagctggggcgcgctgctgagtgacggtgcaaactcaatggaagtatcaccgtggctgctgttatacccggcgggtttcctggtcgttaccctgttttgttttaactttatcggcgatggcctgcgtgatgccctcgacccgaaagaccgttaa

SEQ ID NO: 164122 - DNA, 921 bp, Enterobacter cloacae
atgttgaaatttatcctacgtcgctgtcttgaagcgattccaacgctatttattctcatcacgatttccttcttcatgatgcgccttgcgccgggaagtccatttaccggtgagcgtacgctgccgccagaagtgatggcgaatatcgaagcgaaataccacttaaacgatcctatctctacccagtacttcaattacctgaagcagctggcccacggtgattttggaccgtcatttaaatataaagactattccgttaacgacctggtggcgtccagcttcccggtttcggcgaaattgggtgctgcggcattcattctggccattgttttcggggtcaccgcaggcgtcatcgccgcgctcagacaaaataccaaatgggattatgccgtaatgggggtggcaatgaccggggtagtcatacccagcttcgttgtcgcgccattactggtgatgatatttgccattacgctgaagtggctgcctggcggcggctggaacggcggggcattaaagttcatgattttgccaatggtggcattatccctggcgtacatcgccagtatcgcgcgtatcacccgaggttcaatgatcgaagtgctgcactcgaacttcattcgtaccgcgcgcgcgaaagggctgccgatgcgtcggattatcttccgccacgcgctcaaaccggcgctgttgcccgtgctctcctacatgggaccagcattcgtcgggatcatcaccggctcgatggttatcgaaaccatttacggcctgccgggcattggccagctgtttgttaacggcgcgcttaaccgcgactattcgctggtactgagcctgaccattctcgtcggtgcgctgaccattctctttaacgctatcgtcgatgtcctttacgccgtcatcgacccgaaaatccgttactaa

SEQ ID NO: 164123 - DNA, 1632 bp, Enterobacter cloacae
atgtccatcatcacaaaaaaaaatctggtagcggcggggattttaactgcgctaatcgcgggaaacgctgcaatggctgcggacgttcctgcaggtgttcagctggcggagaagcagacgctggtgcgtaacaacggtgcggaagttcagtctcttgacccgcacaaaattgaaggtgttcctgagtctaacgttaaccgcgacctgttcgaaggcctgctggtaactgacgtagacggccacccggcaccgggcgtggcagaaaaatgggaaaacaaagatttcaaagtctggaccttccatctgcgtaaagatgcgaaatggtccgacggtacgccggtgacggctgaagatttcgtttatagctggcagcgtctggcgaatccaacgaccgcctctccgtatgcgagctacctgcaatatggccatattgccaatattgatgacatcatcgcgggcaaaaaaccgatcaccgatctgggcgttaaagcgatcgatgccaataccttcgaagtcacgttgagcgaacctgttccgtacttctataagctgctggttcacccgtccgtctccccggtaccaaaatccgcggtggaaaaatttggtgaaaaatggacccagcctgccaatatcgtgaccaacggcgcctataagctgaaagactgggtggtcaacgagcgtatggtgcttgagcgtaacccgcaatactgggacaacgctaaaaccgtcattaatcaggtgacctacctgccaatttcttccgaagtgactgacgtcaaccgctaccgcagcggcgaaatcgacatgacctataacaacatgccgattgaactgttccagaagctgaagaaagagatcccgaaagaagttcacgtcgacccgtacctgtgcacctactactatgaaatcaacaaccagaaagcaccgttcaccgacgtacgtgttcgtactgcgctgaagctggcactggatcgcgatatcatcgtgaacaaagtgaaaaaccagggcgatctgccggcatacagctatacccctccatacaccgatggcgcaaaactgaccgagccagactggttcaaacagacgcaggaagagcgtaacgcagaagcgaagaaactgctggccgaagcgggctataccgccgataagccgctgaccttcagcctgttatacaacacgtccgatctgcacaaaaaactggctatcgccgtcgcctcgatctggaaaaagaacctgggtgcgaacgtgaagctggagaaccaggagtggaagaccttcctcgacagccgtcatcagggcacctttgacgtggcgcgtgccggctggtgtgcggactataacgaaccgacctccttcctgaacaccatgctgagcgacagctcaaacaacaccgcgcactataagagcccggcatttgacaagctgattgccgacacgctgaaaaccactgacgaagcacagcgtactgaactgtactctaaagctgagcagcagctggataaagattccgcgatcgttccggtttactactacgttaacgcccgtctggtgaaaccgtgggtaggtgggtacaccggtaaagacccgatggataatatctacgttaaaaacttgtatattatcaagcattaa

SEQ ID NO: 164124 - DNA, 648 bp, Enterobacter cloacae
gtgatccaaacgctctttgattttccaacgtattttaaattttttattggtttgtttgccctggtcaacccggtggggatcattcctgtcttcattagtatgacgagttaccagacagcggcggccaggaataagaccaacctcaccgctaacctgtcggtggcgatcatattgctcacctctctttttctgggtgacgccattctccagcttttcgggatttcgatagattctttccgcattgcaggtgggatcctggtcgtgaccatcgccatgtccatgatcagcggtaagcttggcgaggataagcagaataaacaagagaagtcagaaaccgccatccgcgaaagcattggcgttgtgccgctggccttaccgctgatggccggtcctggggccatcagttcaaccattgtctggggcacgcgctatcatagcctgatgcacctgattggcttttccgtggctattgccatttttgcgctctgctgttggggcgtgttccgcatggcaccctggctggtgcgcttgctgggtcagacgggcatcaacgtcattacgcgtatcatgggcctgttgctgatggcgttagggatcgaattcatcgtaacgggtattaaaagcattttccccggattattgcattaa

SEQ ID NO: 164125 - DNA, 2679 bp, Enterobacter cloacae
atggctgttactaatatcgctgaactgaacgccctcgtcgagcgcgtgaaaaaagcccagcgtgaatatgccaatttcacccaagaacaggttgataaaatcttccgcgcggccgcactggctgctgcagatgctcgaatccctctcgctaaaatggccgttgccgaatccggcatgggtatcgttgaagataaagtgatcaaaaaccactttgcttcagagtatatctacaacgcctataaagatgagaaaacctgtggcgtgctgtctgaagacgacaccttcggtactatcaccatcgctgaacctatcggcattatctgcggtatcgttccgaccactaacccaacgtctaccgctatcttcaaatcactgattagcctgaagacccgtaacgcaatcatcttctctccacacccacgtgcgaaagacgcgaccaacaaagctgcagatatcgtcctgcaggccgctatcgctgcgggtgcaccaaaagacctgattggctggatcgaccaaccttctgttgagctgtccaacgcgctgatgcatcacccggacattaacctgattctggcgaccggtggtccaggcatggttaaagctgcatacagctccggtaaaccggctatcggtgtgggcgcgggtaacacccctgttgttatcgacgaaactgctgacatcaaacgtgctgtcgcgtctgtactgatgtctaaaaccttcgataacggtgtaatctgtgcatctgaacagtctgttgtggttgtggattccgtatatgacgcggttcgcgaacgtttcgccagccacggcggctacctgctgcagggcaaagagctgaaagcggttcaggacatcatcctgaaaaatggcgcgctgaacgccgctatcgtgggtcagccagcctacaaaattgctgaactcgcaggctttaccgttccggcaaccaccaaaatcctgatcggtgaagtgaaagttgttgacgaaagcgagccgttcgcacacgaaaaactgtctcctacgcttgccatgtaccgtgcgaaagatttcgaagaggcggtagagaaagcggagaagctggttgccatgggcggtatcggtcacacctcttgtctgtacactgaccaggataaccagccagagcgtgttgctcacttcggtcagatgatgaaaaccgcacgtatcctgatcaacacccctgcttctcagggtggtatcggtgacctgtacaactttaaactcgcaccttccctgactctgggttgtggttcctggggtggtaactccatctctgaaaacgttggtccaaaacacctgatcaacaagaaaaccgttgctaagcgagctgaaaacatgttgtggcacaaacttccgaaatctatctacttccgccgtggctctctgccaatcgcgctggatgaagtgattactgatggccacaaacgtgcgctcatcgtgactgaccgtttcctgttcaacaacggctacgctgaccagatcacctctgtgctgaaagcggctggcgtcgaaactgaagtgttcttcgaagttgaagctgacccaaccctgagcgtggtacgtaaaggtgctgaactggctaactccttcaaaccagatgtgattatcgcactgggtggtggttccccaatggacgccgcgaaaatcatgtgggtgatgtacgagcatccagaaactcacttcgaagaactggcgctgcgctttatggatatccgtaaacgtatctacaagttcccgaaaatgggcgtaaaagcgaaaatgatcgcggtcaccaccacttccggtaccggttcagaagtcacgccattcgcggtagtaacagacgatgcaaccggtcagaaatacccactggctgactatgcgctgacgccagacatggctatcgttgatgcgaacctggttatggagatgccgaagtcactgtgtgcattcggtggtctggatgcggtaactcacgccctggaagcctacgtttctgtactggcatctgagttctctgacggtcaggctctgcaggctctgaaactgctgaaagaaaacctgccagcgtcctacaacgaagggtctaaaaaccctgtagcacgtgaacgtgtccacagtgccgcaaccatcgccggtatcgcgtttgccaacgccttcctgggtgtttgccactcaatggcgcacaaactgggctcacagttccacattcctcacggtctggcgaacgccctgctgatcagcaacgttatccgttataacgctaacgacaacccaaccaagcagactgctttcagccagtacgaccgcccacaagcacgtcgtcgctatgctgaaatcgctgaccaccttggtctgagcgcaccgggcgaccgtactgctgccaagattgagaaactgctggcatggctggaaagcctgaaagctgaactgggtattcctaagtcaatccgtgaagcgggcgtacaggaagctgacttccttgctcacgtagataagctgtctgaagatgcattcgatgaccagtgtactggtgctaacccgcgctacccactgatctccgagctgaaacagattctgctggatacctactacggtcgtgagttcaaagaaggtgacgttgccgctgtgaaaacagaagcacctgtcatcaaagctgacaagaaagcgaagaaaagcgcttaa

SEQ ID NO: 164126 - DNA, 615 bp, Enterobacter cloacae
atggcacaactttatttctactattcggcaatgaatgccgggaaatccaccgcgctgctgcaatcctcgtacaattatcaggagcgagggatgcgtaccgttgtttatacggcggaaattgacgatcgctttggcgcggggaaggtgagctccagaatagggctctcgtcgcctgcaaggctgtttaacccgaaaaccgatctgtttgaagacattcgtgcagaacatgctgcgcagcccattcattgtgtcctggtcgatgagagccagtttctgacgcgtgaacaggtccatgccctgtcagaggtagtcgatgagcttgatatccccgtgctgtgttatggcctgcgcacggatttccgcggcgagctttttgaagggagccagtatttgctcgcctggtcggataaacttgtcgaactgaaaaccatctgcttctgcggtcgtaaagccagtatggtacttcgtcttgaccaggccgggaaaccttatgcagatggcgagcaggtggtgataggcggcaatgaacgctatgtttcggtctgccgtaagcattataaagaagcgctatctgtaggctcgctgacggcgattcagcacgacaacagaaaataa

SEQ ID NO: 164127 - DNA, 414 bp, Enterobacter cloacae
atgagcgaagcacttaaaattctgaacaacatccgtactcttcgtgcgcaggcaagagaatgcaccctcgaaacgcttgaagaaatgctggaaaaattagaagttgtagttaatgaacgtcgcgaagaagaaagcgctgctgcggctgaaatcgaagaacgtactcgtaaactgcagcaatatcgtgaaatgctgattgctgatggtatcgatccaaatgaattgctgaacagcatggctgccgctaaaaccggtactaaagcaaagcgtgctgcccgtcctgctaaatatagctacgttgatgagaacggcgaaactaaaacctggactggccagggtcgtactcctgctgttatcaagaaagcgatggatgagcaaggtaaacagctggacgacttcctgatcaaggattaa

SEQ ID NO: 164128 - DNA, 909 bp, Enterobacter cloacae
atggctgccctaaattcgaaagtcagaaaggccgttatcccggtagcgggattggggaccaggatgttaccagcaaccaaggcgattcctaaagagatgctgcctctggttgataagccattaatccagtatgtcgtgaatgaatgtattgcagccggcatcactgaaattgtgctggttacgcattcatctaaaaactctatcgaaaaccatttcgatacaagctttgaacttgaagctatgctggaaaagcgcgttaagcgtcagctgttagaagaagttcagtctatttgccctccacacgtcaccattatgcaggttcgtcaggggctggcgaaaggtctgggccacgctgttatgtgcgcacacccagtcgtgggtgatgagcctgtagcggtaattctgcctgacgttattctggacgaatacgaatccgatctttctcaggataacctggctgaaatgatcaagcgtttcgacgaaaccggcagcagccagattatggttgagcctgttgaagacgtaacggcatacggtgtggttgactgcaaaggcgttaaccttgagccgggtgagagtgtgccaatggtgggcgtcgtagagaagcctaaagccgacgtagcgccttcaaaccttgctgttgtaggtcgctatgtcctgagtgctgagatctggcctctgctggcgaaaacgcctccaggagcgggtgatgagatccagctgacggatgccatcgatatgctgatcgagaaagagaccgttgaggcctaccatatgaaaggtaagagccatgactgcggtaataagctcggttatatgcaggcgtttgttgaatatggtatccgccacaataccctcggcgaagaatttaaaacctggctcaaagagagcgtaggtattaagaaataa

SEQ ID NO: 164129 - DNA, 1014 bp, Enterobacter cloacae
atgacgcagccattggccggaaaacacattttgattgttgaagacgagcccgttttccgatcgctactggattcgtggttatcctcgctgggcgcaatgacgtcactggctgaagatggcatcgacgccctggaaaaaatgatcagcattacgcccgatttgatgatttgcgacattgcgatgccgcgcatgaatggactgaagctggttgagcatctgcgtaacgaaggcaatcagacgccgattctggtcatctctgccaccgaaaacatggcggatatcgcaaaagcattacgtctaggggtacaggatattctgcttaaaccggttaaagatttgaaccggctgcgagaaacggtcttagcgtgcctttatccgaatatgtttaattcccgggttgaggaagaggaacgtcttttccaggactgggacgctctggtgagtaatccgcctgctgcggcgaaactgttgcaagaactccagccgcccgtccagcaaactatttcccactgtcgcgtaaattatcggcagctggtggccgctgaccagcctgggctggtgctggatattgcgccactgtcagattctgaccttgcgttttattctctggatgtcacccgggcgggggataacggtgtattagcggcgttgcttcttcgtgcgctatttaatggtttgttgcaggaacagttatcccatcagggacaacggttgccggagttaggcagtttactcaaacaggtaaaccagctttttcgtcaggccaatttgcctggacagtttccgctattggtcggctattaccacagcggtttaaaaaatctgatcctcgtttcagccggtctcaatgcatcactgaataccggtgaacaccatattcaggtgagtaacggtgtaccgcttgggacgttgggaacggcgtatcttaatcaaattagccaccgctgttcctcgtggcagtgccaaatttggggcgccggggggcggctacgcttaatgttgtccacggaataa

SEQ ID NO: 164130 - DNA, 903 bp, Enterobacter cloacae
atgagaaaggttaaaattgggctggcgctgggttcaggtgccgcccggggatggtcacacatcggcgtgattaatgccttaaatgagatgggcattaccgtcgatattgttgcagggtgctcaatcggatcgcttgtcggctccgcttacgcgtgcgggaagcttccggagctcgagacgtgggtgcgctccttcagctactgggacgtgctgcgtctgatggacctctcctggcagcgtggtggactgctgcgcggcgaacgcgtctttaaccagttccgccaggttatgcccctcgaagacttcactgattgtcagatgcctttcggcgccgtcgcgacgaacctcagtacaggtcgcgaactctggctaaccgaaggggatatccatcttgccgtgcgtgcctcctgcagtatgccgggactcatggcgcctgtcccacacaacggttactggcttgtcgatggtggcgtcgttaacccggttcccatctctctgacgcgtgcaatgggtgctgacatcgtgattgccgtcgacctgcagcacgacgcccacctgatgcaacaggatctcatgccggtcaacctccagagcgaagatgctgagggcgagaaactggcctggcacgagcgcctgcgcggaagaatcgggcgtatgaccgcacgtcgttcggttgctgcgccgacggcgatagaaatcatgaccacgtcaattcaggtactcgagaatcgccttaaacgtaaccgtatggcaggcgatcctccggatattcttattcagccgtactgtccgcaaatctctactcttgatttccatcgggctgaggccgccatcgcagcgggctcgttagccgtcgaaaagaaaatggacgaattgttgccttttgtgcaaaccgcacgttaa

SEQ ID NO: 164131 - DNA, 360 bp, Enterobacter cloacae
atgcgttcacggtacactgcttttgtgatcaaagacgcagactacctgattaaaacctggcatccatcctgccacgcagccgatttcaaacaggacatcgaagccgggtttgcgaacacgcagtggctcggccttaccgtctatgaatccgcaacagacagtcatgttgacgaaggttacgtcagctttgttgcccgttttaccgagaacgctaagcctggcgccattatcgagcgttcccggttcttaaaggaacgcgggcaatggtattatattgacggaacgcgtccacagtttggtcgtaacgatccctgcccgtgtggttcaggtaaaaaatttaaaaagtgttgcgggcagtaa

SEQ ID NO: 164132 - DNA, 843 bp, Enterobacter cloacae
atgcaatcattacaacgtaaagttctgcgcaccatctgtcccgatcaaaaagggctgatcgcacgaattaccaacatttgctacaaacatgaactgaatatcgtgcagaacaacgagttcgttgaccaccgtaccggccgcttcttcatgcgtaccgaactggaaggtattttcaacgacaccaccctgctggccgatctggacagcgcgcttccggaaggctccgtgcgcgagctgacccctgcgggccgacgccgcatcgtgatcctggtgactaaagaagcacattgcctgggtgacctgctgatgaaagccaactacggcggtctggatgtcgaaattgcggcagttattggcaaccatgagacgttgcgctcgctggtcgagcgctttgatattccgttcgagctggttagccatgaaggccatacgcgtgaagaacacgacgacctgatggcgcaggccattgaagcgcataacccggactacgtggtgctggcgaaatacatgcgcgtgttaacgccgtctttcgtggcgcgtttcccgaacaagatcatcaacatccaccactcgttcctgccggcctttattggtgcgcgtccataccaccaggcgtacgagcgcggcgtgaagatcatcggcgcgacagcccactacgtgaatgacaatctggacgaaggtcccatcatcatgcaggacgtgattcatgtggatcacacttacaccgctgaggacatgatgcgtgcagggcgtgacgttgagaagaatgtgttaagccgcgcgctgtatcaggtactggcccagcgtgtcttcgtttacggcaacagaaccatcattctttaa

SEQ ID NO: 164133 - DNA, 444 bp, Enterobacter cloacae
atggaatgccttatcgatgatatcgaccgacaaattttagcctgcctggttgaggatgcgcgcatgtcgttgaaggtgctcagcggccgcatcggtctgacgtcccccagtacggcagaacgcctgaagcggctggaagagcgcggtgtgattcaggggtatggggcgcgggtgaatctggcggcgctggggtatacgctgcaggcgctggtgcgcgtacggccgttgccagggctgttgcataaggtggataagtatattcaggcgatgccggagtgtattgagagcgacaaagtcaccggggaagattgctttgtgattaggctggtggtgcgatcgatagaacaactggatgcgctgctggacggtctggcagagcatgctcagtgtaatacgtcgattgtgaagagttcgccggtcaggcgtcgcttgcctccgatgtag

SEQ ID NO: 164134 - DNA, 897 bp, Enterobacter cloacae
atgcgtgatttccataaaggcgtgtggcaaatgagcctggcgatgttaatttccggctctatcggcgcgtttgttttgctctccggtctgccggtgacggaagtggtgttctggcgctgtcttatcggggctatggcgctatttatttttatccgggcaagtcaaaagcccttcagccccctcacccgcaccacgctgctgctggctattcttggcggcgtggcgctcgtggtgaactggctgctgctcttcgcggcctatgagcgcatctcaattggtctttcaaccgtggtctataatacccagccttttatgctggtcttgatggggatgtttctgggcgaacgcgtcagcctggtgaaatggggctggctattcctcgcctttggcggcgtggtgatcctgctctccagcgagctcaccggcgcgcatggcagcgaatggctcaccggaataggtttggccatggccgcggccttcttctacgcgctgacggcaatcattgcgcgcaaactgaaaacaatcgcaccgcagcatattgcctttatccaggtgctgaccggcgtcgtgatgcttttgccgtttgccagcctgccgtcattttccggtgatttcccctggccgatgctgctgacgctcggcattgtccataccggcattatgtaccagctgctctacagcgcaattcagaagctgcctacgcccatcaccggctccctgtcgtttatctatccggtggtggcgattgttgtcgataatctggtgttcggacacgcgcttaatctgacgcagctggcgggcggcgcgctgatcctgtttgctgccgcgggcaacaacctgggctggggcgaaaaaaaaccccgcgagcgcggggttagtatcaaaacggcgaattag

SEQ ID NO: 164135 - DNA, 678 bp, Enterobacter cloacae
atgcacttcctgaatatgttcttctttgacatttacccgtatatcgcgggcaccgtgttcctggtgggaagctggctgcgttacgattatggccagtacacctggcgtgccgcctccagccagatgctggaccgcaaggggatgcacgtggcgtctaacctgttccacatcgggattctgggcatttttgccggtcacttcctcgggatgctgacgccgcactggatgtatgaagcgtggctgccgattgaggtgaagcagaagatggcgatgatcgcgggcggtgcctgcggcgtgatgacccttgttggcggcctgctgctgctcaagcgtcgtctgttcagcccgcgcgtgcgtgcgaccacaaccgcagcggatatcctgatcctctccctgctgatggtacagtgcgcgctgggtctgctgaccattccgttctcggcgcagcatatggacggaagcgaaatgatgaagctggtcggctgggcgcagtccgtggtgaccttccacggcggagcatctgagcacctggacggcgtggcgtttatcttccgcgttcacctggtgctggggatgacgctgtttgtgctgttcccgttctcccgcctggtccacatctggagcgcgccggtggagtacctgacgcgcaaataccagattgtacgcgcccgtcgctaa

SEQ ID NO: 164136 - DNA, 711 bp, Enterobacter cloacae
atgattgaactcgtcattgtttcgcgtctgctcgagtacccggatgctgcgctggcgcagcaccagcaggagctctttgatgcgcttgcggcatctgaaaagctggataaagaagatgcccagaagctgggcgttttcctccgtgacctgctggcgcgcgatcttcttgatgcgcaggcggactacagtcagctgtttgatcgggggcgtgcgacctcgctgctgctgttcgaacacgttcacggtgaatcccgcgaccgcggtcaggcgatggttgacctgatggcacagtacgagcagcacggcctgcagctcgacagccgcgagctgccggatcacctgccgctctatctggaatatctggcgcagctgccaaaagaagaggcgctgggcggtctgcaggacatcgcgccgatcctggcgctgctcggcgcgcgtcttcagcagcgtgagagccgctacgcggtgctgttcgatctgctggtgaagctcgccaacgcctctgtcgacagtgaaaaagtggcggagaaaatcgccgatgaggcccgtgacgatacgccacaggcgctggatgcggtctgggaagaagagcaggtcaaattctttgctgaccagaactgcggcgagtctgaaatcgctgctcaccagcgccgttttgccggcgcggttgccccgcaatatttgaatatctctaacggaggacggcactaa

SEQ ID NO: 164137 - DNA, 1536 bp, Enterobacter cloacae
atgaaaattcgttcacaagtcggcatggtgctgaatctggataaatgcatcggctgccatacctgctcggtcacctgtaaaaacgtctggaccagccgtgaaggtatggaatacgcctggttcaacaacgtggaaagcaagccgggcaccggcttcccgaccgactgggaaaaccaggagaagtggaagggcggctggatccgcaaaatcaacggcaagctgcagccgcgcatgggtaaccgcgcttggcttctgggaaaaatctttgctaacccgcacctgccgggcatcgaggattactacgagccgtttgactacgactaccagaatctgcacaacgcgccggaaggtaaacaccagccgatcgcccgtccccgctcgctgatcaccggtcagcgcatggacaaaattaccagcggtccaaactgggaggagattctgggcggcgagttcgaaaaacgcgccaaagaccagaacttcgagaacatgcagaaggcgatgtacggccagttcgaaaacaccttcatgatgtatctgccgcgcctgtgcgagcactgccttaacccggcgtgcgtggcgacctgcccgagcggcgccatctacaagcgtgaagaagacggcatcgtgctgatcgaccaggacaagtgccgcggctggcgcatgtgcatcaccggctgcccgtacaaaaaaatctacttcaactggaagagcggtaagtccgagaagtgcatcttctgctacccgcgtatcgaagccggtatgccgaccgtctgctccgaaagctgcgtaggccgtattcgctacctcggcgtgctgctgtacgacgcggacgcgattgaaaacgccgcgagcaccgagaacgagaaggatctgtatcagcgtcagctggacgtgttcctcgacccgaacgatccgaaggtgattgagcaggcgctgaaggacggcattccgcagagcgtgattgacgccgcgcagcagtctccagtgtacaaaatggcgatggactggaagctggccctgccgctgcatccggaataccgcacgctgccgatggtctggtacgtgccgccgctgtcgccgattcagtctgccgctgacgcgggtgagctgggcagcaacggcattctgccggacgtggagagcctgcgtattccggttcagtacctggccaacctgctgaccgcaggggatacccagcccgtactgctggcgctgaagcgtatgctggcgatgcgccacttcaagcgtgccgaagccgtggacggcgtaaccgacacccgcgcgctggaagaggtcggtctgaccgaagcgcaggcgcaggaaatgtaccgctatctggcgattgccaactacgaagaccgtttcgtggtgccgagcagccaccgtgagctggcccgcgaggccttcccggagaaaaacggctgtggctttacctttggcgacggctgccacgggtcagacagcaaattcaacctgttcaacagccgtcgcatcgacgccatggatgtgaccagtaaaacggagccgcactcatga

SEQ ID NO: 164138 - DNA, 3744 bp, Enterobacter cloacae
atgagcaagtttttggaccggtttcgctacttcaagcagaagggcgaaacgtttgccgatgggcacggccaggttctggataccaaccgggactgggaagacggttaccgccagcgctggcagcatgataaagtcgtccgttctacccacggcgtaaactgcactggctcatgtagctggaagattttcgttaaaaacggtctggtgacgtgggaaatgcagcagaccgactacccgcgcacccgtccggatatgccaaaccatgaaccgcgcggctgcccgcgcggcgccagctactcctggtatctctacagcgccaaccgtctcaaatatccgctgatgcgtaaacgcctgatgaaaatgtggcgtgaagcgaaagtgcagcacagcgatccggttgatgcgtgggcatccatcatcgaggacgccgacaaagcgaaaagcttcaagcaggcgcgcggtcgcggtggtttcgttcgctcttcctggaaagaggtgaacgagctgattgccgcctccaacgtctacaccgtgaaaacctacggtcctgaccgcgtggcaggtttctcgccaatcccggcgatgtcgatggtctcttacgcttccggcgcgcgctatctctccttaatcggcggtacctgcctgagcttctacgactggtactgcgacctgccgccggcgtctccacagacctggggcgaacagaccgacgtaccggagtccgccgactggtacaactccagctacatcatcgcctggggctcaaacgtgccgcagacccgtacgccggacgcgcacttctttaccgaggtgcgttacaaaggcaccaaaaccgtggcggtgaccccggactacgccgaaatcgccaagctgtgcgatctgtggctggcaccgaaacaggggaccgatgccgcgatggcgatggcgatgggccacgtcatgctgcgcgagttccacctggataaaccaagccagtacttcaccgactacgtccgtcgctacaccgacatgccgatgctggtgatgctcgaagagcgtgacggctactacgccgcaggccgtacgctgcgcgccgccgatctggtggacgcgctgggccaggaaaataacccagagtggaaaaccgtcgcctataacagcaacggtgagctggtggcgccaaacggctctatcggcttccgctggggcgagaagggcaagtggaaccttgagcagcgtaacggcacgaccggtgaagagacggaactgcgtctgagcatgctgggtagccaggacgagatcgctgaggtgggcttcccgtactttggcggcgaaggttccgagcacttcaacaaggttgagctgaaaaacgttctgatgcacaagctgccggtgaaacgcctgcagctggccgacgggactaccgcgctggtcaccaccgtctatgacctgaccatggcgaactacggcctggaacgcggtctgggtgatgaaaactgcgcaaccggctatgacgacgtgaaggcttataccccggcatgggcggagcagatcaccggcgttccacgcgcgcagatcgtgcgtatcgcccgagagtttgcggaaaacgccgataagactcacggtcgttccatgatcatcgtcggggcgggtcttaaccactggtatcacctcgatatgaactaccgtggtctgatcaacatgctgatcttctgcggctgcgtcggccagagcggcggcggctgggcgcactacgtgggtcaggaaaaactgcgtccgcagaccggctggcagccgctggcgtttgcccttgactggcagcgtccggcacgccacatgaacagcacctcctacttctataaccactccagccagtggcgttacgagacggtcaccgcgcaggagctgctgtcgccgatggcggataaatcccgctacagcggccatctgattgacttcaacgtccgcgccgagcgaatgggctggctgccgtcggcgccgcagctgggcacgaacccgctgcgcattgcggaagcggcgaagaaagcgggcatgtcaccggtggattacaccgtgcaatccctgaaggatggctcaatccgctttgcggcagaacagccggaaaacggtaaaaaccacccgcgcaacctgttcatctggcgctccaacctgctgggctcgtccggtaaaggccacgagtacatgctgaagtacctgctcggtaccgaaaacggtatccaggggaaagatctcggcaagcagggcggcgtgaagccggaagaggtggagtggaaagacaacggtctcgacggcaagctcgatctggtggtgaccctcgacttccgtctgtccagcacctgcctgtactccgacatcgtgctgcctaccgccacctggtacgaaaaagacgacatgaatacctcggatatgcatccgtttattcatccgctgtctgcggccgttgacccggcgtgggaatcgaaaagcgactgggaaatctacaaagacatcgcgaagaccttctccgaagtctgcgtggggcacctcggcaaagagaccgacgtggtaacgctgcccatccagcacgactccgctgccgaactggcgcagccgctggacgtgaaggactggaaaaaaggcgaatgcgatctgatcccgggcgtgaccgcaccgcacatcattccggttgaacgtgactacccggcaacctacgagcgctttacctctatcggcccgctgatggagaaaatcggcaacggcgggaaagggatcgcctggaacacccagagcgaaatggatctgctgcgcaagctcaactacaccaaagcggacggcccggcgaaaggccagcccatgctgaacacggcgattgatgcggcagagatgatcctgaccctggccccggaaaccaacggccacgtcgcggtgaaggcctgggcggcgctgagcgagttcaccggtcgcgaccatacgcacctggcgacgaataaagaggaagagaaaatccgcttccgcgatattcaggcccagccgcgcaagattatctccagcccgacctggtcaggtctggaagacgagcatgtgtcctataacgcgggctacaccaacgttcacgagctgatcccatggcgcaccctgtccggccgccagtcgctgtatcaggaccaccagtggatgcgcgacttcggtgaaagcctgctggtgtaccgtccgcctatcgacacccgctccgtgaaagcggtaatgggcgcgaaatcgaacggtaacccggagaaggcgctgaacttcctgacgccgcaccagaagtgggggatccactccacctacagcgacaacctgctgatgctgaccctgtcgcgcggcggtccgattgtctggatgagcgaaacggatgccaaagatctgggtattgaagataacgactggatcgaagtgttcaacagcaacggtgccctgacggcgcgtgcggtggtgagccagcgcgtaccggccgggatgaccatgatgtaccacgcgcaggaacgtatcgtgaacctgccggggtcagagatcaccgagcagcgcggcgggatccacaactccgtgacccgcattacgccgaagccgacccacatgattggtggctatgcccagctggcctacggctttaactactacggtaccgtaggatcgaaccgcgatgagttcgtggtggtacgtaagatgaagaatattaactggttagacggcgaaggtaatgaccaggtacaggagagcgtaaaatga

SEQ ID NO: 164139 - DNA, 1398 bp, Enterobacter cloacae
atgagtcactcatccgctcccgaaagggaaaatggtgccgttattactgactggcgtccagaggatccggcgttctggcaacagcgcggccatcgtgtagcaagccggaatctgtggatttccgtgccgtgcttgttgttagcgttttgcgtgtggatgttgtttagcgcggtggcggtaaacctgcccaaagtcgggtttacgttcacaaccgatcagctgtttatgctgaccgcgctgccgtcgctgtcaggcgcgctgctgcgcgtcccttacgcgtttatggtgccggtcttcggcggccgtcgctggacggcgttcagtacgggcatcatgatcgtcccatgcgtgtggctcggcttcgcggtgcaggatacctccacgccgttcagcgtgttcgtgattatctccctgctgtgcggctttgccggggcgaacttcgcctccagcatggcgaacatcagcttcttcttcccgaaagcgaagcagggcggcgcgctggggattaacggcggtctgggcaatatgggcgtgagcgtgatgcagctgatcgctcccctggcgatctcggtctccatttttgcagcctttggcggcggtggcgttgagcaggcggatggttcttccctctatctgcaaaacgcagcctggatctgggtgccgttcctcgtggtcttcacccttgcagcctggttctttatgaatgacctgtccgcgtcgaaggcgtcgctgagcgaacagctgccggtgctgaagcgtggacacctctgggtgatggcgctgctgtatctggcgaccttcggttcgtttatcggcttctcggcgggcttcgcgatgctgtcgaaaacgcagttcccggacgtgcagatcctacaattcgccttcttcggcccgtttattggcgccctggcgcgttcgctgggcggcatggtatccgaccgtctgggcgggacccgcgtgacgctggttaacttcgtcgtgatggcagtcttctgtgcgctgctgttcctgacgctgcctgctgacggacagggcgggagcttcatcgccttcttcggcgtgtttatggtgctgttcctgacggccgggctggggagtgcgtctaccttccagatgatctccgtgatcttccgcaagctgacgatggaccgcgtgaaggcgcagggcggaagcgaagagcaggcgatgcgtgaagcggcaacggatacggctgcagccctgggctttatctctgcgattggcgcaattggcggcttctttattccgaaagcgttcggcatctcactggatctgaccggctctccggcgggtgcaatgaaggtcttcctcatcttctatatcgcctgcgttgtgattacgtggctggtatatggccgtaataccaaaaaaaataagtaa

SEQ ID NO: 164140 - DNA, 1797 bp, Enterobacter cloacae
atgttaaaaagatgcttatctccgctaacgctcgtgaatcagctcgccctgattgttttgctgtccaccgccatcggcgtgaccggcatggcgatctccggctggctggtacaaggggtacagggtaatgcgcatgccatcaacgaggcaggctcgctacgcatgcagagttaccgtctgctggcggcggttccgctgacgcaggacgatcggcctttaatcgatgaaatggagcgcacggcgttcagccccgagctggaaaatgccgccatccgtgccggtcagcaatcccagttgaacgcccttcaggggtactggcacacccagctgcagccgggcctgaaacaggcgcgcagtacagaagccgttgcccaggacgtggcggggtttgtctcccgcattgacgcgctggtctccgcgttcgaccagacgaccgaattacgcatcgaccgggtggtgatggtgcaccgggccatggcgctgtttatggggctgctgctgatcttcaccatcgtctggctccgcgcgcgtctgctgaatccctggaaacagctgctggcgatggcccgcgcggtcaccgcacgcgattttacccagcgcacgcacattagcgggcgcaacgagatggccatgctcggccaggcactcaataccatgtcggcagagctctccgagagctacgcggtgctggagcagcgcgtacaggaaaaaacggccgggctggagcagaaaaacgagatcctctctttcctctggcaggccaaccgtcgcttgcacatgcaggtgccgctatgtgaacgtctctcaccggtgctgaatggcctgcaaaagctgaccctgctgcgcgatctggagctgcgggtctacgatgtggaagacgaagagaaccaccaggaatttacctgtcagtccgatatgtcctgcgatgacaaaggctgccatctttgccctcgcggcctgccgccgctgacctccggcggcacgaccctgaagtggcgcctgacggacagccacactcagtacggcattctgctggccaccctgccaaccggacgccacctgagccacgaccagcagcagctggtggatacgctggttgaacagctgacggccacgctggcgcttgacaggcatcaggaaaaacagcagcagctgatcgtcatggaagagcgcgcgaccatcgcccgcgagctgcacgactccatcgcccagtcgctttcctgtatgaaaatgcaggtgagctgcctgcagatgcaggatgcggagatgcccgacagcaacaagcagctgctcagccagatccgcaacgagctgaacacctcctgggtgcagctgcgcgagctgcttaccaccttccgtctgcagctgaccgagccgggcctgcgcccggcgctggaatccagctgtcacgaatttagcgcccggctggggttcccggtgaagctggattaccagctgccgccgcgctttgtcccctcccatcaggccatacatttactgcagatcgcccgcgaagcgctgagcaacgtgcttaaacacgctgaagcaacggcggtcacggtcaccgtcagccagcacgacaatcaggtgaaactgacggttcacgataacggccgcggcgtgccggaaaatgccgaacgcactaaccattatggtttaatcattatgcgagaccgcgcccaaagcctgcgcggtgattgccaggttcgccggagagagacgggcggcacggaagttgtcgtcacctttattcccgagaaaccgcttacaactgctcaaggagatacccatgactaa

SEQ ID NO: 164141 - DNA, 651 bp, Enterobacter cloacae
atgactaatcaggaaccggcatccatcctgttgatcgacgaccatccgatgctgcgtactggcgtgaaacagctggtcagcatggcgcccgatatcaccgtggtgggcgaagccagcaacggcgaacagggcattgagcttgccgaatccctcgatcccgatctgatcctgctcgatctgaatatgccgggcatgaacggactggagaccctcgacaagctgcgggaaaaatcgctttccggacgcatcgtcgtctttagcgtgtcgaaccatgaagaggatgtggtcacggcgctgaagcgcggggcggatggctatctgctgaaagacatggagccggaagatctgcttaaggcgctgcagcaggcggcggcgggcgagatggtattgagcgaagccttaacgccggtgctggccgccagcctgcgcgctaaccgcgccacctctgaccgtgacgtcagccagctcacgccgcgcgagcgcgacattctcaagctcattgcccagggcctgccgaacaagatgatcgctcgccgcctggacatcaccgaaagcacggtcaaagtgcacgtgaagcatatgctgaagaaaatgaagttaaaatctcgcgttgaagccgccgtgtgggtgcatcaggaacgcattttctaa

SEQ ID NO: 164142 - DNA, 1407 bp, Enterobacter cloacae
atggctgtatcgtcccgcattcgtttgctgtttttactcccccttcttacggccggagccgttcacggtgcgccgaattcctttatgcatcaggcgcagcacccctttgataataatggggatagtctgcccgatctcggcctggcggcgccaacgggcgaaggggagaaacacctcgccgaaatggcgaaagccttcggtgaagccagcatgaccgacaacgggctgacgaccggcgagcaggcgcgtcagtttgcctttggtcaggtgcgcgacgcggtaagcggggaagtgaaccagcagattgagtcctggctgtcgccctggggaaacgccagcgtgaacgtgctggtggataatgacggcaaatttaacggcagcagcgggagctggttcatcccgtggaatgatactaaccgttacctcagctggagccagcttggcctgacgcagcagacggatggcctggtcagtaacgccggaatcggtcagcgctgggtcgccgggaaatggctgctgggctacaacaccttttacgataatcttctcgatgaaaacctgcagcgtgccgggctgggagcggaagcgtggggggaaaatctgcgcctctcagcgaactactatcagccctttgccggatggcgcgcgcgatctgacgttcaggagcagcgcatggcgcgcggatatgacgtgaccgctaaagcctggttgccgtggtttcatcacctgaacaccagcgttagcgttgagcagtactttggcgataacgttgacctgttcaacagtggaaccgggtaccacaacccggttgcggtcaatctggggcttaactatacccccgttccgctggtcacgttgaccgccgggcacaagcagggcgaaagcggcgagagccagaataaccttgggctgaagctcaactaccgctttggcgtgccgctggctaagcagctttccgccgatgaggtcgccgcgacgcgatccctgcgcggcagccgctacgattcaccggagcgcactagcctgccggtgatggagttccgccagcgtaaaacgctgtccgtctggctggccacgccgccgtgggatctgaaagggggcgagaccgttatgctgaagctgcaggttcgcagcacgcacggcatccgtcagatccactggcagggggatacgcaggcattgagcctgacgtcgccggccaaaagtaacagcgcagacggctggagcgtgattatacctgcctggaatgaacaggaaggtgcgacaaaccgctggcacctctcggcggtggtagaagatgagaaaggccagcgcgtctcgtccaatgagatcacgcttgctgtggtgcagccgctggtcgcattgcctgatgacgacccgcgctggaagctgctgccggaggagtaa

SEQ ID NO: 164143 - DNA, 2526 bp, Enterobacter cloacae
atgacggaaacccggacaacatgtccctactgcggggtcggctgcggcgtggtcgcccgcgtggaaggtgaagcggtcagcgttcggggggatgaaacccatcctgcgaactttggccgcttgtgcgtgaaaggatcggccctggcggaaacaatggggttacaggggcgattgctgcgccccgttgttgacggtgctgaggtggcctgggcgcaggcgctgggagccgcaggcgagcgcctccaggacattatcgacaaatgggggccgcaggcggtggcgttttacgcgtccgggcaattgcttaccgaggattattacgccgccaataagctgatgaaagggtttatcggcgcggcgaacattgataccaactcccggctctgcatgtcatcggcggtcgttggctacaagcgcgcctttggtgaagacgtcgtgccgtgcagctacgaggatgtggaaaacagcgatctggtggtgctggtgggctcaaacgcggcctggacgcatccggtgctgtatcagcgcctggtacaggcaaagcacaacaatccggagatgaaagtggtggtcatcgatccgcgcagaaccgcttcctgtgaaattgctgacctgcatctggcgctcactcccggcagcgacgccgggctgttcgtcggtctgcttaatgtcattcagggaacagacgcgtggccgatatcacgcgtggcggcgttttgcggcctctcgccgcaggatattggtacgttttacgactggtttatgacggcgccccgggccatcacgctctacaccatgggaatcaaccagtcctccagcggcagcgacaaatgcagcgccatcattaacgtgcaccttgccagcgggaaatttaaccgtccgggctgcggcccgttttcgctgaccggacagccaaacgcgatgggcggaagagaggtgggcgggctggcaaatcagctggcggcgcacatgaactttgagccggacgatctctcgcgggtggcgcgtttctggggaacggaacggcttgcgcagacgccgggcttgatggcggtggagctgtttgacgccattgcccgcggcgaggtgaaggcagtgtggatcatgggcaccaatcctgccgtctcgctgccggacagccacgcggtgtgtcaggcgctggggcgctgcccgctggtgattgtctctgaggtgatgaatgataccgacaccagccggtttgcccatattcgctttccggcgctggcctggggagagaaggacggcacggtaaccaattccgagcgacgcatttcgcgccagcgcgcgtttctgcccgcgcccggtgaggcaaagccggactggtggatcgtcgcgcaggtggcgaaacggctggggcacggcgacgcctttgcctggctgcatccccaccagattttttgcgagcatgcggcgctgacggcctttgaaaatgacggcgcgcgggccttaaaccttcacgacctggctacgctaacccgtgaggagtgggagcggcttgagccctggcagtggcctgggggagattttccgtgccgaaacattgttcccgttgacccacagtcgcacggtgcgacggtcagcgcgttgtacccgctgattctcaactcggggcgcattcgcgatcagtggcataccatgacgcgaacaggatatgtggccagactgatgcagcatatcgccgaaccctttgttgaggtttgccccgcagacgccgttcggttttccctgtgcgacggccagctggcgcgcatcagttcgccgcgcggcgtcatggtagcaagagtgcgcatcagcgacgcccagcgtgaagggaacgcttttgccccgatgcactggaacgctgagtttgcccgccaggggaaggtgaatgcgctggtggaagggcgctgcgatccggtttcgggccagccggagagtaaacaaaccgccgtcagaatccagccctggcagcccgtctggcagggagaactctatgcccgcgaagggctggaaatgccctcttcggtttactggtggcgtaaagcttcacgcctgacggtggcgtgcgataaaccgctgctgtcgtgggtaatggaatacgccagcggccggggctggcagctgcaggttgcgcagaccggtgaacgcagcagcgtgctggcctggcatgaaggccagcttatgctgggtttctgggaaggtaccgcgttaccggcgctggcgcatacggtgattgaagccgcttttcattcaccccccgtgctgcccgcagaacgccacgccctgttgaacgggcagagcgtcgggaaggcgatggatccgggacgcattatctgcagctgtttcagcgtcggggaagaggcgatacgggaggcgattgccggagggtgtgattccgtcaccgcgctgggggcgaagctgcgctgtggtacgaactgtggttcctgcgtgccggagctgaaagggctgtttcaggataatcctgaaatgtccgccagaactgcatttcagggcttatcgcgttaa

SEQ ID NO: 164144 - DNA, 3987 bp, Enterobacter cloacae
atgcgactggtcattatcgggaatggcatggcggccacgcggctgattgcctcgctcaccgggcgtgctgccgatcgtttcgccattaccgtcatcggtgacgagccggagcatgcctataaccgcatccagctttcgccggtgctgggcggtgaaaaaacggctgggggcatctgtcttcagaatgacgactggtaccaggaacggggcgtgacggtgctgcggggcgaaaaggcgctcgccgtgaatgtggacacgcgggaagtgcaaaccaccgcccgcacgctgggctgggatgcgctggtgtttgccaccggctcaaccccctttgttccgccaattcccggctgcaatgcgacgcatgtcttcacgttccgtaccctggaggatatccgggccattcgggcgatcgccggtccggcggtagtgctgggcggcggcgtgctcggggttgagacggcggcagcgctggcgcgctcaggggacaacgtcacccttgttcatcgcggtccgtggctgatggagcagcagctggatgagcaggcgggcgtgctggtggaagaggcgctggcggcgcggggcgtgcgctgtgagctcgcctctggcatcgcggcgattgacgggaatagcgtgacgctgctgaacggacgcagcgtcaccgccgcgcgcgtggtgctggcgacgggcgtgcagcccaacgtcgtgctggcgcaggccagcggcattcgctgcgcgcgcggcatcgtggtggatcaccagatgcaaacctccgtgccggacgtctacgccattggcgagtgctgtgaaattgacggccagacgtttggcctggtcgccccctgtctggcgcaggcggatatcctcgccgcacggctggccggagacgtcaccgcgccgtttgttctgaccgacaacggcatgcgcctcaaggtgaccggcgtggagctgttcagtctcggtcgcgcggcagagcaggagggcgatgtggtctggagcgcatgggatccgctgacccgtcactatcgtcgtttactgatccatcagggggcgctggctggcgtgctgctgatgggggactgccgcagcgcggcaacatttaccgatttactggcaacggctgcgcccgcgcacgcggactggctgttcgatcgtttcactacgcaaccgcaggttgcaggacagaacgctatgacaaaacctactctggtggtggttgggcacggtatggtcggccatcatttcctcgaagactgcgttaaccgcaatctgcatcagcagtatcagatcgttgtctttggcgaggagcgctatgccgcctatgaccgcgtgcatctgtcggaatattttggcggccgcagcgcggcgtcgctttcgctggtggagggggatttctttgccgacaacggcattgagctgcgcctgtcgcagcagattgtcgctatcgatcgcgacgcgcgcgtggtgcgtagcgccagcgggcacgaaacccactgggacaagctggtgctggcgaccggctcatacccgttcgtgccgcccgtgccgggaaacgatctgccgggctgttttgtctaccgcacccttgacgacctggacaacattgcggcgcacgcggcgggctcacgccgcggtgtcgtgattggcggcgggctgctggggctggaggcggcgaatgccctgaagcagctcgggctggaaactcacgtggtggagtttgcgcctaacctgatggcggtccagctcgacaacgacggcgcggcgatgctgcgcaagaaaatcgaggcgcttggcgtcggtgtgcataccagtaaagcaacgacggagatcgccgccgcggacggcgggctggtgttgcgctttgccgatggagaacagctggaaacagacatggtggtcttttctgccggcattcgtccccaggacgcgctggcgcgcagcagcgggctggctatcggcgaacgcggcgggatcggcattgacgaccgctgtcagacctccgatccggacatgctggccattggtgaatgcgccctgtgggaagggaaaatcttcgggctggttgcgcccggctaccagatggcgagggtggccgccgccgcgctggcgggagaggagaaaaccttcgccggcgcggatatgagcaccaaactcaagctgctgggcgtggacgtggcctcgttcggtgatgctcacggccgcaccccaggggcgctgagctaccagtggacgcacggcccgcagcaaatctacaagaaaatcgtggtcagccacgacggcaaaacgctgctcggcggcgtgctggtgggtgatgccagcgaatacgccacgctggtacagatgatgctcaacgggatagccctgccaaaagagccggaaacgctgatattacccgcgtcgtcaggcagtgcgccaaaagcgctcggcgtggcagcgctgccggaaagcgcacaaatctgttcgtgtcataacgtcagcaaaggcgatatctgtcaggcggtaagtgcgggcgcaacggatatcggcgcgattaagcagtgcaccaaagcggcgaccggctgcggaggatgtagcgcactggtgaagcaggtgatggagttccagctggcggcgcagggcgtggaggtgaaaaaggacatctgcgaacacttcccgtactcgcgtcaggagatttaccacctcgtgcgcgtcaaccatatccgcacctttgaccagctcattagccgctacggtcagggacacgggtgcgaaatttgtaagccactggtggggtcagtgctcgcctcctgctggaacgagtatctgctgaaaccggcacacctgccgctgcaggacaccaacgaccgctacttcgccaatatccagaaggacggtacttactccatcgtgccacgcatgcctgcgggggaagtgaccgcagacgggctgatcgccatcggccagattgcgaaacgctacagcctgtacagcaaaatcaccggcgggcagcgtatcgacctgtttggcgccacgctggaacagctgccggagatctggcaggcgctggtggaagccggatttgaaaccgggcacgcctacggcaaatccctgcgcacggtgaaatcctgcgtcgggtcgacctggtgtcgctacggcgtgcaggactccaccggcctcgcggtcaggctcgagcaccgttacaaaggcctgcgcgcaccgcacaaaatcaaaatggcggtctcagggtgtacccgcgaatgcgccgaggcgcagagtaaagacgtgggggtcatcgccacggacaaaggctggaatctctacctgtgcggcaacggcgggatgaagccgcgccacgcggatctcttcgccagcgatctcgatgatgaaacgctgatccgcaccgttgaccgtttcctgatgttctatatccgcacggcggatcgcctgcagcgcaccagcacctggatggacaacctggaaggcggcctcgactacctgcgggaggtgatcctcaacgacagcctgggtatcgcccacgagctggagctggagatggcgcgggtggtagagacgtatcagtgcgaatggcagaccacgcttaacgatccaaaccgtctggcgctgttccgcaccgcggtgaacgtcgcgccgtctgatgaaagcaagcgctggcaggaaatctgcggcatcgacgatatccccgagcaggcgggaatcggcgcgcggcttgggcgtaagccgatcgcgctgttccgctttggcaaaaccgtttacgccctcgacgatcgggagcctggcagcagcgcgaacgtgctttcccgcggcattcttggcgatgcggcgggggagccggtggtgatctccccgctctacaagcagcgtatccgcctgcgcgacggctgtcaggtggagaacggcgaacccgcggtgcgcgcctggccggtcaaaattgagaacggcaaggtgtgggtcggtaatgatgccctggtaatgcgtgcggaggcctcatga

SEQ ID NO: 164145 - DNA, 789 bp, Enterobacter cloacae
atgaaaccattaatccaggtccaggccgtgagccagcgtttttccaccgccagcggcgaatttctggcgctgcagaacgtctcttttgatatccatgagggcgaaaccgtcagcctgattgggcactccggctgcggtaaatcgacgctgctgaaccttatcgctgggatcacgctgccgacggaaggcgggctgatttgcgacaaccgcgaaattgccgggccgggtccggagcgcgcggtggtattccagaaccattcgctgctgccgtggctcacctgcttcgacaacgtggccctggcagtagatcacgtgtttcgccacagcatgagcaaggcggagcgccgggagtggattgagcacaacctcgaccgcgtgcagatggggcacgccctgcacaagcgcccgggggagatctccggcggcatgaagcagcgcgttgggattgcccgcgcgctggcgatgaagccgaaagtcctgctgatggatgaacccttcggcgcgctggatgcgctgacgcgcgcccatctgcaggactcggtgatgcagatccagcaggcgctgaacaccaccatcgtgctgattacccacgacgtggacgaagcggtgctgctctccgatcgcgtgctgatgatgaccaacggcccggcggcgaccgtcggggagatcctgcacgttgacctgccgcgcccgcgtaaccgggtgcagctggccgacgacagccgctatcaccacatgcgccagcagatcctgcatttcctctatgaaaagcagccgaaagcggcgtag

SEQ ID NO: 164146 - DNA, 879 bp, Enterobacter cloacae
atgcagcatctgcaaaagacaaaatcacacgagacgccggagagtggagaggtgattgtcctgcctccggtgcaggttcgccgccgtacgccgacgtttgcgcgtcggattaacgcgatccttcagcgcatcattccggcttttctggggctgggactgctggtggtgctctggcagctggcggcgattaacagcaaaggtttcccgacgccgctcagcacgctcgattccgctattaccctgtttgccgatccgttttatcgcgacgggccaaacgacatgggcatcggctggaacgtgctcgcctcattacagcgcgtggcggtgggctttggcctggccgcgttcgccgggatcccgctcggtttcctgattggccgcttcacctttttttcgcgcatgttcggcccgctgatcgcgctgttacgcccggttagcccgctggcctggctgcccatcggcctgctgctgttccagaaagcggagcccgcgtcgagctggaccatttttatctgctccatctggccgatggtgatcaacaccgccgaaggcgtgcgccgcattccgcaggactacctcaacgtggcccgggtgctgcagctttccgagtggaccatcatgcgccgcattctcttcccggcggtgctgcccgcggtgctgaccggggtgcgcctctccatcggcatcgcctggctggtgattgtcgccgccgagatgctgaccggcggtttagggatcggtttctggatctggaacgagtggaacaacctcaacgtcgaaaacattctcatcgccatcgtcatcattggcgtggtcgggctgctgctggagcaggggctgatgctgatcgcccgtcgctttagctggcaggaaaaataa

SEQ ID NO: 164147 - DNA, 1248 bp, Enterobacter cloacae
atggcggatttgtcgagacggcgttttttgcaggccagcatgctggcgagtggtgcaatgctgttgccgggtgtcatgcaggccgcatgggcggcaggctcggataaaccggagcaggaaacagtacgcatcgggtttatcccgctgacagactgtgccccggtggttatcgctgcgctgaaagggtttgataaaaaatacggtattaccatcgtgcccaccaaagaggcgagctgggcggcggtgcgcgacaagctggtggcgggcgaactcgatgccgcgcacattctctacggcctgctgtacggactggagctgggcatcgccggcaagccacagcagatggctaacctgatgaccctcaaccagaacggtcaggcgattacgctctccagcgatctggcagagaagggcgttcatgaccttgacgggctgaaaaagcggattgggcagcaggcgcctggcacctataccttcgcgcacaccttcccgaccgggacgcacgccatgtggctctactactggctggccagcgcgggcattcacccctttgacgacgtgcgcacggtggtggtgccgccgccgcagatggtgatgaacatgcgcattggcaacatggtcggcttttgcgtcggcgagccgtggaacgcgcgtgccatcaacgaccgcatcggttttaccgccgccacgtcgcagtctgtctgggccgaccatccggaaaaaatcctcgggacgcgtcgcgactgggtggagaaaaacccgcacaccgcccgggcgctggtgagcgcagtgctggaggcggcgcgctggattgaggcctccccggaaaacaaacgcgaaaccgcgcagatcctctcccgccgggcgtggctcaactgcaaagagcagtatctcaccggacgcatgctcggcgagtacgacaacggcctgggccagcgctggcaggacgcgcacccgatccgcttcttcaacgagggggccgtcagctacccgtatctctccgacggcatgtggttcttaacccagttccgccgctggggcttgctcaaagccgccccggactacgcgggcatcgcacaacgcattaaccagacggcggtctggcaggatgccgccacggcggtggggggcattaccacaccgacttcaccactacgcagcagcacattgatggacggcaccgtctggaacggtaccgacccggaaggatacgccagccgtttcgccattcaccgtaaaggggcctga

SEQ ID NO: 164148 - DNA, 1185 bp, Enterobacter cloacae
atgacattaatggcaggcatttcgccaggcgctgccgaatggctcacgcgcgcaaagatgatgcgccaggagcagttctgcaagctggcacagctgggcgtgcttgtgcacggcattagccaactggtgcacatgttacagtgcgagcgcggggcgtccaacgtctggctatgctcacagggcaagctgtacgctcccgaatgcaaagccagccgggcgctggtggatgaaaacctcgcagccctttacggcattcttgacacacagtcgccgattccgggaagtgccgtctgtgaacgcatcggcggcgcgctcctgagcctggagacgcttcccgcgctgcgtgacggtgtgattcagcagacggtaacggcaccccaggcgatggaacactactcccgcatgcttcgccatctgctcagtatcgtgccgcagcttaatgacagcattgacgatccgcaaatcgcaggacgttttgtcgcgctttatagcctgatgcagggcaaggagctggcgggacaggagcgggcgctgggggcgattggcttcacgcagggttttttcgatgatgtgactcgtcagaggctggttgaccgcattgacgggcagcaggcctgctttgagatctttctgtcacacagcgccgctgacgttcagaccaccttttcaatgcactgtcagcccgatcgtgagacggagcagctccggcgcgtggcctgtacccgccagcccgccgccgataacggccttaccgcgctggcctggtttgctctgcaaaccgcgcgccttgagcatctgcgcacgctggaggagacgatcatcgccgatctgatggtcgcggtggacgaatgcattcaccgtgacgatgagtacgcgctccccggcgatgaacaggatgacccgccgatccgctatccggaaaaaccgttgcttaccctggttcgccagcaggcgcgcgagatagagcagctctcacgtcagcttgcgtcgctgcgcgatacgcttgaagagcgcaaaatcattgataaagcgaagagcgtgctgatgacccaccagaatatgagtgaggaacaggcctggacggcgctgcgcaaaatggcgatggacaagaaccaaaggatggtggatatcgcccgcgcgctgctcatggtgaagaatgtatggcaggtaacaccaaaggagtag

SEQ ID NO: 164149 - DNA, 354 bp, Enterobacter cloacae
atgcagaagattgtgatcgtcgccaacggtgcggcctacggcagcgaatcccttttcaacagcctgcgcctggcgatcgcgctacgtgaaaaagagagcgacctggcgttacgcctttttttaatgtcggacgccgtcaccgccgggctgaagggacaaaagccggccgagggctataacattcagcagatgctggagatcctgaccgcacaaaacgtgccggtgaagctgtgcaaaacctgcaccgacgggcgcggtatcaccggactgccgctgattgatggcgtagaaattggtacgctggttgaactggccgagtggacgctgtccgctgataaagtattaactttttaa

SEQ ID NO: 164150 - DNA, 1785 bp, Enterobacter cloacae
atgttcagatcgattcgtgcacgcatcatcgcggcgacggcaggctgtctggtcgtcgcccttctcctcaacaccgttattaacttccaggtcacacgccaggataaccagcagtcacagcgcgatatcctgaccagcaccagcgccagccataacatggcgattgccgactgggtaaaaagcaagatgacggttatcgcctctgcccagaccgttgcgctgagtgacgacccggttccggtgtttaaacagcttgcgcaggcgggtggattcaccaacgtttatgtcggctacgccagcaaaacggcgaaattctctgagcccgcgggcgtacctgcggattatgacccgaccattcgcccgtggtatcagcaggtggtcagcacggacggcccggtcgtcaccgcgccttacgttgatgcaggtaccggtaaactggtggtgactttcgccgtgccggtgaaagagaatggcgccctgaaagcggtggtggcgggcgatgtggccatggacagcgtggtggcgaacgtgcgcgggatccatccaactccgtccagcagcggcttgcttctgaacagtgacggcagcgtgattgcggctaacgatccggctctgacgcttaaaccgtttgctgagaccatcaaaggcatcgattttgctgcgctgaaaagcggtaaccttgtcgacggtacgctgaacgacgtcgaaaaaaccttcgtggcaaccgccgtgccgggcacaaactggctgctggtcgtcgccctcgacagcggtgacgccacctccggcatgcgttccctgcttaaggcctcggcgatttcgctggtgatcctggcgctgctgagcgcggccattgttcacctcctgattgcccgtctgctgaagcgcctgtcggacattcgcgacgcgatgcacaacattgccaacgggactaacgacctgtcgcagcgtctgcctgacagcggtgaggacgaggtggcgcagattgcccaggcctttaacgccttcagcgataagctgtcggtggtgatggtgcagctccgtgatgccagcgagtcggtgaaaaacgccgctcaggagattgcggcgggtaaccaggatctctccggacgtaccgagcaggcggcgtccagcctgcgcgagacggccagcgccgtggagcagatcaccgcctccgtgacccagtcgaacgagtcggcggcagaagcgaacgaccaggcgagcaaggcctccgcggccgcggcgcgcggcggcgaggtggtatcccaggcgatcagcaccatgcagtccatcgaagtcgcgtcggctaaaattggcgacatcaccagcgtgattgacggtatcgcgttccagaccaacattctggcgctgaacgcctccgtcgaggcggcccgtgccggcgagcaggggcgcgggtttgccgtggtggcgggcgaagtgcgtaacctggcgagccgcagcgcccaggcggcgaaagagatcaaatcgctgattgattccaccaccgacagcgtggccaccggctcccgctacgtgcatctggccggggaaagcatggacgagatccgctccagcatcggcagcgtctccggcatcatgcgcgaaatctccatcgccaccagcgagcagatgaagggtattcacgagatcaaccacgcggtgacccacctcgaccgcatggtccagcagaacgccgagctggtcgtgcaatccgccgctgccgcgggcgccctgcagagccaggcgggcgaccttgctgaaaccgccggccatttccgcatttaa

SEQ ID NO: 164151 - DNA, 240 bp, Enterobacter cloacae
atggcactggtaaaaacaagtttgaaactgtttggcggggatacggtagtggtgcgttgctcagagcgctgccgtattcatctgatgagtgcgaaagcacaaaaacaatcccaggcggatattctcaccgtgcaggatgataacgcctggcttaccgtgccgtataccggcacctgggatgtgctgatcgatagccacagccagtctctggagcactctgtcagttacgtagcagcttaa

SEQ ID NO: 164152 - DNA, 696 bp, Enterobacter cloacae
gtgttaacgcgtgatttcttaatgaaggcagattgtaagacggcatttggtgctattgaggaatcgcttctctggtcagctgaacaacgtgcggcgtcgctcgctgccacgcttgcctgccgcccggatgatggcccggtatggatttttggctacggctccctgatgtggaacccggcgctcgaatttgtcgaatcggcaacgggcacgttgcccggctggcaccgcgcattttgcctgcgcctgacggccggacgcggcagcgcgtgccagcccgggcgtatgcttgcactgaaagagggcggacgcaccacgggcgtggcgtatcgcctcccggatgccacgctggaagaggagcttacgctgctctggaagcgtgagatgatcaccggctgctacatgccgagctggtgcaagctggatcttgacgacggacgcaccgtcaatgcgctggtgtttatcatggacccgcgccatccgctgtatgaagcggacacccgcacgcaggtgattgccccgttaattgctgccgccagcgggccgctgggtaccaacgcgcagtatctcttctctctcgatcaggagctgacccgcctcggcatgaaggacgattgtctgaatgagctggtggtgaaggtgaaggcgctgctggaaggaaacccgctcaacggcacgctgcgaccgggttttgcctga

SEQ ID NO: 164153 - DNA, 231 bp, Enterobacter cloacae
atgccttataaaacgaaacgcgaattacccgataatgtgcaaaacgtgctgcccgctcacgcgcaggatatctacaaagaggcgtttaacagtgcctgggaacagtacaaagataaggacgatcgccgggatgatgccagccgtgaagagacggcacacaaagtcgcctgggccgctgtaaaacatgaatatgaaaaaggagacgacgataaatggcataaaaagaaatag

SEQ ID NO: 164154 - DNA, 1101 bp, Enterobacter cloacae
atgacagcaacacacgaggcggtaaagacccgccacaaggagacgtctctcattttcccggttctggcactggctgtgctgctcttctggggaagcagtcagtcactgccagtggtggttggtatcaatattcttgccctggtcggtatcttaaccagcgcctttagcgtcgttcgccatgcggacgtactggcccaccgtctgggcgaaccctacggatcgttaattctcagcctttccgtcgttattctcgaagtcagcctgatttccgcgctcatggcgaccggcgatgccgcgccgacgctgatgcgcgacacgctctactcgatcattatgattgtgacgggcggcctggtgggcttctctctgctactgggcgggcgtaaattcgcgacccagtatatgaacctgttcggcattaaacagtatctgattgccctcttcccgctggcgattatcgtgctggtcttcccgatggcgctgccgggtgccaacttctccaccggtcaggcgctgctggttgcgctgatttccgcagccatgtacggcgtgtttctgttgattcagaccaaaacgcaccagagcctgttcgtgtatgagcatgaagacgacagcgacgacgatgacccgcaccacggtaagccgtcggcccacagcagcgcgtggcatacggtttggctgatcgtgcatctgattgcggtgattgccgtcaccaagatgaacgccaatccgctggaaacgctgttaaccgaactgaacgcgccggtcgcgtttaccggtttcctggtggcgctactgatcctgtccccggaagggctgggggcgctgaaagccgtcttaaacaatcaggtgcagcgcgccatgaacctgttcttcggctccgtgctggcgaccatttcactcaccgtgccggtggtgacgctgattgcctttatgaccggtaacgaactgcagttcgcgctgggcgcgccagaaatgattgtgatggtagcctcgttgctgctgtgccagatttcgttctcaaccggacgcaccaacgtgctgaacggggcggcgcatatggcgctgtttgtggcttacttgatgacaatttttgcgtag

SEQ ID NO: 164155 - DNA, 855 bp, Enterobacter cloacae
atgaaacaaaaagtggttagcattggtgatatcaaggtagcaaacgacctgccgttcgtgctgtttggcggcatgaacgtgctggaatcccgcgacctcgccatgcgtatctgcgagcactacgtgaccgtgacccagaagctgggcatcccgtacgtgtttaaagcctcttttgacaaagccaaccgctcctccatcaattcttaccgtggcccgggcctggaagaagggatgaagattttccaggagctgaagcagacctttggcgtgaaagtgatcaccgacgtgcatgaagccgctcaggcgcagccggtggcagacgtggttgacgtgattcagctcccggcgttcctggctcgccagaccgacctggttgccgcgatggcgaaaaccggtgccgtgatcaacgtgaaaaaaccacagttcgtgagcccgggtcagatgggcaacatcgtcgataagtttatcgaaggtggcaacgacaaggttatcctgtgcgaccgtggttccaacttcggttacgacaacctggtggtggatatgctgggcttcagcgtgatgaaaaacgtctctaatcagtctccggtgattttcgacgtgacccacgcgctacagtgccgcgacccgtttggcgccgcgtccggcggccgtcgtgctcaggtgaccgaactggcgcgcgccggtatggcaaccggcctggctggcctgttcattgaagcgcacccggatccggataacgcaaaatgcgacggcccatccgcgctgccgctggataagctggagccgttcctgaaacagatcaaagcaattgacgatctggtcaagagcttcgatgagctggataccagcaaataa

SEQ ID NO: 164156 - DNA, 810 bp, Enterobacter cloacae
atgaagtccttagccgatttcgaatttaataaagtgccgctttgcgatggcatgatcctgatttctgagatgatccgcgacgattttacgtcgcagtacgtctacgatgagctggagaatctggtcagcctggcgcgtgaagagatcaatcaggcgcgcccgcaggactggcaattagagaagctgcttgagcttttctacggcgaatggggtttctgcgacacgcggggcgtgtatcgcctgtctgacgcattatggctggaccaggtcttaaaaaatcgtcaggggagcgccgttgcgctgggttctattttgctttgggttgcgcatcgcctggatattccactggtgccggtcatttttccgacgcagatgatcctgcgtgcggagtggctggacggcgagatgtggctcattaatcccttcaacggcgatacgctggatgaacatacgctggacgtgtggctgaaaggcaatatcagcccggtggctgagctcttcaacgaagatctcgacgaggcggataacgcagaagtgatccgcaagctgctggatacgctgaagtctgcgttaatggaagagcgtcagatggagctggccctgcgcgccagcgaagtgctgctgcagtttaatccggaagacccgtacgaaattcgcgaccgtgggttgatctatgcccagctcgattgtgagcacgtggcgctgaacgatctgagctatttcgtcgagcagtgtccggaagatcctattagcgaaatgattcgtgcgcagatcaacgcgatctcgcacaagcaaattacactgcattaa

SEQ ID NO: 164157 - DNA, 831 bp, Enterobacter cloacae
atggattttcagcgctggttacgtgaggctgccgctgagctttccgaaagcgaaagcccgaaacgcgatgccgaaattttgcttgagcatgtgacgggtaaagcccgcacgtacctgctggccttcggcgaaaccgaactgactgctgaacaggaagcccggctcgccgcgctgcttgcccgacgtaaaaccggcgagccggtggcgcacctggtcggcgagcgcgagttctggtcgttaccgctttacgtctcggcggcgacgctgatcccgcgccccgacaccgagtgtctggttgaacaggcgctggcgcgcttacccgcatcgtcctgccgcattctcgatctcggaacggggaccggggccatcgccctggcgctcgctaccgaacggcccgactgcgcgatcacggcggtagatgtgatgcccgacgcggtggcgctggcgcagcgtaacgtggaacgtctttgcctgaccaacgtgacggtgctgcaaagcagctggttcagcgcgctggagaagcagacgttcggagtgattgtcagtaacccgccctatattgacgagcatgacccgcaccttgcgcagggggatgtgcgcttcgaaccgctgacggcgctggtcgccgccagggagggtttagccgaccttgatcacattgtgacaacgtcacgacaacatttgctttccggcggctggctgctggtggagcatggctggacgcagggggaagccgtgcgggcgctctttacccaggcgggctacgccggtgtcaaaacctgccgcgactacggcggcaacgaacgcctgacgctggggcagtggttatga

SEQ ID NO: 164158 - DNA, 1083 bp, Enterobacter cloacae
atgaagccttctatcgtcgctaaactggaagctctgcacgagcgccatgaagaagtccaggcgctgctcggggatgccgggaccattgcggaccaggaacgttttcgcgcactttcacgtgaatacgcgcagttaagtgatgtttctaaatgctttaccgactggcgacaggttcaggaagatatcgaaaccgcgcagatgatgctcgacgatcctgaaatgcgcgagatggcgcaggaagagttgcaggatgcgaaagcgcgttctgaggagatggagcagcagcttcaggtgctgttgctgccaaaagatccggacgacgaacgcaacgcgttcgtggaagtccgcgccgggaccggcggggacgaagcggcgctgtttgccggggatctgttccgcatgtacagccgctacgccgagtcgcgtcgctggcgcgtggagatcatgagcgccaacgaaggcgaacacggtggctacaaagaggttatcgccaagatcagcggcgacggcgtgtacggtcgtctcaagtttgaatccggcggtcaccgcgtgcagcgcgtaccggccaccgaatctcagggccgcattcacacctccgcctgtacggtggcggtgatgccggagctgccggaagcggagctgccggacatcaacccggctgacctgcgtattgataccttccgctcctccggggcgggggggcagcacgttaacaccaccgactccgccatccgtattacccacttgccgaccggcatcgtggtggagtgtcaggacgagcgttcccagcacaaaaacaaagccaaagcgctctccgtgctgggcgcacgtatccacgcggccgaaatggcgaaacgccagcaggcggaagcgtctacgcgtcgtaacctgctgggcagcggcgatcgcagcgaccgtaaccgcacctacaatttcccgcaggggcgcgtgactgaccaccgcatcaacctgacgctgtaccgtctggacgaagtaatggaaggcaagctggatatgctgattgagcctatcgtgcaggaataccaggccgaccagctggcggcactgtccgagcaggaataa

SEQ ID NO: 164159 - DNA, 1257 bp, Enterobacter cloacae
atgaccctattagcactcggtatcaaccacaaaacggccccggtttcgctgcgagaacgcgtaacgttttcgccagatacgctcgacctggcgctggatagcctgcttgcacagccgatggtgcagggtggcgtggtgctctcgacgtgcaaccgtaccgagctctatttaagcgtggaagagcaggacaacctgcacgaagcgctgatccgctggttatgcgactaccacaatctcaatgaagacgagctgcgcaacagcctgtactggcatcaggacaacgatgccgtcagccatctgatgcgcgtggccagcgggctggattcgctggttctgggcgagccacaaattctcggtcaggtgaaaaaagcctttgcggattcgcaaaaagggcatctgaaggccagtgagctggagcgcatgttccagaagtccttctccgtggcgaagcgtgtgcgaaccgaaaccgacattggtgccagtgcggtttctgttgctttcgcggcctgcacccttgcacgccaaatctttgaatccctttctaccgtcaccgtgatgctggtgggcgcgggcgaaaccatcgaacttgtggcgcgccatctgcgcgagcataaagtgaaaaagatgattatcgctaaccgcacccgcgaacgcgcgcaggtgctggcggatgaagtgggggcagaggtggttgccctgagcgacatcgatgaacgcctgaaggaggcggacattattatcagttcgaccgccagcccgctgccgattatcggcaaagggatggtggagcgtgcgctgaagtcccgccgtaatcagccgatgctgctggtggatatcgccgtcccgcgcgatgtggagccagaagtcggcaagctggctaacgcctatctttacagcgtagatgacctgcaaagcatcatttcgcacaacctcgcgcagcgtaaagcggcggcggtgcaggcggaaaccattgtcgagcaggaaaccagtgagtttatggcctggctgcgcgcgcaaagcgtcagcgagaccatccgcgagtaccgcgggcaggcggagcaggtgcgtgatgacctgactgccaaagcgttagcggccctggagcagggcggcgatgcgcaggcgattatgcaggatctggcgtggaaactgactaaccgcctgattcatgccccaaccaaatctcttcagcaggctgcccgtgacggggatgatgaacgcctgactattctgcgcaacagcctcgggctggaatag

SEQ ID NO: 164160 - DNA, 612 bp, Enterobacter cloacae
atgacccgactgattcgcctgctgcccctggcggcactggttctgaccgcgtgtaccgtcacccaaccaaaaggcccgggcaaaagccctgattcaccccagtggcgtcagcaccagcaggacgtccgtaatttgagccagtaccagacccgcggcgccttcgcctatctctctgatgagcaaaaagtgtatgcccgtttcttctggcagcagacgggtcaggacaactatcgcctgctgctgctgaacccgctgggcagcaccgagctggagcttatcgcgaaaccgggcgaagcgcagatcaccgataacaaaggccagcactacaccgcaaccgatgccgaagagatgattggcaagctgaccggaatgcctatcccgctcaacagcctgcgccagtggatccttggcctgccgggtgacgccaccgactatacgcttgacgatcagtatcgtctgagccaggtgaactacacccagaacggcaagacctggaaagtggtgtacagcgactatgacagcaagagtaaaccgtcgctgccatccaacatggaactgacccagggcagccagcgcatcaagctgaaaatggacaactggatcgttaaatga

SEQ ID NO: 164161 - DNA, 870 bp, Enterobacter cloacae
atgatgacccactggccctctccggcaaaactgaatctgtttttatacattaccggccagcgcgctgacggctatcacaccctgcagacgctgtttcagtttattgactatggcgacacaatttctatcgaactgcgccaggacgggcagatttgcctcctgacgccggtcgacggcgtggcgcatgaggacaacctgattgtgcgcgctgcgcgtctgctgatgaacgctgcagcggaatcgggtcgtctgcctgcgggaagcggtgcggacatccgtatcgagaaacgtctgccgatgggcggcggcctgggcggaggctcatccaacgccgctaccgtgctggttgccctgaaccacctttggggctgtgggctgtcgcaggacgaactggccgccttaggcttgaggctgggtgcggatgtcccggtgtttgtgcgcggtcatgcggcctttgctgagggcgtgggcgaaatcctctccccggtcaacccgccggaaaaatggtatctggttgctcaccccggcgtgagcattccgaccccggtcatctttaaagatcctgacctgaaaagaaataccccgattcggtcaatagaaacgttattaaattgtgaattcagcaacgattgcgaggatatcgcaagaaaacgttttcgcgaggttgatgcggtgctttcctggctgttagaatacgcgccgtcgcgcctgactggtacaggggcctgtgtctttgctgaatttgacaccgaatccgccgctcgtcaggtgcttgagcaagcgccggtttggctgcatggttttgtagcgcgtgggatgaacatttcccccctacagcaggccattctggcgcagactgagtttcggtga

SEQ ID NO: 164162 - DNA, 948 bp, Enterobacter cloacae
gtgcctgatatgaagctttttgctggtaacgccaccccggaactagcacaacgtattgccaaccgcctgtacacttccctcggcgacgccgctgtaggtcgctttagcgacggcgaagtcagcgtacaaattaacgaaaatgtacgcggtggtgatattttcatcatccagtccacctgtgctccaacgaacgacaacctgatggaactggttgttatggtcgacgccctgcgtcgcgcttccgcaggccgtatcactgctgttattccttacttcggctatgcccgccaggaccgtcgcgtccgttccgcgcgtgtgccaattaccgcgaaagttgtcgctgacttcctgtccagcgttggcgttgaccgcgtactgaccgttgacctgcacgcagagcagatccagggcttcttcgacgtcccggttgataacgtattcggcagcccaatcctgctggaagacatgctgcagctgaacctggataaccccatcgtggtttctccggacatcggcggcgtggtacgtgcccgtgctatcgctaagctgctgaacgataccgacatggcgatcatcgacaaacgtcgtccgcgcgctaacgtttctcaggtgatgcacatcatcggtgacgtggctggccgcgactgcgtgctggttgacgacatgatcgataccggcggtacgctgtgtaaagcggctgaagcgctgaaagagcgtggtgccaagcgcgtattcgcttacgcgacccacccgatcttctccggcaatgccgtaaacaacctgcgcaactccgtcattgacgaagttgtagtatgcgataccatcccactgagcgacgagatcaaggcactgccaaacgtgcgtaccctgaccctgtccgggatgctggccgaagcgattcgtcgtatcagcaacgaagaatccatctctgcaatgttcgaacactaa

SEQ ID NO: 164163 - DNA, 1680 bp, Enterobacter cloacae
gtgaaaaacgtaacctcctcacatgttctgccctttcgcgccctcatcgacgcctgctggaaagagaagtacacctcgtcacgttttatccgtgacctgattgccgggatcaccgtcggcattatcgcgattccgctggcgatggcgctggcgattggcagcggcgttgcaccgcagtatggcctgtacacctcggccgtggccgggatcgtcattgccctgaccggcggctcacgcttcagcgtctccggcccgaccgccgcctttgtggtgatcctctaccccgtttcgcagcagtttggtctggcaggcctgctggtcgccaccctgatgtccggcgtctttttgattctgtttggtctggcccgctttgggcggctgattgagtacatccccctttccgtcacgctggggttcacctcggggattgggatcaccatcggaaccatgcagatcaaggatttcctcggcctgcaaatgacccatgttccggagcactatttacagaaagtgggtgcgctgtttatggcgcttccgacggccaacctgggcgatgccgccattgggattgtgacgctgggcacgctgatcgtctggcctcgtctgggcattcgactgccgggccatctgcccgcgctgctgctgggctgtgcggtgatggccatcgtcaatatgttcggcggccatgtcgccactatcggctcgcagttccactatgttctggcggacgggtcacagggcagcggcattccgcagctgctgccgcagctggtgctgccgtgggatatgcccggatccagctttaccttaagctgggattccctgcgcgcactactgcccgccgcgttctcgatggcgatgctgggggcgattgaatccctgctctgcgccgtcgttctggacgggatgaccggcaccaagcacaaagccaacagcgagctggttggtcaggggttagggaacctcatcgcaccgttctttggcggtattaccgccacggcagccatcgcccgttctgcggccaacgtgcgcgcgggtgcaacgtcacccgtttcggcagttatccactccctgctggtgatcctcgccctgctgatcctcgccccactgctctcctggctaccgctttccgccatggccgccctgctgctgatggtggcctggaacatgagtgaggcgcacaaggtggtaaacctgctgcgtcgggcgccgaaagacgacatcatcgtgatgctgatctgcatgtcgctgaccgtgctgttcgatatggttatcgccatcagcgtcggaatcgtgctggcttccctgctgtttatgcgccgtattgcgcaaatgacgcgcctctccccggttaacgtggaggtgcctgacgatgtgctggttctgcgcgtgattggcccgctgttcttcgccgcggcggaaggtctgttcagcgatctggagtctcgcatcgcgggcaaacgggttgtggtgctaaaatgggatgccgtaccggtgctggatgctggcggcctggacgccttccagcgctttgtgaaacgtctgcctgaaggctgtgagctgcgggtgagtaacctcgaattccagcccctgcgcaccatggcgcgtgcaggcgtgcagccgatccctggccgccttgctttttatcctaaccgtgaagccgcgttagcggatctgtga

SEQ ID NO: 164164 - DNA, 1059 bp, Enterobacter cloacae
atgttgattcaggtgggtgaactggcgaaacgggccggtatcaccgtacgcacattgcatcactatgagcaaacaggagtgttgctgccttctgccagaagcgcggcaggttaccggctttacaacctggcggatgttcagcgcctgcatatgatccaggcgctggcaaaagcggggctggaacttgctgaaatcagggatttccttgagcaggagtcgctgtcgttaaccgagttactcgatgcgcaaatcacgttgctggataaacagctgcgtagcatacatacgctgcgcgaccggctggtcgaactgcgtgccgggcttctcgacgatgcggcgccggacctggaatcctggctacagactctggagttaatgaatatgtacgatcgctggtttagcaaagaagagttacagcagctgccgtttgcggtgcagaaggacgcgctgtcggctatctggtcagggctggtggcagaggccaacgcgctgctggagcaccatatacccgttacggacgagagggcgaagaacctggcgacgcgctggatggagcgcctggagcaggacacggcgggcaaaccggagtttcttacccggctgaacgagatgcacagcgtagagccacagatgcaggcgcaaaccggcatcacgccggagatgacggattacattacgcgcgcgtttgcggaatccaagctcagcatatgggagaagtaccttactcccgaagagatggcctttacgcggaagcactactttgatcgcatgatggagtggccgccgctggtggcgaagctgcatcaggcgcagcgggaaaatctcgaccccgcctctgacgatgcccaaaagcttgccgaaaactggctggcgctgttccagtcgtacgcgggcaccaacccggagacccagcaaaagtttcgcactgccatgcagcaggagccgcatctgatgaagggaacctggatgacgcctgccgtgcttgcatggctccagcaggcgatcggggtgctgatgcagagacgtttctctgcatcaggcggctcacagatccgctaa

SEQ ID NO: 164165 - DNA, 276 bp, Enterobacter cloacae
atgaaacgcaaaaacgcttcgctactcggtaacgtgctgatgggtttggggctgtttgtgatggtcgtcggcgtaggttattccatattaaaccagctgccgcagcttgatcttccgcaatacttcgcgcatggcgcggtactgagcatcttcctcggtgcggtattgtggctcgccggggcgcgcgtgagcggacatgaggaagtctgcgataaatactggtgggtgcgccactacgataaacgctgccgtcgagatcagcataagcacagctag

SEQ ID NO: 164166 - DNA, 585 bp, Enterobacter cloacae
gtgacgattaaactgattgtcggcctcgccaacccgggcgcagaatatgcggctacccgccacaatgccggggcatggtacgtcgatctgctggccgagcggttacgtgctcccctgcgtgaagaacctaaattcttcgggtatacctcacgtatcaaccttgctggcgcggatgttcgcctgctggtccccaccacgtttatgaacctgagcggtaaagccgtggcggcgatggcaacgttttatcgcatcaatccggatgaaattctggtcgcccacgatgagctggatcttccccctggcgtggcaaaattcaagctgggcggcgggcatggcggccataacggtcttaaagacatcatcagcaagctgggcaataacccgaatttccaccgtttgcgcgtgggaatcggccatccgggcgataaaaacaaagttgtcggtttcgtgctcggtaagccaccggtttctgagcagaaactgattgatgaggcggtagacgaagcggcgcgctgcacggaaatctggctgcaagacggcttaaccaaagcgacaaaccgcttacacgctttcaaagcgcaataa

SEQ ID NO: 164167 - DNA, 444 bp, Enterobacter cloacae
atgaataaatccattaatatacagacggatactgcaacattagtaatttatgatttgatgtcattaaagcataggattaatgatgatgcagattggtggagtcttccagaagatgaaattgaagaaataaataaagggaatgtattatttctcaatcttggtgatgatggtacttataaaattgatattaaaaatgacattggtgaatataccggttctttatttttaaacgtacctactggaaaggttttcataggggcgggagaggatgtcactggcggagatctggaaccagatgattcagatgctatttcaggcgagtttattactttagaacctggtagttacgaggttaaatataaaaaacaaggttcagatgttctaatttcctttacaaaagcagtgtttactgaaaattcattagaagagggagtttatctctga

SEQ ID NO: 164168 - DNA, 441 bp, Enterobacter cloacae
atgaaatacaccctccaggaaggttcattttccctttttcctgctgcctggcaggataacagcatgaacattattcgcgatgacgaaagcgggctgtccgtggtggtcagccgcggcgtgattcccgatggcagcgactacgaacaagagtttcaccgccagtgggatgtgttgcgtcctcagatgggtgagatcgcccagagcgaattccggaacgtaaacgccgggcctgacggaaaaattagcggactggaagtcgagaccacctttgaccgtaacggacagcgcctgtggcaaaaacagctggccgtgcagacgccgggcaaaccggtattgatgatttttaccctctcggcattaagagcctttaccgaagaggacgaggtgcgctggagcgcgcttaagcagagtctgacgctaaacgacaaccggaatgtgtaa

SEQ ID NO: 164169 - DNA, 1077 bp, Enterobacter cloacae
atgcccaataaacttttagcatccgcattgtgcgcggctttattggctggcgtcgttgaaacgtcaaccgcgcttgaattatcgcaatacaataagctcaatacggtaagtcgcatcgttaatgatagcgaagtgacagacattctcaggaaaacgctgggaaatcattaccaggcctttattgataactttgatgtcttcggtgaaccgcataccactccaggtggaggattgtttgttgagggctggctaaaggatctctaccaggaaaatgcctcagcgctggttatcaatcctgacggcaaaatcttcgcggcctgggtggttccagaatcaaacgttatccattaccagtcatctgataatagtcagccgattaatgccgatattcagcaatgggccgccaggttcaatacgatgcagtttgcagcgaacagccaatcgagacctgcgtttgacggggtttgggcaggcggggttggcaacgactcgacgttaaccctgcagttagctgaatcaggcaaccgtatcaccgggtcttattgctatatctcccagagaggaaaccgcatcgactgcccggaagatgatgagcgaaatcttagcggtacgatcgcgggaaaccgtgcgaacgttgagttcaactcatcgtttggcggcgcaggcggacgggctgttctggaaataaaggggagtgagatggaatggcgtttagttactcctcctcaaaaaggaaattattatgctccgcagcgttatacgttacgtaaagccgcttcggttcaaaacgctgaaaccagaaaactggacaccgaaaggttcgctatttctcttataaataagtgcggtcattttgatagcgaatgtgatcagatggtctatctcggcgtgcgcaaaagcgataacagtacgatctccttaaggggaaaaacgttgcacgactccgcaggtaaaataatcggctcaacctacaagaatggcgagatcgcttataccgtgacgtatgcacccgtgaaattggttgtcagcaaaggcagccatgttttagtcgaacaatcaggtcaatggcgtaaataa

SEQ ID NO: 164170 - DNA, 567 bp, Enterobacter cloacae
atgacgattaacgtgaaaaaacacacgccgacatttcttttttctgccctgatgtttacctgtctcggcagcaatgtggttttggctcgggtgattcctcccgttctgacaaaacgggatttttctgtgcagatcaaagaccagcctgtcgcattgggcgaccgatggtctcctgatagtgccggtaaaattgatgtgccgtgggaaggcaactttgtcggtgaggttccttttgacggaacgaactataaattctaccagcatcaaagggctgggttagaaatattcagttccaatctctggtgggataaagctgaacgaagcgttgatgattatatcgtgtcgcagattacgctgactgccgaagacttcgcaacgccgcggggtgtccatgtgggttcaacaaccagagagctgaacaacgcatacggcaatggccttgttgaaaatgattcagggacccagtgggtttcctatgcgttgggtaaaaaagtactctcttttgagatgaagggcggcaacgttgtgaaaataacaatgaattacgataatggtttttcagagtaa

SEQ ID NO: 164171 - DNA, 417 bp, Enterobacter cloacae
atgtttatttccgggatgagcgcatcgcttaagacgttatccgttacaacccttagtaatgcgccgttatcgtttaagatgaccaggcaaaatgaatatatcaatttctacaatgccgacgatatcaaactcgctgatggaacgaacataaccgcaattgggttacgtttaagcaaacaaaacgaaggcatggcgcctttactgaatttttcaccttcctcaggtcaatgcataacgcttgataccattaaaaagcgctatccgcagctgaggttaactgattatccgcgcggccgttcggagaacgaagtgaccagctatacagcccgaaaagatatgaatggacaaaaggtgagcttcagtttcaccgtgaaaaatcctcactgtctgggttcagtcgtcattagcgcagactaa

SEQ ID NO: 164172 - DNA, 1923 bp, Enterobacter cloacae
atgctcaaccgaattaccgttcagctcccggtcgaggggcttctgttctggaaactgacgggccgcgaggcgatgtccgagtcgttcgcgctgacgctgaccgtgctcggcacggacgcgcgcattgaccgcagtaagctgctgggccagccggtcacggtgaccatcccgacgcagagcctgctgacgccccgctatataaacggcaagattacccgggtggcggtcagcgccgttgagctgacgggcacccgctatgcggtgtaccagctgacggtggagccggatctgtggccgatgaagcgcgaccgcaacctgcgtatctttcaggggcagacggtgccgcagattgtgaaaaccctgctgggtgagcatcaggtcaacgttgaggataaactcaccggcagctaccgggtgtgggactactgcgtgcagtatcaggagtcgagcctggacttcatcagccgtctgatggagctggaggggattgcgtatcacttccgccatgaggcggacaagcacaccctggtgctcaccgacgccgccacgcagtaccagccgttcagcggctatgaggttattccttaccaccagacgccgtccggcggcagtacggacgaagagggcatcagccagtgggcgctggaggacagcgtgacgccggggatatacagcctcgacgactatgacttccgcaagccgaacgcgtggctgttccaggcccagcagaacccggcgtcgccgacgccgggcagcattgacgtgtacgactggccggggcgctttgtggacaaggggcacggggagttctatgcccgtatccgtcaggagcgctggcaggttgagcaccagcagattcaggccaccgccacggcggcggggattgcgcccgggcacaccttcaccttaaccaacgcgccgttcttcagcgacaacggagagtatctggtcactgccgcgggttaccacctcgaagagaaccgctatgccagcggcgagggggagaccattcaccgtaccgatttcacggtcattcctgcgtcggtggcctaccgtccggcgcagaccacggcgtggccgcgcacctacggcccgcagacggcgaaagtggtggggccgaagggcgagagtatctggacggacaaatacggccgggtgaaggtgaagttccactgggaccgtctggcgaagggcgatgacaccagctcctgctgggtgcgcgtgtcgagcgcgtgggcgggccagggctacggcggggtgcagatcccgcgcgtcggcgacgaggtggtggtggactttatcaacggcgacccggaccgtccgatcattaccgggcgcgtgtacaacgacgcgagcatgccgccgtgggcgctgccggctgcggcgacgcagatgggctttatgagccgcacaaaagacggttccgtggacaatgccaacgccctgcggtttgaggataaagcgggtgcagagcaggtgtggatccaggccgagcgtaacatggacaccagcgttaaaaatgatgaaacgcacagcgtcggcggagcgcgcagccattacgtgaagaaaaatgaactgcatcgcgtggaagcgaatcagacccaggccgtgaaaggtggcaccgagatcctgacggggaaaggtaagctggatgcggcggtggagcagtatgttatcgcttccgggacgaagctgcggttggtctctggtgagagcgccattgaactcaacgcgaacggcaagattaacctgatcggcaaagagtttaacttctttgtcgagggggatgggtatatcactacgggcggtaagctgcatctgaacacgtcgggaaccaagccgggcacgacggcgccgggatcggggcataaaggggatattgatgcggcggtgcaggcgaaatttacgccaaaagatgagtaa

SEQ ID NO: 164173 - DNA, 351 bp, Enterobacter cloacae
atgagtaaagaaaattacaccgcgctggattatatcaatgatgctattgatgcaattaatcatcgattagaagaaaatcctacattttctttatatgttatggcgaagaatcagttggactatattaagtctattctaatggggtctgagaaagataaaagtaaattgcacaaattaaatcttggagtgcttgcgtcaaaagaatttgatacaaccgatgcagaacttgctcagcatttgtccaatgttaattatatagcttcgcaaatgggaaaaggattgaagtttattctccctcatgagcaagacgttgagtatttgaaaaggcaaaaacggtatcgcaagtggtaa

SEQ ID NO: 164174 - DNA, 1074 bp, Enterobacter cloacae
atggttgctgaaaaacaatatttttttcctcttgagatgaaggatcaggaaaaagagattcgggaaaatttctggaaatgtctctatacctctgcagaaaaagagatgcttcattactggctattgttaccccagaatgttaagccagcagagttaaagccgatcacgtttcaggaggttgggctgacgaatatcggacgatacattgccgatgacaccggcccctatattgaagtctgggctgcatatgaacactgtcagtgggaaatgaatgcgtcagactggcttatcaataagctcgatttaatgggtgagaaagtactgagccaaaggataattacgcatccttcaggaagcgggaagtttgcggatatcctgtccattaaaacgatgccatcgggtgatgaggtcgtttcacgatatacggtgcagaaggattataatcccgtaaatggtgggggaaattacttccttttgaaaacggcttgtgcgtcaaaagattacaacacgattgccgacactattttcctgattgctatcaactgggatttactgcatcgcagcaatttgatgctttcagaactgttgaaaacagtcagtcttagcaacaaaaatgacagtggatttaaaattccggattcatggctggtgaatacgctggatgataatcgtctggtaattgaacacacagtaggtaacgtcaaccatggagtgattaatttctgtcttttccgtcaggctgattatcccgctgcgcaggctattttcgatgaagcaactgcgcgctttaaccgccacgatagtgcggtctctcttacgacatcggacattgccagcatcccaaatgatatcaatcccacgtttacaggcgatctttatagctgtacgggagaggtagtcagtgctgctgagaatatcagggcttattacgatatgcgtatctttaaaatgaatgatttgtggtgttacgttgaggtggttgggcctcatcgtaatcatcaggattattattacgaagccaataaacgatgcatggaaatcattctttctacgtttcgcatagaaaaacgatga

SEQ ID NO: 164175 - DNA, 435 bp, Enterobacter cloacae
atgcattggtttttctttatagtctttatgatttggacgctagcgcttatctggaatggaaaagatttatttaacaaaaagcagtggctccttgcggggttaatgttcgttctggtgttagtggctacggtcgtcattggctttacgttgaaatggcttgctcagtcaatgtcattattttccgtcgcaacggccaagcattattcgatcatcttatccatgtctttcctgtgtgtttggggattaaagatcacagtagtgctgctctgcacgttattttccgggattatgggggggcacaaaagatacaacgcggaaaattatgaaaaattatcgtctatgacacgtgccgtggcgcctggcttacttatctttgctaaaagcttaattaccctcggaagcttccttatgttttcgggtttatggcttaagtaa

SEQ ID NO: 164176 - DNA, 1056 bp, Enterobacter cloacae
atgggaaaaccagccgccagagcgcgcattgattccagcgcacatactggcccaattcaaagcggaagtcccaacgtaattattggcggatttccggcagcacgaaaaggcgacccgctttcatgctcccaacatggtcagggaagtattctcagtggttcaacaacggtatttgtgaacggtttgcctctcgccagggaaggtgacaagacgggttgcaatacctcagcgacccctgcggtcgcatccactcaacccgcacctccgcaatactggggcggaacggcggcgaaggatgcgggtaaagatggtgctatacatggtgatgtttacgacgcccgtgtgcttggcgcctatgcaagccttgaagataaatccggctttggaaaacccgatacggcttcagccggattcgcacttgccgatatcacggtcgggaatacaaaaagtcaggataaatataaaggcgaggtacgtactaaagtaggggtggcgactgccagcggcacgttagtgaccgatcgagctgattacggggcgattaatctcaatgcaaacgccaccgcgatacaatatggcgcctcgggaagcattggaaaagaagggcaacaatacggcggcgtcggtggggatgtatacctggcaaccgctgaagcgaaggccgtcagtgaactatatgacggaaataaagggcgttatggttttaatgttgaacttggcgcagaagccgcggcggtcaaaggagaggcgacggctaaagccgatttttatggcgtagtcgttgccgatgggaaactttcagggagtgcagggagcgctggcgcttctgcaggagtgggaacctggattgatagcactgattattcatttaaccttaaagtgtccggtgagcttgcagcggcgctcggtctgggaggggatgccagtatcaaatttgctctcaaaccgatccttgactggatttatgacgataatgaaagtaagccgtccccagcggcgggcagtggcgatggtgcgattaagactggctgtgttacagtcctgataggagattaa

SEQ ID NO: 164177 - DNA, 1959 bp, Enterobacter cloacae
atgctcaaccgaattaccgttcagctcccggtggaggggcttctgttctggaaactgacgggccgcgaggcgatgtccgaatcgttcgcgctgacgctgaccgtgctcggcacggacgcgcgcattgaccgcagtaagctgctgggccagccggtcacggtgaccatcccgacgcagagcctgctgacgccccgctatataaacggcaagattacccgggtggcggtcagcgccgttgagctgacgggcacccgctatgcggtgtaccagctgacggtggagccggatctgtggccgatgaagcgcgaccgcaacctgcgtatctttcaggggcagacggtgccgcagattgtgaaaaccctgctgggtgagcatcaggtcaacgttgaggataaactcaccggcagctaccgggtgtgggactactgcgtgcagtatcaggagtcgagcctggacttcatcagccgtctgatggagctggaggggattgcgtatcacttccgccatgaggcggacaagcacaccctggtgctcaccgacgccgccacgcagtaccagccgttcagcggctatgaggttattccttaccaccagacgccgtccggcggcagtacggacgaagagggcatcagccagtgggcgctggaggacagcgtgacgccggggatatacagcctcgacgactatgacttccgcaagccgaacgcgtggctgttccaggcccagcagaacccggcgtcgccgacgccgggcagcattgacgtgtacgactggccggggcgctttgtggacaaggggcacggggagttctatgcccgtatccgtcaggagcgctggcaggttgagcaccagcagattcaggccaccgccacggcggcggggattgcgcccgggcacaccttcaccttaaccaacgcgccgttcttcagcgacaacggagagtatctggtcactgccgcgggttaccacctcgaagagaaccgctatgccagcggcgagggggagaccattcaccgtaccgatttcacggtcattcctgcgtcggtggcctaccgtccggcgcagaccacggcgtggccgcgcacctacggcccgcagacggcgaaagtggtggggccgaagggcgagagtatctggacggacaaatacggccgggtgaaggtgaagttccactgggaccgtctggcgaagggcgatgacaccagctcctgctgggtgcgcgtgtcgagcgcgtgggcgggccagggctacggcggggtgcagatcccgcgcgtcggcgacgaggtggtggtggactttatcaacggcgacccggaccgtccgatcattaccgggcgcgtgtacaacgacgcgagcatgccgccgtgggcgctgccggctgcggcgacgcagatgggcttttatagccgcagcaaagatggccataaagacaatgccaatattctccgttttgaagataaagccgggcacgagcagatctggatccatgcagaaaaaaatatggatacggatattgaaaattctgaaactcatgatgtcggtgtcgatcgtagaaaaaccatcggacaggatgagaatattacgattaagcggaacctgaaatcagatgtaggtaataatgaaacgcataatattgttaacaagcacgttataaacgttgggaaagatcaaaccgtcttgaccatggataaagaaggtaacgcgctgctggaatctgtgaccacgattaaactcaaagttaaagacaactatattctgatcgccccggataccattgagattcacgtaggccagggcaacctcaaagcagaggctgtggaacaagccatcttcaaaggtgatgagcttacaaaactaggtgatgggatcaataccgagctcaaggcaaatgatacggtgagtataacgggaactaaccttaccgatattaagggcgcgattgtaaaagttaacagttaa

SEQ ID NO: 164178 - DNA, 1419 bp, Enterobacter cloacae
atgacggataatgataacaatcggactgtcccaaacgcgctcccagtcgggtaccgcttcaacgagtttgaaatcaaagaggtgatcggcggcggcggttttggcattgtctatcgcgcgtgggatcaccagctcgaacgcactatcgctatcaaagaatttatgccttcctcgctcgccgtacgcggcgacgacatgaccctggtgctgcgcagcgagcgctttggcaaagcgttctccgcgggcctgaacagctttatccaggaagcccgtctgctggcgcgctttaaccacccgaacctgctgcacgtcctgcgcttctgggtgcaaaacgacacggcctacatggggacgctgttttacagcggcaccacgctgtcacgcctgcgtgaagaaaagccggagctgatcaatgaagcctggatccgccgcacgctgccgatgctgttcggtgcgatcaagaccatccatgacgaaggctacctgcaccgcgacatctctctggataacatccagatccaggataacggcctgccggtgctcctcgatttcggctccgcgcgccgcaccatcggtaacctttccgacgaaacggaaaccatgctgcgcccgggctttgcgccgatcgagcagtacaccgacgacaacgaaagcgagcagggcccgtggacggacatttacgccctcggcgccgtgctgcgtaccctgattgtgggttctccgccgccggtcagcgtggtgcgctcgattcaggatacctgcaaaccgctggtggaaatcatgccgcagggctattccattccgctgctgcaggccattgaccgcgcgctggcgctgcacatggaggaccgtccgcagtccatcgacgagttcgccgcgctgatagagatgccggtcgccgggattaacgacgtgctgacggcgaaaaagcccggcacgatgctggtaccggtggaggaggaacagccggcgtcgctgctcgactggcgtcgctacaggatcccgggcatggttgccgcaggcgtgctggtcggcgttgtcgctggcgcgatgctgttcagcggcggcaaagatgcgccagagcaggctgcgcaggcaccggcagagacgcgtccaaccgaaaccgccgcgaacgccccagacgtgaagccagaaacggcgaaggtgggcgaaccggcgacggcacagcagacgccaccgcctgccgcgagccctgttgcgttggtctatatccgcatcctcgacggcgaaacgctgaaagtaaacggcgagccaaaagcgctgcgcccaggaaccaacggctatgcatcgctcaagctgccagccggtgaggcgaagattgaactgcagggcaacggaagaacgcgtggccagacgctggatattgccaagccgggcacctggctggtgaatccgtag

SEQ ID NO: 164179 - DNA, 2616 bp, Enterobacter cloacae
atgtcagaaattagccgtgccgtgcttttcggcaaactggatacgctgttatttacctctctggaaagcgccactgcgttctgcaagctgcgcggcaacccctatgttgagctggtgcactggctgcatcagctgatgcagcagcaggatggcgatctgcagcatgtcatccgccactttgccctcgacgagcagcagctgacgcgcgatatcgttgccgcgctggatgtgcttccgcgcggggcgagttccgtttccgatctctccgagcatatcgacagcgccgtggagcgcgcctgggtcttcggctcgctgaagtttggcgtcagccgcattcgcggcggccatttgctgatcggcatactcaaaacctggaacctggccaacgtgctgaaaagcatttcggcgcagttcacccgccttaacgtcgaggtattgattgagcagttcgataccatctgcgccaacagcaaagagacgcagcaggccgctgccgccgtcgacgcaccggcgggcgcggttccggctgctcaggggacgctggcccagtacggtcaggacctgaccgcccgcgcccgggaagggaagattgacccggtcgtcgggcgcgatgaggagatccgccagatggtggatatcctgatgcgccgccgtcagaacaatccgctgctgaccggggaagccggggtcgggaaaacggcggtggtggaagggctggcgctgcgtatcgccgacggcgacgtgccggagccgctgcagaacattcagctgtggctgctggatatcggtatgctgcaggccggtgcaggcatgaaaggcgagtttgaagcccgtctgcaggcgctcattaacgaagtccagtccagcgccacgccgatcattttgtttatcgatgagatccacaccctgattggcgcaggcggccagcaggggaccggcgatgcagcgaacctgctgaagccagccctggcgcgcggccagctgcgcaccatcggcgccaccacctgggcagaatacaaaaagtacattgagaaagatccggcgctgacccgtcgtttccagacggtgcaggttcacgagcctgacgaagcgaaagccattctgatgctgcgcagcaccgtgtcgccgctggagacgcaccaccaggtgttgctgctcgacgaagcggtcagcgcggcggtgaagctgtcccaccgctacatcccggcgcgtcagctgccggacaaagccgtggccctgctcgacaccgcctgcgcccgcgtcgcggtgagccagagcgcgccgcctgcgcagctggaagactgcctgcgccaccttgctgcgcttgacgtggaaattgagatcgcagaacgcgaagcgcgcgtgggggcgggtgacgccgagcgcgtcacggcattacgcgccgaacgcgacgcgtatgagacaaaacgcgaagccctggcccggcgctgggaagaagagcgcagcctggtgcaggagattatccgcctgcgcgccgcgctgttcgcggcgggcgaagaagataccgccgagctgcgcggccagctggcggagcagcagcaggcgctgaacgccttacagggagacgagccgctgctgtttgccgcggtggatgaaaacgtggtcgccgcggtggtctctgactggaccgggatcccgctgggccggatggtgaaaaacgaaatcgacgcggtactcaaccttgccgacacgctgaaccagcgcgttatcggccagcgtcacggtctggacctgattgcccgccgcgtgaaaacctcccgggcgaagctggacgacccgaacaagccggtgggcgtctttatgctgtgcggtccgtccggcgtcggtaaaaccgaaaccgcgctggcgctcgccgaatccctgtacggcggcgagcagaacgtcatcaccatcaacatgagcgagttccaggaagcgcacaccgtctccaccttaaaaggtgcgcctccggggtacgtagggtatggtgaaggcggggtattaaccgaggccgtccgccgccgtccatacagcgtcgtgctgctggacgaaattgagaaagcgcacccggacgtccacgagatcttcttccaggtcttcgacaaaggctggatggaagacggcgaggggcgccatattgatttccgcaacaccattattattctgacctccaacgtcggcaccgagctgattagcgccatgtgcgccgatccggacctcatgccggagcctgatgccttaagcggcgcgctgcgccagccgctgctggaggtgttccctccggcgctgctgggccgcctgctggtggtgccgtactacccgctcagcgacgagatgctggggcagattgttcgcctgcagctcaggcgcatccagcgtcgtctggaggagaatcacagcattatttctgagtttgacgacagcgtggtggaacagattgttcagcgctgcaccgaggtggagtccggcggccgcatggtggatgctattctgaccaacaccctgctgcctcagatgagccagatcttacttaccgccagccgcagcgacgaacagtaccgacgtctgcacgtcacctgcgagcagggcgagtttcactgtcagtttgccgcgtaa

SEQ ID NO: 164180 - DNA, 1044 bp, Enterobacter cloacae
atgagtgacgccgccactgcaccgctgcgcgtgcatcgcctgacgaagctgccggatgcgttctggcacggcgtccgcgagacgccctggcgctacgatctgtttcagctgttaaggcgcattgatgcccagggtggcgagcgctatccgctgggccgcgcgccgctgccaaaatttgaaccgctgcgcatcggccagcagccatcgatgagttttgccccgtcgacgctggccagggtgcgtcagcgggaagagagcgggctgcatgaggtgtctatcctcagcttcggcctgtttggcccgaacggcccgctgccggtccacatgaccgagtacgcccgcgagcgtatttatcatcatcaggacaccagcctgagcgcgtttgccgatctgtttcaccaccgccttgcgctgctgttttaccgcgcgtgggcggatgcgcagcccaccgtctcgctggatcgcgccgataacaagcgctttgagggctatctggcgtcgctgattggcatgggccagccgggtcagatggacaacggcagcctgagcgcgcacgcgcgctttacccacgccgggcacctgacccgtcacgggcgggatccggaggggctggagaagatcctgcgcagctattttaaggcgccggtcaaactggtcagcaacgtgccgcagtggatgcctctctccgcgcgcgagcaggcgcaactgggagcaggacgccgtatgccgcgcatgggtgagtccgcctttctcggcgtcgccgtccgcgacgtgcagcataagtttcgcatcgagattggcccgctgagcgcggaggagtacaaccgctttctgccgggtgaagcgtgggtcaccgagctgcgcgactgggtgcgtcagtacgccggtgtggagtttgaatgggaaacgcgggtgatcctgcgcgcagacgcggtgcagggcgccacgctcggcagtcatgggcgattaggctataacacctggctgggccttcagccgcagcctgtcccgcgcggcgatctggtgtatcgcgcagagcggtaa

SEQ ID NO: 164181 - DNA, 1872 bp, Enterobacter cloacae
atggaaagtaaactactcgaatactacaaccgtgagctggcctacctgcgcgaaatgggggccgagtttgccgaacgctacccgaaagtcgccggacggctgggcatgcgcggcatcgacgtggcggacccgtataccgaacgtctgatggaagggttcgccttcctgacctcccgcgtgcagatgaaaatggacgcggagtttccgcgcttctcccagcgtctgctggagatgattgcgccgaactatcttgcgcccacgccgtcgatggcgattgcggagattctgcccgacagcagccggggcgacctgagcaagggcttcgtcgtgccgcgcggtaccatgatggacagcctggcgctgaaaaaaaccggcgtgacctgcagctataccacggcgcacgaggtcaacctgctgccgctgaaaatcgacaaggtcgagctgggcggagtccccgccgatttgccgctcgcacagctgggtctgagccagcgggggatcggcagcgccctgcggatccgcatcgcctgcgacggcccgcaacatctcgggcatctggacttcgaccgtctggaatttttcctcgccggtccggatatcgaggcgctgaagctgctggagctggtgatggagcaccatgccgggatcgtctgtcagacggtcagcccgcagccgcagcgacagctgctggcaacggatgcgctgcgccaggagggttttgagcctgaccaggcgctgcttccggacgatctgcgtaactttgacggctatcgcctgctgcaggagtatttcgcgtttccggcccgtttccgcttcattagcctcagcggcctgagcacgctgatccagcgctgtgaagaagaaaaagccttcgacatcttcatcctgctggataagtcggatgaacagctggagcgcgtggtcgatgccagccacctggcgctgcactgcaccccggtcatcaacctgttcccaaagatcgcggcgcggcagaagcttaatgacggtcagcatgaataccatctggtggtcgataacatccgtccgctggattatgaaatctacgcggtaaaaaaaatctatggcagcgcggacggccagcgtgatgaccagacgtttcgtccgttctggagcacctggagcggcgatgcgggcaactacggggcctatttttccctgcgacgcgagcagcgcgtgctgtccgagcacgccctgcgctacggcacccgtaccggctatatcggctcggaggtcttcgtctcgctggtggatgaacagcacgcgccgtggcaggaaaacctgcgctatatctctgccgaggtgctctgcaccagccgtgacctgccgctgatgctgcagcaggagctcggggagttcattatggcggactccatgccggtgaaatccctcaccctgcgtaaagggccgacgccgccgcgtccggcgctggcggaagggttcagcacctggcggcttatcagccagctgcagatgaactacctcagcctgatggacagtgacaatgaggagggggctgccgcgctgcgtcagctgttaggactgtacgcaaacctggccgaaacgcctgtggcgcgtcaggtggaaggcgttcgccactgcgtgctggagccggttcaccgccgcgtgcctgaacccggcccggtggtgttcgcccgcgggatcggcattacgctgacggtggatgagcgagccttttcgggggccagtccgtggctcttcggcagcgtgatggagcgcctctttgcccgtctggtctctatcaacagcttcaccgagttcaccctgaaaagtcagcagcgcggcgagattggctactgggcgccgcgcatgggtaaaagggcgctgatatga

SEQ ID NO: 164182 - DNA, 564 bp, Enterobacter cloacae
atgagtaatcccgctggcgaaggcgatctgctgcgcagcggctggcaagcccgcagcaagcaggagaaggtgggggcgcgcgacaaaatgcagccctcgctgctcgatcgcctcactgataacgacccggaaaaaaagcgtgagtcggccaacagcaatctgatcacccacgccgccctgcgccgcaatgtgctgcgcgatttgcagtggctgtttaataccatcaaccacgatgcctccggcgatttaagcgcgctaccgcacgtgagccgctcggtggttaacttcggcgtcgcgcccctggccgggaaaagaatgtcggacatcgaatggcacgacattcagcgcaagctcaccgaggccatcatcaattttgaaccacgcattttgccgcaggggctgcaggtccgctgcgtgtcggatacctcctcgctggatctgcacaacgtgctctccatcgagatcaaagggcgtttatggtgcgtgccgtacccgctggagtttctgtttcgcaccgatgtcgatctggaaaacggccattttgaactgaaagatgcggggtaa

SEQ ID NO: 164183 - DNA, 813 bp, Enterobacter cloacae
atgaatacgctctatcaacacctggcgggtgagtcgctcaacgacgcgcttgcgcgtctggaagcagaaatcaaagcccgtccggcggatgccgacctccgcgccgcgttcgtgcagtttttaacccttagcggcaactggacgcgtgccctgacccagctgaaaagctggctggcgctgaagccgcaggcgaaacccaccgtcacgctgctggagcagtccattcagggcgagctgcagcgcgcgcaggtgatggcgggacagacgcgtccggcgatgcctgaaacccagtggccgtggctaaccacccttgcggcggcgctgagcgaggagggcgagcgcgcgcaggcgctgcgtctggaagcccttgagcaggcgcaggccacccccggccagattaccctcgaaaacgaggagacgcaggcctttgactggctgatggacggcgatgcccgtctcggcccggtatgcgaaaccatcgtcaacggccgctatttctggctgccgtttaacgctatcgcggagatccgtttccaggcgcctgccagcgtgaccgacctggtctggcgtcacgcgctggtgcgcctgacggacgggacggagcaggtgtgccagatcccggcgcgttacccgtttgccgccgatgcttccgatgtggtcaaactggggcggaccaccgactggcacccgctcgatactgacggcacgctgtatgaaggccagggccagaaggcctggctgagcgagcaaagcgaaagcccgctgctgtccttaagcctcgtgacgtttgcgacggatggagccgatgagtaa

SEQ ID NO: 164184 - DNA, 999 bp, Enterobacter cloacae
atgaaactttggctatcgggtttggcacttctggcggcgacctctaccgcgcaggctgaaaatttccgcatcgtgcagtctcctgcgcagaagctggatatctggatcgacaacatcaaagacaacacgccgcagagctggtgtaagcctgaggtggcgctgcgcattgtggcgaacggcaagaaagacgtctccgtgctggagaactttgtgccgcgtcttggcgcactgctggaacaccagtgcagcaaagtcaataaactcagctggacgctcaacgatccggcgggaaccacgctggcgcagggcacggctggcaaagcgcaggactgggcgctggtggtgaaacaggagcaggccgcgcctgctgcgaccgtcaccgccaccccagccagcggcgcgttactgccgcccgatcagaacgtggcttcccgcaccgttgccgccgaccgtacgccgtggcaggagtttaccctgcaggacggctgccacctgcgcaccttctgggaagggggcgcctctgcaccggcgctcttcattccggattctgacaccacccgctgcggcaacggcagctggctgagcggacacaccgttgtgtcgcagtcccgcaacggcgggcagaaagagatggcggtaacgtacattcatggcttcccggtaaccgggctgaatcaaagcgccgacccggaaaacgcgctgatcacctccgtcaacaaagagcgcatggtattcagcaccccaaacagcgaccagagctggatgatcctgccttacgacagcaccctgaacagctggaagagcaacggcaccgtcgcggtggagatctcccgtgaaaccgccagcgacgatgcaaagctgcaggcgcgtatcgccgcggtgaaaaaaacctggagcgcctgggtggcacccggcaccccgctgaatatcgtgctgattgacaccctgcgtcctcagctgcgcgatccggccgttggcgcatggcgcgcggcaaattaa

SEQ ID NO: 164185 - DNA, 798 bp, Enterobacter cloacae
atgaatatcgcaacggcttctctctcccgccaggggacgcgcgccagcaaccaggatcagacgggagaaaccattggggaacgttcagcctgctttgtcgtctgcgacggcatcgcggggctgccgggcggcgaagtggccgccgcgctggcccgcaacagcattatctcccgctttgatggcgacaaacatcttaatgcgcagcatattcgcgactacgtgcagacggcgaatcgcactattctcagcgaacagcaggccgttcaggactatcgccggatgggcacgacgctggttagcctgttcattgaccgtgattacgggctggcctactgggcccatgccggagacagccgcctgtaccttttccgccggggatggctgtggcatgtgaccaccgaccacagcctggtgcagcagatgaaagatgccgggcaccagaccgacaacctgaacagcaatctgctctatctggcgctgggaattgaaaacggcgggccggaagcgagctacagcgacgtggtgcaggttgaagacggcgatgcctttttactctgcaccgacgggttctggcacggcgtcagcgaagagcaaatgaagcagtcgctgcatatggttaatacgccgcaggagtggctgaccttaatgaaccaaatcattcaaaagaatggcgaacaggaggggaatgcccaggataactatactgccctggcggtatggatgggcaaccctcaggacaccactttgctgcacactctctctgacgcagcacaatttcttccctgcggaactgattag

SEQ ID NO: 164186 - DNA, 1761 bp, Enterobacter cloacae
atgcgattcacgattatttctacgaaacccggtcatcagccgccgcaaagcagctgtgatttttacgccccgggcggcaccattgggcgcggtacggataacaatctggtattgccggacaatgaccgcaccatctctcgtctgcaggccattgttcacgttgacgctcagggcgaatgccgcgtcaccaaccgcggcagcgtcacccgcgtggttttaaatgacattccgctggagcggggacgtcaggttgagctgcaggatggcgacattctcggtattgatgactaccgtatcgaagtgaccgagctgatccacgatacgcagcccgtgagccgcatggcggccagcctgcaccagcaggcgcgtccggccgtggctcctgcgcctgcgcagcagccgaaaccggcgagtgccgcaccccgcgggaaagccgaaccgaccgccgtgccaacggagatctgggatagcctgatgcaggagttttccatctccgacagcatctccagcaaccgtacaaaaccgcagcctgcggcatcgcacgatccgttctcccagcctgcagccccggagcgtaacgccgaagatccgctggcgatgttcaacgacagcgatcccacgctcgaacgtaagcatgtcgatccggactcgctgttcagcgacgaagcgctgtttaaaaaagagagcatttttgacgacgttacgccttccacgctggtgccaccggttgagacccagccagccccgaacgaagaggggacggatgagctcgatccgctggccctgtttggcggtaagtccagcgcgccagccgcgcgtaatgacgacccgctcgggctgttgggcggcgcgccgttaacccatccggatgacgtgattaacgagaagccagcccccgtgccggtacctgagcaggaagaggacgcgctggccgattctccgctgttcgcccctgagccgcaggaagaaccgcgtgctgaagaggaacccgcgcgaccggattacgctggcttcacgatgccgacgccacaggccgttgcgcgcagcagcgcgcaggcaccgaagggccgcctgcgcatcgatccggtcaataacgccgccgccccagccgccacggcaaacagcggtgagaagggcgaagtgctgcagggcgagctgctggaggcgctgctggaggggatgggactcagcgaaatgcagcccgttccgcagtttgaccgtgaaaatatgcgtcagctggggcagatcctcggcatgttctctcaggggaccgtggcgctgctctcctcgcgctccattctcaagcgcggcgtaaaagccgacatgaccatggtgctggacgatgccaacaacccgttcaagctgttgccgaccggcaaaaccgtgttaatccagatgttcggcaccccgatgccgggctttatgccgccgaccaaatccgtgcgcgacgcgctgatcgacctgcaggcgcaccagctgggcatgatctccggcatccgcgccatcattgccgcgatgctgcagtcctttaacccggaacagctggaagagcaggcgaagcagaacggcatgacctcgcgtctggcgctgccgggcagccgcaaagccgccctgtgggactactttgttcgcagctacggcgagacggcgggcgagattgaggacgacttccacacgctgttcggcgaggccttccttcatgcgtatgacatggaggtcaatcagtacaaagactcacagagcggatcggaagacaaatga

SEQ ID NO: 164187 - DNA, 408 bp, Enterobacter cloacae
atgattatgcaaaagttattcggtgtgtttgcagtcacgttaatggtcagcgcctgtttgtctcatccagaacaatatcagtcgctttcggtaacgctgaaaaataatgaatcctgctttgctatccctgctaattccgggttagaagcgccggtcaccagccattcacccaccattatgaaacgcgcgggaaatgaatggaaagcggtatcgccgccgtcaacgtttagccctgaagtgacgttaacgacccaacagtgtcaccagtggcaggggattgcgtggcaagccggagaatatgatgttgctctgaaggtgtcagggaaaaacgattctattcgctatgcggcccgcttcaccttacaagaaggtccctcaggccagtttaagcttacgcagactgaatag

SEQ ID NO: 164188 - DNA, 483 bp, Enterobacter cloacae
atggctattgatatgtttctgaaggtcgagggtgttacgggcgaatcgaaagattctaaccacaccggctggactgatattacctccttctcctggggcgcttcccagccaggtaatatgagcgttggcggtggcggcggtgccggtaaagttaactttaacgacctgcacgttaacgcgctgatcgacaaatccaccaccgctatcctgaaacactgcgcaagcggtaaacacctgactaaagttgagctgtccgtttgtaaagcgggcggccagcaggtggaatactcccgcatcacgctggaagatgtgctggtgacctctgttcagtataccggtgctgacaatggcgataccgttggtgtgacctatgcattccaggctgcgaaagtgaaacagcagtactgggagcagaccacgtcgggtggtaaaggtgctgaaagcagcgctggctggaacatcaaagagaacaaagaagcgtaa

SEQ ID NO: 164189 - DNA, 252 bp, Enterobacter cloacae; identical to SEQ ID NO: 127942

SEQ ID NO: 164190 - DNA, 495 bp, Enterobacter cloacae
atgagaccattatacgaacaactaaaacgtcagcattactcttcaaatcatacccgcgcgggttttgcctcgggtgaacaggtcttctcagaaattggctatgattattcaacgattatcaagcagcaaccggcatacgaaaatacctgtgcggtaagaatgagtctggcattgttaaaatgtaatgttgaattcacagggcgtttacccataaagtcgggcccctataaaggaaaaacaatcgaacccggcgcaaaattacttgcggatcaactttataaatcccatgtgtttggcaaggcagaaatctttaccgatcgtgaggcgggtgcgcgatcgatgttgggccgaaaaggcgttgttttcttcaataaaattgatgggtatggcggtggtcatatcgaccttatcgagcctctgagtaataattcgtttatatgtaactccgattgctttccgtactgtcaggaaatctggttttgggaattaaaataa

SEQ ID NO: 164191 - DNA, 1500 bp, Enterobacter cloacae
atgagcaaccagactcaacaacacgagcagcaggcgggtcaggcgttcagccaggatgaattcagcgcgctgctgaacaaagagttccgcccgaaaaccgaccaggcgcgttccgccgtcgaaagcgcggtcaaaaccctggcgcagcaggcgctggaaaataccgtcaccttctcgaacgatacctaccgcaccattcagaacctgattgcgggtatcgacgaacagctgtcacagcaggtgaaccagatcattcaccacgaggagtttcagaagctggagagcgcctggcgcggcctgagctacctggtgaacaacactgaaaccgacgagatgctgaagatccgctttatgagcatctccaagcaggagctgggccgcaccctgaagcgctacaagggcgtgggctgggaccagagcccgatcttcaagaaaatttacgagcaggagtacggtcagttcggcggcgagccgtttggctgcatcgtcggcgactactacttcgaccacagcccgcaggacgttgagctgctgggggaaatggcgcgcatcggttctgcggcgcactgtccgttcattaccggtaccgcaccgggcgtgatgcagatggagtcctggcaggagctggccaacccgcgcgacctgaccaagatcttccagaacaccgaatacgccgcctggcgttcactgcgtgaatccgaagatgcccgctatctgggcctggtgatgccgcgcttcctgtcgcgcctgccgtacggcattcgtaccaacccggtcgacagctttgattttgaagagcagaccgacggcgcgaaccacaacagctacgcctgggcgaacgcggcctatgcgatggcagccaacatcaaccgctccttcaaagagtacggctggtgcacctcgattcgcggcgtggagtccggcggggcggtggaaaacctgccgtgccacaccttcccgagcgatgacggcggcgtggacatgaagtgcccgaccgagatcgccatcagcgatcgtcgtgaagccgagctggcgaaaaacggctttatgccgctggttcaccgcaaaaactccgactttgctgccttcatcggcgcgcagtccctgcaaaaaccggccgagtaccacgacccggatgccaccgccaacgcgcgtctggcttctcgcctgccgtacctgttcgcctgctgccgttttgcccactacctgaagtgcatcgtgcgcgacaaaatcggctccttccgcgagcgcgaagagatggagcgctggctgaacgactgggtcatgaactacgtcgacggtgacccggcgaactcctcccaggagaccaagtcccgcaaaccgctggcggctgcggaagtgcaggtgcaggagattgaggacaacccgggctactacgccgcgaagttcttcctgcgtcctcactaccagctggaaggtctgaccgtttccctgcgtctggtatctaaactgccgtcgctgaagacgaaagacgcgtga

SEQ ID NO: 164192 - DNA, 525 bp, Enterobacter cloacae
atggcaatgagtaacagtgggcagaaattcatcgcacgtaatcgtgccccccgcgtgcagatcgagtatgacgtagagatctacggtgcagaacgtaaaattcagctgccgtttgtgatgggcgttatggccgatctggtcggcaaaccggtggaaaacctgccggccgtcgacgagcgtaaattcctcgaaattgacatcgacaactttgacgaacgcatgaaggcgctgaagccgcgcgtggcgttccaggtggacaacaccctgacgggcgaaggtaagctcaacgtggatctgaccttcgacagcatggacgacttcctgccggacgcggtggcccgcaaggttgagccgctgaacaagctgctggaagcgcgcacccagctctccaacctgctgacctatatggacggtaaaaacggtgcggaagagctgatcgcaaaaattctgcaggatccgacgctgctcaaatccctgagccagttgccgaaaaatgacgaaagcgcgaaaggtagcgaggaataa

SEQ ID NO: 164193 - DNA, 1017 bp, Enterobacter cloacae
atgaatatcgaagaatttctcgcgcccataagccccgacaacccctgcggcgaaaacctggagtacgacgctgacttccaggcgatgaaccaggcaagccttgggaaagcggaacagcagtttggcgacacgatcatcccggcggagcctgctgactggaacacggtcgaaaaatacgccaccagcctgctgacccgcaccaaagatcttcgcgtcctgctggcgttaacccatgcctggacccgccgtcgcgggctggcgggctacgcggacggattactgctggtgcaggaggcgatcgcccgctactgggagccgctctacccgctgctcgaagagtacggtgaaaccgacccgttctaccgcatcaacgctctcgccgggctgagtgataaatccgacctgacggtcgcggtacgcaacgcctcgctgctgcgttctaacggcgatgaaatttcgctgcgggatgcccaggcgctgctggacggcagtaaaaccgaatgcccggactatcccggcgggcgcccgcggctgattgacgagctggcccgcggcgaccagccggggaccgcagcggtcatcgtcattaacgaacgtctgctggccattcgcgagctgctcatcgggcatctcggtgaaagcggcgtacctgagatggagcagctgctgaaaaccgtggggctggtggccagcgcctgtcaggtgaccgacatcagcaagctgctgccgaaccgtgatgcgcaggctgaaccccaggctgagcagcagccgacggctacgcagcccgttcagccggtgaccgactggcgcagcgtgcaggtcaccagccgcgccgacgcccagctgatgctggaaaaagcgaagcagtattttgcgcagtacgaaccgagccaccccgcaccgctgatgattgaacgggtgcagcggctgtcagaacttaactttatggacattattcgcgacctggcgccagacggcgttaaccaactggaaaacatctttgggcgccgcgaatag

SEQ ID NO: 164194 - DNA, 717 bp, Enterobacter cloacae
atgacgaatacccctgcgatgaaccgctacagctggtatggcaagttacccagcgccggagattttttgcagcgccgctttcctgacaccttacagcgccagtggtcgcactggttccaggttggtctgctggcctggcagcaggaagagcagcgcagcggcgagcgcccgtttcagaaagcacccgtctggaattttgtggtaccgcccatgctgggcagccagatgatccagatgggctgtctgctgcccgggcgcgacagcgtcggccgacaatacccggtttgcattcagctgagcttcgccccgtcagagtggtcgaccagcctgctcagccaggccgaaagctggtatcagcagattggacgcctcgggctgcacgcggtgcgcaacagtttttccgcctcgcagctcgacgagatgctgatgtccattccggcgccgcagccggtcgagccgcaaaagcgctccgacatcctggatgtgattggctacgacgaggacggccagagcacgctgggctggcctcaggcggcagagtgctttgacccgctgcgtcagaccagctactggtggaccaaccgctgcgacggatacccgctctacacccacgtgcacagcggcaactttaccgggcagcttttcaccctgctgttcgatccggcagggggcgcccgtccgggccgtcacggtctctatccgcctatgtttgaataa

SEQ ID NO: 164195 - DNA, 3621 bp, Enterobacter cloacae
atgctgacgactcttctttccatactgactaaccgcattctgtggagcttcctcggcgtcacggcgctggcggcggtgatctggatgattggcccgctgttgtccatcgtggacacccggccgcttgaatctgaacagaaccgcatcatcagtatcgccgtggtctatctgctgtgggcgcagggccacattctgccgcgtctttacaacgcctggctgaaccgcaagctgatggacaagctcaatgagaacaccaccagcccggaagcggcggatccgcagaagcgactgaacaacgaggagcagatcctcgccagccgttttgatgaagccgcgcagatgctgaaaaaagcgcacttcagcaaggcggggcagagcgctcagtggacgcagcgcttcagcacgcaatacctctatcagctgccgtggtacgtcattatcggcgcgccgggttccggtaaaaccacggcgctggtcaactccgggctgcagttcccgctggccgaccgtttcggtaagaccgccctgcgcggcattggcggcacgcgcaactgcgactggtggtttaccaacgaggccgtgctgctggacaccgcgggtcgctataccacccaggagagcgagcaggtgcaggacgccggggaatggctgcagttcatggggttactgcgcaagtatcgccgccgccagccgatcaacggtgtgatcgtcaccatcagcatttctgacctgctcacccagtcagccgaggcgtcccgccagcaggcggtgaacctgcgtcagcgtctgtccgagctgcatgaacagctggggattcgcttcccggtctacgtgatggtgaccaaggccgacctgctcaaaggcttccgcgcctggtttgccgactacgataaagcgcagcgcgaccagatttggggcttcacgctgccgtgggaacaaaccaaacacgccgattacgacctgatgggcaatttccagcaggagttttctctgctgcagcagcgcctcgacgccgggctgccggaaaccatgctcaaagagcatgacgcgaagacccgcgccgaagcgtatcttttcccgcaggagttcgctgcgctgcgtccgctgctggcggattacctgagcacggtcttcgcccgctcgaacttcgaaaccgagttctctccgcgcgggatctacttcgccagcgggacgcaggaaggcatgccgttcgaccgcgtgatgggcgaactgaaccgcgcgctgtcgctgccggaaggggcagagagcgataactgggattcggtcagcaaagaatcgccaatcccgggcgcaaaaggccagagtttcttcatcaagaacctgctgcaaaacgtcatcttccaggaagccgggatcgccggagaaaaccgctggtgggagctgcgcaaccgggccgtgatctggtctggctatgcggcgctgctggccctgctggtgatcctgggtggactgtggctcaccagctatgccaaaaacaaggcctacctggaagaagtggatgcgaaggttccgctgctcgaccagcagagcaaggccttacagaaccagacccagcgtgatctgttcgaactgctgccgctgctgaatagcctggtggatctgccgaaaagcgacgcgtttgacgtgaacgatccgccggtctcccgccgtatggggctttatcgcggggatgacgtcagcgatgcctctcagtccctgtatcagaaagcgctggatcagatgctgctccctgccgtcgccatgcacatcaccacctggcttcgcaacgacaacggcagcgatgtggaatacagctacgaggcgctgaaagcctatcagatgctctatcagccgaagcactacgacggcaaattcctgcattcgtgggtaatgctcaacctgcagcgtaacctgccgcagaacgtcacgaaggcgcagctgcagcagcttgaatggcacctgacgcagctgctggagccgaaaattcaggcctcgccgtacgcgcaggacgagtccctggtagcgcgcgaaagagcgatgatcggccagcagccgctttcaacccgcgtctacggccgcctgaagcgcctgctggaacatgacgacaacctgaagccggtctccctttccgacctgggcggaccgcagagcgagctggtattttcccgcaaaagcggcaagccggtgagcgaaggcgttccgggtctgtatacgccggacggctactggaaaagctttaacggccagattgacagcgttaccaccgccctgcacgaggacgacgcctgggtgctgggggccgccacggcgcaggaagataaacagcagatcgataacgccgtgcgccagctctatatgcgcgactttatcgctaactgggatcgctttctcgctgacattcagctgaataacagcgccgacctttcccagcgcatcaataccgcgcgcctgctttccggcgccaactcgccgctgcgccgcctggtgcagaacctgagccaggtcctgacgctctcccgcgatacgccagcgccggaagatgcgggtaaagctcaggcgcaaagcagccgcgccacccgcacgctggaagcgctgttcagcaataatgacaacgcgccaacgcaggccgccgcggttacccaggcgccggagcagctggtgaccgaccattacgcgccgatgattgagctggcccagccgctggagaagggcgggaagaccatcgtgtttgacgattttctcaagcaggtggatgagctgtatcgctacctgaccgcggttcaggatgccgccaacagcggcatgccggcgccgggcggggaggcgatcagccgcctgcaggccagcgccggtcgtctgccgggcgggctgcaaaccatgttcagcaacatggcggtgggtgccagcagcgacacccagcgccgtgacctggaaaacgtgcgtaagcgcattaacgttgaggtgggcgggttctgccgtcaggcgattgccggtcgctacccgctggtgcgcagcgccagcaccgaggtcacccctgacgatctcgcgcgcatgtttgcgccggggaccgggctgatggataccttctttcgcgataacctgaccagcaaagtggacaccacccaggccaactggcgctttatgccgggcattgacggaaaaacgctgccgggaagtgaagggctgctgagaccgttccagcaggcccagtcgattcgcgacgccttctttgctaacggcgcaaccacgccgtctttcaaggtgacggttcgcaccgtgcgaatggataacaccattctgaatctgaccctggacgttgacggtcaactgctgcgctacagccacggcccgcaggccgtgcagatcatgaactggccggggccgggcggcaccaaccaggtccgtatgcagctggggctggcgaacggcagtacggcgacgctggtcaccaacggcgcttgggcgctgaaccgctttttcgataaagcgagcaccagcccgggcacgggtagcctgagccgtcaggccaccttcaacgtcgacggacatcaggtcacgctggagtttgcgccgaacagcattcgtaacccgttccagcttccccgtttctcatgcccataa

SEQ ID NO: 164196 - DNA, 1239 bp, Enterobacter cloacae
atgcaggaacgacaggataccggcagcgatgccgcgttcaccggggccagtagcaacaatcagctggtggcggccgccaatccgctgctcaatgcgattccgcagatccgtcattcggtatcgcacgacgatcaggtggcgttacgccagcgcctgatcgatgaaattcgccgtttcgaagtccgctgtcagcaggcggggctgccctacgaagtgatcgtcggggcacgctactgcctctgtacggcgctcgatgaagccgccgcgctcaccccctggggcagcagcggggtctggtcaagcaacggcctgctggtgacgttccataacgaaacctggggcggcgagaagttcttccagctgctggcgcgcctgtcgcaaaacccgcgcgagcacattctgctgctggagatgatcaactactgcctgctgctcggcttcgaaggacgctatcgggtgctggacaatggccgcacccagcttgagaccatcaagcagcggctgtggcagatgatccgcggcgtgcgcggcagctatccggcgccgctttctccccatccggaagatcgcccggtgctgcgcaagctctggcggccgatggttcctctctgggcctgcgtggcgctggccgggtttatcgcctgtctgttttatatcgtgctcaactggcgtcttggcgacagcaccaacccggtgctggcgaagatttaccagtcccagctgccggaaaccactattcagcaaccggcgcgtcagcttccggcagtgctgaacctgcgcggcttcctgaaaccggagatcgaggctggcctcgtcgcggtgaaagacgaagcggatcgcagcgtggttatcctgaaaggcgacgggctgtttgcctctgcctcgaccgtcgtgcgcgaccgctatgaaccggtcatccaccgcatcgcgcaggcaatgaataacgtgagcggcaaaattctggtggtgggctacagcgacaacgtgccgatccgcagcgcgcgctttgcctctaactatgaactctctctggaacgcgcccgctcggtacagaaaatgctgcagggaagcctctctcagcctggccgcgtgaaagcggaagggcggggagagattaacccggtagcgccgaacacgacgcctgaaaaccgcgcccgtaaccgccgtgtggaaattactctgctggtgtcgcctgaaaatacccaggccgagctgaacggattgccgcaaggaaactaa

SEQ ID NO: 164197 - DNA, 1344 bp, Enterobacter cloacae
atgacgaaagcagaaaaggtcgtctggaccgaaggcatgttcctgcgtccacaccattttcagcggactgaaagctatctgctcaaccatgttcgtgaatggggcgcgctgcagcgatcgtatctctggggctttctcgacgttgaactggatgaagcgatgcttcgtcagggatgcatagccctgagctactgcagtgggctgctgccggacggcacctttttccaggtgcgcaacgggcgcaacggtcctgtaccgctgaaaattcctgacaatctcaccaacgaaaaggtggtgctcgcactgccggttcgtcgtggcgagagagaagaggtgattttcagcgaagagccatcctcgctggcgcgctttatcgcgttcgagcaggaggtggaggacgataacgccatgtcggtgggggatgctaccgtccagtttggccgcctgcgtctgaccctgatgctcgaaaaagacctcacggcggagtggaccgccatcggcgtggcgtttgtgaccgagaagcgtaacgacaaccacgtgcggctcgacaacagctacattccgccgatgctcaatgccaataacagcccgcagatctacagcatgatcaacgatctgcacggcttactggtgcagcgcagccagcagattggcggccgtttgcgccagcccggccgctttaacacctctgaaatgatcgagtttacgctgctgtcgctggttaaccgtcatctgggcgaggtgtctcatttaaaaaccctcccgctgctgcacccggaaaccctctggcgcagctggctgccgtttgccaccgagctcgccacctggacgtcgcagcgtaccgccgaaagcgtgctgccgatttacgatcatgacgatatcgcaaactgcttcagcaagctgatgctgatgctgcgtcaggggctgtcgctggtgatggaagaccacgctatccaactgccgcttaacgagcgctctcacggcctcaacatcgccacggtgcctgaaaccagcatggtgcgtgagttcggcttcgtgctggcggtcaaagccaacgtgccgggcgaacacctgcaaacccatttcccggcgcagatgaaggtcgcaccggtgtcgaaaatccgcgatctggttcagcttcagctgccgggcattatgctgcgcgccatgccggttgcaccgccgcagatcccgtggcatgccggctacagctactttgagctcgagaagggcagcgagctgtggcacgagatggataagtccggcgcattcgccctgcaccttgcgggggagttcccggggctggatatggagttttgggccatccgtagcccgacagaataa

SEQ ID NO: 164198 - DNA, 504 bp, Enterobacter cloacae
atgaataataaaaattttcataggctgtggttattcttttacgcgatgattttcgcgctgatcggtggttgttcgtcgtcttcacacagcgacccctcccgctacaatctgcagtttcaggctcatccacaaatcaatgaatctgcgccgcttaaggttcgggtgctgttgctgaaatccgatgcggatttcatgtccagcgacttctactccctgcagaacaacgcgtcagccacgcttggcgcgaatctgctgaacagcgatgtgttcttcctgatgccgggacagctgtcaaaaactctcagcgggcaaagctcgccggaggctcgctacatcggcgtgatggcggagtaccaggtgctggatggcaaaaaatggcgcgtttcactccctctgcccgtgcctggcgaaaatcatatctaccagttctggaaatggtccgccgatgaacttcaggccaacgtttttctcgacgtgaacggcattcgggtcatcagccagtaa

SEQ ID NO: 164199 - DNA, 495 bp, Enterobacter cloacae
atgaaaatgcgcgtactgttttcacttctgtttgtaatggcggtggcgggctgtaaagcaccgcagaaacctgtgattaacgacgatacgatcgagaccagccaggtcaacggcgtcaccttaacccaccgtcacgctgtgacgccgccggcggagttcacgccggttaacgagccgtatcgtgccatgtatccggcctctctgatgagccgtcctgacttcggcggtaaagttatccgcactcttgataccggaaaaacgtacgtggtgctgggtcaggttgaacactactggatggcgcttgccgatgaaggcaacgagcagctgattggttacgttccgatgcgcgccgttatcaaggccgaccagtacgacgccgccgtgcgtaaacaggcgattcgccataagacgcgtaaaaaagcgacctgtgtcgatgtcgacggcaacagcaaagcctgcaaagacagcgctaacggtacctggatcctgaactaa

SEQ ID NO: 164200 - DNA, 2289 bp, Enterobacter cloacae
atgaacaagaaaagacgctcggtgccaggcatcagacactatgacggccctgccggcggctggggcgcactgaaagcgacggcgattgcggtacgcacccaaatggatacgtttgacgccccggcgacgctgctgcgcaccaaccagcctgacggctttgactgcccgggctgcgcgtggcctgataaagaacacaaatcgacgttccagttctgcgagaacggcgccaaagcggtgacctgggaagcaaccagcaaacgcgtcacccccgcgtttctggccgaaaacagcgtctcctcgctgctggcaaaatcggactttgagctggaaggctacggtcgactcacgcaccccctgcgctatgatcgggcgagcgacaccttccgccccgtcgactgggacgcggcgtttcagcgcatcggagaggtgttgcgcgggctcgaaccggaccaggtcgagttctatacctccggacgcgcctctaacgaagcggcgtatctgttccagctgttcgcccgtgaatacggcaccaacaacttccccgactgctcaaatatgtgtcacgaggccaccagcgttggtttgccccgttcgattggcatcgggaaagggaccgtctcgctggacgacttcgacaagacggagctggtgatctccatcggccataaccccggtacgaaccatccgcgaatgatggggaccctccatgagctggcccgccgcaacgtgccgattatcgtctttaacccgctgcgcgagcgcgcgctggaacgttttgcggacccgcaaagcgtgattgaaatggcgacctacggctccacggatatcgcttcgacctatttccaggtgaaggccggaggtgatgccgccgcgctgaaagggattgccaaacacctgctggaaatggaggccgctcgcggggacgtgctcgatcgcgcgtttattgccgaacatactcagggctttgaggactttgccgcagatatcgcgcaaacccgctgggacgagattgaacgcgagtcgggtctcagccaggcggcgctcaaacaggtggcagaggcgtatgcgaaatcgaatgccaccatcatcacctacgggatgggcattacccagcacaacaaagggacggccaacgtccgcctgatcgctgacctgctgctgatgcgcgggaatatcggcaagcccggcgcgggaatatgcccgctgcgcggccactcaaacgtgcaggggaaccgtaccgtcgggattagcgagaaacccacgccggccttcctgaaccgtctgaaggaggttttcggctttgagccaccgtctcaccacggccatgacgcggtgcaggccacccaggcgatgatcgacggccgcgcgaaggcgctcatctgcctcggcggtaattttgcggtggcgatgcccgaccatgaacgcgggttcccggccatgggctccctggatttgagcgtccacgtcggcaccaagctcaaccgtacccatctgctggtgggcaaagagacctttattttcccgtgtcttggccgtaccgagctggatgttcaggccaccggccgccagtccattaccgttgaagactcgatgtcgatggtccatgcctcatccggcaagctaaaacccgcctccccgttgcttcggtcagaacccgctatcgtcgcgggcatggcggaagccaccctgccggacacccgcgtggactggatgacgctggttgaggattacgaccgcatccgcgatctgatcgagcagaccattccggggtttgagaactataacgcgcggatccgcgttcccggcggcttccgtatgccgctgccgccaacgcaacgtctctggccaacggcgacgggaaaagcgatgttctcggtcttcgacggtgttcacgagaacgccagcggtgaaggtgagcacgtcctgcgcctgatcacgctgcgcagccacgaccagtacaacaccaccatttacgcgctggatgaccgttaccgcggcgtgtttggccgccgcgacgtgctgtttatgaacgaagacgatatggcgcagtcagggctggaacacggcgaccgcgtggatatcgaaaccgccctgcccggcaacggacagcgtctggaagacattaccgtggtggcgtacagcatcgcgccggggaccgtcggggcctattatccggaggccaacgtgctggtcccgcttgattatctggataaggacagcggtacgccgtcgtataaatccgttccggttcgcatcaccctgcgctcaaaagagatccgcatgctgtaa

SEQ ID NO: 164201 - DNA, 897 bp, Enterobacter cloacae
atggatatcaaacagttaaaatatttaatcgcgctcgacgagacccgccattttggcaaggcggcctcgcagtgcaacatcactcagccgaccctttccatgcgcatccgcagcctggaagaggagctcgggctggtactgattgtgcgcgggcagcgctttgaagggtttacgccggagggtgaacgtatcctcgcgtgggcccgcgcgctgctggctgcacatgacgggctacaggcggaagccgcgctgtgcaaaggtcaggtggtgggcgaacttcgtctggggatggtgccgctggcgagcgtggatccgatgatctttatccgtctgctgacggaaaaatacccggagctgacctacagcctctattccatgtcctccgcgcagattgccgacggcgtcagccgcaatcagcttgagctggggatttgctatctcaacagcatcgataccagcctgttcgatattatccagcttcccaaaacgaagatgggcctgctgcacgacgtccgccatttccagctcggccaggagacattgacctggcgcgatctgacggattttcctctggggttcctgaccaaagggatgcattatcgggcgcatatggaggccagctttaagtctgctggcattgaaccgaggtccgttttcgagagcgactccacgttccagatcatccaggcggtgcaaagcggcgtatgctgcgccgtgatgccgctgaacaacgggctggaagatctgaacggtcatttcaggattgtccccatcgccgacgcggatatcgaggcccctgtcggcctgattatgcgccgacagaaacccgtctcctcgctggcgctgcgctgttttaccgacgcgcaggagatctatcacgccagcaatgaggcgtag

SEQ ID NO: 164202 - DNA, 759 bp, Enterobacter cloacae
atgagtaacctgctggcgtttcccatgtatgcggtggatcgcgccgacacccgcgcgctctggctggcggtaaaggggctgctggctgcgcgcggtgtgcccgtcgaagatgtccctggctggccggagtccgatctgctcacccactggcgacagcctgcgcttgtcctcagccaggcctgcggttatccgctcgtcacgcagctttcggacgtgcaggtcgtcggctgttttcactacgcggccccgggctgcaaagggttccactaccgcagctttctggtggtgcgcgaggagaatcggcacctcacgctggcggattttcgcggccgacgggcggtctgtaactctgcggactcgcagtccggctacaatgcgctgcgaaaaaaagtggcgcctctggtggctcaggagccgtttttcgcgcaaacgtccttcagcggcagccatcgccagtcgctgattgatgtcaaacgcggggcaggggatatcgcggccatcgactgtgtcacctgggcactgctgcagcgtcacgaaccggaaagcctgacgggtctggcggtcattgaccatacccctctgacgccagggctgccgctcattacctcgacccgcacctcgcctgagaccctgaacgcccttcgcgatgcgctccacgcgctggtgagttcgccggagcaccgggccgtttgcgacgcggtgctgatccgcggttttagcgtggtgacgcgtcaggcctacgcctcattgctggcgtga

SEQ ID NO: 164203 - DNA, 867 bp, Enterobacter cloacae
atgttcacgatttatgcgggctggtttgccacgctggcgttctggcaagcgctcggcctgctgcccgccacgctgctgctgatcgggtttaccgcctggtatatgtccctgcagcatgagcttatccacgggcatcccacccgttttgcctggcttaaccagctgttcggcacgctcccgctggcggtctggtatccgtatggcctctaccgggattcccatctggctcaccatcggtacgatagcctgacccatccggtggatgaccctgagtcgtattattttaccgaggcgagctgggcgcgcttttccccctggcagaagcgcctgatccgggcccggaatacctttgccggtcggcttctgctggcgccgctgctggatatcgtccagacgctgggcagcgccggggcggcgtttcgtcatcttcacctgcgggcgatgacgatgtggctggttcacatcacgctgctggtggcgcttttcgcctggatgacgcacgtcggtttttcccccgtctggttcgtgctggcggtcagctatccggcgctggcgctgaccaaggtgcgatcgtttctcgaacatcgcgcggcggacgatccgctggcgcgctccgtcattaacgaggccgggctgttctggcggatactgtttttaaatctcaactaccattcagtacaccatgatttaccgggggtgccgtggtacgggctgaaggcgatctaccagcaaaaccgggaggcgtaccgggagcgaaactgcggttttctcgtcaggggctacggtgaatggctgcgccagttctgggccaggcccgtcgacgtcaccgttcaccccggaaaacaacaggaagagggatatgagtaa

SEQ ID NO: 164204 - DNA, 981 bp, Enterobacter cloacae
atgaagaagatcctgattatcgttcccgacggcggcatgctgtttgaagccgccggtatcgccgacattctgatgcaggccaaccggctgcatccggaagggctggcgcatccccgctaccggattatcatcgccaccacgcagcctcaccaggtgatccacggccagtccggtctgaacctgctggcggactatcgtctgccggagctggatccgcgcgaaccgctggacaccattatcatcaccggacgcggcatgaacgagcaggagagcatagccgttgtggactggctgcacctcgctgcgccgcacgcccggcgggtagcctctatctgcggcggcgcgatgctgctggcccagaccggcttgctggacggtcggcgcgccaccacccactggcggctgctggagaccctgcaagcccagtacccgtcaatccaggtcgaaggcggcccgctgtacattcaggacggccccatctggacctccggcggcgtgagttccgggttcgacctgaccctggcgctggtggaggacgactacggatttaccctcgcccgcgacgtggcgcaggatatggtgatgtacctgcgacgtcccggcggacagctgcagttcagccgctacagcctgcagcagccgggcaccgcagggccgataggcgaagtgcaaagctggatcctgcagaacctcaccgccgatctgtgcgtggagaacctggccgagaaagcggcgatgagcccgcgtaacttcacccgcgtgtttacccgcgaggccggggtctcgccagcccgctacgtgaccgaagcgcgtctggccgccgcccgccagctgcttgagcaaacccgcgatccccttgagcgcgttgcggagcaaagcgggtttggcaccagcattaatttacgccgcatctttgagaaacagcttcacctcacgcccggcgaataccgccagcgctttcactgccgcaagatggcgtaa

SEQ ID NO: 164205 - DNA, 1011 bp, Enterobacter cloacae
atggttaaggtcggtattaacggtttcggccgtatcggacgtaatgtcctgcgcgcggcgctgggcaacccggatctgcagattgtggcgattaacgatctgacggacagtaaaactctcgcccatctgctgaaacatgattcccttctgggcaaactgcccgcgcccgttgaagcgggtgacggtgcgctgcaggtggacggccagcggatcgtggtatttagcgaacgcgacccggcgaatatcccgtggcgtgatgccggggtagacgtggtgattgaggccaccggcttcttcaccgagcgggagaaagcggcggtgcatatcacccacggcggcgctaagcgcgtcatcatttccgcccccgggaagaacgacgacctgacgattgtgatgggcgtcaaccatgaccagtacgatcccgcccggcacgcggtggtgagcaacgggagctgcaccacgaacggtctggcaccggccgctcaggtgctgcatcagcagttcggaattgagcatggcctgatgaatacgacgcacgcttacaccaacagccaggcgctgcacgatcagccggagaaagatctgcgcggcgcccgcgcggcggcgctgtcgattgtgccctactccagcggcgcggcgaaagcgctggggaaagtgatcccctccctggacggcaagctgaccgggtactccctgcgcgtgccggtgccggtggtgtcgattgtcgatttaaccgtgacgctgagccgcaacgtgaccgccgaagaggtgaatgacgcgttccgcaacgcggccgccagcgggcctctgaaaggcattctgggctatagcgatgaaccgctggtctccagcgattaccagggtgacccgcgctcctcgattatcgacgggctttccacgctggtgattggcgggaatatggtgaagatcctggcgtggtatgacaacgaatggggcttctctaaccgcctggtggatctggcagtattgatggataagaaagggctgtaa

SEQ ID NO: 164206 - DNA, 1188 bp, Enterobacter cloacae
atgagttcatgtgtcgcggcgagcgaggcggtagcgcctgcaaaacccgcctggcgggccgtctattcactggggctgggggtatttggtttgattacggcagaatttctgcccgccagcttgttaacacccatggccgcgagcctgggcgtgaccgaggggatggccggacaggctgtcaccgccaccgcgctggtggcgctggtcaccgggttgttgatcaccccggcaaccaagagtatcgaccgccgctgggtactgatgtttttctcggtgctgcaaattatctccagcctgctggtggcctttgcgcccaacctgcacgtcctgctcatggggcgcctgcttctggggatagcgatcgggggattctgggccatgtcgacggccacgacgatgcgtctggttccggcagataaagtgccgaaagcgctggcggtgatcttctccagcgtgtcgattgccacggtagtcgcggcgccgctgggcagctatctgggcagcctgatcggctggcgcaacgtctttgtgctctgcattctgccgagcatgctggcgctgctgtggcagctgtgggtgcttccgtccatgaagccggagagcagcggtagcctgagtacgctgttccgcgtgctgcgccgtccagggatgatcggcggcatgctggcgaccatcctgatcttcagcggccatttcgctttctttacctacctgcgtccgttcctggagacggtaggacaggcgagcgtggaaaccatttcattgatcctgctgggctttggtatcgccaactttgtgggcacctccgtggccgggcatctgctggcacgcaatctgcgcctgacgctggcgctggtgccgtttgcgatgggcgttctcgcgctaatgatggtcgcctttggtcatctggcgatgctggacgggctgctggtcgcgctgtggggctttgcatttggtctggttccggtgggctggtcaacctggcttgcgaccaccgttccggatgaagccgaaagtgcaggggggctgctggtggcctcaatccagctggcgataagcgccggtgcggcaggaggtggggcggtatttgatcttaacggtgccagcggcgtgttcgcgggcagcggtttgctgctggtgacggcgatggtgattgtgtttatgggtgtgaaagtgaaagcggagtga

SEQ ID NO: 164207 - DNA, 957 bp, Enterobacter cloacae
atgaccgtacagtcacccgatttgatcagcgaacttttacggggcatgcgcctgtcaggcgtgaaataccggcggattgaagccagcgcgccctttggcgtcgcgtttcatcaggctcccggccgggcacagttccattttgtgagccacggtagcgccctgctgcgcatggagagcggcgcaacgttcgaactgagcggcggcgacgccctctttattcccggcgggaattcccacgctttgctctctgacgagcaggccacccttaccccggtcaacgccttcccgagcgagcctatctgcagctcggtctgcgccattacctgcgagccctgcccggagagcgagaacacccttatttttagcgggtgcatggattttgagctgggcgggatgcagccgctgatcaaggcgatgccggaagtgatgatggttagccggctgatgtccacctggccggaaattcatccgctgctggcggcgatggagcgggaatccgcggcgcgtcaggccgggtatgccgggatccttgcgcggctggccgacgtggtggcggcgttaattgtgcggggctgggttgaaggcggctgtggcaaagccaccggctgggtgcaggtgctgcgcgacccgcgcctgagccgggccatttacgccatgcaccagcagccaggcctgaactggagcgtggcggatctggcaaaagaagcaggcacgtcccgctccgtattcgcggaacggtttctcgcggcgacgggaaccaccccggcaaaatatctcagcgagctgagaatgcggctggccattcagtatattcgtcatgaaaaccagcccattgaaaccgtagcgctgcggctggggtatggctctctggcggcatttagccgggcgtttaagcgcatcattggccatgcgccgggcacgctgcgggaagccagccagaccgcggaagaggtctga

SEQ ID NO: 164208 - DNA, 1686 bp, Enterobacter cloacae
atgataagacctcgtacactacgccccgcgtttttgccccttgcgttaggcggcgcgctgctcggcgtaacgacactgagctatgccgacgataaccccgcaacccagacaacctcacccgatattttacttggccctctgtttaacgacgtgcagagcgccaaactgtttcccgatcagaaaacctttgcggatgccgtccccaaaagcgacccgctgatgattctggcggactaccggatgcagcatacgcagtccagctttgacttacgccactttgtcgagatgaactttacgctccctgcggaaggggaaaaatatgttccgcctgctggacaaagtttacgtgagcacattgacgatctctggcccgtactgacgcgcactaccgataaagccagcaacaaatgggattcccttctcccgttaccgaagccctacgttgtgcccggcggtcgtttccgcgaggtctactactgggacagctatttcaccatgctgggactggcagagagcgatcattgggacaaaatcagcgacatggtggataactttgcgtatgagatcgacaccttcggccacattcccaacggcaaccgcagctattacctgagccgctcccagccgccgtttttctcgctgatggttgaactgctggcgacccatgacagcgacgcgctgaagaaatatcgtccgcagatggagaaagagtatgcttactggatggacggcgtcgatgccctgcagccgggccaggccaacaaacgcgtggtgaaactggatgacggcgctgtcctcaaccgctactgggacgaccgcgatacgccgcgcccggagtcctggcttgacgatgtgaacaccgcgaaaagtaacccaaaccgaccggcaaccgagatctaccgtgatttgcgttccgccgcggcttcgggctgggattttagctcccgctggatggacgatccgcaaaaactcggcaccatccggaccaccagcattgtgcccgtggacctgaacgccctgatgttcaagatggaaaaactgctggcccgggcaagccaggagagcggcgatgccgccagcgcaagcaagtatgagacgctggccaccgcgcgccagaaagccatcgagagccacctgtggaatgataaagaggcctggtacgccgattacgacctgaagagcaagaaggtacgcaatcagctcacggcggcggccctgttcccgctttacgtcaaggcggcggcgcaggatcgtgccgaaaaagtcgccgcggcaacgtcctctcgtctgttgaagccgggcgggatagcgaccaccaccgtcaacagcggccagcagtgggatgcgccaaacggctgggctccgctgcaatgggtggcggcggaagggttgcagaattacgggcaagagaaggtctcgatggatgtgacctggcgcttcctgaagaacgttcagcatacctatgaccgggaaaagaaactggtcgagaagtatgacgtgtcgaccaccggtacggggggcggcggcggtgagtatccgctgcaggacggcttcggctggagcaacggcgtgacgctgaagatgctggatcgggtctgcccgaaagagaaaccgtgcgacagcgtgccggaaaatcggcctgcggcgaatgacgaggtggcgccggtgaaagcatctgcgcagtaa

SEQ ID NO: 164209 - DNA, 2103 bp, Enterobacter cloacae
atgactccctctcgttttacgctttgcgccctggcaggcaccatcacgctcgcactgcacgctccggcattcgccgaggaatccactatcgtcgtcacgggcgcagagcagggcagcgcgctgccggcctggacgaacagcgccacgaaatcggccgtagctgaaagtaaaacgccgcaggtcatcacgaccctctctgcgccggaaattgacaagcgccatgcgaattccgtgaatgaaatcctccgctatgcgccgggcgtttcaaccgaagtgcggggaaatacctcctacatgagcgaatataaaattcgtggctttaccgtcgaccaggagttctacaacgggctgcagttaccctataacgtcaccggcaataccaaagcgcgcatcgatccgctgttgattgacagcgttgatatcctgaaaggcccctcatcggttctctacggcggcggctcgccgggcgggctggtgaatatccagagtaaaaagccgcagcgggaagcgcgaactgaattgggttttaacaccggcaaccgcaacctgaaagagggctatctcgactcaaccgggcagattgccaacagcgactggaactaccgcctgctggggaaagcgacggaaaatgacgatcagccgcacaccacccggtatgaaaactacctggttgccccgtccgtcacctggcaacccgacagcaaaacccgcctcaccctggatgcgctggcgcagaactcccctagcctgacgccgtctaacccgcttccgatcgcctacctgcgctcgacatacgcgggcaagcgcgattacgccggtgatgagtggagcgggtttaagcagcgtcagtggatgctgggctacagctttgagcatgagtttgacagcggctggggctttaaccagaaggcgcgctatttcgacgtcgacacgcaccagcgcagcgtctatgcaacgggcacgggaagcgaggtttatcagctcaaccgttttgcctacaccaccgatgaagatctgcagagcttcaacatcgataaccaggtcaccaaaaccgtggcgctcggtgactggcaacaccatctgctggccgggtttgactatcagaagctgaactcccatttccactaccgttacgcatcgaccacgccgggcatggatatgcgcaatcctgactattcgcaaatcagcgaaagcgcattagggctgtataccgctcagaaaaaccgtctgagctatcagcagaacggctattacctgcaggatcaggtggagtttggcgggttaaatctgctggccagcctgcgttacgatgattatcgctccgtcaccaccaattatctgcaaaacggtgataaggcctgggtatcgcaggatcgcgtcaccaaacgtctgggcgcgctttacgcctttgataacgggatttcgccgtttatcagctattccgaaggttttgcgccggtgtcgccgcagggcacgctcgtggcgaaagacgtcaagccgaccaccagcaagcaggtggagggcggcgtgaaatatctgctggccgactacgccaccacctttaccgcctcggtgtttaacatccgccagaaaaatgtcgttacctccgatccgggcttcctgaactatcgtcagaccggggaagtggaatccaaaggggcggaactgtctgccatcagccgcccgacggacaacctgacgctaattgccaactacgcctacacccacgcgatcaatacggaagatgacaagtacaaaggtaaacgtccaacgcaggtgccggagaatgccttcaacctttggggggattacacctttgaaaacacaccgctgaaagggctgatgctgggcgcgggcgcacgctacaccgggccaatggaaatctcaccggctaacgatgcgggtaaactggggggcagcacgcagtacgatttgtcggcatcctaccggatgggtgaaattctgccttcgctggcagggctgacgcttaaggccagcgcgcagaacatcaccaacaaagagacgctgacctgctacgacgcgaccaactgctggattgggcgggacagaacgtatcagcttggggcaagttacagtttctga

SEQ ID NO: 164210 - DNA, 255 bp, Enterobacter cloacae
atgggtatcatcgcctggattatctttggtcttattgctggcgctatcgcgaaattgatcatgccgggaaacgatggcggcggctttattttgacctgcgtactcggggtcgttggtgcggttgtgggcggctggctggcgacgatgtttggcttcggaggcaacataagtggttttgacctgcacagttttctggtcgctgtcgtgggcgccattgtggtgctgggcatattcaggttactgcgacgagcataa

SEQ ID NO: 164211 - DNA, 732 bp, Enterobacter cloacae
gtgagtcattacagtgagcagttcctcaagcaaaatccgctggctgtattaggggtattacgcgacctgcaaaaaggtgaagtgccgctgcgcatcagctggtcgaataatcagttcatcagtaagatccttgacgcctcgcaggagcggctggtgattgatttaggcagtcaggagtatgaaaaccgcgcggcgctgaaggcggagaatatcgcggtgatggccgaaacgcagggcgctaaagtggagtttgtcctgtcgcgactggaactgagcgaataccaggggctgccggcctttgtgaccccgcttcccactaatctttggtttgtccagcgtcgtgaatattttcgcatcagcgccccgcttcaccctgcctacttctgcaaggccaaaatgccggacaaaaaagagattcgcttccgtctcttcgatctgtcgctgggcggtatgggcgcgctgatggatacgccgaagcctgacggactggtagagggcatgcggttcacgcaaatcgagctggatatggggggctgggggcgcttttatttcgatgcacagctgattgccatcagcgaacgcaccgtcgtggacagcaaaaatgaaacgatcaccacgccgcgtctgagcttccgtttcctcaacgtcggacctggcgctgagcgcgaactgcagcgcattatctactccctggagcgggaggcgcgcgaacgcgcaaataaagttctgtaa

SEQ ID NO: 164212 - DNA, 612 bp, Enterobacter cloacae
gtgaaattgagatggtttgcttttttgattgtgttgctcgctggctgtagttcaaaacatgattatcaaaacccgccctggaacccggaagtgccggtgaagcgggcgatgcagtggatgccgatcagtgaacaagccgggaaagcctggggcgtcagtccgcgcctcatcacggcgatcattgcggtggaatccggcggtaaccccacgcttgtcagcaagtccaacgcggtggggctgatgcagcttaaagcgtcaacggcggggagagaggtataccgctacatgggctggagcggccagccgtcgaccagcgagctgaagaacccggagcgcaacatttcaatgggcacggcctatctgagcatcatggagcatggcgtgctgaaggggattcaggatccggaggtcatgcagtacgcgctggtggtgtcttacgttaacggcgccggcgcgttgctgagaaccttctcctctgaccgcaaagaggcgatagaagagattaacggcatggacaaagacgaattctttgagcatgtggtgaaaaatcacccggcaccacaggcgcctcgttatatctggaaagtgcagaaagcgatggatgccatgtaa

SEQ ID NO: 164213 - DNA, 915 bp, Enterobacter cloacae
atgtctcagattcatctcatcgcgccgtcgggctactgcattaaccaggacgcggcgcagcggggcgttcagcgtttgctggaatcgggccaccaggtagaaaatcagacgattatcccccgccgccagcagcgttttgccggtaccgaagcgcagcggctgaatgatatcaacagcctggtgaacctgaagggtgaaaaccggatagtgctggcggtgcgcggcggatatggcgcgagccggctgctggagagaattgactggcagggcctggcggagcgtcagcagcaggatccgctgctgatatgcggccacagcgatttcaccgtcatccagcttgggctgctggcgctgcataacgtcatcaccttcagcggcccgatgctggccggtaacttcggcgcgccggagctggaagcgttcaccgtggaacatttctggcgcgcgctgcgtaatcccacctacagcgtggagtggcaggggaatggaccgcactgggaatgcgaaggtcagctctggggcggcaacctggcgatgctggtttcgctcatcggcagcccgtggatgccgaacattgaaaacggcattctggtgctggaagatatcaacgaacatccgttccgcgtcgaacggatgctgttgcagctctatcatgccggtattcttgagcgccagtccgcgattgtgctgggcagcttcagcggcgctgccccgaatgactatgacgcgggttactccctggaaaccatggttgagttcattcgctcgcggctggatattccggtgatcgccggtctggacttcggtcatgagcagcgcaccgtgactctggcgctgggggcgcacgcctccctgctccataatgattccggctcccggctgaccatcagcggccatcctgtcataaaggcataa

SEQ ID NO: 164214 - DNA, 1734 bp, Enterobacter cloacae
ttggatgccgcagcgataatcagccttttcattctgggttcggtccttgtaaccagcagtattttattaagttcattttcatcgcgtctcggcatacctattcttgttattttcctcgccatcggcatgctggccggcattgatggcattggcggtatcccattcgataactaccctttcgcctacatggtgagtaacctggcgctggcggtgatcctgctggacggcggcatgcgcacccaggcgagctccttccgcgtggccttagggcccgcgctgtcgctcgccacggtcggcgtgttgattacctccggcctcaccggaatgatggccgcgtggcttttccatctgaatatcatggaagggttgctgataggcgccatcgtgggctcaaccgatgcggctgcggtgttttccctgctcggcggtaaagggcttaacgaacgcgttggctccacgcttgagattgaatccggcagcaacgacccgatggcggtgtttctcaccatcacgctgattgagatgattcagcagcacgagacgggcctcagctggatgtttgcgtggcatatcctgcagcagttcgggctggggattgttattggcctggcggggggatacctcttacagcagatgatcaaccgcatctcgctgccctcggggctttacccgctgctggccttgagcggcggcattctcatttttgccgttaccacggcgctggacggcagcggcattctcgccgtctacctctgcgggttcctgatgggtaaccgccctattcgcaaccgccatgccattttgcagaacttcgacggcctggcatggctggcgcagatcggcatgttcctggtgctcggtcttctggttaccccatcggacctgctgcccatcgccgttccggcgctgctgttgtctgcgtggatgatcttcttcgcccgtccgctgtcggtatttgctggcctgctgccgtttcgcggcttcaacctgcgcgagcgcgtctttatcagctgggtgggtctgcgcggcgcggttccgattattcttgcggtctttccgatgatggccggtctggataacgcccggctgttctttaacgtggccttcttcgtggtgctgatttcgctgctgttccagggaacgtccctcgggtgggcggcaaaaaaagccaaagtggtggtacctcccgtgggctggccggtgtcgcgggtggggctcgacattcatccggaaaacccgtgggagcagttcgtctaccagctgagcgccgacaaatggtgcgtgggcgcttcgctgcgcgatttgcacatgccggccgaaacgcgcattgccgccctgttccgcgacaatgtcctgttgcaccctaccggcagcacccgcctgcgcgaaggggatattctctgcgtgattggccgcgagcgtgacctgcccgcgctgggcaagctgttcagccagtcgccgccggtggcgctggaccagcgtttcttcggcgattttattctggaagccagcgccaggtttgccgatgtggcgctgatttacggcctggatgaaggtgctgaagacggagatagccagcaaacgctgggcgaaatcatccagcagcggcttggcgcagccccggtcgtgggcgatcaggtagagtttgccgggatgatctggacggtagcagagaaagaagataacgcggtaaggaaagtcggtttgaggccgatggaagaggaagcggagtag

SEQ ID NO: 164215 - DNA, 1071 bp, Enterobacter cloacae
atgtcccgtcctgttctggctcagctgaacctgcaggccctgaaggataacctgcagattgttcgccgggcagcacctggcgcacgcgtgtggtcggtggtgaaagcgaatgcctacggccacggcattgaccgtatctggagcgcgctgagcgccaccgatggctttgcgttactcaatcttgaagaggccattctgctgcgcgagcgcggctggaaagggcccatactgctgctggaggggttcttccacgccgacgatctgccgctgctggataagtaccggctgaccaccagcgttcacagcaactggcagatcaaagcgattcaggatgcgaagctccacgcgccgctggatatctatctcaaggtcaacagcggcatgaaccgcctgggcttccagcctgagcgggtgcatacggtctggcagcagctgcgcgccctgaagaacgtgggtgaaatgacgctgatggcgcactttgccgacgcggaaaaaccggacggtatcgccgatgccatggtccgcattgagcaggcggcagaagggctggactgcccgcgctcgctgtccaactcggcggccacgctgtggcatcccgaggcgcattacaactgggtgcgtccggggatcgttctgtacggcgcgtcgccctcgggccagtggcaggatatcgccaacagcggcctgaagccggttatgaccctgcgcagcgaaatcattggtgtgcagaccctgaaagctggcgacacggtgggctacggtagccgctatcgggcaaagggcgagcagcggattggtatcgtggcgggtggctatgccgacggctacccgcgcattgcgccgaccggtacgcctgtgtgggtagatggagtccgcacgggaacggtaggcaccgtatctatggatatgctggccgttgacctgacgccctgcccgcaggcgggtatcggttccccggtcgagctgtggggtaacgaaatcaaaattgatgacgtggcggccgcggcgggcacggtgggatatgaactgatgtgtgccctggcaccgagggtgccggttgtgacggtgtaa

SEQ ID NO: 164216 - DNA, 1299 bp, Enterobacter cloacae; identical to SEQ ID NO: 145036

SEQ ID NO: 164217 - DNA, 1533 bp, Enterobacter cloacae
atggctactattgattccctgaacaaggacaacacacgtctgagcgatggacccgactggaccttcgagctgctggatgtttacctcgccgaaatcgaccgggttgcaaaactgtatcgcctggatacctatccccatcagattgaagtcattacgtccgaacagatgatggacgcctactccagcgtcgggatgccgattaactatccgcactggtcgtttggtaagaaatttatcgaaacggagcggctgtataagcacgggcagcagggtctggcgtatgagatcgtcatcaactccaatccgtgtatcgcctatttaatggaagagaacaccattaccatgcaggcgctggtgatggcgcacgcctgctacgggcataactcctttttcaagaataactatctgttccgcagctggacggatgccagctcgatcgtcgattacctgatcttcgcccgtaaatacattaccgactgcgaagaacgctacggcgtggacgaagtggaaaaactgctcgactcctgtcacgcgctgatgaactacggcgttgaccgctacaaacgcccgcagaaaatctccctgcaggaggagaaggcccggcagaaaagccgcgaagagtatctgcaaagccaggtgaacatgctgtggcgcactctgccgaagcgtgaggaagaaaaaacgatcgccgaagcgcggcgttatccgtccgagccacaggaaaacctgctctattttatggagaagaacgccccgctgctggagccgtggcagcgtgagatcctgcgcatcgtgcgcaaggtgagccagtatttctacccgcaaaaacagacgcaggtgatgaacgaaggctgggcgaccttctggcactacaccattctcaaccacctgtacgacgaggggaaggtcaccgagaggttcatgatggagttcctccacagccataccaacgtggtgttccagccgccctataacagcccgtggtacagtgggattaacccgtatgcccttggcttcgccatgttccaggacattaagcgtatctgtcagtcgccgacggaagaagacaagtactggttcccggatatcgccggatctgactggctggaaacgctgcactttgcgatgcgcgactttaaggatgagagtttcatcagccagtttatgtcgccgaagatcatgcgtgacttccgcttcttcaccgtgctggacgacgaccgcaacaactatctggagatctccgcaatccacaacgaggagggataccgtgagatccgctctcgcctctcttcccagtacaacctgagcaatcttgaacccaacattcaggtgtggaacgtggatttgcgcggtgaccgctccctgacgctgcgctatatcccgcacaatcgcgcgccgctggataaagggcgtaaagaggtgctgaagcacgtgcatcgcctgtggggctttgatgttcagctggagcagcagaatgaagacgggagcgtcgagctgcttgaacgctgcccggcgcggttaaatacgctgtag

SEQ ID NO: 164218 - DNA, 720 bp, Enterobacter cloacae
atggtcattaaggcgcagagcccggcgggtttcgcggaagagtacatcattgaaagcatctggaataatcgtttccctgcggggtccattcttccggctgaacgcgaactctctgaactgattggcgtcactcgcaccacgctgcgtgaagtgcttcagcgactggcgcgcgatggctggttgacgatccagcacggcaagccaacaaaagtgaacaacttctgggaaacctccgggctgaacattcttgaaacgctggcgcgtctcgatcatgaaagcgtgccgcagctcattgataatctgctctccgttcgcaccaacatcgcgacgatctttattcgtacggctttccgccagcatccggaagatgcgcttgcggtgctggccagtgccaacgaggtggaagatcacgccgacgcgttcgccaccctcgattacaacgtcttccgtggcctggcgtttgcctccggcaacccggtgtacggtctgatcctcaacggtatgaagggactctacacccgcattggccgccactactttgccaatcccgaagcccgcagcctggcgctgggcttttaccataagctgagcaagctgtgctccgaaggtctgcacgatcaggtgtatgagacggtgcgccgctacggtcacgattccggtgaaatctggcaccgtatgcagaaaacgctgccgggtgatttggcgattcagagccgctga

SEQ ID NO: 164219 - DNA, 1539 bp, Enterobacter cloacae
gtggaaatttcttttgggcgcgccctgtggcgcaattttttaggccagtctcctgactggtacaaactgatactgctggtgttcctggtcgttaaccctctcctcttttacgtgaacccgttcgttgccgggtggctgctggtcgcggagtttatcttcaccctggcgatggcgctgaaatgttatcccctgttgccgggcggattgctggcgtttgaagcggtagtgattgggatgacttctgccgagcatgtcaaagcagagctggcttcaaatcttgaagtgcttctgctgctgatgtttatggtggcgggcatctactttatgaaacagctgctgctgtttatctttacgcgcctgctgctcagcattccgtcgaaaatggttctctcgctggcgttttgccttgcggcggccttcctgtcagccttcctggacgcgctgacggtcgtcgcggtggtgataagcgtcgcggtggggttttacggtatttatcaccgcgtggcctcctctcgtcccggtgaggatctgcaggatgacagccatgtcgatgcgcataaccgtgaggtacttgagcagtttcgcgccttcctgcgcagcctgatgatgcatgccggggtgggtaccgccctggggggcgtgatgacgatggtgggcgagccgcaaaacctgatcattgcgaaagcggcgggctggcacttcggtgatttcttcctgagaatggccccggtgagcgtgccggtgctgatctgcggtctggcgacctgtttgctggtggagaagtttcgcctctttggttacggggcacaactcccggagccggtacgtcaggaactgcataaattcgatctgcagagccgacgccagcggacgcgccaggagacgctgcgcctgattgcacaggggatcatcggcgtctggcttatcgccgcgctggcgttccatcttgctgaagtggggctgattggtctgtccgtgattattctcgccactacctttaccggcgtgacggatgagcatgccatcggcaaagcctttaccgaagcgctgccgtttaccgccctgctggcggtgttctttgcggtcgtggcggtgataatcgaccagcacctgttcgcgccgattattgcctttgtcttacgggcatcaccggatgctcagctgtcgctgttttacctgtttaacggcctgctctcgtcgatctctgataacgtctttgtcgggacggtttacattaacgaggctaagaccgcgatggagcaaggcgtgatcagcgccggacagtttgaactgctggccgtggcgatcaacaccggtaccaacctgccgtcggtggcgacacccaatggccaggccgccttcctgttcctgctgacctccgctcttgcgccactcatacgtctttcttatggaagaatggtctggatggccctgccctatacgctggtgcttacgatcgtgggattgctttgcgtcaaaattacccttattccctgtacgcaatggttgatacaagcgggtatacttgcggcgcagtaa

SEQ ID NO: 164220 - DNA, 480 bp, Enterobacter cloacae
atggccctgaccgcctttgcgctggaaatggtcgcgctgtggttccagcacgtaatgggactcaaaccttgcgtgctctgtatttacgaacgctgcgcgctgttcggcattatgggggctggcctggtcggcgcgattgcgccgaagtcgccgcttcgctatgccgggatcgcgatctggctgtacagcgcctggaaaggcattgaactctcctggcagcacacgatgatgcagctgcatccgtcaccgtttatgacctgcgattttgccgcccgcttcccgagctggctgccactggacaaatggctgccgcaggtgttcgttgcctccggtgactgctccgttcgccagtgggaattcctgacgctggagatgccgcagtggctggtaggcatttttgccgcctacttcgtcgtggcgctgctggtgctgatcgctcagccgttcaaaccgaagaaacgcgatttgttcggacgctaa

SEQ ID NO: 164221 - DNA, 441 bp, Enterobacter cloacae
atgaacgacatccctttctggcaaagcaaaactcttgacgacatgaccgacgcggaatgggaatccttatgcgacggctgcggtcagtgctgcctgcacaagctgatggatgaagacacggacgaaatctacttcaccaacgtggcctgcaagcagctgaacatcaaaacctgccagtgccgcaactacgagcgccgcttcgagttcgagccagactgcattaaattaacccgtgagaatctccccacctttgaatggctgccgcatacctgcgcgtatcgcctgctggcggaggggaaaggtctgcctgactggcaccccctgctgaccggttcaaaagcggcgatgcacggcgaacgtatctccgtgcgccacattgcggtgaaagagtccgaggtgcgggactgggaagatcacatcatgaaccacccgacccgttga

SEQ ID NO: 164222 - DNA, 660 bp, Enterobacter cloacae
atgtatcaacatcataactggcaaggtgcattactggattatcccgtcagcaaagtggtttgcgtgggcagcaactatgcaaaacatattcaggagatgggcagtgcgacgccagaagagccggttctgttcattaagcctgaaacggcgctttgcgatattcgccagccgctggccctgccgcaggggctaggctcggtgcaccacgaagtggaactcgccgtgctgatcggcgcaacgctgcgtcaggcctccgaagagcatgtgcaaaaagcgatcgccggatacggcgtggcgctggatctgacgctacgcgacgtgcagggcaaaatgaagaaagcggggcagccgtgggaaaaagccaaagggtttgataattcctgcccgatttcggcgtttgtgccggtgagcgaatttaccggtaatccgcaggatacgccgctcagcctgaaggttaacggtgaaatccgccagcagggcaccacggcagacatgatccataagattgtgccgctgatcgcctacatgagccgcttctttaccctcaagccgggtgatgtgatcctgaccggcacgccggaaggcgttggtccgctcgcgagcggtgatgaacttgaagttggttttaacggcctgtcgctgaaaacccgcgtgctgtaa

SEQ ID NO: 164223 - DNA, 276 bp, Enterobacter cloacae
atgttttgtgtgatctacagaagtacaacccgtgaccagacctatctttatgtcgaaaagaaagacgatttttcacgcgtgcctgaagaattaatgaagagctttggccgaccgcagatggcgatgctgctgccgcttgatggtcgcaagaaactggtgaatgccgatctggagaaagtgaaaacggcattagccgagcagggctattatttacagcttccgccgccacccgagaatttattaaaacagcatcttgaggcgaacgggaaaaaatag

SEQ ID NO: 164224 - DNA, 708 bp, Enterobacter cloacae
atgtcaaacacgcccatcgagcttaaaggcagtagcttcaccttatcagtggtacatttgcatgatgcaaaacccgaggttattcgtcaggcgttagaagacaaaatcgcccaggctcccgccttcctgaagcacgcccctgttgttatcaacgtcagcggtcttgaagcgccggttaactggaaacgtctccagcaggccgtctcctcgaccggactgcgtattgtcggcatcagcggctgcaaagatactgaactgaaagcggaaattgaccgtgcggggctgccgcttctgaatgaaggcaaagaaaaagccccgcgtgcggcacccgttgccgtcgaaacgcccccccctgcggcgcaaaacgttacaaacatcacaaaaacgcgaatgattgatgtgccggttcgttccggtcagcgcatttatgcaccaaactgtgatctgattgttacaagccacgtcagtgctggcgctgagctgattgcagatggcaatattcacgtttacggtatgatgcgtggacgtgcgctcgcaggtgcaagtggcgatcgggacgcgcaaatattttgtactcacctgacggcggaactggtgtccatcgcaggtgaatattggctgagcgacaagatcccagccgaattttatggcaaagcggctcgcctgcttctggcagacgacgcgttgaccgttcaaccgttgaattga

SEQ ID NO: 164225 - DNA, 813 bp, Enterobacter cloacae
atggcacgcattattgttgttacttcgggtaaaggaggcgttggcaagaccacctccagcgcggccatcgctactggtttggcccagaagggaaagaaaaccgtcgttatcgacttcgatatcggcctgcgtaacctcgacctcatcatgggatgtgagcgtcgcgtcgtgtatgactttgtgaacgtcattcagggcgatgccacgctgaaccaggcgctgattaaagacaagcgcaccgagaacctctacattctcccggcttctcagacgcgtgacaaagacgccctgacccgtgaaggggtagaaaaggtgctcgacgagctgaaaaaaatggagttcgacttcatcgtctgtgactcccctgccggtatcgaaaccggtgccctgatggcgctctacttcgctgatgaagcgatcatcaccaccaaccctgaagtttcatccgtgcgtgactcagaccgcattctcgggatcctcgcctctaaatcccgtcgtgcggaaaatggcgaagacccgattaaagaacacctgctgctcacccgctacaacccgggccgcgtgaacaaaggtgacatgctgagcatggaagacgtgctggagatcctgcgcattaagctggtgggcgttatcccggaagatcagtccgtgttacgcgcctctaaccagggcgagccagtgatccttgatacaatggcagatgcaggtaaagcttacgccgataccgttgaccgtctgctgggagaagaacgtcctttccgcttcattgaagaagagaagaaaggtttcctcaaacgcctgttcggaggataa

SEQ ID NO: 164226 - DNA, 270 bp, Enterobacter cloacae
atggcattactggacttttttctctcgcggaaaaagaacaccgccaacatcgcaaaagaacgtctgcaaattatcgttgcggagcgtcgtcgtagcgacgccgagcctcactacctgccgcagctgcgcaaggacatcctggaagtgatctgtaagtacgtgcagattgacccggagatggtgacggtgcagctggaacaaaaagacggggatatttcgattctggagctgaacgtgacgctcccggaagcggaagagtcgcgtccgtag

SEQ ID NO: 164227 - DNA, 1155 bp, Enterobacter cloacae
atgggcgcaaacaaaagagaatccgatttgaattaccagatgatcacgaccaacgacgagctggcttcgctgtgcgaagtgacgcgcgactttcctgccattgccctggataccgagtttgtccgtacccggacgtactatccgcagctggggttgattcagatgtacgacggtaaacacgtgtcgctgatcgaccctctcggcattaccgactggacgccgatgcgcgatctgctgctcgataccgccgtcacgaaatacctgcacgcaggcagtgaagatctggaagtctttctgaacacctttggcatcatgcctcagccgctgattgatacgcagatccttgcggcgttcagcgggcgaccgctctcctggggctttgccgccatggtggaggagtatacgggcctgacgctggataaaagcgaatcccgtaccgactggctggcgcgtccgcttaccgcgcgccagctggagtatgcggcggctgacgtgttttacctgctgccgatcgccggacagctgatgaaagaagccgaggcatccggctggctgtccgccgcgctggacgagtgccgtatgacccagctgcgtcgtcaggaagtggtggatccgaaagaggcctggcgcgacatcagcaacgcctggcagctgcgtacgcgtcagctggcgtgcctgcagctgctggcagactggcgcttgcgtaaagcgcgcgagcgcgatctggccgttaactttgtggttcgcgaagagcatctctgggcggttgcgcgctatatgccgggcagcctcggcgagctggacagcattgggctttcgggcagcgaaatccgtttccacggcaaaaccctgctggcgctggtcgcaaaagcgcaggcgttaccggaagaggcgctgccggaaccgctgctgaacctgatggacatgccgggctatcgcaaagcgtttaaggacatcaaagcgctggtgcagacggtggccatggaaagcaagctgagcgcggagctgctcgcctcacgccgtcagattaaccagctgcttaactggcactggaagctgaagccgcagaatggcgtaccggaaatgatggcgggatggcgcggggaattgatggccgatcgcctgaatacgctgctggaaggttatccgcgataa

SEQ ID NO: 164228 - DNA, 1719 bp, Enterobacter cloacae
atgacgacgaacactcatttcagaggtgatgcattgaagaaggtttggcttaaccgttatcccgcagatgttcctgctgagatcaatcctgaccgttatcaatccctggtggaattatttgaacactcggtaaggcgctacgcggaccagcccgcatttgtgaatatgggcgaggtgatgacgttccgtaagctggaggagcgcagccgggcgtttgcggcgtacctgcaggaagggctggggctgcaaaaaggggaccgcgtcgcgctaatgatgccgaacctgctgcaatacccggtggcgctgttcggtatcctgcgtgccgggatgattgtcgttaacgtcaacccgctgtacaccccgcgcgagctggagcatcagctgaacgacagcggcgcggttgcgatcgtcattgtgtccaactttgcccatacgctggaaaaagtggtcgacaaaacccaggtgaaacacgtcatcctgacgcgcatgggggaccagctctccaccgccaaaggcacgctggttaactttgtcgtcaaatacgtcaaacgtctggtgccaaaataccatctgccggacgctatctccttccgccgcgcgctgcatgcgggctatcgtatgcagtacgttaagccggaagtggtctcagaagatctcgcgttcctgcagtataccggcggtaccaccggcgtggcgaaaggcgcaatgctgacccaccgcaacatgctggcgaaccttgagcaggtcaatgccacctacgggccgctgctgcatcccggcaaagagctggtcattacggcgctgccgctgtaccacattttcgcactgaccatgaactgcctgctgtttattgagctcggcggtcaaaacgtgctgattactaacccgcgtgatataccggggctggtgaaagagctggcaaaatacccgttcaccgccatgaccggggtaaataccctgtttaacgcgctgcttaataacaaagagttccagcagttggacttctccacgctccatctctctgcgggcggcggcatgccggttcagcaggcggtggccgagcgctgggtgaagcttaccggccagtatctgctggagggctatggcctgacggagtgcgcgccgctggtcagcgttaacccgcatgacatcgactaccacagcggaagcattggcctgcccgttccttccactgaagcgaaactggtcgatgataacgataacgaagtcgcgccgggtgagccgggtgagctttgcgtcaaaggtccacaggtcatgctgggctactggcagcgtcccgatgcgaccgacgaaatcatcaaagacggctggctgcataccggtgacatcgcggtgatggatgacgagggcttcctgcgcattgtcgatcgcaagaaagatatgatcctggtctccggcttcaacgtctatccgaatgagatcgaagacgtggtgatgcagcacagcggcgtgctggaagtggcagcggtcggcgtgccttccggcagcagcggtgaagcggtgaagatatttgtggtcaagaaggatccttctctcaccgaggaagcgctgataacgttttgtcgtcgtcagctgacgggctataaagtgccgaagctggtggaattccgcgacgagctgccgaaatccaacgtcgggaagatattacgacgagaattacgtgacgaagcccgtgccaaagtagacaataaggcctga

SEQ ID NO: 164229 - DNA, 582 bp, Enterobacter cloacae
atggcggttcagactaaagtagtacgccttattatggcaggcgcggttgccatagcactgagcggatgcgtttccgttcctgatgcgattaagggcagcagcccgacgccacagcaggatctggttcgggtgatgaatgcacctgagctgtacgtcggccaggaagcccgctttggtgggaaagtgatcgacgtacagaaccagcaggggaaaacccgcctggagatcgccacggtaccgctcgacagcggcgctcggcctgtactgggcgaggcctcccggggacgtatctatgcggacgtcagcgggttcctcgatccggtcgattttcgcggacagctggtgaccgttgtcgggccgattaccggcgccgtacagggcaaaatcggcagcacgccgtataaatttatgaccatgcaggtgaacggctacaagcgctggcggctggcacagcaggtgatcatgccgcctcagccgatcgatccgtggatgtggggtccacatccttatcgttacggctacccgggctggggctggtataacccggggcctgcacaggtacagacgatcgttactgagtaa

SEQ ID NO: 164230 - DNA, 696 bp, Enterobacter cloacae
atgcgaattctggctattgataccgcgacagaggcttgctctgttgctctgttgaacgacggtgctgtttctgcccatttcgaagagtgcccacgggaacacacccaacgcattctccccctggtaaaagccattttaacccagggcaacacctccttaaccgacctcgacgcgctggcctttggccgcggccccggcagctttacgggcgtacgcatcgggattggcattgcgcaagggctggcgctgggcgccgaactgccgatgatcggcgtctcaaccctcgccaccatggcgcagggcgcatggcgcatgaccggggcaacgcgcgtcctggccgcaatagatgcccgcatgggcgaagtttactgggccgaatacacccgcgacgagcagggcgtgtggcacggtgaagagacggaagccgtgcttaagccggaagcggtgacggaacggctgaagcagctgtccggcgagtgggcgaccgtcggtacgggctggccagcgtggcctgagatggcgaacggcaccgggctgacgctggtggacggtaacatgcttctgccggctgcggaagatatgcttccgattgccagccagctgctcgcagcaggcaaaaccgtggccgttgaacacgcggaaccggtttatttgcgaaacactgtcgcgtggaagaaacttccgggccgcgagtga

SEQ ID NO: 164231 - DNA, 1911 bp, Enterobacter cloacae
gtggcagacgatttttcccctgaaggtcaattagcgcaggctatccccggcttcaaaccccgtgagcctcagcgacagatggcgcatgccgttgcacgcgccatcgataaggctcagccgctggtggtcgaagcgggtaccggaacgggtaaaacctatgcttaccttgcgccagcgctgcgggcgaaaaaaaaggtgattatctcgaccggttcgaaagcgctgcaggaccagctctacagccgcgatttgcccacggtggcaaaggcgctgaaatataaaggccgtctggccctgctgaaggggcgctccaactatctctgcctggagcgccttgagcagcaggcgctggcgggcggcgacctgccggtgcaaaccctcagcgacgtcattatccttcgcgcctgggcgaaccagacggaagagggcgatatcagcacctgcgcgagcgtgccggaagattccccggcctggccgctggtgaccagcaccaacgacaactgcctcggcagcgactgcccgctgtataaagactgcttcgtggtgaaagcgcgcaaaacggcgatggatgcggatgtggtggtggtgaaccaccatctgttcctcgcggatatggtggttaaggacagcggctttggtgagcttatcccggaggcggacgtgatgatcttcgacgaagcccaccagctgccggatatcgccagccagtatttcggccagtcgctctccagccgccagctgcaggatctggcgaaagatttcaccattgcgtaccggaccgaactcaaagatacccagcagctgcagaagtgcgccgatcgtctggcgcagagcgcgcaggattttcgtttacagcttggcgagcctggctatcgcggtaacctgcgcgagctgctggcggacaaaaacatccagcgcgcgctgctgctgctcgatgatgcgcttgagctctgctacgacgtggcgaaactgtcgctcggccgctccgcgctgctcgacgcggccttcgaacgcgccacgctctatcgcgggcggctgaaacggctgaaagagattaaccagccgggttacagctactggtacgagtgcacttcgcgccactttaccctggcgctcacgccgctgacggtggcggataaatttaaagaggtgatggcgcaaaagccaggcagctggatcttcacgtcggcaaccctgtcggtgaatgacgacctgcaccacttcaccgagcgcctcggcatcgagcaggcggaatcgctgcttctgcccagcccgttcgattacgaaaagcaggcgctgctctgcgtgccgcgcaatctgccgcttcccaaccagccgggtgcggcccggctgctggcggcgatgctgaagccgatgatcgaggccaataacggccgctgctttatgctctgcacctcccacgccatgatgcgcgacctcgccgaacagttccgcgccaccatgacgctaccggtgctgctgcagggcgaaaccagcaaaggccagctgctgcagcagttcgttagcgccggtaacgccctgctggtcgcaaccagcagcttctgggaaggggtggacgtgcgcggcgacacgctttcgctggtgatcattgataagctgccgtttacctccccggacgatccgctgctgaaggcgcggatggaagactgccgcctgcgcggcggcgatccgtttgacgaggttcagctgccggatgcggtcattacgcttaagcaaggggtagggcgcttaatccgtgacgtcaccgatcgcggcgtgctggtcatctgcgataaccggctggtgatgcgtccttacggggcaaccttccttgcaagcctgccgcccgcaccgcggacgcgggacataaaacgcgcggtgcgtttcctggcaaacccaacggcggagtaa

SEQ ID NO: 164232 - DNA, 345 bp, Enterobacter cloacae
atgacaattgtgcgcattgatgccgaagcccgctggtctgatgtggtgatccacaaccagacgctctactacaccggcgtcccggcgaaccttgacgcggatgcgttcgagcagacggccaataccctggcgcagattgacgcggtgctggaaaaacagggcagcgacaaatcccgcattctggatgcgacgattttcctggcgaacaaagatgacttcgcggcaatgaacaaagcctgggatgcgtgggtggtggcgggtcacgcgcctgtacgctgcaccgtacaggccacgctgatgaagccggaatacaaggttgagattaagattatcgcggcggtttaa

SEQ ID NO: 164233 - DNA, 183 bp, Enterobacter cloacae
atgtttgcaggtttaccttctctgagccatgaacagcagcagaaagcggttgagcgaattcaggaactgatgtcccaggggatgagcagcggacaggcgatttcccaggtggcggaagaactgcgcgccacgcataccggcgagcggatcgtggcgcgtttcgaggatgaagatgaagagtga

SEQ ID NO: 164234 - DNA, 1335 bp, Enterobacter cloacae
atgccacacatgaacatgcgcttccccactgttattaccctgccctggcggacagacgccgctgaatactggttttcccgcctgagccatcttccgtttgcgatgctgctgcactccggccatgcggaccatccctacagccgctttgatattctggtcgccgatccgctgaagacgctgacaaccgatgacctgtcgctgacggacgatccgctggcgcagcttcagtacgatattaacgcgctgggcttatccgctacgccaaacccggaccttcccttccagggaggcgcgctgggcctgtttggctatgatttgggccgccgttttgaaacgctgcccgagcgtgcgcaggctgatatttccctgccagatatggccgtggggctgtatgactgggcgttaatcgtcgatcacctgaaaaaaacggtttccctgctgtgccatcgtgacgtccaggcgcgtctggactggcttgaggcgcaacaggctgcacccgcagagacgttcacgctgacctccggctggcgctccaacatgagcgccgcggagtatggcgaaaaattcgcgcgcgttcaggcgtatctgcaaagcggcgactgctaccaggttaacctcgctcagcgtttccaggcgacctatcgtggagatgaatggcaggcgtttacccgtcttaatgccagcaataaggcaccgttcagcgcatttgtccgtctggaacagggggcgatcctcagcctgtcgcccgaacgctttattcatctggcggaggggaccattcaaacccgcccgattaagggcacgctgccacgccttgccgaccccgacgccgaccgcaagcaggcagaaaaactcgccgcctcgccgaaagaccgcgccgaaaacctgatgatcgtcgatctgatgcgtaacgacattggccgggtggccgttccggggagcgtccgcgtgccggaactgtttgtcgtcgagcctttcccggcggtgcatcatctggtcagcaccattaccgcgcggctgcctgactcgcgtacggcctgcgacctgctgcgcgccgcgttcccgggcggctccatcaccggtgcgccgaaggtgcgggcaatggagatcattgatgaactggagccccaccggcgcaatgcctggtgcggcagcatcggctatatcagcctgtgcggcacgctggataccagcattaccatccgcacgctgaccgcctgcaacggaaacctttactgttcggccgggggcgggattgttgccgatagtcaggtcgaggcggaatatcaggaaacctttgataaagttaaccatatcctgaaactactggagtaa

SEQ ID NO: 164235 - DNA, 579 bp, Enterobacter cloacae
gtggaaaaagagaacctgacgctggatgactttttatcgcgttttcagctactaagaccgcaggtcaatcgcgaggcgctgaatcagcgtcaggcggccgtgctgatcccggtcgtgcgtcgcgcgaagccgggcctgctgctcacccagcgttccgcccatttacgtaagcatgccggtcaggtcgcttttccggggggcgcggtagacagctccgacgcctcgctgattgccgccgcgctgcgcgaagcgcaggaagaggtggccattccgccggaggccgttgagatcatcggggtgctgccgcccgtggacagcgttaccggtttccaggtcacgccggtggtgggcattatcccgccgggtctgcagtatcacgccagcgtcgatgaagtctctgcggtgtttgaaatgccgctggatgaagcccttcgactgagtcgttaccacccgctggatattcagcgtcgtgggcatgaccatcgggtctggttgtcctggtatcagcattattttgtctggggcatgacggcgggcatcattcgtgaactggcgctacagatcggcctgaaaccttga

SEQ ID NO: 164236 - DNA, 1365 bp, Enterobacter cloacae
gtgattagtatattcgacatgttcaaagtgggaattggcccttcgtcttcccatactgttggcccgatgaaggccggtaaacagttcgtcgatgatctggtcgaaaaaggattactggaaagcgttacccgtgtcgccgtggatgtttacggctcgctgtcattaacgggtaaaggccaccacaccgatatcgccattattatgggtctggcaggcaatatgccggataccgttgatattgatgccattccggcattcatccgcgacgtggaaacacgtggccgcctgctgctggcaaacggcaagcaggaagtcgatttcccgcaggatgacggcatgcgttttcgcagcgacaacctgccgctgcatgaaaacggcatgaccattcacgcttatagcggtgaaaaagagatctacagcaaaacgtactactccatcggcggtggtttcatcgtggatgaagagcattttggcaaagacagcgtcggcgacgtcagcgtgccgtacccgttcaaatcggcgaccgagatgctgggctactgcaaacagaccggtctttccctgtccggtatggtgatgcagaacgaactggccctgcacagcaaaaaagagattgaagactattttgccaacgtctggcaaaccatgcgcgcctgtatcgatcgcgggatgaacaccgaaggcgttctgccgggtccactgcgcgtgccgcgtcgtgcctccgccctgcgccgtatgctggtgaccacggacaagttctccaacgacccgatgaacgtggtcgactgggtaaacatgtttgccctggcggttaacgaagagaacgccgccggtggccgcgtcgtaacggcgccaaccaacggtgcctgcggtatcgttcctgcggtgctggcgtattacgaccactttattgagcccgtgacgccggacatctatatccgttatttcctggcggcaggtgccatcggcgcgctgtacaagatgaatgcctctatctccggtgcggaagtgggctgtcagggtgaagtcggcgtggcctgctccatggcggcggcgggtctggcagagctgttgggtgcaagccctgagcaggtctgcgtggcggctgaaatcggtatggaacataacctcggtctgacctgcgacccggtcgcgggccaggtgcaggtgccgtgcattgagcgtaacgcgattgcctcggtgaaagccatcaacgcctctcgtatggcgatgcgccgtaccagcgaacctcgcgtatcgctggataaggtgattgaaaccatgtacgaaacgggcaaagacatgaacgcgaaataccgcgagacgtcccgtggtggcctggccattaaggtgcagtgcgactaa

SEQ ID NO: 164237 - DNA, 1599 bp, Enterobacter cloacae
atgcaaactgcacaaacgatcattaaaaattatcgccgaaaacgcgttatcgtctgcgtgacggttgcgctcctcacgctcatcctgacgctaggcattcgctttatctcccagcgcaacgttaaccaacagcggatcctcgattttaccagccataccgttcgcgcccttgataacgttctgctttccctggaaaaccaccgcaacgtgctgcagccgctggtggggcagccctgcccgcaggtgcagctggcgctgcggcagcaggcagccattttgcagacggtacgctccattgccctgatcgaagacggtatcctgtactgttcgagtattttcggcagccgcagcgagcctgtgcgtgacgtccttcaggagctccctgccagcacggcgaagctgattttatcgaccgaccagtggctgcttaagggcagccctgttttgatccagtggtatcccgtctctcaggacggtgaagatggcgtcgtcgagattatcaatatcgacctgatcgccagaatgatccttgagccccagcgtccgctcatcaatgacgtggtgctgacagtcggcaatcgctttttacgttacggtcaacgcgtcaccgacagcctgacgtttgatgaggagagcgcccttttccagcagtcttcaacccaaaatcctttcacgattacggtcggcggacctggccccggagagttagccttaaaaagcctgcccgcccagctgccgctgggactgatgctcagcctgctgctgggctatctcgcctggctggcgacggcaaaccggatgagctttacgtgggagatcgatatgggcattgcggcccgggaatttgagcttttctgccagccgctggtgaatgcccgcacccaggcgtgcactggcgtggagatcctgctgcgctggaataacccccgtcagggttggatcaccccggaggtgtttatccctctggcagaagaacataaccagattgtccccctgacccgctacgtcatcgccgaaacggtgcgccagataggctacttcccgtccagccccggttttcacatcggcattaacgtcgccgccagccatttccgccacgcagtattgatacaggatctgaaccgtctctggttcagcgcctgtccgcgccaacagctggtaattgaactcacggaacgggatgcgctgctggacgcggattatcgcatcgtgcgcgaactgcatcgcaaaggcgtgaagcttgctatcgacgatttcggcaccgggaacagctccctctcctggcttgaaaagctgcacccggacgtcctgaagattgaccagtcttttacgaccgccatcggcaccgatgccgtgaattcaacggtgacggatatgatcattgcgctgggccagcggctaaatatcgagctggtggcggaaggggttgagactgaggagcaggcgcgctatttacgccgtcacggcgtacctgtgctgcagggatttttctatgcgcggccgatgccgctgcgggactttccagactggctggcgggaagtactcccccgccagcgcgtcataacgggcacatcgtgcccttaatgccgctgcgttaa

SEQ ID NO: 164238 - DNA, 1560 bp, Enterobacter cloacae
atggaattcttaatggacccgtcaatctgggtaggattgctcacgctggtggtgctggagattgttctcggcatcgataacctggtgtttatcgccatccttgcggataagctgcccccaaaacagcgtgataaagcgcgtctgattggtctctcgctggcgctggtcatgcgactgggtctgctctccgttatctcgtggatggtcacgctgaccaaaccgttgttctccgtcatggattacaccttctccggccgtgatttgatcatgctgatcggggggatattcctgctcttcaaagcgacgacagagctccatgagcggctggaaaaccggcagcacgatgatggtcacggtaaaggctatgccagcttctgggtggtggtgctgcagatcgtggtgctggatgcggtcttctcgctggatgcggtgatcacggcggtcggcatggtgaaccacctgccggtcatgatggcggcggtggttattgcgatggcggtcatgctgctggcgtcgaaaccgctgacgcgtttcgtgaaccagcatccgacggtggtggtgctgtgtctgagcttcctgctgatgattggtctgagcctggtggcggaaggctttggcttccatattccgaaaggctacctgtacgctgcgattggcttctcgatcctgatcgagctgttcaaccagattgcgcgtcgtaactttattaagcagcagtcaaatcagccgctgcgcgcccgtaccgcggatgccattctgcgtctgatgggcggtcgtcgtcaggtgaacgttcagtctgattccgaaaaccacaacccggttccggtgccggaaggggcgtttgtggaacaggaacgctacatgattaacggcgtgctctctctggcctcccgttcgctgcgcggcatcatgacgccgcgcggggagatcagctgggtcgatgctaacctgagcgtggatgaaattcgccagcagctgctctcttcaccgcacagcctgttcccggtgtgtcgcggcgagctggatgagatcatcggcgtggtcagggcaaaagagatgctggtcgctctggaagaaggcgttaacgtcgaagccgttgctgccgcatcgcctgcgattgtggtgccggaaacgctggatccgatcaacctgctcggtgtgctgcgccgcgcgcgcggtagctttgttatcgtcaccaacgagtttggcgtggtgcaggggctggtgacgccgctggacgtgctggaagcgattgccggtgaattcccggatgaagacgaaacgccggaaattgttgccgacggcgaaggctggctggttaaaggcacgaccgacctgcacgcgctctcgcacacgctggggctggaaaacgtggtcaacgatgaagaagacatcgcgaccgttgccggtctggttatcgccgtgaacgggcagatcccgcgcgtcggcgatgtgattgagctgccgccgctgcacattaccattgtcgaagccaacgactatcgtgttgatatggtccgcattgttaaagaacaatctgcccacgatgaagatgagtaa

SEQ ID NO: 164239 - DNA, 966 bp, Enterobacter cloacae
gtgaccattgctattgtcataggcacacatggttgggctgctgagcagctactcaaaacggcagagatgctgttgggcgagcaggaaaacgtcggctggatcgatttcgttcccggtgaaaacgccgagacgctgattgagaagtacaacgctcaactcgcgaagctggataccagcaagggcgtgctgtttctcgttgatacatggggcggcagcccgttcaatgctgccagccgcattgtcgtcgataaagagcactatgaagttgtcgccggggtcaatatccccatgctggtggaaaccttcatggcgcgcgacgacaatccgtctttcgacgagctggtggccctggccgttgaaacgggccgtgaaggggtgaaagccctgaaagcacagccggtggaaaaacctgcccctgcgcccgcagcggcaccgaaagcggcagcgccggcaaaaccgatgggtccgaatgattacatggtgattggccttgcgcgtattgatgaccgcctcatccacggtcaggttgccacgcgctggaccaaagagaccaacgttcaacgtattatcgtagtcagcgacgaagtggccgccgacaccgttcgtaaaacccttctgactcaggttgctccgcctggcgttaccgcgcacgtcgtggatgtcgccaagatgatccgcgtttacaacaacccgaaatatgcgggcgaacgcgtaatgctcctgttcactaacccgacagacgttgagcgcattgttgaaggcggcgtgaaaatcacctccgttaacattggtggtatggccttccgtcagggcaaaacgcaggtcaacaacgccatttcagttgatgcgaaagatatcgaggcattcaacaagctgaatgcgcgcggtattgagctggaagcccgtaaggtttccacggatcaaaaactgaaaatgatggatttgatcggcaaagttgggaaataa

SEQ ID NO: 164240 - DNA, 801 bp, Enterobacter cloacae
atggagattaccactcttcagattgtactggtgttcgtcgtcgcatgtattgcgggtatggaatccgtacttgatgaatttcagttccaccgccctctggtggcctgtacgctgattggggccgttctgggtgacatgaaaaccggtatcatcatcggtggtaccctggaaatgatcgccctgggctggatgaacatcggtgcggcagttgcgcctgatgccgcgctggcctctatcatttcgaccgttctggttattgccggtcaccagagtattggtgcaggtatcgccctggcgatcccgctggcagccgcaggccaggttctgaccatcattgttcgtactatcaccgtagccttccagcacgcagcggataaggccgccgaaaacggcaatctcacggcactgtcgtggatccacgtttcttccctgttcctgcaggcgatgcgtatcgcgatcccggcggttatcgttgcgatctccgtcggtaccagtgaagtccagagcatgctgaacgccattcctgaagtggtcaccggcggtctgaacatcgcgggcggcatgatcgtggtcgttggttatgcgatggtcatcaacatgatgcgcgcaggctacctgatgccgttcttctacctcggcttcgtgaccgctgccttcaccaacttcaacctggttgcactgggtgtgattggtgcggtaatggcgattctctacatccagctcagcccgaaatataaccgcgtcgcgggtgccccagcgcaggctgctggtaacaacgatctcgataacgaactggactaa

SEQ ID NO: 164241 - DNA, 852 bp, Enterobacter cloacae
atggttgatatgacaaaaactaccaccgagaaaaaactcactccgggtgatattcgtggcgtgttcatccgttctaacctgtttcagggttcatggaacttcgaacgcatgcaggcgctgggtttctgcttctccatggtaccggcgatcaaacgcctgtatccggaaaataacgaagcgcgccgtcaggccatcaagcgtcacctggaattcttcaatacccatccttacgttgcggcgcccgttctgggcgtaacgctggcgatggaagagcagcgtgcgaacggcgcagagattgacgacggtgccatcaacggtatcaaagtcggcctgatgggcccgttggccggcgtcggtgacccgatcttctggggtaccgtgcgtccggtcttcgcggcgctgggtgccggtatcgcgatgagcggcagcctgcttggccctctgctgttcttcatcctgttcaacgccgtgcgtctgctgacccgttactacggcgtggcctacggctaccgtaaaggggtggacatcgttaaggacatgggcggcggcttcctgcagaaactgactgagggggcgtcaatcctcggcctgtttgtcatgggggcactggttaacaagtggacgcacgtgaacatcccgctggtggtatcgaccatcaccggacaggatggtcagactcgcgtcaccaccgtgcagacgattctggaccagctgatgccgggcctggtcccgctgctgttgaccttcgcctgtatgtggctgctgcgtaagaaagtgaacccgctgtggattatcgttggcttcttcgtcatcggtatcgcgggctacgccgtcggcctgctgggtctgtaa

SEQ ID NO: 164242 - DNA, 459 bp, Enterobacter cloacae
atgactgtcacggacatcgtactggttttatttattattgcccttctggcttatgcgatctatgacgagttcatcatgccgcgccgtcacggcgagacgctgctctctcttccccttctgcgtcgcgggcgcgtggatgccttcatcttcgtgggcctcatcgccattcttatttacaataacgtcaccagccatggtgcattattaaccacatggttattatgtgcgctggcattaatggcgatttatctgttctggatccgcacgccgaaaatcatttttaaatcccacggattcttcttcgccaatgtatggatagaatataaccgtattaaagagatgaatttatccgaggacggcgtgctggtgatgcaattagaacaacgccgcctgcttattcgggtgaagaatattgatgacctggaaaagatatacaagttacttattaaaactcaatga

SEQ ID NO: 164243 - DNA, 567 bp, Enterobacter cloacae
atgaatatctccgctacgatccttctcgcttttggcatgtccatggacgcattcgctgcttccatcgggaaaggcgccacgctccacaaacctaaattctcagaagccctgcgtaccggcctgatttttggcgctatcgaaacgctgaccccgcttctcggctggggacttggcatgctcgccagccagttcgtgctggagtggaaccactggattgccttcgtcctgctggtgtttctcggtggccgaatggtcattgaaggttttcgcggcggcgatgatgaagacgaggagccgcagcaccgccacggcttctggctgctggtcaccacggccattgccaccagccttgatgcgatggccgtcggcgtcggtctggcttttttgcaggtcaatattatcgccaccgcgctggctattggctgtgcaaccctgattatgtccacgctgggcatgatggtcggacggtttatcggcccgctgctgggtaaacgcgccgagatcctcgggggaattgtgctgattggcattggtgcccagatcctctgggcacacttcgccggttaa

SEQ ID NO: 164244 - DNA, 816 bp, Enterobacter cloacae
atgtccttcagctgtcccctttgccacgcccccctgacgtactcagataaacgttatacctgtccgcaggggcatcagtttgaccaggcaaaagaaggctacgtgaatcttctgccggtgcagcataagcgctcgcgcgatcctggcgacagtgcagagatgatgcgggcgcgccgcgcgtttctcgatgccgggcactatctgccgctgcgggagaccgtcgcgcagaggctgaatgacattctgccggcttccgccaccgccatgctcgatatcggctgtggggaagggtactacaccgcacggtttgcggaggttgctcgtgagaagggcgcacagacattcggtctggacgtgtcgaaagtggccattcgcgcggcggcaaaacgttataccaacgtgacgttctgcgtggcgtccagccaccggctgccgtttgacgatgccagcatggacgctgttatccgcatctacgcgccgtgtaaggcggaggagctggcgcgcgtcgtgaaaccgggcggatgggtggtcaccgtgacgccaggtccgcgtcatctgatggagctgaaagggctgatctacgacgaagtgcgtctccatgcccctcattctgaacagctggccggttttaccctgaagcaggcggaatcggtggcgtacgaaatgatgctgaaaggggaagaggccgtcgcgttattgcagatgacgccgttcgcgtggcgggcaaaacctgaggtatgggaaacgttagcggcacactcaacatttcgctgccagacggacttcagcatccacgtctggcagcgcgaagattaa

SEQ ID NO: 164245 - DNA, 1719 bp, Enterobacter cloacae
gtgaagaagaaatcgatagcgaccgtcggaaatttcacgccggcgcgttttgtgctgctctgtttagctattttttgtagtctggcttttctgctgggccgcgttgcctggctgcaaatcattaagcctgacgatctggtgaagcaggaagatatgcgatccctccgccagctggcgattgatgcgccgcgcggcatgataatggatcgcgagggtcgccctctggcggtgagcgtgcctgtccaggccgtctgggccgatcctaagacggtgctggcaaaagggggcgtcagccttgatgagcgctggcaggcgctggccagcgcgctgcatctctccctcggcacgctctcggcacgcatcaacgccaacccgcaggggcgttttatttaccttgcccgccaggtcgatccggcacaggcaaagtggatcgataaactgaatctgcccggcatcaatttacgcgacgagtcccgccgtttttatcctgctggtcatgtggcagcgaacctgattggcttcaccaatattgacgggcagggcattgaaggtgtggaaaagagcttcaacgcccaactcaccggcaagccgggcgtgcgtcaggtgagggaagatcgctacgggcgcgtggttgaaaacctgactgaaatcgcgccctcaacggcgcataacattcagttaagtattgacgagcggctgcaaaccatcaccgaagatgcgctcgacaatgccgtggcctggaacaaggccgagtcgggggcatcggtattaattaatatcccaaccggggaaatactcgcgatggcgagctatccggatttcaatcccaataatcgggaaggcgcgacgataaatgatttccgcaaccgcgcgatcagcgatacgttcgaacccggttcgaccgtcaagccgctggtgctgatgacggccctgcagcagggcctggtccagccggacagcgtgattgacacccatccgtatacccttgacgggcatcgcattcgcgacgtgggctattaccctgagctgacgatgaccgggatcctgcaaaaatcgagcgacaccggcgtgtcccgactttcactggcgatgcccgttcagcaccttattgatacctatcgaaactttggttttggcaccaatacggggcttggcttaacgggggaaagctcggggctgttgccacagcgtaaatactggagccagctcgatcgcgcgacttttgccttcggctacgggctgatggtcacgccgctccagctggcccacgtctacgccacgattggcgggttcgggcttgagcgtcctctctccatcacccgcatcgatccccccgttatcgggcaccgcgtcatgccggaagagattgcgcacgaagtggagcacatgatggagagcgttgcgctgccgggcggcggtggcgttaaggctgccgtgcgtgattaccgggtggcggtgaaaaccggcacggcgaagaaaattgacgatagcgggaagtatgtcgataaatacgtcgcctacactgcgggcgttgcgcctgccagcaatccgcgttttgctctggtggtggtgattaacgatccgcaaaacggggcctactacggcggtgccgtctctgcgcctgtcttcagcgagattatgggtaacgtgctgcgtctggagaatatcaaacctgacggattaccggcggggtccgatcaccttatcgtcatgcgctaa

SEQ ID NO: 164246 - DNA, 210 bp, Enterobacter cloacae
atggcaaagattaaaggtcaagttaagtggttcaacgagtctaaaggttttggtttcattactcctgctgacggcagcaaagacgtgttcgtacacttctctgcaatccagggtaacggcttcaaaactctggctgaaggccagaacgttgagttcgaaattcaggacggccagaaaggcccagctgcagttaacgtaactgctatctga

SEQ ID NO: 164247 - DNA, 990 bp, Enterobacter cloacae
gtggtctggaaaaatccctggtatgacccctccctgaaacatcataccccgaacggctttcgtaatacccttcctgtcggacatcaacccggtgaccttgaccgttggcgtaaagcgcgcaaagaggccggtttaccgaagccgcccgcgctgggttatgacgatttcatccgccagtggtggcaacccgttgagcttgcggcatctcatgaagatggggtgtggtggctcggacatgcgagtgtgttgctgcagctggacggcaatatcatccttaccgatccggtgttttcacgacgtgcttctccgctgcctttcctgggaccccagcgcaaaacgcctcccgtactgtctgtcgagcaacttcatcagcttgatgcggttgtcatctcccataatcattacgatcatcttgatgacgcaaccattcgcagaatcctcaagcgctttcccgacgtctgttgtttcgttccgttgggcctggccgactggtttcgtcgccggggagcaaaacgcgtggtcgaactcgactggtggcagagtttcacctggcaggggatgacgctgaccgccgtgccggcacagcactggagcatgcgcacgccatggaaccgcaatcgttccttatggtgcggctgggtgatggaaggacggcatcaccgtttctggttcagcggtgataccggctattcgcctgagctgttgttgattcctgaacgcctgggccagatagatgccgccgcgttgccgattggtgcctatgccccacgatggttcatggctgttcatcatatggatccgcaatcagcggtggcattgtggcagcagttgggttgccctctggcgtttcccattcactggggcgtgtttgaactggcagatgaagctttagatgaacctgtgcaggagttaactgacgcgctcgataatttagcaccagttaatcattctttcaggatactgaaaattggtgaatatttatccttctaa

SEQ ID NO: 164248 - DNA, 291 bp, Enterobacter cloacae
atgggtgagttactgaattcagggctgctgaatatggcatccctgatgatttctttggtggttctgcttgtggggctggtcatctggtttttcgtgaatcgggccagttcgcgtacaaatgagcagatcgaactgctggaagcgctgctcgatcagcaaaaacgccagaatgcattgctacgccgtctttgcgaggctaacgaaccggaagagaaagacgcgccgaaagacgcggtcgctgaagataacaaagacgaagacgactttatccgcctggtggctgagcgttaa

SEQ ID NO: 164249 - DNA, 240 bp, Enterobacter cloacae
atgcgattcatcattcgaacaattattgcactggcccttgtctggattggccttctgttaacgggctatggtgtgcttgtggggagcacagaaaacgcagccgggttaggcattcagtgtaaatacctaaccgcacaaggaatgagcaccgcccagtatctgcatactgacagcgggatcattggcttaacccaatgtcctgtactgcgtaaaacctccgtcgtgattgataacggctaa

SEQ ID NO: 164250 - DNA, 792 bp, Enterobacter cloacae
atggctattgcggatttggataaacaaccagattctgtttcttccgtgctgaaggtgtttggcatcttacaggcgcttggagaagagcgtgaaataggtattacagagctgtcacagcgcgtgatgatgtcaaaaagcaccgtttatcgctttttgcaaaccatgaagtcattgggttacgttgcccaggagggcgaatctgaaaaatattctctgacgctgaagctgtttgaattaggtgcgcgtgcgctacaaaatgttgacctgatccgcagcgcggacattcagatgcgtgaaatctctcgcctgaccaaagagaccattcatctcggtgcgctggatgaagacagcatcgtttacatccataaaatcgactccatgtacaatctgcgcatgtattcgcgcattgggcgccgcaacccgctctacagtaccgcgattggtaaggttctgctggcgtggcgcgatcgcgaggaagtggagcagatcctcgaaggcgtggaatacaagcgcagcacggaacgaaccattaccagtacggaagcgctgctgacggtgctcgaccgcgtgcgcgagcaagggtatggcgaagataacgaagagcaggaagaggggctgcgctgtatcggcgtcccggtatttgaccgctttggcgtggtgattgcgggcttaagtatctctttcccaaccttacgcttctccgaagagcgtctgcatgagtatgtgactattctgcacactgccgcacgtaaaatttctgaacagatgggctatcacgactacccgttttaa

SEQ ID NO: 164251 - DNA, 882 bp, Enterobacter cloacae
atgatgcgaatcgcgctcttcctgctcaccaacctggcggtgatggtggttttcgggctcgtgctaagcctgacaggaattcagtcgagcagcgttcagggtctgttgattatggcgctgctgtttggttttggtggctcgttcatctccctgctgatgtcgaagtggatggcattgaaatcggtagggggtgaggttattgaacagccgcgtaacgatatggaacagtggctgatgaatacggtggctcagcagtcccgtcaggccgggatcgccatgccgcaggtggccatttaccatgctccggacatcaacgcgttcgccacgggtgcccgccgcgatgcgtcactggtcgctgttagcaccggactgctgcagaacatgagccgtgacgaagccgaagcggttatcgcccacgaaatcagccatatcgcaaacggtgacatggtgaccatgaccctgattcagggcgtggtaaacaccttcgtgatctttatctcccgcattctggcgcagattgccgctggcttcatgggcggcaaccgtgacgaaggcgaagagagcaacggcaacccgctgatctattttgccgtgtcgatggtgctggaactggtattcggtattctggcgagcatcatcacgatgtggttctcccgccaccgtgaattccacgcggatgccggttctgcgaagctggttggtcgcgagaagatgattgccgcgctgcagcgtctgaaaacctcctacgagccgcaggaagcgaacagcatgatggccttctgcattaacggtaaatccaaatcgctgagcgagctgtttatgtctcacccgccgctggataaacgtattgaagcgctgcgcagtggggaatacctgaagtaa

SEQ ID NO: 164252 - DNA, 2049 bp, Enterobacter cloacae
atgaacactttttttaagctcaccgcgctggcgggcctgtttgctataacaggtcacgcctttgcagtggacgatatcacgcgtgttgatcaaattccggtactcaaggaagagacgcagcacgcgacggtgagcgagcgcgtgacctcacgtttcacccgttcgcactatcgtcagttcgatctcgatcaggccttttcggccaaaatctttgaccgctatctgaacttgctggattacagccataacgttttgctcgccagcgatgtcgagcagttcgctaagcggaaatccgaggtgggtgacgagttgcgttcaggcaagctggatctcttctacgatctctacaacctgtcgcaaaagcgccgcttcgaacgctatcagtacgcgctgaaagtgctggaacgtccgatggacttcaccggcaacgacaccttcaatctggaccgcagcaaagcgccctggccaaaagatgaagccgagctgaatgcgctgtgggacggcaaagtgaaatacgacgagctgagccttaagctcaccggcaaagacgaaaaagagatccgtgacacgctgacgcgtcgttacaaatttgccattcgtcgcctggcacagaccaacagtgaggatgttttctcactggccatgacggcctttgcgcacgaaattgatccgcacaccaactatctctcacctcgcaacaccgagcagtttaataccgaaatgagcctgtctctggaaggtatcggcgcggtgctgcagatggacgatgattatacggtgatcaattcgatggtcgcgggtggtccggcatccaaaagcaaagccattagcgtaggcgatcgcattgtgggtgtgggacaaaccggccagaacatggtcgatgtgatcggctggcgtcttgatgacgtggttgcgctgatcaaaggtccgaagggcagcaaggttcgtctggaaattctgccagccggaaaaggcaccaaaacccgtatcgttaccctgacccgtgagcgtatccgtctggaagaccgcgcggtgaaaatgtcggtgaaaaccgtgggtaaagagaaggtgggtgtcctggatattcctggcttctacgtcgggttgactgacgatgtgaaagttcagctgcagaaacttgaaaagcagaacgtcagcagcatcatcatcgacctgcgcagtaacggcggcggggcgctgacggaagcggtttcactctctggcctgttcatcccatctggcccggtggttcaggtgcgcgataacaacggtaaagtgcgtgaagatgcggacaatgacggtgtggtctactacaaaggcccgctggtggttctggttgaccgcttcagtgcatctgcatctgagatcttcgccgctgccatgcaggactacggccgcgcgctgatcgtcggtgagccaaccttcggtaaaggcaccgttcagcagtaccgctctctgaatcggatttacgatcaaatgctgcgtccggaatggcctgcactgggctcggttcagtacaccattcagaaattctaccgcgtaaacggcggcagtacgcagcgtaagggtgtcacgccggacatcatcatgccgacaggcacccaggagacggaaactggcgagaagtttgaagataacgcgttgccgtgggacagcatcaatgccgcgacctacgtgaaagcgggtgatatgacgcaatttggccctgagctgctgaaggcgcataacgaccgcatcgcgaaagatccggagttccagtacatcctgaaggatattgcccgattcaatgccctgaaagataaacggaatatcgtttctctgaactacgctcaacgtgaaaaagagaacaacgaagacgatgcaacccgcctggcgcgtatcaacgatcgcttcaagcgcgaaggtaaacctctgctcaagaaactagacgatctgccaaaagattaccaggagccggatccgtatctcgacgagacggtgcatatcgcgctcgacctggcgaatcaggaaaaagagaaacctgccgtacagcccgctccggcaaaataa

SEQ ID NO: 164253 - DNA, 687 bp, Enterobacter cloacae
atggaaaatcaacctaagttgaatagcagtaaagaagttatcgcatttctggccgagcgtttcccgcagtgcttcagcgcggaaggcgaagctcgtcccctgaaagtcggtatttttcaggatctggtggcgcgtgttgaaggggaaatgaacctcagcaaaactcagctgcgttccgccttacgtctttatacttcgagctggcgttacctgtacggtatcaaacctggcgcgacccgcgtggatctcgacggcaacccttgcggtgagctggacgagcagcacgttgagcacgcgcgcaagcagctggaagaagccaaagcacgcgttcaggcacaacgtgcagaacagcaagcgaaaaaacgcgaagccgccgcggcaaacggccaggaagaagcgcctcgtcgtgagcgtaaaccacgccctgcgccgcgtcgtcacgataataacgatcgcaaactgcgtgcagacaaaccagcagcaaaagccccgcgtgcgcctcgtgaagagccgcgccatacgccggtttctgacatcaacgccctgagcgtaggtcaggcactgaaggtaaaagcgggtaacaatgctatggacgccaccgtactggaaatcaccaaagatggcgttcgtgtacagctgacttctggtatgtcaatgattgtacgcgcagaacacttgttgttctga

SEQ ID NO: 164254 - DNA, 498 bp, Enterobacter cloacae
atgaacaaaacagaattctacgcggatctgaaccgcgattttaaggcattgatggcgggtgagaccagcttcttagccactctggcaaatactagcgcattgctgtttgaacgtctctctgacgtgaactgggctggcttttaccttctggaaggtgaaacgctggtgctcggtccgttccagggcaaactggcctgcgtgcgtattccggtagggcgtggcgtatgcggcacggcggtggccgagaatcaggtccagcgtgtggaagacgttcatgcgtttgacgggcacatcgcctgtgatgctgccagtaattctgaaatcgttctgccgctggtggtcaaaaatcagattattggcgttctggacatcgacagtacggtcttcagtcgctttacaaccgaggacgaacaggggctgcgcgagctggtggcgaatctggaaaacgtactcgcagcaaccgattatcaaaaattctttgcgagcgtcgcaggataa

SEQ ID NO: 164255 - DNA, 1284 bp, Enterobacter cloacae
atggccttaaaaacaaccaaaattacgccgacgagaaagataactgtccatacggtaagcgaagctttgcctcgtgcacattatcagcgttgcccccagtgcgatacgctttttatgttgccgaagatgaaatcgcaccaaagtgccttctgcccccgctgtgacgccaaaattcgcgatggccgcgactggtcgttgacccgcctcgccgccatggccgttaccatgctgctgctgatgcccttcgcctggagtgagccgctgctaaaaatctacctgctcggcgtgcgcattgacgccaacgtgctgcagggcatctggcagatgacccgtcagggcgatcccatcaccgccgcgatggtgctgttctgcaccgtcggcgcaccgctggtgctggttgccgccattgcctatctctggtttggcaacattcttggcatgaaccttcgcccggtgctgctgatgctggacaagctcaaagagtgggtcatgctggatatttatctggtcggcgtgggggttgcgtcaataaaggtgcaggactacgcctttttgcagcccggcgtcggactctttgccttcatctgtctggtattgctgagtatcctgacgctgatccacctgaacgttgagcagctctgggagcgattctaccctcagcgccccgccacgcgtcccgatgaaaatctgcgcgtctgtctgggttgccactataccgggttacccgacacgcgcggacgctgcccgcggtgccacattccgttgagactgcggcgcaataacagcctgcaaaaatgctgggcggcgctgatcgcctccctggtgttcctgatccccgccaatatgctgccgatttccatcatttacgtgaatggtggacgtcaggaggatactatcctctccgggattatctcccttgcgcacagcaatgtcggggtggcggcgatcgtctttattgccagtatcctggttccctttaccaaagtggtggtgatgattaccctgctcatcagcattcacttaaagtgtgaacaaggtttacggacccgcattttgcttctgcgattcgtcacctggattggccgctggtcaatgttagatctgttcgtgatttcgctgatgatgtcgctcatcaatcgcgatcagttacttgcttttacaatgggacccgcggctttttatttcggctctgcggtgatattgactattcttgctgtggaatggctggatagccgcttactttgggatgcacatgagtcaggaaacccccgcttcgccgactga

SEQ ID NO: 164256 - DNA, 2634 bp, Enterobacter cloacae
atgagtcaggaaacccccgcttcgccgactgaagcgagaattaaaacaaaacgccgcatttcgccattctggttgctgcccgtcatcgccctgatgattgcaggctggcttatctggacaagctatgaggatcgcggcagtaccgtcaccattgatttccagaccgccgacggcatcgtcgccgggcgaactcccgttcgcttccagggggttgaagtgggtacggttcaggatatctcccttggaaaagggctgaacaagattcaggtgcgggtcagcattaaatctgacatgcaggatgccctgcgcagcgaaacgcagttctggctggtgacgccaaaagcctcgctggccggtgtgtccggtctggatgcgctcgtcggcggtaactatatcggcatgatgcccggcaaaggcgaaccgcaggatcactttgtggctctggatacgcagcccaaataccgcctcaataacggcgatttgatgattcatctccaggcgccggacctcggttccctgaacagcggctccctggtctatttccgtaagatcccggttggccgcgtgtatgactacgcgattaacccgaataaacagggcgtcacgattgatgtgctgatcgaacgtcgcttcaccaatctggtgaaaaaaggcagccgcttctggaacgtgtccggcgtggatgccgacctcagcctgagcggtgcaaaagtgaagctggagagtctggccgcactggtgaacggcgccatcgcctttgactccccggaaaactcaagccctgccacggctgatgacacgttcggattgtacgccgatctggcgcacagccagcgcggcgtgatcgtcaaactcgcccttcccgatgctaaaggactaaaagcgggttcaacgccgctgatgtatcagggtctgcaggtcggccagctcaccaaaatgacgctcaacccgggcggatcggtcaccggcgaaatgacggtcgatccgagcgtggtcgatctcctgcgcgagaaaacgcgcatcgaaatgcgcagtccaaagatctccctgaacgataccagcctcagcacgctgctgaccggcaatacctttgagctgatccccggggaaggtcagcccagcaatagcttcgtgattgccccggcggataaagccctgctgcaaaagccgggcgtcgtgacggttacgctcaatgcgccagaaagctatggcattgaagccggtcagccgttgattttacacggcgtgcaggtgggacaggtgctggagcggaagctctccgcggatggggtgcaattctccgtcgccatcgacccgcaatacagagacctggtacatggcgacagtaaattcgtggtgaacagtcgcgtcgacgtgaaggtaggtctggacggcgtggagtttctcggcgccagcgccagcgaatgggtgaacggcggcatccgtattttgccgggggataaaggccccgtgcgcgacagctacccgctgtatgccaaccttgagaaagcgattgaaaacagcctgagcgatcttcctaccaccacgctgacgttaagcgccgagaccctgccggacgttcaggcgggctccgtggtgctgtatcgcaagtttgaagtcggggaagtgatcaccgttcgcccgcgtgccgacgcctttgatatcgaactgcacatcaagccggagtaccgcaagctgctgacgccgaacagcgtcttctgggctgaaggcggcgcgaaagtgcagctgaacggtaacggactgaccgtacaggcctctccgctgtcacgcgcgctgcgcggggcgattagcttcgataacctcagcggagcgggcgcgaacctgcgtaaaggcgataagcgaattctcttcccgtccgagaccgccgcacgcgccgtgggcgggcagattaccctgcacgcgtttgatgccggcaagctggcggaaggcatgcccatccgctacctgggcattgatatcgggcagatccagaagctgacgctgatcacctcgcgcaacgaggtgcaggctaccgccgtgctctacccggaatatgtgcagacctttgcgcgcgcgggttcgcgcttctcggtggtgacaccgcagatctcggccgcaggcgttgagcatctcgacaccattttgcagccgtacatcaacgttgagcccggccagggcaatgcccgccgtgatttcgagctgcaggaagccacgatcaccgactcgcgctaccttggcggcctgagcatcgtggtggaagtgccggaagcgggctcgctgagcatcggcacgccggtcctgttccgcggcattgaggtcggtacggtcacgggcctgacgctcgggacgctctccgaccgcgtgatggtggcgctacgcatcagcgaacgctaccagcacctggtgcgtaataactcagtgttctggctggcatccggctactcgctggacttcggcctgacgggaggcgtggtgaaaaccgggaccttcaaccagttcattcgcggtggtattgcgtttgccacaccgccggggacgccgctggcgccgaaagcgcagccgggtaaacatttcctgctgctcgaaagcgaaccaaaagagtggcgcgaatggggaaccgccctgccgcgttaa

SEQ ID NO: 164257 - DNA, 1398 bp, Enterobacter cloacae
atgcgcgaggcgcttccttctcacctgtcgttagacgattttatcgccgcctgccagcgtccgttacgccgcagtattcgcgtcaacacgctgaaaatcagcgtcgcggattttctggcgctggtcgcgccctacagctggcagcttacgccggtaccgtggtgcgctgaggggttctggatcgagcgcgatgacgaagacgccgtgccgttgggaagcaccgctgaacatctgagcggcctgttctatatccaggaagccagctcgatgctgccggtggcagccctgttcgccgatggcaatgcgcccgagcgcgtgatggatgtggccgcggcgcccggctcaaaaaccacgcagattgccgcccgtatgggtaaccgcggcgcgatcctcgccaacgagttttccgccagccgcgtgaaggtattgcatgccaacatcagccgctgcggtattcataacgttgccctgacgcacttcgacggccgagtgtttggcgccgccctgccggaagccttcgacgccattctgctggacgctccctgctccggcgaaggggtggtgcgtaaagatcccgatgcgttaaagaactggtccgtggaaagcaaccttgagatcgccgccacgcagcgggagctgatcgagagcgcattccatgcccttcgcccaggcggcacgctggtctattcaacgtgcaccttaaaccgcgatgaaaacgaagacgtctgcctgtggctgaaagcgcaatacccggatgcggtcgaattcctgccgcttaacgatctgtttgtctcagcacaggaggcgattacgccggagggtttcctccacgtattcccgcagatttacgactgcgaaggcttctttgtggcacgtctgcgtaaaacgcaggcggttgctcccctgcccgcccccaaattcaaggtcggcaacttcccgtttgcccccctcaaaggtcgcgatgcagcacagcttgtcgccgccgccgaaaaaattggcctggtctgggatgagagcctgcacctctggatccgtgataaagaggtatggcttttcccggctgagatcgaaccgctcatcggaaaggtccgtttttcccgaatcgggatccgcctggcggaagtgcataataaaggctatcgctggcagcatgaggccgtcatcgcccttgccgggcacgagaatgcctttgcccttacgcatcaggaagccgaagagtggtaccgtggtcgcgatgtctatcctgacagcacgccatcaggcgatgaagtgatcgtgacgtatcagggatacccgctcgggctggcaaaaaaagtcggttcacgactgaaaaacagctatccgcgcgagctggtccgggatggacgactgtttaccggtaacgatcgcaccgcctga

SEQ ID NO: 164258 - DNA, 384 bp, Enterobacter cloacae
atggacgactgtttaccggtaacgatcgcaccgcctgaaaaaaagcgcatttttttactggcgattttgctctccttgtctacgatcaaaaatgggtggccgtactggtcataccagattttgacaaccgacccggagagcactatgacgaaaaccagcgtgcgtattggcgcttttgagatcgacgacgcagaactgcgcggcgaagcgcaaggcgatcgaacgttaagtattccctgcaaatccgacccggatttgtgcatgcagctcgatgcatgggatgcagacaccagcgtcccggcaatacttgatggcgaacattctgttctttaccgtgagcattacgatagtaaaaccgatgcctgggtcatgcgtcttgcctga

SEQ ID NO: 164259 - DNA, 645 bp, Enterobacter cloacae
atgtatcagcgaattgaaggtggaatgtggcgtcacgtctgggtggtcagcgatatacatggctgttatcagcggcttatggatgagcttaaacgccgtcattttaatccgtatgaggatttgcttatttccgttggggatatgatcgatcgcggtccggacagcgttaaatcattacagcttatcaatgagaaatggtttcgtgccgtccggggcaaccatgagcaaatggcgctcgacagtctggataataacgatttttcactctggacaatgaatggcggaatatggttcaggcaacttgaacgggaccagcaacagcttgcgctatcgttgctcgaggcctgtcacgatttaccgcatatcatcgagataacctgtgcgaacggtctgaacgtgatcgcccatgcggattatccgggagcggaataccgctggcaaaaaccggtgagcgcccagcgcgttttatgggatcgcgatcggttgatggggtttatggtgggcaaagggcagggcatcagcggtgcggatcatttctggttcggacatacgcccgtcgacagaaggtatgattttgacaatctccactacattgatacgggcgccgtatttgacggttactttacgctggcgcagctgcagtaa

SEQ ID NO: 164260 - DNA, 942 bp, Enterobacter cloacae
gtgtctaatacgcacctgcataacgatgttttctatccgcatcgcacaaatattatttctgagctggtgaacggcaaacgcgtgccggggccgatctggcgcaagcgcgaatatcgcctgaagttcctgttacgttcgctggtgttctggtcttctacccatcgcatgctggaggcgctttctggtcgcgacgatttcgacagactgctggcctctcaaattacattgccgagcaaaacccaccggcagtacctgatgcgcggcctgacggctaacgatcgcgccgacgcgatcgttagccattattactggattgatagcctgaaagagagcggcctcgccctggcactgaccagcccacaggagaagcccgttgcgcagttccatgcaaaagacggagttatctatacggttaatgcgtcctctgcggggaaagccgagcgtgaaggcgaaagcacgctttggcttcgcgacaacgaggatacgctgctggccagcctgacctttagcgtcgcgcgcagcaatgggcaacaggtcatggtcatcggtgggcttcagggcccccgccgcagcgtaacgcgtgacgttattaaacaggccacccgcgcctgccacggtttgttccctaagcgcgtgttgatggaagtgcttttccagctggctgcacagtcctccgtccgggcgatttttgccgtcagcgatgagggccacgtattccgtgcgctgcgctatcgcctcagcaaaggccgccatttccacgccagctatgatgaattttgggcctctctggacggtaaaaagctctcagccttctgctggcagctgccgctacagatggcgcgtaaatcccttgaagaaattgccagtaaaaaacgcgctgaataccgccgtcgctttgagctgcttgatgaaatcgaggcgtcggttaaatcgcacttttag

SEQ ID NO: 164261 - DNA, 492 bp, Enterobacter cloacae; identical to SEQ ID NO: 125866

SEQ ID NO: 164262 - DNA, 339 bp, Enterobacter cloacae
atgaaaaagacagtactttctctcatattgctggcctgcacggggagcgcgtttgccgcaccgcaggttatcaccgtcagccgttttgaagtgggtaaggacaaatgggcgttcaaccgcgaagaggtgatgctgacctgccgtccgggccatgcgctgtatgccatcaacccgagcacgctggtgcaatacccgttaaatgaaaccgccgagcagcaggtggccagcggaaagagcagcggccagccgattagcatcattcagatcgatgacccggcgaatccgggacagaaaatgagtctggccccgtttatcgagcgcgccgacaagctctgctaa

SEQ ID NO: 164263 - DNA, 870 bp, Enterobacter cloacae
atgctggcgctgtgttatatcgggttgcgctttatccatttcggggcgctgatgctgatttttggcaacgcgctttacagcgtctggtttgcgccttcctctctccagcggctgatgtgccgacgtttccagctgcagcagaaagtggcggcttttgtgagcctggcggctgcactcctgatgtttatgcttcagggcgggcagatgggtaacggctggggcgatgtgtttgccccacaggtctggtccggcgtaatgaggacacagtttggcggcgtctggctgtggcaaatgattctcgctgcgatgacggtcgctgcagcatggctcgcgccgctgaaaggttcgcggctgctgctgctcgccatggggcagcttatcctgctggcgggggtagggcacgcggcgatgaacgacggtccgatgggggcgctgcagcgccttaatcacgcttttcacctgatctgtgctgctacctggcttggcggattactgcccctgctgttctgcatgcgtctggcgaaagggcgctggcagaatgccgccatctataccatgatgcgcttctcgcgcgtgggccattatgcggtcgcgggcgtgctgctcagcggagcgatcaatgcgctcatgatactgggcgtccatgttccctggcaggctgactacgtgcagtttttgttgttcaaatgtgcgctggtggcgttgatggtggtaattgcgctggcaaatcggtattttctggtgccacggtttcgtccggagaccgggcgagcacaacagatttttatcaggatgacacaggcagaagtggtgctgggggcgctggtactggcaacggtcagtctgttcgccacctgggaacccttctga

SEQ ID NO: 164264 - DNA, 372 bp, Enterobacter cloacae
atgggtttctccgcttcccgcgcggtaagcgcactggtttttctggcctctacaatgatgaccccctccgtgctggcgcatgcgcaccttaagcagccgatcccggcagcggacagcgtggtgagcgctccgcaggcactgacgctgaatttttcagaaggcatcgaaccgggatttagcggtgtggtggtgacggatgcgcaaaagcaggtcatcaaaacgggaaccgccacgcgcgacgaaaagaacaaggcgcagctcaccgttccgctggaccaaacgctgacgccagggacgtaccaggtagactggcatgtcgtctcggtagacggtcataaaaccaaaggtagctatcactttagcgtgaaatag

SEQ ID NO: 164265 - DNA, 231 bp, Enterobacter cloacae
atgaagatcaatctggccgcccttccacaggacgagatggataaagtgaatgtcgatctcgctgccgctggcgtcgcgtttaaagagcgttacaacatgcctgtcgtggctgaagtcgttgaacgggaacagcccgcccatctgcgcgactggtttcgcgaaagactcatcgcccaccgtctcgcctcggtcaacctctcccgtttaccgtacgaacctaaagttaaataa

SEQ ID NO: 164266 - DNA, 651 bp, Enterobacter cloacae
atgtcacattggaatatagcggcggcccagtatagcgggcagcatcagagtgtcgatgaccatatcacgcaccacctgcgcttcatcgccgaagcagcacggcaggggtgcgatctgctggtgtttcctgaactgtcattaacaggctcgggaacgacgacgttacctctcccacccggcgacgcccagcttgaaccgctgctcgacgcggcgcatcgttaccgaataaccgtaattgccgggctccccgtggagcgggatggtcagcgccagaaaggtctcgcgctcttcacccccgctcgtcaacgcatccttcgctacccgcaaggtggcggagccagcctggtgccgggagagaaacagctcagcattattgatgcgcatgccgattcccccaatctcgatcccagagcgtcgctgtttaccagctgtcagtcagtggaggataaccgctggcggcagtccatcagtaccctgcagcgcttcgcgcataaatatgccatagcggtgctgatggcgaatgcctgcggcggtagcgcgctgtgggatgaaaaaggccagctgatcgttcgcgcggataagggcgagctgctgttgaccggcacgctcggcggagagggttggcaaggcgatatcattcctttaggctag

SEQ ID NO: 164267 - DNA, 663 bp, Enterobacter cloacae
atgctgcgcgtcatcgataccgaaacttgcgatcttcagggcggaattgtagaagtggcctctgtcgacgtggttgatggtaaaatcgtcaacccaatgagccatctggtgcgtcctgaccgccccatcagccctcaggcgatggctatccatcgcattaccgaatcgatggtggcggacaagccgtggatcgaagagatcattccccactattacggtagcccctggtacgtcgcgcataacgccagttttgaccgccgggtgctccctgagatgccgggggaatggatttgtaccatgaagctggcgcgccgcctctggccgggcattaaatacagcaacatggcgctgtacaagtcccgcaagctcagcgtccgcacgcctgaggggcttcaccatcaccgggccctgtatgactgctatatcaccgccgcgctactgattgatatcatgaatacctcaggctggacgccggacgatatggcaacgattaccggacgccccgcactgctgaccacgtttacctttggtaaataccggggcagagcggtgtcggatattgcggataaagacccgggctatttgcgctggctgtataacaaccttgacaaaatgagcccggaactgcgcctgacgctaaagcactatctgggcgaagcttaa

SEQ ID NO: 164268 - DNA, 2199 bp, Enterobacter cloacae
gtgagggcattgagcgggatattcgggaacaaaaacaggcgttacagggatagttctcgccgttgcgacccggtttcgcttgcatcatgcgtgggttttgccaaccttatagggtgtaaaacgaaaaagaatgacgacatgccaccgaaagcccgacgtataccttatgcgatcaccacgcatggcgatacgcgtatagacaactattactggctacgggacgattcacgctcccggccagaggtgctcgactacctgcacgaggaaaacgactatggccgcaaggttatgtccagccagcagacgcttcaggaccagctgctgaatgaaatggtgcagcgtattcctcagcgcgatatctccgcgccctggaccaaaaatggctatcgctatcgccatatttatgagcccggcaacgagtatcccatctaccagcgtcagtcggtcctgagcgccgaatgggatgcgtgggatattctgctggatgccaatcagcgcgcggcccacagcgagttttatactctgggcggcatgtccatttcgccggataatgcggtgatggcgctggcggaggattatctctcccgtcgccagtacggcctgcgttttcgcaatctggacaccggcaactggtatccggaaatgctggaaaacgtctccccggattttgtctgggcgaatgattccgagacggtgtactacgtcaaaaagcacgcctgtacgctgctgccctatcaggtatggcggcacaccatcggaacggactccacagacgacgagctggtctatgaagagaaagacgaaacgttttatatcagcctgcataaaacctcttcgcgccattatgtgattatcttcctggccagcgccacgacatcggaagtcctgctgctggatgccgaactgcccgacgcccagccgctctgtttcctgccgcgccgaaaggatcatgagtacagcctggatcacttccagcacagcttttatctgcgctcgaatcgcgagggtaaaaactttggcctctataaaaccaaagtacgcgatgagcgcaagtgggaggtgcttatccccgcgcgggatcaggtgatgctggaagggtttaccctgttcaccgactggctggtggtggaggagcgccagcgcgggctgaccagcatccggcaaatcaaccgcaaaacgcgggaagtggtggggatcgcgttcgacgacccggcctatgtgacgtggattgggttcaatcctgaacccgaatcatcgcggctgcgctacggctactcatccatgaccacaccggacaccctgtttgagctggacatggataccgggcagcgtcaggtgataaagcagaccgaggttaaagggtttgagtccgaaaactaccgcagcgagcacctgtgggtcaccgcccgggatggcgtcgaggtccccgtctcgctcgtctatcacaaagcccatttccagaaaggcaaaaacccgatcctggtgtacggctacggctcctacggctccagcatggatgccgatttcagcagcagccgtttaagcctgctcgaccgcggctttgttttcgccatcgcccatattcgcggcggcggtgagctggggcagcactggtatgaggacgggaaattcctgaaaaagaaaaacaccttcaatgactacctcgacgtctgcgatgcgctgattgatcagggctatggcgatccgaagctctgctttggcatgggcggcagcgcgggcggtatgctgatgggggcggttatcaaccagcgtcctgaacgctttaaggggattgtcgcgcaggtgccgtttgtcgatgtggtgacgaccatgcttgatgaatccattccgctgacgaccggggagtttgaagagtgggggaatccgcaggatgagatttactaccgctatatgaaaacgtacagcccttacgataacgtcgaggcgaaagcctatccccacatgctggtcaccaccggcctgcatgactctcaggtgcagtactgggagccggcaaaatgggtggcgaaactgcgggagctgaaaaccgacgacaacctgctgctgctgtgtaccgacatggattccggacatggcgggaaatcgggacgatttaaatcgtatgaaggggtggcgctggagtatgccttcctgattggcctggcgcaggagacgctgccaggccgtgcagagcgttaa

SEQ ID NO: 164269 - DNA, 651 bp, Enterobacter cloacae
atgtctggctggctaaatcaattgcaatcactgttagggcagaaaacgtcgtcttccggcgagcgggatctcagcaaactactggtgcccggggcgctcggcgggctggcaggcctgctggtcgcgaataaatcctcgcgcaagctgctggcaaagtacgggacaggcgcgctgctggccggtgggggcgccattgcgggtaccgtcctgtggaataaatacaaggacagggtccggaccgcgcacagcaatgaaccgcactacggcgagcacacctcgccgctggatctgcgcaccgagaggctcattcttgcgctggtttttgccgcgaaaagtgacggacatatcgacgataaggaacggctggcgatcgaacagcagctgcgcgaagccggcgtcgaagagaagggcagagcgctggtggcgcaggccatcgaacagcccctggatccgcagcgtctggcgcaaagcgtgaaaaatgaggaagaggcgcttgaactctatttcctcagctgtgccgccatcgatatcgatcactttatggagcgcagctacctgaatgcgcttggcgacgcgctgaagatcccgcaggacgtgcgtgagggcattgagcgggatattcgggaacaaaaacaggcgttacagggatag

SEQ ID NO: 164270 - DNA, 1179 bp, Enterobacter cloacae
atgattcgtttaggaaccgcgctgcgacctgcggcgacgcgagtgatgctgttgggatcgggcgagctgggaaaagaggtcgccattgagtgccagcgtttaggcgtggaagtcattgccgtagaccgctacgccgatgcacccgccatgcacgtcgcccatcgttcttatgtgattaacatgctggacggcgatgcccttcgtgagctgatttcacgcgagaagcctgatttcgttgtaccggaaattgaagccatcgccaccgacacgctgattgcgcttgagcaggaaggccagcgcgtggtgccctgcgcgaaagccgcaaagctgaccatgaaccgcgaaggcattcgtcgtctggcggcagaagagctgggattgcccacgtcgagctatcgttttgctggcgataaagccgcattcctgcaggccgttgaggagattgggtacccgtgcatcgttaagccggtgatgagctcctccggtaaaggacagagctttatccgcgacagcagcacgctggacaaggcgtgggagtacgcccagcagggtggccgcgccggtgccggtcgcgtgatcgttgaaggggtggtgaagtttgatttcgagatcaccctgctgaccgtcagcgccgttgacggcgtccatttctgcgacccgattggccaccgccaggaagatggcgattaccgcgaatcctggcagccgcagcagatgagcgccctggcgctggagcgtgcgcaggcgatcgcccgtaaaaccgtcctggcgctgggcggctatggcctgtttggcgtggagctgtttgtgtgcggcgatgaggtgatcttcagcgaagtctcccctcgcccgcatgacaccggcatggtcacgctgatttcgcaggatctctccgagttcgccctgcacgtgcgcgccttcctcggcctgcccgtcggcggtatccgtcagtacggcccggccgcctcggcggtgatcctgccgcagctaaccagccagaacgttacgtttgataacgtcgacgcggcggtgggtgccgggttgcaggtccgtttgttcggcaagccggagatcgacggaacccgtcgtcttggcgtggcgttagccaccggagataacgttgatgacgccgtggcgagagcgaaagcggccgcagcaagcgttaaggtaacgggataa

SEQ ID NO: 164271 - DNA, 642 bp, Enterobacter cloacae
atgaaaaactggaaaacaagtgcagaagcaatcctgaccactggccctgtcgtgccggttatcgtggtaaacaagctggagcacgctgtaccgatggcgaaagcgctggttgcgggcggcgttcgcgttctggaagtgaccctgcgtaccgcctgcgcgatggatgccattcgcgcgattgccaaagaagtgccggacgccattatcggtgcgggtaccgtaacgaacgcaaaacagctggctgaagtgaccgaagcgggcgcacagtttgccatcagcccgggcctgaccgagtcgctgctgaaagccgccaccgaaggttccattccgctgatcccgggcatcagcaccgtttctgaactgatgctgggcatggactacggtctgaaagagttcaaattcttcccggcggaagcgaacggcggcaccaaagcgctgcaggcgattgccggtccattctctcaggtacgcttctgcccgacgggcggtatctctcctgccaactaccgtgactacctggcgctgaaaagcgtgctgtgcatcggtggctcatggctggttccggcggatgcgctggaagcgggcgactgggatcgcatcaccaaactggctcgcgaagcggtagaaggcgcgaagcagtaa

SEQ ID NO: 164272 - DNA, 1812 bp, Enterobacter cloacae
atgaatccgacattgttacgcgtaacacagcgcattattgagcgctcgaaagagacccgttcggcctacctcgcccggattgaacaggcgaagagcaacaccgttcaccgctcccagctggcctgcggtaacctggcgcacggcttcgccgcctgccagcctgacgataaagcgtcgctgaaaagcatgttgcgtaacaatatcgccatcattaccgcctataacgatatgctctccgcgcatcagccctatgaggtttacccggacatcatccgtaaagcgctgcacagcgtgaatgcggtcggccaagtggcggggggggtacccgccatgtgcgacggcgtgacgcagggtcaggacggtatggagctctcgctgctgagccgtgaagtcattgccatgtccgcggcggtgggcctgtcacacaacatgtttgatggcgcgctctatctcggcgtatgcgacaagattgttccgggcctggtgatggccgcgctgtcgtttggtcatctgcctgcgatcttcgtgccgtcgggcccaatggcaagcggcctgccgaacaaagaaaaagtgcgcattcgccagctgtacgcggaaggaaaagcagatcgtcaggcgctgctggaagcggaagctgcatcctaccacgcgccgggcacctgtacgttctacggtaccgcgaacacgaaccagatggtggtggagtttatggggatgcagcttccgggctcgtcctttatccagccggatgcaccgctgcgcaaggcgctgaccgaggccgcggcccgtcaggtcacgcgtctgaccggaaacggcaacgaatggatgccgatgggcaaaatggtcgacgaaaaagttatcgtcaacgggattgtcgcgctgctggccaccggcggttcgaccaaccacaccatgcacctggtggccatggcgcgtgcggcgggcattctgatcaactgggatgacttctccgagatctcttccgtggtgccgttgatggcgcgcctgtatccaaacggtccggcggacatcaaccacttccaggccgcaggcggcgtaccgctgctcatgcgcgagctgctgaagggcggtctgctgcatgaagatgttaacaccgtagcgggctttggcctgcagcgctacacccaggagccatggctgaacaacggcgagctggactggcgcgaaggggcgaccgcatctcttgatgcgcaggttatcgccaccatcgacaaacctttctctcctcacggtggcacaaaggtgctgagcggtaacctcggtcgcgcggtaatgaagacctctgccgtaccggaagagaatcagattatcgaagcgccagcggtggtatttgaaagccagcacgacgtattacctgcctttgacgccggtctgctcgacaaagactgcgtggtagtggtgcgtcatcagggccctaaagccaacgggatgccagaattacataaacttatgccaccacttggtgtattattggaccgccgtttcaaaattgcactggtgaccgatggacgcctctctggcgcctcaggtaaagtgccatcagctatccacgtgacgccggaagcgtacgacggcggcctgctggcgaaagtgcgtgacggtgacatgatccgcgttaacggtcagacaggcgagttaaccctgctggtggatgacgccgagctggcggcacgtcagccccatattcctgacctgagcgcgtcgcgcgtgggaacaggacgcgaaatgtttggcgcactgcgtgagaatctctccggtgctgagcagggcgcaacctgtattacgttttaa

SEQ ID NO: 164273 - DNA, 1476 bp, Enterobacter cloacae
atggcggtaacgcaaacagcccaggcatgtgacctggtcattttcggcgcgaaaggcgatcttgcacgccgaaaattgctgccttccctgtatcaactggagaaagcgggccaaattcatccggatacgcgtatcctgggtgttgggcgcgccgactgggacaaggacgcttataccaaagtcgtccgcgaggcgctcgaaactttcatgaaggaaaaaattgatgaaagtttgtgggataccctgagcggtcgtctcgatttctgcaaccttgacgtgaatgacgtcagcgcattcgctcgcttgggcgcgatgctggatcagaaaaaccgtgtcaccattaactatttcgccatgccgccaagcaccttcggcgccatctgcaagggcctgggcgaagccaaactgaacgccaaaccggcgcgcgtcgtgatggagaagccgctgggtacctcgctggcaacctcgcgtgaaatcaacgaccaggtgggcgagttctttgaagagtgccaggtctaccgtattgaccattatctcggtaaagagacggtgctgaacctgctggcgctgcgttttgctaactccctgtttgtgaacaactgggacaaccgcaccatcgaccacgtggaaatcaccgtggccgaagaggtggggattgaaggtcgctggggttactttgaccaggccggtcagatgcgcgacatgattcagaaccacctgctgcagattctgtgcatgattgccatgtctccaccgtctgacctgacggcggacagcatccgtgacgccaaagtgaaagtgctgaagtcgctgcgccgcatcgaccgctccaacgtgcgcgagaaaaccgttcgcggccagtacaccgccgggtttgcgcaaggcaaaaaggtgcctggctacctggaagaagagggcgcgaacaagtccagtaacaccgagacgttcgtggccatccgcgtggacatcgacgactggcgctgggcgggggttccgttctacctgcgcaccggtaagcgtctgcctgcgaaatgttccgaagtggtagtctactttaagaacccggaactgaacctgttcaaagagtcctggcaggagctgccgcagaacaagctgaccattcgtctgcagccggacgagggcgtggatatccagatcctgaacaaagtgccgggcctggatcataaacacaacctgcagaccaccaagctggatctgagctactccgaaaccttcaaccagacacacctggccgatgcttacgagcgtctgctgctggaaaccatgcgcggtatccaggcgctgttcgtgcgtcgcgatgaggtggaagaggcgtggaaatgggtcgactccatcaccgaagcctgggctgccgatcaggatgcgccaaaaccgtatcaggcgggcacatggggacctgtcgcgtcggtggcaatgatcacccgtgatggccgctcctggaacgagtttgagtaa

SEQ ID NO: 164274 - DNA, 870 bp, Enterobacter cloacae
atgaacatgctggaaaaaatccagtttcaactggaacaccttagcaaatccgagcgaaaagtggccgaggtcattctcgcctctcccgctcaggcgattcattcaagcatcgccgctctggcacaggaagcgggtgttagcgaacccacggtcaatcgcttctgccgcagcctggaaacgcgcggctttcctgattttaaactgcatctggcacaaagtctggctaacggcaccccttatgttaatcgtaatgtggatgaagacgacagcgttgatgcctataccgcgaaaatttttgagtcggccatggcttcgcttgaccacgtccgtcagtctctggacatgagttccgtgaatcgcgcagtggatttactcacccaggccaagcgaattgccttctttgggctcgggtcgtcggcggccgtcgcgcatgacgccatgaacaaatttttccgctttaacgtcccggtgatttattccgatgacattgtcctgcaacgcatgagctgtatgaattgcagtgaagatgacgtcgtggtactgatttcgcatactggccgcactaagagtcaggtagaactggcgcagctggcccgtgaaaacgatgccatggtgattgcgctgaccacggcgggcacaccgctggcccgtgaggcgacgctggcgatcactctcgacgtgccggaagacaccgacatttatatgccaatggtctcccgactggcccagctcaccgtgattgacgtgctggcgaccggttttaccttacgccggggggcaaaattccgggataacttgaagcgggtcaaggaagcgctgaaggaatcgcgttttgataaagaattgcttataaagagcgatgttcgatag

SEQ ID NO: 164275 - DNA, 1443 bp, Enterobacter cloacae
atgtccagaaggcttcgcagaaccaagatcgtaaccaccttaggcccggccaccgatcgcgataataatctcgagaaaattatcgccgccggcgccaacgtggtgcgtatgaacttctctcacggtacgccagaagaccataaattacgtgccgataaagtgcgtgaaatcgcagctaaactgggccgtcacgttgcgatcctcggcgatttgcagggtcctaaaatccgtgtttcgacctttaaagagggtaaagttttcctcaatatcggcgacaaattcctgctggatgccaacctgggcaaaggcgaaggcgataaagagaaagtcggtatcgactataaaggcctcccggctgacgtcgtacctggcgatatcctgctgcttgacgacggtcgcgtgcagctgaaagtgctggaagttcagggcatgaaagtgtttaccgaagtcaccgtcggcggcccactctccaacaataaaggcatcaacaagctgggcggcggcctctctgcggaagcgcttactgataaagataaagcggatattgtgactgctgcactgatcggtgttgactacctggctgtctccttcccgcgctgcggcgaagatctgaactatgcgcgtcgtctggcgcgtgatgcaggctgcgatgccaaaatcgtcgccaaagttgagcgtgcggaagccgtttgcgatcaggatgctatggacgacgtgatccttgcctctgacgtggtgatggttgcgcgtggcgacctgggtgtggaaatcggcgaccctgagctggtgggtattcagaaagccctgattcgtcgcgcacgtcagctgaaccgcgcggtgattaccgccactcagatgatggaatcgatgatcaccaacccgatgccaacccgtgcagaagtgatggacgtggccaacgccgtgctggacggtaccgatgcggtaatgctctctgcggaaaccgctgcgggccagtatccggcagaaaccgtggccgccatggcacgtgtttgcctgggtgctgaaaagatcccaagcatcaacgtctctaaacaccgtctggacgtgcagttcgacaacgttgaagaagcgattgcgatgtctgcaatgtatgcggcaaaccatctgaagggcgttaccgcgatcatcactatgaccgaatctggccgcaccgcgctaatgacctctcgtatcagctcaggtctgccgatcttcgccatgtcccgtcacgaacgtacgctgaacctgacggcgctgtaccgcggcgtgacgccggtacacttcgacagcaccaatgacggcgtggccgcggcgcacgatgccgtaaacctgctgcgcgacaaaggctatctggtctctggtgatatcgtcattgtgacccagggcgatgtgatgagcaccatcggctcaaccaacaccacgcgcgttatgaccgtcgagtaa

SEQ ID NO: 164276 - DNA, 972 bp, Enterobacter cloacae
atggaaacccaaaaaaacaatattgaatacattcctgagtttgaaaaatccttccgccatccgcgcaactggggcgcctggctcggtgtctacgcctttgcggggatagcgttgctgccggcttccgtccgcgatcctgtcctgggtaaaattggccgtcttgccgggcgcttaggcaagagtgcccgccgtcgcgcgcagatcaatctctattactgttttcctgaaaagagcgacgccgagcgcgaggcaatcattgatgagatgtataccaccgcaccgcaggccatggcgatgatggcggagctggcgctgaaagggccggagaaaattgtcgatcgcgttgactggaaagggctggatatcattgaggagatgcgccgcaatgacgagaaagtcattttccttgtcccacacggctggggcgttgatattccggcgatgctgatggcctctcagggccagaagatggcggcaatgttccataaccagggcaataaaatcttcgattttgtctggaatacggtgcgtcgtcgttttggcggacgcctgcatgcgcgcaacgatggcattaagccgttcattcagtcggtacgccaggggtactggggctactatctgccggatcaggaccacggccccgagcacagcgagtttgtcgatttctttgcgacctataaagcgacgctccctgcgattggccgcctgatgaaagtgtgtcgtgcccgcgtgatcccgctattcccggtctacgacggtaaaacgcatcgcctgagcattgaggttcgtccgccgatggacgatctgctgaccgctgacgaccacaccattgcccgtcggatgaacgaagaggtggagatcctggtagggccgcatgccgagcagtacacgtggatcctgaagctgcttaaaacgcgtaagccgggcgaaaaagagccgtataaacgcaaagagctttatccaacgaaataa

SEQ ID NO: 164277 - DNA, 1320 bp, Enterobacter cloacae
gtgcaacagatagcccgctctgtcgccctggcatttaacaatctgcctcgaccccaccgcgtcatgctggggtcgcttacagtactcaccttagcggtcgccgtctggcggccctatgtttaccacccgagttctgcccctatcatcaaaaccatcgagcttgaaaagagcgaaatccgctctttgctgcctgaagccagtgagcctatcgaccagtcggctcaggaagatgaagccattccacaggatgaactggacgataaaaccgagaacgaagcgggtatccatgaatatgtagtttctaccggtgacacgctgagcagcgtgctgaaccagtacggcatcgacatgggcaatatcagccagctggcggcggcagataaagatcttcgcaacctgaaaattgggcaacagctctcctggacgttaacggccgatggcgatctccagcgtctgacctgggaaatgtcccgccgtgaaacccgcacctacgatcgcacggcaaccggtttcaaaatgaccagcgaaatgcagaagggcgactgggtcaacagcgttctcaaaggcaccgtgggcgcaagctttgtctccagcgcgcgcgacgcagggttgaccagcgctgaaatcagttcggtgatcaaagccatgcagtggcagatggatttccgcaagctgaaaaaaggcgatgagttttccgtcctgatgtcccgcgaaatgctggacggcaagcgcgagcaaagccagctgctgggcgtgcgtctgcgctccgagggcaaagattactacgcgatccgtgccgaagacggcaagttctacgaccgcaccggtacgggccttgcaaagggcttcctgcgcttcccgacggcgaaacagttccgcgtctcctccaactttaacccgcgtcgtctgaacccggtcaccggacgcgtcgcaccgcaccgtggcgttgactttgctatgccgcagggcacaccggtactcgcggttggggatggcgaagtggtggtggccaaacgtagcggcgcagccggatattatgttgcggtacgtcatggtcgcacgtatacgacccgctatatgcacctgcgtaagctgctggttaaaccaggacagaaggtgaagcgtggtgaccgcattgcgatatccggtaataccggtcgctctaccggcccgcacctgcactacgaagtgtggatcaaccagcaggccgtgaacccgctgacggcgaaactgccgcgcaccgaaggcctgacgggtaaagatcgtacggattacctggcgcaggtgaaagaggtgctgccgcagctgagcttagactaa

SEQ ID NO: 164278 - DNA, 693 bp, Enterobacter cloacae
atggaagcgtttatgcagaagtcagcaaaacaggtggcgggtgaaaaacaggtcgcgattgccgacctccccggcgtgaaaccgttactcatgaaaggggcggatgacgacggcgacgaacatgaccatcatgctgccgacggtgaaaaaggtgatggagatcaccatcacggcgagtacaacatgcatctttggttatccccagagatagcgcggctttcagcggttgcaatccatgacaaattagtggaacttatgccgcaaagtcgagccaaactagacgccaacctgaaagattttgaggcacaattagccgcaaccgataagcaggtaggtaatgagctcgcaccgttgaaaggaaaagggtatttcgtttttcatgacgcctacggctattacgaaaaacactacggtttgaccccgctggggcactttaccgtcaaccctgaaattcaacctggtgcgcagcgtttacatgaaatcagaacacagctggttgagcaaaaagcgacatgcgtttttgctgagccacagttcaggccagcggtcgtagaagccgtggccagggggacatccgtgcgcatggggacccttgacccgctaggaacgaatatccagttgagcaaagcgagctattcgcagttcctcagccaactggcgaaccagtatgcgagctgcctgaaaggagattaa

SEQ ID NO: 164279 - DNA, 756 bp, Enterobacter cloacae
atgacgacattggtttctcttgaaaatatttcggtctcatttggccagcgccgcgtcctctctgacgtgtcgctcgatctgaagcccggcaaaattctgacgctgctcggccccaatggcgcaggcaaatccaccttggttcgcgtggtgctgggtctggtcgcacccgatgaaggcgtgatcaagcgtgaggaaaaattgcgcatcggctatgtgccgcaaaaactgcacctcgacgccacgctgccgctgacggtgagccgtttcctgcgcctgcgtcccggcacgcgtaaagccgatattctcccggcgctgaagcgcgtgcaggcaggccatcttgtcgatgcgccgctgcaaaaactgtccggcggtgaaacgcagcgcgtattacttgcccgtgcgttgctcagcagcccgcagctgctggtgctggatgagccgacgcagggggtcgacgtcaacggccaggtcgcgctatacgatcttattgaccagctgcgtcaggaactgaactgcgcggtactgatggtatcccacgacctgcatctggtgatggcaaagactgacgaagtgctgtgtcttaaccaccacatctgctgctccggcacgccagaagtggtctccatgcacccggaatttatctccatgttcggccctcgcggcgctgaacagctcggcatctatcgccatcatcataatcaccgccatgatttgcagggacgaatcgttctgcgtcggggaaatggacactcatga

SEQ ID NO: 164280 - DNA, 786 bp, Enterobacter cloacae
atgattgaactgttactgcccggctggctggccgggattatgcttgcctgcgccgcgggtccactcggctcgtttgtggtgtggcgcagaatgtcttacttcggcgataccctggcgcacgcgtccctgctgggcgtggcttttggcctgctgctgaacgtcaacccgttctacgcggtgattgtggtcacgctgctgctggcggccggtctggtctggctggaaaaacgccctcacctcgccatcgataccctgcttggcatcatggcgcacagcgccctgtcgctgggtctggtggtggtcagcctgatgtccaatatccgcgtggatctgatggcctacctgttcggtgacctgctggccgtcacgcctgacgatctcatcgctatcgccattggcgttgtggtggtgctcgggattctgctctggcagtggcgtaacctgctggcgatgaccgtcagccccgatctggcgttcgtcgatggcgtgaagctgcagcgcgttaagctgctgctgatgctggtaacggcgttaaccattggcgtggcgatgaagtttgtcggcgcgctgattattacgtcgctgctgatcatccctgcggctacggcgcgtcgttttgcccgtacgccggagcagatggccggtgtcgccgtaattatcgggatgattgcggtaacgggtgggctaaccttctcggcgttctatgacacgcctgcggggccgtccgtggtgctgagtgcggcggttttgtttatcttcagtatgatgaagaagaccgcgcagtag

SEQ ID NO: 164281 - DNA, 1011 bp, Enterobacter cloacae
atgattgaagcagaccgcctggtttcggcaggcactgttcaggcagaggatgtggtggatcgcgcgattcgcccaaaactgcttgatgagtacattggccagccgcaggttcgttcccagatggagatttttatccaggcggcaaagctgcgcggcgatgcgctcgatcacctgctgatttttggccctccggggttgggcaaaaccacgctggcgaatatcgtcgctaatgaaatgggcgttaacctgcgcaccacctcaggcccggtgctggagaaggcgggcgatttggcggccatgctgaccaacctcgaaccgcatgacgtgctgtttatcgatgagatccaccgtctgtcaccggtggtggaagaggtgctctatccggcgatggaagattatcagctggatatcatgattggtgaaggtccggcggcacgctccatcaaaatcgatctgccgccgtttaccctgattggcgcaacaacgcgagccgggtcgttgacctctccactgcgcgaccgcttcggtatcgtgcagcgtctggagttttaccaggtggccgacctccagcacatcgttggccgcagcgcccgctatatggggctggagatgagcgaagagggggcgtttgaagtggcgaagcgttcccgcggtacgccgcgtattgccaaccgcctgctgcgccgcgtgcgtgactttgctgaggtgaagcacaacggttcgatctccgcagagatcgccgcgcaggcgctggatatgctgaacgtcgatgcagaaggttttgactacatggaccgcaagctgctgctggcggtgctggacaagttctttggtggcccggtcgggctggataacctggcggcggcaatcggggaagagcgtgaaaccattgaggacgtgcttgaaccgtatctgatccagcagggcttcctgcagcgtaccccgcgtgggcgtatggccacggtgcgggcgtggaatcatttcggcattacgccaccggcaatgccgtaa

SEQ ID NO: 164282 - DNA, 615 bp, Enterobacter cloacae
gtgataggcagactcagaggcatcatcattgaaaaacaacccccgttagtgctgctggaagtgggtggcgtgggctatgaagtccatatgccgatgacctgcttctacgagctgccggacgcgggcaaagaggcgattgtctttacccagtttgtggtgcgtgaagatgctcagctgctgtacggcttcaacaacaaacaggaacgcaccctgttccgcgagctgattaaaaccaacggcgtcgggccgaagctggcgctggcgatcttatccggcatgtctgcaccacagtttgtgaatgccgttgagcgtgaagatcctgcggcgctgattaagcttcctggcatcggtaagaaaacggcagaacgcctgattgtcgagatgaaagaccgctttaaaggcctgcatggcgatctcttcacgccggcggccgatctggtactgacctcgccaggtgcgcctgcggcggatgatgacgcggagcaggaagcggttgccgcgctggtggcactgggctataaacctcaggaggccagccgcatggtaagtaaaattgccaaaccggacgccagcagtgaaactctgattcgtgaagcgctgcgcgctgcattgtga

SEQ ID NO: 164283 - DNA, 522 bp, Enterobacter cloacae
atgtcgattattctcgggattgatccaggctcacgcgtcaccggttatggcgttatccgtcaggtgggacgccagttaacctacctgggcagtggctgtattcgcaccaaagtggacgatctgccgtcgcgcctgaagctcatctatgcgggcgtgtcggagatcatcacccagtttcagccggactatttcgccatcgagcaggtctttatggcgaaaaacgccgattcggcgctaaagctcggtcaggcgcgcggggtggccattgtcgctgcggtgaaccaggatttgccggtattcgaatacgcggcaaggcaggttaagcagacggtggtgggcatcggtagcgcggaaaaaagtcaggtgcagcacatggtgcggaccctgctcaagctccctgcgaacccgcaggccgacgccgccgatgcgctggcgattgcgattacccactgtcacgtcagccagaacgcgatgcaaatgagcgaatcgcggctcaatctggcgcgaggcaggttacgataa

SEQ ID NO: 164284 - DNA, 741 bp, Enterobacter cloacae
atggcaggtcatagtaagtgggccaacaccaaacaccgcaaagcggcacaggatgccaagcgcggtaagatctttaccaaaatcattcgcgagctggtgacggcagcgcgtctgggcggcggcgatccggcctctaacccacgtctgcgcgcggcggtggataaagcgctgtctaacaacatgacgcgtgacaccctgaaccgtgctatcgcacgtggcgtgggcggtgatgaagacgcgaacatggaaaccatcatttatgaaggttacggtcctggcggtacggcggtgatggttgagtgcctgtccgacaaccgtaaccgtaccgttgcggaagtgcgccacgcgttcaccaaaaccggtggcaacctgggcactgacggttctgttgcttacctgttcagcaaaaaaggcgtcatctccttcgagaaaggcgacgaagatgcgatcatggaagcggcgctggaagccggtgcggaagacgtagtgaccttcgacgacggcgctatcgacgtttataccgcctgggaagagatgggtgccgtgcgcgatgcgctggaagcggcgggcctgaaagcggacaacgctgaagtctccatgatcccgtccaccaaagcggacatggatgcagaaacggcaccaaaactgctgcgtctgatcgacatgctcgaagactgcgacgacgtgcaggaagtgtatcacaacggtgaaatctctgatgaggttgcagcgactctctga

SEQ ID NO: 164285 - DNA, 444 bp, Enterobacter cloacae
atgacatataagctccccgtttcggtcctggtggtcatttatgcagaagacacgaagcgggtgctgatgttgcagcggcgcgatgaccctgaattctggcagtcggttaccggcagtctggaagagggggaaaccgcgccgcaggccgccgcgcgtgaagtaaaggaagaggtcgccattgacgttgcccgcgagcaactgaccctgaaggactgtcagcgcacggtggagttcgaaatttttagccatttacgtcatcgctacgcgccgggtaccgagcgcaatacggaatcgtggttctgtctcgcgcttccccatgaacgggagatcgtgtttaccgaacacctgacctaccgctgggtgaatgcggcggatgccgccgcactgaccaagtcgtggagcaaccggcaggcgattgaagaatttgtaattaacgctgcctga

SEQ ID NO: 164286 - DNA, 1773 bp, Enterobacter cloacae
atgcgtacagaatattgcgggcagctgcgtcagtcccacgtcggacagcaggtcaccctgtgtggttgggtcaatcgtcgtcgtgatcttggtagccttatcttcatcgatatgcgcgaccgcgaaggtatcgttcaggtgttcttcgatccggatcgcgcagatgcgttgaagctggcctctgagctgcgtaatgagttctgcattcaggtcaccggcaccgtgcgtgcgcgtgacgagaaaaacgttaacgccgacatggcgacgggtgccattgaagtgctggcgtccgatctgacgatcatcaaccgtgctgaagcgctgccgctggactccaaccacgtcaacactgaagaagcgcgtctgaaataccgctatctggatctgcgtcgtccggagatggctcagcgcctgaaaacccgtgcgaaaatcaccagcctggtgcgtcgctttatggatgaccacggtttcctcgatatcgaaaccccgatgctgaccaaagccacgccggaaggcgcgcgcgattacctggtgccatcccgcgtccataaaggcaaattctacgcgctgccacagtctccacagctgttcaaacagctgctgatgatgtccggcttcgatcgctactatcagatcgtgaaatgcttccgcgacgaagacctgcgtgctgaccgccagcctgaatttacccagatcgatgtggaaacctccttcatgaccgccgagcaggtgcgtgaagtgatggaagccctggtgcgtagcctgtggaatgacgtgaaaggcgttgagctgggcgatttcccaatcatgaccttcgcggaagccgagcgtcgctacggctctgacaaaccagacctgcgtaacccgatggagctggtggacgtagctgatctggttaaaaacgtggagttcgcggtcttcgcgggcccggctaacgacgccaaaggccgcgtggccgcgctgcgtgtaccgggcggagcggctctgagccgtaagcagatcgacgactacggcaacttcatcaagatctacggcgcgaaaggtctggcctatattaaagtgaccgagcgtgcgaaggggctggaaggtatcaccagcccggttgcgaaattcctgaacgcggacatcgtggaagcgatcctggagcgcaccggcgcgcaggacggcgacatgatcttctttggtgcagataacaagaaagtcgttgcggatgcgatgggcgcgctgcgtctgaagctcggtaaagacctgaatctgaccgacgagagcaaatgggcgccgctgtgggttatcgacttcccaatgtttgaagacgacggtgaaggcggcctgaccgcgatgcaccacccgttcacctcgccgaaagacatgacggccgccgagctgaaagcggcaccggaagaggccgtcgccaacgcctacgatatggtcatcaacggctacgaagtgggcggtggttccgtgcgtattcacagcggtgaaatgcagcagaccgtgttcggcatcctgggcatcaacgagcaggagcagcgcgagaaattcggcttcctgctggacgcgctgaaatacggtacgcctccgcacgcgggtctggccttcggtcttgaccgtctgaccatgctgctgaccggcaccgataacatccgtgatgttatcgctttcccgaaaaccactgctgcagcgtgtctgatgaccgaagcgccaagctttgccaacccggccgcactggctgagctgggcattgaggtggtgaagaaggaagagaaaaactga

SEQ ID NO: 164287 - DNA, 567 bp, Enterobacter cloacae
atgttaacccttgatgccagcaaaaccgcgcttgtggtgattgatttacaggaaggcattttgcccttcgccggtggcccgcataccgcggacgatgtggtcagccgcgccgcccgcctggcggaaaaatgccgtgccagcggtgccccggttgtcatggtgcgcgtcggctggtctgcggattacgcagaagcgttaaaacagcccgttgatgcgcagactcccgcccgcgccctgccggaaaactggtggacgtacccggtctcgctcggcaaacgcgacggcgacatcgaagtgaccaaacgtcagtggggcgccttctacggcaccgatctggagctgcagctccgccgtcgcggcattgacacgatcatcctgtgcggcatttccaccaacatcggcgtggagtcgactgcccgcaacgcgtgggagctgggctttaatctggtgattgccgaagatgcgtgtagcgcggcctcggcggaacagcaccagggcagcatgacgcacatcttcccgcgcatcggtcgcgtgcgcagcacggacgagatcctcagcgcgttatga

SEQ ID NO: 164288 - DNA, 819 bp, Enterobacter cloacae
atgatgtatgtgggcctaccccagtggtcgcacccgaaatgggtgcgccttggcatcaccagccttgaggagtatgcccgacacttcaactgcgtcgagggtaataccaccctgtatgcgctccctaaagccgagattgttgcgcgctggcgggagcaaacaaccgacgactttcgcttctgcttcaagtttccggctacgatttcccatcaggccgcgctgcgaaactgcggtgagttgaccgacgaattctttggccggatggcgcctctggcaaaccgcatcgggcagtactggctgcagcttccggcaacgtttgctccgcgcgacctgcctgcgctctggcagttcctggatgccctgccccgggaatttacctacggcgtggaggttcgacaccaggacttctttgcgaaaggcgaagcggaaaaaacgctcaaccgcggcctgcttgagcgttccgttaaccgtgtgatcctcgatagccgtccggtgcacagcgcgataccgcataacgaggccatcgttgaagctcagcgtaaaaaaccgaaagtgccggtccacgccatcgtgaccgcgaagaacccaatggtcaggtttatcggcagcgataacatgctgcaaaaccaggcgatgttcgccgtctggctggaaaaactggcctcgtgggaacacaccaccacgccgtatctctttttgcacacgccggatattgcccaggcccccgaactggtcgatgctctgtggcaggccttgcaggcggcggtgccgtccgtgggcagcgccccttccatcccacaacaatcttctcttttctga

SEQ ID NO: 164289 - DNA, 396 bp, Enterobacter cloacae
atggtcagcgcgctgtacgcggtgttaggtgcattactgctgattaagttttcatttgacgttgtgcgcctcagaacgctttaccgcgtttcttacggtgacggcggcttttccgagctgcaaagcgctatccgcattcacggcaatgcggtcgaatacatccccgcggccctcatcctgctgctttttatggagatgaatggcgcagaaacctggatggtgcacatctgtggcctgctgcttatcgctggccgcctgatgcattattacggctttcaccaccgcttaatccgctggcgtcgttccggcatgagtgcaacctggtgttcgcttttgctgatggtgctggctaacctgtggtatatgccgtgggagttggttttctccctccattag

SEQ ID NO: 164290 - DNA, 744 bp, Enterobacter cloacae
atgtcagatcgcgacacgcttttttccgcgcctatcgccagcctgggcgactggaccttcgatgaacgggtagccgaagtcttcccggatatgatccagcgctctgttcccggttattccaatattatctctatgatcggcatgctggctgagcgcttcgttcaacccggcacgcaggtctatgacctgggctgctcgctcggcgcggcaacgctgtcggtacgtcgtaacgttcatcacgaaggctgccgaatcattgccgtggataactctccggccatggtggaacgctgccgtcgccatattgacgcctacaaggcccctgttccggttgacgtggtggaaggcgatatccgtgagatcgagatccaaaacgcctcgatggtggtgctgaatttcaccctgcagttcctggtgccggaagaccgccagctgctgctggacaaaatctatcaggggctgaatcctggcggcgcgctggtgctctcggagaaattcagctttgaagatgccgaggttggcgagctgctgttcaatatgcaccacgattttaaacgggcgaacggctacagcgagctggagatcagccagaagcgcagcatgctcgaaaacgtgatgctgacggactccgtagaaacccacaaggcgcgcctgcgtcaggccggatttgagcatagcgaactgtggttccagtgcttcaactttgggtctctggtggcgctgaaagcggggacacccgcatga

SEQ ID NO: 164291 - DNA, 972 bp, Enterobacter cloacae
atgattgagttcagcaacttctatcagctgattgccaaaaatcacctctcccactggctggagacgctgcctgcgcagattgccgcctggcagcgggatcagcagcacggcctgttaaagcagtgggcaaatgcggtggagtttctgccggaactgaccccgcatcgtctggatctcctgcacagcgtcaccgcagagagtgaagaaccgcttccgccagggcagatcaaccgtatcgaaacgctgatgcgcaacctgatgccgtggcgtaaagggccgttctcgctgtacggcgtgaacatcaataccgaatggcgctcagactggaaatgggatcgcgttctgccgcacctttccgacctgaccgggcgcaccattctggacgtgggctgcggtagcggctatcacatgtggcgcatgattggcgcgggcgcgcatctggtggtcggtatcgacccgatgcagctgttcctgtgtcagtttgaagcggtacgtaagctgctgggtaacgaccagcgcgcgcacctgctgccgctgggtattgagcagctacccgcactgaaagcctttgataccgtgttctccatgggcgtgttatatcaccgccgttccccactggagcacctgtggcaactgaaagatcagctggtcagcggcggcgagctggtgctggaaacgctggtgatcgaaggcgatgaacatgccgttctggtaccgggcgatcgctacgcgcagatgcgcaacgtttacttcatcccttccgcactggcgctgaagaactggctggagaagtgcggatttgtggatgtgcggattgccgatgtcagcgtgacctctatcgaagagcagcgccggaccgagtggatgatcaccgaatcgctggagcagttcctcgacccggccgatcacagcaaaaccattgaaggctatccggcgccgatgcgtgcggtgctgatagcgacgaagccgtaa

SEQ ID NO: 164292 - DNA, 744 bp, Enterobacter cloacae
atggcgctgctggagatttgctgttacagcgtggagtgtgccgtcaccgcgcaaaattacggggctgaccgcattgaactgtgtgcggcacccaaagagggcgggctgacgcctgcttacggcgtgctgaaggctgcccgtcaggccgtcacgattcccgttcacccgattattcgtccgcgcggcggtgatttttgttacacggcgggcgagttcggtgccatgcttgatgatatcgccctcgtgcgcgacctggggttccccgggctggtcaccggcctgctggatgaagacggcaatatcgacctcccgcgcatgcgtcaggtcatgagcgccgcgcaggggctcgccgtcacttttcatcgcgcatttgatatgtgtaaagatccgcttcaggcctttgaaacgcttggagaacttggcgtggcgcgcattctgacatcgggtcaacagccgtccgctgaaaaaggactgcaattaattacggaactaaaagcacattccggtgttccaataataatggcgggtgcgggagtccgcgccagcaatctggaacggtttttaaacgccggggtagaagagctgcacagctcggcaggcaaatggatgccgtcacccatgcgttatcgcaatacaggattgtctatgtcgacggatgctgaagcggatgagtattcacgctacggcgtagagggagagtcggttgcggaaatgaagtcgctgattgagcgccatcacgtgtag

SEQ ID NO: 164293 - DNA, 570 bp, Enterobacter cloacae
atggcgaactggcaatccattgacgaactgcatgatatttccgcagatttaccgcgcttcacccaggcgttcacagaacttgccacccgtctcggcctggatatcgcgccgcttgaggccgatcacatctctttgcgctgccatcagaatgccaccgcagagcgctggcgtcgcggatttgaacagtgcggcgagttactgtccgagaatatcattaacggtcgccccatctgcctgttcaggctgcgtgagccggtgagcgtggcccactggcaattcaccgtggttgaactgccgtggccgggcgagaagcgctatccacacgaagggtgggagcacattgaaattgtcctgccgggtgagccggagacattaaacgcgcgcgcgctggccctgttagctgacgaaggcttaagccagccggggatttttgtgaagaccagttcgcccaaaggcgaacgcgagcggttacccaacccgacgctggccgtcacggacgggcaggtcacggtgaagtttcatccctggaccattgagcagatcgttgccagtgaggcgcaagagatgtga

SEQ ID NO: 164294 - DNA, 1734 bp, Enterobacter cloacae
gtgaatattcaggctcttctctccgaaaaagtcagtcaggcactgattgccgcaggcgcgcctgcggattgcgaaccgcaggttcgtcagtcagcaaaagtacagtttggcgactatcaggctaatggcgtgatggcagtggctaaaaaactgggtatgccgccgcgacagctcgctgagcaggtactgacgcatctggatctcgccggcattgccagcaaaaccgaaatcgccggcccgggctttatcaacatcttccttgagcctgccttcctggcaagccacgttgacgcggcgctgaaatccgatcgtctgggtgtttcccagccggaagcgcagaccgtcgtgatcgactactctgccccgaacgtggcgaaagagatgcacgttggccacctgcgctccaccatcatcggtgatgccgcggtgcgtacgctcgagttcctcggtcacaaagtgatccgcgcgaaccacgtgggcgactggggtacccagttcgggatgctgattgcttacctggaaaaacagcagcaggaaaatgcgggcgaaatggcgctggcggacctggaagggttttatcgcgaagccaaaaagcactatgacgaagatgaagcctttgccgagcgcgcgcgcagctacgtggtaaaactgcagggcggcgatcaatacttcctcgagatgtggcgcaagctggttgacatcaccatgtcgcagaaccagcttacctataaccgtctgaacgtcaccctgacccgtgatgacgtgatgggtgaaagcctgtacaacccaatgctgcccggcattgtggctgacctgaaagcgaaaaacctggcggtggagagcgaaggcgcaacggtggtgttccttgatgagtacaaaaacaaggaaggcgaaccgatgggcgtgatcatccagaaaaaggatggcggctacctctacaccacgaccgatatcgcctgtgcgaaataccgttatgaaacgctgcacgccgaccgcgtgctgtactacatcgactcccgtcagcaccagcacctgatgcaggcgtggaccatcgtgcgtaaagccgggtacgtaccggacagcgttccgctggaacaccacatgttcggcatgatgctgggtaaagacggcaagccgttcaaaacccgcgcgggcgggaccgtgaagctctccgacctgctggacgaagcgctggaacgcgcccgtcgtctggtggccgagaagaatccggacatgccggccgacgagctggaaaaactggcgaacgccgtgggtatcggcgcggtgaaatacgcggacctgtccaagaaccgtaccaccgactacatcttcgactgggataacatgctggcgtttgaaggcaacaccgcgccatacatgcagtacgcttacacccgcgtgctgtcggtcttccgcaaagccaatatcgacgaaagcgtgctggcgaatgccaccgtgaccatcacggaagatcgtgaagcgcagctggcggcgcgtctgctgcagttcgaagagacgctgaccgtggtcgcgcgtgacggcacgccgcacgtgatgtgtgcttacctgtacgatctggcgggtctgttctccggcttctacgagcgctgcccaattctctctgcggagaatgaatcggtccgcaacagccgcctgaagctggcgcagctgacggcgaagaccctgaagctgggtctggatactctgggtatcgaaaccgtagaacgtatgtaa

SEQ ID NO: 164295 - DNA, 393 bp, Enterobacter cloacae
atgcgtaaatggctttggctgttgttcttcccgctggcggcgcaggctgccgggggaggcgcctggcaggcgagcagcataggggtgaccctcagcaaccgcggtgttgccatgtcatctaacccgctggcgcctgctgaagaggtttccggtctgatgggtctggtggtctggaactaccggctgattggcccaacgccagcgggcctgcgggtgcgcctctgctctcagacgcgctgcacggaaatcgacggtgaaaatggaacaacgcaggcgttcaacggcgtgccggctattgaacctttgcgtttcatctgggaagtgccgggcgggggacgtttgatcccggcgctgaaggtgcagagtaattctgtcatcgtgaactaccgctga

SEQ ID NO: 164296 - DNA, 2079 bp, Enterobacter cloacae
atggctaatctggtggcaatgttgcgcctgcccggcaacctgaaatcgacccaatggcagatcctggccgggccgattctgatcctgctaattctgtcgatgatggtactgccgctcccggcgttcatcctcgacctgcttttcactttcaatatcgcgctgtccattatggtgctgctggtggcgatgttcacccagcgtaccctggagttcgccgcgttcccgaccattctgctgtttaccaccctgctgcgactggcgctgaacgtggcgtccacccgtatcatcctgatggaaggccacaccggggcggcagcggcaggtaaagtggtggaagcgttcggccacttcctggtgggcggtaatttcgctatcggtatcgtggtgttcgtcatcctcgtgatcatcaactttatggtcatcaccaagggtgcagggcgtattgcggaagtgggcgcgcgctttgtgctggacgggatgccgggcaagcagatggcgatcgacgccgacctgaacgccgggctaatcgccgaagatgaagccaaaaagcgccgtgcggaagtgacgcaggaagcggacttctacggctccatggacggtgcgagtaagtttgtgcgcggtgacgccatcgcgggcattctgatcatggtgattaacgtggtcggcggcctgctggtgggcgtattgcagcacgggatggacatgggccacgcggcggaaagctatacgctgctgaccatcggtgacggtctggtcgcgcagatcccggcgctggtgatctccactgcggcgggtgtcatcgtgacccgcgtgagcaccgatcaggacgttggcgagcagatggtgggccagctgttcagtaacccgcgcgtgatgctgctggccgcggcggtgctcgggttgctcggtctggtgccgggtatgccaaacctcgtcttcctgctgtttacggcggcgctgctgggccttgcctggtggatgcgtggccgtgaaaccaaaccggcagcggaacctgttccggtcaaaatgccggagaataatcaggccgtcgaagcgacctggaacgacgttcagctggaggattctctgggaatggaagtcgggtatcgcctgatcccgatggtcgatttccagcaggacggcgagctgctcggccgtatccgcagtatccgtaaaaaattcgcccaggacatgggcttcctgccgccggtggtacacatccgcgacaatatggacctgccgcccgcgcgctatcgcatcctgatgaaaggcgttgaaattggcagcggtgatgcctatccgggccgctggctggcgattaaccccggcaccgccgcaggcacgctgccgggcgagcaaaccatcgatccggcctttggtctggccgcgatctggattgaaagcgcgctaaaagagcaggcgcagatccagggttacacggttgttgaagccagtaccgtggtggcaacccaccttaaccacctgattgggcaattctcggcggagctgtttggccgtcaggaagcgcagcagcttctggaccgcgtcacgcaggagatgccgaagctgacggaagatctggttccgggggtgctgaccttaaccacgctgcacaaggtgctgcaaaacctgctcgacgagaaggtgccgattcgcgatatgcgcaccattctggaaacccttgccgaacacgcgccgatacaaagcgatccgcacgagctgacggcggtggtgcgcgtggcgctgggccgggccattacccagcagtggttcccgggaaccggggaggtgcaggtgatcggcctcgatacgccgcttgagcgtctgctgctgcaggctctgcagggcggaggcggcctggagccgggcctggcggatcgcctgctggcgcaaacccaggaggcgctggcgcgtcaggagatgctcggcgcgccgccggtgctgctggtgaaccacgcgctgcgtccgctgctgtcccgcttcctgcgccgcagcctgagccagctggtcgtgctgtcgaatctcgagctgtcggataaccgtcatatccgcatgaccgcgacgattggaggaaaataa

SEQ ID NO: 164297 - DNA, 1149 bp, Enterobacter cloacae
gtggcagaagagaacgacgacaaaacggaagcccccacaccccaccgactagaaaaggcgcgtgaggaagggcagatcccccgatcccgagaattgacctccctgctgatccttatcgtaggcgtctgcattatctggtggggcggggagtcgctcgcccgcaagctggcgggcatgctctcaaccggcctccgttttgaccacagtatggtcaacgatccgaatctgatcctcagccagattattcagctgattaaaggggccatggttgcgctgctgcccctcattaccggggttgtgctggtcgcgctggtctcgccggtgatgctcggcggtctggtcttcagcgccaaatcgctgcagccgaaattttccaaactcaacccgctgccgggtattgcgaaaatgttctctgcccagaccggggccgagctgctcaaagccattctcaaatcggtgctgatgggcagctccgcggggttttacctctggtaccactggccggaaatgatgcgtcttatcagcgaatcgccgctcaccgcgatgagcaacgcgctgaatctggtcgggctctgcgcgctgctggtggtgctcagcattatcccgatggtgggttttgacgtgatcttccagctctatacccacttcaagaagctgcggatgtcgcgtcaggatatccgtgacgaatataagcagatggaaggtgacccgcacgtgaaggggcgcatccgccagatgcaacgtgccgccgcccgtcgccgcatgatggacgatgtgccaaaggccgacgtcatcgttaccaacccgacacactattccgttgcgctgcgctacgacgaaaacaaaatgagcgcgccgaaagtggtggcgaaaggggcgggactgatcgcgctgcgtatccgtgaaattggcaccgaacaccgcgtgccgatcctcgaagcccctccgctggcgcgtgccctgtaccgccatgcggatattggacaacagatcccgggacaactttacgccgccgtggcggaagtgctggcctgggtatggcagttgaagcgctggcgtctggccggcggtcaacggcctgtgaaacctgagaaccttccggtgcctgccgcgctggattttatgaacgagaaggacactgatggctaa

SEQ ID NO: 164298 - DNA, 645 bp, Enterobacter cloacae
atgatgcaacctgctatgaaacccgttgaagaacactcgccgagcgacattatcgtccgcatcggcagcctgacgcgcatgttgcgtgacagcctgcgtgagctgggtctggatcaggcaattgccgaagcggcggaagcgattcctgatgcacgcgatcgtctggactacgtcgtacagatgaccgctcaggccgcggaacgtgcgctgaacagcgttgaagcgtcacaaccgcaccaggatgcgatggaaaagggtgcgaaagcgctgaccaaacgctgggacgagtggtttgagaacccaatcgagctggcggatgcccgcgaactggtgaccgacacccgtcagttcctgggggatgtgcccggtcacaccagcttcaccaatgcccaactgctggacatcatgatggcgcaggatttccaggacctgaccggtcaggtgattaagcgcatgatggatgtgatccaggagattgagcgccagctgctgatggtgctgctggagaacatcccggaaccggcagcccgtccaaaacgcgagaacgaaagcctgctcaatggtccacagctcgacgccagcaaggcgggcgtggtggcaagccaggatcaggtggacgacctgctggacagcctcggcttttga

SEQ ID NO: 164299 - DNA, 390 bp, Enterobacter cloacae
atggcggataaagagcttaagtttttggttgtggatgacttttccaccatgcgtcgcattgtgcgcaacctgctgaaagagctgggcttcaataacgttgaagaagcagaagacggcgtggatgcgctgaacaagctgcaggcgggcgggtttggttttgtgatctccgactggaacatgccaaacatggacggtctggaactgctgaaaaccattcgtgctgatgcgggaatggcgtccatgccggtgctgatggtcacggcagaagcgaaaaaagagaacatcattgccgctgcacaggcgggcgcaagcggctacgtggtgaagccattcacggcggcgaccctggaagagaagctcggtaagatcttcgagaaactcggcatgtga

SEQ ID NO: 164300 - DNA, 1050 bp, Enterobacter cloacae
atgagtaaaatcagggtattgtccgtcgatgattcagcgctgatgcgtcagatcatgactgaaattatcaatagccacagcgacatggagatggtggcaaccgcccccgatccgctggtagcgcgggatttaattaaaaaatataaccccgacgtgctaacgctggatgtcgagatgccgcgcatggatggcatagatttcctcgaaaaattaatgcggctgcggcccatgccggtggtgatggtctcctccctgaccgggaaaggatcggaaatcaccctgcgcgcgctggagctgggagcggtggactttgtcaccaagccgcagctcggcattcgcgaggggatgctggcgtacagcgagatgatcgccgagaagatccgcaccgcgtcgcgggcgaagcttgccgcccacacgccgatggccgcgcctgcgacccttaaggccggtcccttactcagctcggaaaaactgctggtcattggggcgtcaaccggaggaacagaggcaattcgtcatgtactccagccattgccgctctcaagtccgggtattctgatcacgcagcatatgccgccaggctttacccgttcgttcgccgaacgcctgaacaagctgtgccagatcagcgtgaaagaggcggaagacggcgagcgcgtgctcccgggacatgcctatatcgcgccgggcgacaagcatatggaactggcgcgcagcggcgctaactatcaaatcaaaattcatgacggaccgccggtcaaccggcaccgtccgtcggtggatgtgctgtttcattcggtggcgaaacatgcggggcgcaacgccgtgggggtgatcctgacggggatgggcaacgacggggccgccggaatgcttgcaatgcaccaggctggcgcctggacgattgcgcagaatgaagcaagttgtgtggtgttcggcatgccgcgcgaggccatcaatatgggtggcgtgagcgaagtggtcgatcttagccaggtaagccagcagatgctggcgaaaatcagtgccggacaggcaatacgtatttga

SEQ ID NO: 164301 - DNA, 867 bp, Enterobacter cloacae
atgacatcaccaatgccccctgggcaaacgtcattattgttgcagatgacacagcgcctcgcgctgtccgacgcgcattttcgtcggatatgtcagttaatctaccagcgtgcggggatcgtgcttgcggatcataagcgggacatggtctacaaccgtctggtgcggcgcttgcgtacgctggggctggatgattttggccgctatctgagcatgctcgaggcgaaccagaacagcgcagagtggcaggcttttattaactcgttaaccaccaacctgacggcatttttccgggaggcccaccacttcccggtcctggccgagcatgcgcgccggcgcaccggggagtatcgcgtctggagtgcggccgcctcgacgggtgaagagccgtactcgctggcgatcacccttgccgatacgctggggatggcgccgggacgctggaaggtctacgccagcgatatcgataccgaagtgctggagaaggcgcgtaacggtgtttatcgccaggatgaactgaaaacgctgtcgccgcagcagctgcagcgttatttcatgcgcggcacgggcccgcatgaaggcctggtacgcgtacgccaggagctggcgaactgcgtcgaattcgcgcccgttaacctgctggataagcagtacaacgtgccggggccgttcgacgccattttttgccgtaacgtcatgatctattttgataaaacgacgcaacaggacattttgcgtcggtttgttccgttgctcaagcctgacggtttactgtttgccgggcactcggaaaacttcagcaacctcgtgcgtgagtttagcctgcgtgggcaaacggtatatgcgctgagtaaggaaaaagcatga

SEQ ID NO: 164302 - DNA, 1602 bp, Enterobacter cloacae
atgttaaatcgtattcgtatctcgaccacactgtttttgattctgatcctttgcggtgtgttgcaggttggcagtaacgggttgtctttttgggcgtttcgcgatggctatcagaatttgcaggacgttgaggcgagtaatcagcagcgctccgcactggcacaaacccgtgccgtgctgttgcaggcaagcactgcgctgaacaaggcgggaaccttaaccgcgctaagttatccgccggatgacataaaggcgctgatggccaccgcacgcgacagccttaaacaggctgacgcacagtttaaggcctttgcggcgcaggccaccggcagcgagaaagagaaagcgctgaaggccgccatgaagacccactttgaacagtggtacagcgatctggaccatcaggcgacgtggcttgagaacaaccagctgtcggactttatgaccgcgccggttcaggcctcacaggcggcgtttgacggcagctttgacgcatggcagcaggatatcaatcagtctgttctgcgcgccggtgaagcaagccgcaccagctatcacatgtcgggcgtcatcttcggcgtgatggtgattctggcgggcttgctgaccggcgccgcgctgctctggtcacgcaaaatgattgtgcagccgctggcgattatcagcagccacttcgacagcattgcgaaaggcgacctggcgcgtccggtggcggtgttcggcaagaacgaaatttcggcaatttttgccagcctgaaggcgatgcagggatcgctgagggaaacggtatccgacgtgcgtcagggcagttatgccatgcacaccgggatctcagagattgcggcgggtaacaacgatctctcatcccgcaccgagcagcaggcggcctcgctggcgcagacggcagccagcatggagcagctgaccgcgacggttagccagaacgctgataacgcgcgtcaggcatctgacctgtcaaaacaggcggcgatgacggcgaagaagggcggcgaccaggcgtcccatgtcgccagcaccatgcaggagatcgccaccagttcacagaaaattggtgacatcatcagcgtgattgacggtatcgcgttccagaccaacattctggcgctgaatgctgccgttgaagcggcgcgtgccggggagcaggggcgcggatttgcggtggtggcgggtgaggtgcgtaacctggcgagccgcagcgccaacgcggcgaaagaaattaaggtgctgattgaagaatcggtgtcacgggttcagcaaggctctaccctggtggatacggcggcacaaaccatgcacgaaatcgtcacctcggtgacgcgggtgaacgacatcatgggcgagattgcctcggcgtcggatgaacagcgtcgcgggattgagcaggttgctcaggcggtcacccagatggatcaggtgacgcaacagaacgcctcgttagttgaggaagcggcagcggcaaccgatcagctggccagccaggcggatcgtctgacccggctggtcgcggtatttaatgtgaaagagcacgttgaagcagtaacagaagtcgggcggtcgcaggccgtgccagttgtatcctga

SEQ ID NO: 164303 - DNA, 1668 bp, Enterobacter cloacae
atgttgaaccgtatccgcgttgtcacaatgcttatgatggtgctggtcattttcgcactacttcagcttatctccggcgggctttttttctcgtcattaaaacagaaccaggacagctttgcggcctcgaacgatctccgcctgcagcagagtgaactcacctcaacgtgggatctgatgctgcaaacgcgtatcaacctgagccgctcgtccgcgcgcatgatgatggatcccaacaatcagcagagcagcgcgaaaaccgatctgctgaaaaatgcccgggcgacacttgcggatgccgcaaagcattacgaggcctttaagaaaatcaccccgcagcctgcgatggagcaggtgagccagaatatcgacgaaaaatacaacgcctaccatgccggtctggcagagctgattcagttcctggagagcggcaacatggacgcctatttcgcgcagccgacgcaggggatgcaaaacgccctcggcgcggcgctgggggaatatgcaaaggtcagtggcgatctgtatcactccgcgtttgctgaaagccagaatgactaccgctttgcgaaatggcagatggcggtgctggcgctggcgctggtcattgtgctgatcgcggtctggtacggcattcgccatatcctgctgaaccctctcggtcgcgtcatcgcccatattcgtgacattgccggcggtgacctgaccaaaacgctgaccgtgtccgggcgcaatgagatcaccgagctggcaaacagcgttgaccatatgcagcgttcgcttatcgataccgtcgccaacgtgcgtagcggcacggatgccatctataccggcaccagcgaaattgcgatgggcaataacgacctctcatcgcgcactgaacagcaggcgtccgccctggaagagacggcggccagcatggagcagctcaccgcgaccgtgaagcagaacgccgataacgcccgccaggcgtctcagctggcggaaagcgcctccgagacggcgcagcgcggcggccgcgtggtggatggcgtggtgaaaaccatgcacgacatcgccgagagctcgaagaaaatcgccgacatcatcagcgtcatcgacggcattgccttccagaccaacattctggcgctgaacgccgccgtggaagcggcgcgcgcaggcgaacagggacgcggatttgccgtggtggccggggaagtgcgcaacctggccagccgcagcgccaacgcggcaaaagagatcaaatcgctgattgaagattccgtctcccgcgtcgataccggctccgtgctggtggaaagcgccggggagaccatgaatgacatcgtgaatgccgtcacccgcgtgacggacatcatgggtgaaatcgcctctgcgtctgatgagcagagtcgtggtatcgaccaggttgccctggcggtatcggaaatggatcgcgtgacacagcaaaacgccgccctggtgcaggagtccgctgcggcggccgctgccctggaagaccaggcgagccgtctgaagatggccgtctcggcgtttcgtctcgcttcactcgctggaaacacggtcaccccgcaggcgacgtaccgcgcgccagccgctgaaccggctgcaaaccgtacgcgtaccgcggcgaccggacaagatgaaaactgggaaacattttga

SEQ ID NO: 164304 - DNA, 963 bp, Enterobacter cloacae
atgaagcgtctgctgatgttgatgctgttgctgttctccggcggcggctgggcggcgtgtaccgtcagtacggttaatgcgtcgtttggcagcgtcacctcgttcgcgctcagcggaaccggggaggtggaaaccaccggcaggcttgttgtggcgtgtgataccgtgctcaacgttctgaccaacgattcggtgaccctgagctacaccgcggcgtcagtctcgggcaacagtcgcgcgaccatgaaacgtacggataatgccgccattacggacgtaatccccacccggctgtgcggattatcggcttgtgcgagcagcagcgaggtgcagataagtaaaacgtatacctggagcgggaataccttgctggggctgctggggacaaggcagtataacattccgctctattttcgcaccgtcgccggacaaaacgtcactgccggtccctaccaggtgcagttgaccttcagcatcagctacagcgtctgtgccttcggtgttggaagcctttgtacgaatgcccagacgggaacctcaacaaccaccatcctgttggatatgaccgtcaccaacgactgtagcgccatgaccacgccggacgtcaacttcaacagcgcgccgctggtacaaagtttccccaccgtctcacaggcgattgccgtcacctgtaccaaaggcagtacctataccatcggcattaacaacggtgctaacgcgctgaataacgtgcgccggatggtaagcggcagtaactacctcagttatgacatctataaagaagccacgggtaaccgctggggcggcagcggcagcgaacgctggaccagcgcgacgtcgtcgcaggtcagtgccgacggtttactgcgtacctacaactacaccgcgaaagtgctgactaatcaggccacgccacccgccggaacctacaccgatacgctgattgtcgacgtggctttctaa

SEQ ID NO: 164305 - DNA, 2385 bp, Enterobacter cloacae
atggcagtcgacgcccgtcaactgaagccggcgatgatgatactgctttgcgtcagttccgcgacctgggctgagcccggcgatgacagccttccgccgccgccccaggcacaggcgatacatgatgaagcggtcttccagcttgccctcgtgctcaaccactacgataccggtctggtcgtgcccgtgacgcagcgcaaaggcgctttctttatctccagcgctgacctgctgcgcgcgggactgcccccggaacatgttcctgccggagaggtgaatctctcatcgctttctcaggttcgggtggagtacgacagcgccggacagcgcctgctgctgaccgttccccgggactgggtcgcatcccgcgtgacgccgttcggcgcgcaaacggcgcaggccaaaccgcacttcgggcgcggcgcgctgctcaattacgatctctacaccaaccacacggagcatatcggcggacaggcgtccctctggcatgaattccgctatttcaatgagaacggctcgttttcctccaccggctatgcccgggaaaatttcaccggtaacgacggtcagcaggaagggtatgtccgctatgacacgaccctgctgttcactaacgaggatgacgcaatgagctggaacgtcggggacgtgatcagcgatgccctgagctggagctccagcgtgcggatgggagggatcagcgtcgggcgagatttctccctgcgccctgacctggtgacgtggccgctgcccgaattcgcgggggaagcggcggtacccacctcggtggatctctttatcaacggctatcggtccggctcaacccagcttcagccgggccccttcaccctgaccaatctgccctatatcaacggcgccggggatgcggtactggtcacgacggatgcattagggcgccaggtcagcaccacgctaccgttttatgtctccagcgacctgcttaaaaaagggctaagcgacggcgccgtgacgctgggcagcctgcggcgtaattacggtatcaagaattttgactacggcccggcggcaggcagcggttcgtatcgctacggggtgacggactggctgaccctggaagggcatgcggaaggggcgcaggcgctggcactgggcggggccgggacggtgattaaactcggccagtttggcgtggtgaatacctcttactcgcaaagccgcatgcgcggggaggcgggcgggcaaatcaactggggttaccagtacagcaccagcgagttcagcgtggccacccagcacacgcgtcgggaccgcggctttggcaatctggccctgtacgaccagcctacggtgtatgacgagaacgataaacccatcgccagcttcagccgcaatacggaccagtattctctgaccttcaacctgggacagtacggcaacatcggcgcagcctggattggcgtggagagttttgacagtcaaaaaaccgagctgcttaatctctcatggagccgtaatttgtggggcgcgagcagtatttacctcgccgggagccgggaccagcagcggggagactggacggtcgcgctgtcgctacaggtgccgctgggggcacgcgacagcgccgcgttcaccgtcgaaaacaccccggatgcgggcaatacccagcgcattaactacaaccattccatgccgtctgacggcggctttagctggaacatggcctgggccaaccagtcaaaatccagtgactatcagcagggcacgctgggctggcgtaataacaatattgagctgcagggcggcggctacggcgaaagggacatgatgacctggtggggcgaggcgatgggcgcgattgttctgatggacggcgagctgttcgcggcgaataagatcaacgatgcgtttgtggtcatcagtaccgacggtcatccggacgtgcccgtcagctatgagaaccagcccgttggcaaaacgaataacaacggttacctgctggtcagcggggtgtcggcgtattacccggcaagctaccgcattgataccctgaacctgccggcggacacccggctgaaagagaccgagcggcgaattgcgattcggcgtcacagcggctatctggtcgatttcccgatggagcaggagagggtggcaagcgtcatcctccacgatgcgcgcggccaggcgctgccggtgggaagccaggtccggcgtgcctcgcgcagcaatgcggtggtggggtatgacggtattgcctggctggaaaaccttagcgatgtgaatccgctggaggtgatcgcgcctgacggaaaacgctgcaaggtcaccctgaccgtgggagccaacccggagcacaagctgcaaacctacggtccgctggtgtgtcgggaggcgccatga

SEQ ID NO: 164306 - DNA, 759 bp, Enterobacter cloacae
atgaagccagttttcagacctgtttgtctggcgggcgcgttgggaatggctgtggcaaccggtcaggcgcaggcggcagccaccattctgctctggcctatcgacccgtggcttgcggcagacgccaacgccacggagctgtggatccagaaccagggaaacagcgccaccacgatgcaggtgcgtattgtgcgctggaagcaggaggacggacacgaacgctacaccgcgcagcaggatgtggtcgccagcccgcccatcgtcacgattggcacaggcagcaagcagcttatccgtcttattaagcaggcccccgttcccgcaggcgtcgaacaggcctaccgcattatcgtggatgaaattcctcagcctgatgccaaagcagaacccgccatcggcctcaagttgcagatgcgttactccattccgctgtttgtgtatggccaggggatcccgacaataaaagagggggcgcatcacgcgctggtggagacccggaacctgagctggcgggtgacgcgagcggatgggcagccggtactggaggttcggaatcggggggatgtccatgtcaggctgagccaggtggcgctggagcagggagggcagaaacgcacggtcgcggagggattgctgggttacgtacttcccggcagcacccgcagctggccgatacccgcaggcgttcgtcagccagagcggatgagcgcgcagattaatgccagggacgcacaatggcagtcgacgcccgtcaactga

SEQ ID NO: 164307 - DNA, 504 bp, Enterobacter cloacae
gtgcagccttttttcgcgctgatcgtcggattgctgatggcgcccgcggcggaggcggtgacgtcacagtcctttaaggtcagcgcgacgattgttccgggatgcgcggtggccaccggcagcggaggggttctcgggacgctggattttggcacccataacggcgtcgagagcgcaccggtaagcaccagctttgtgccaaacggggcgttgtctatcgcctgcacgccgggcgtggcgctgagcatgagcattaatggcggacagaattattcaaccgttcgccgcatgaagcgctcgaacggcgccgacgtcgtgggataccggctttacagcagcagctcgctggccgcgaacagcgaaattggcgtcaaccaggcgataccggtgacctatagcaacagcaataacatcgcgctgccgctttttggcgtggcgctactgaccggatttagcccggcaggaacgtattccgatcagctcaccgtgaccttgtcatggtaa

SEQ ID NO: 164308 - DNA, 573 bp, Enterobacter cloacae
atgaaaagaaaactccttttgatctgcgcaggcaccttactgactgcgacaacggtccatcaggcgctggccgtcaccagtagcggcaccatcggcgcgacgctgacgctcacgaacggttgtctgataaacggatcgcccacgcaaaacggcattaacttcgggacactggatttcggcacccatcccgcaacgttttccactctgaccacgcagctcaccggcgccagcggcggaaacaccttcactattcagtgtacgaccgccagctatacggtggcgatcaccggcaacaccaactccaccgcacccggcaccgttgtcggcaccccgggaacccctgcgcgctatctggttaacaccgccaacgcggcacagggtgtggcatacagcctgtacagcgacagcgggtttaacagcgtgattgccaataacaccgcgctgccgatcgcctctacggccggaggggtggacagttacaccctctacgggcgtattaccggcggcggtaacagcgtgacggtcgtcccgggcacctacaccgacacgattaacgtcagcgtcacctattag

SEQ ID NO: 164309 - DNA, 1266 bp, Enterobacter cloacae
gtggcaagtgcaaacaaactcacactcttcatcgtgatattcatgctggcgggtattctttcaggggcagcaattcatgaatatgcatctgcggatgccatcaaagcctggtcggataatattacccttctgaccgatattttcctgcgactgatcaaaatggtcattgcaccgctggtcttcagtacgctcaccgtcggcattatgaagctgggcgaaacttccaccattggccgcgtgggcggcaaagcgatggtatggtttatcagctcatccgtgctctcaattctggtcggcctgtttatcgtcacgctggagcatccgggcagcgggctgaacctgaccgtcccgaccgaagcggtggataccggattagccgttggggggatgacgctgaaagcgttcctgtctcacaccattccgaccagcatcgcgggggcgatgtcgaacaatgagatcctgcagattgtggtgttctcaatgttctttggcattggtggcgcgtcgctggggcagaaattcaatgccccgctggtggccgcgctggacgtggtttctcatattatgctgaaggtcacaggctacgtaatgtacgttgcgccgctggccattttcgcggcaatctcctccgtcatcgccacgcagggcctgggcattctgttgaactatgcctcctttattggcggctactatgttgccattcttctcacctgcatggtgctgctggccgtgggttacatggtgctgaaaaaagaggtgttccgcctggtcagcatgctgaaagatccggttctggtggcgtttaccaccagcagttctgaagcggcctaccctaaaacgctggagcagctggagcgttttggctgctcgcgcaacatcgcctctttcgtactgccgattggctactccttcaacctggtggggtcgatggtgtactgctctttcgcctcgatgtttatcgcgcaggcgtacaacattcatctgagcttctctgaggtgacggtgctgatgctgaccctgatgctggcctcaaaagggattgcgggcgtaccgcgctcctcgctggtggtgctggccgcgacgatcccaagctttaatattccggtggccggtattctgctgctgatggggatcgaccacttcctggatatgggccgttccgcaattaacgttctgggtaatggtattgcgaccgccatgctgtcgcagaatgaaggcgctcgtgacgcggaagctgaagctgaactggtaaagcaggaagcgtaa

SEQ ID NO: 164310 - DNA, 504 bp, Enterobacter cloacae
atgaccggtatgagtaatgtaacgaaactggcgggcgagccatcaggacaggaatttctggtattcactttaggcgatgaagagtacggcatcgatatcctgaaagtgcaggaaatccgtggttacgaccaggttacccgcatcgctaacacgcctgcgtttattaaaggtgtcaccaacctgcgtggcgtcattgtgcccatcgtggatctgcgcgtgaagttcagccagggcgacgttgactacaacgacaacaccgtggtgatcgtcctgaacctggggcagcgcgtggtggggatcgtggtggatggcgtgtctgacgtgctttccctgacctctgatcagattcgtcctgcgccagagtttgcggtcacgctgtcgaccgaatacctgaccggtctgggcgcgctcggcgagcgtatgctgattctggtgaacattgagaagctgctgaacagcgatgagatggcgctgctggatatcgccgcgagtcacgtagcctaa

SEQ ID NO: 164311 - DNA, 2043 bp, Enterobacter cloacae
gtgagcatggatattagcgatttttaccagacattctttgatgaagccgacgaattgttggccgatatggagcaacacttgctcgatttggtgcccgaagcaccggattccgagcagctcaatgccatcttccgtgcggcgcattccattaaaggcggagccggaacgtttggatttaccatcctgcaggaaacgacccatttaatggaaaacctgcttgatgaagcacgacgcggtgagatgcagctcaataccgacattatcaacctgtttttggaaaccaaagatattatgcaggaacagctcgacgcctataaaagttcggcagagcctgacgccgccagctttgaatacatctgcaatgcgctgcgccagctcgcgctggaagccaaaggtgaggttgccgcagccgtggttcctgccgcaaaactgagcgttgtggatacggttgccgcgcaggcgtctgcctctgccgacgcaccggcgggcaaactgcgcgtggtgctgtctcgcctgaaagagaatgaagttaacctgctggaagaagagctgggtaacctggcgaaattaagcaacgtggtaaaaggcaaagacagcctggccgcgacgcttgatgacggtattggccaggacgatatcgtggcggtgctgtgctttgtgattgaagccgatcaaatcgccttcgaaaccgaaaccgaaacggtcgcggttgatgcccctgcggctgtggaagaggcggctgttgtcgctcaggctgccgcaccggctgtggcgcctgcggctccggcgctcaaggcggtgccaaaagaggctgctgcaccgggccgtggtgaaaaacctgccgcgcgctccagcgagtcgaccagcatccgcgttgccgttgagaaggttgatcagctgattaacctggtgggcgaactggtgatcacccagtcgatgctggcgcaacgttcaaacgaactcgacccggtcacccacggggatttgattaccagcatgggccagctgcagcgtaacgcccgcgatctgcaggaatcggtcatgtccatccgtatgatgccgatggaatatgtcttcagccgcttcccgcgtctggttcgcgatctcgccagcaagctgaacaagcagattgaactgaccctgatgggcagctcaaccgaactggataaaagcctgatcgagcgcatcattgacccgttaacgcacctggtgcgtaacagcctcgaccacggtattgaactgccggaaaaccgcattgccgcagggaaatccccggtcgggaatctgatcctgtctgcggaacatcagggcggaaacatctgcattgaagtgaccgatgacggcgcaggtctgaaccgcgagcgcatcctggcaaaagcgatttcgcagggaatggcggtcaatgaaaacatgaccgacgaagaagtgggcatgctgatcttcgcaccgggcttctctaccgcagagcaggtgaccgacgtctccgggcgcggcgtgggcatggacgtggtgaaacgtaacatccaggagatgggcggccacgttgagatccagtccaaacagggttccggcacgaccattcgcatcctgctgccgctgacgctggcgatcctcgacggcatgtccgtcaaagtggcggacgaagtctttatcctcccgctgaacgccgtgatggaatccctccagccgcgtgaggaagatctgcatccgctggcgggcggcgagcgcgtactcgaggttcgcggtgagtacctgccgctggtggaactgtggaaagtgttcgaagtggacggggcgaagaccgaggccacgcagggtatcgtggtgatcctgcaaagcgcgggccgccgctatgcgctgctggtcgatcagctgatcggtcagcaccaggtggtggtgaagaacctcgaaagcaactaccgcaaagtgccgggtatttctgccgccaccattctgggtgatggtagcgtggcgctgatcgtcgacgtgtcggcgcttcagggattaaatcgtgaacaacgtgtggcgtacacagccgcctga

SEQ ID NO: 164312 - DNA, 930 bp, Enterobacter cloacae
atgaaaaaccagtcccatccgatcgtcatcgtaaaaaaacgcaagcacaagggcggtgggcatggcgcgcacggctcgtggaaaatcgcgtacgccgattttatgaccgcaatgatggcgttctttctggtgatgtggctgatctccatctccagcccaaaagagctgatccagattgccgaatatttccgcacgccgctggcaacggcggtggccggcgggccgcgtatctctaacagcgaaagcccgatcccgggcggcggcgatgattacacccagcagaagggtgaggtgaaaaaagagccgaacatcgacgagctgaaacgaaagatggaacaggcgcgcctgaaaaaactgcgtggcgatctcgatcagctgattgaagcggatccgaagctgcgcgcgctgcgaccgcatctgaagattgacctggtgcaggaagggctgcgtatccagattatcgacagccagaaccgcccgatgtttaaaaccgggagtgcggaagtcgaaccgtacatgcgcgatattctgcgtgccattgcaccggtgctgaacggcattcctaaccgaatcagcctgtcaggccacacggatgatttcccgtacgccagtggggagaagggatacagcaactgggaactttctgccgaccgtgccaacgcctcgcgccgcgagctggtggcaggtgggcttgatgatggcaaggtactgcgcgtagtcggcatggccgcaaccatgcgcgtttccgaccgcgggccggatgatgccatcaaccgtcgtatcagtcttttagtgctgaaccagcaggcggagcaggccatcctgcatgaaaacgccgaaagtcagaatgagtcactggacgatttaaaacagcctggggccgttccttcggctgccgttccaacatcgccaccagccaatccgaggtga

SEQ ID NO: 164313 - DNA, 888 bp, Enterobacter cloacae
gtgcttatcttattaggttacctggtagttctcggtacagttttcggcggttacatgatgaccggcgggcaccttggagcactctatcaaccggctgaacttattatcatcggcggcgcaggggtaggggcttttatcgttggcaacaacggtaaatcgatcaagggcacgctgaaagcaattccgttgctgttccgtcgctcaaaatacaccaaaagcatgtatatggatctgctggcactgctctatcgcctgatggcgaagtcgcgtcagcagggcatgttctcgcttgagcgggatattgaaaacccgaaagagagcgaaatttttgccagctatccgcgcattctcgctgatgccatgatgctggatttcatcgtcgactatctgcgactgatcatcagcggcaacatgaataccttcgaaatcgaagcgctgatggatgaagagattgaaacccatgaaagtgaatcggaagtgccggccaacagcctggcgctggtcggcgactcgcttccggcattcggtatcgttgctgcggtcatgggggtggtgcacgccctggcctcagcggaccgtccggcagccgagctcggcgcgctgattgcccatgcgatggtgggtaccttcctcggtattttgctggcgtacggctttatctctccgctggccagcgtgctgcgccagaagagcgcggaaaccaccaaaatgatgcagtgcgtgaagatcacgctgctctctaacctcaacggttatgcgccaccgatcgcggttgagtttggccgtaaaacgctttactccagcgagcgaccgtcgtttatcgagcttgaagaacacgtgcgtgcggtgaaaaacccaaaccaacagacgacaactgaggacgcatga

SEQ ID NO: 164314 - DNA, 579 bp, Enterobacter cloacae
atgagcgagaagagcattgttcaggaagcgcgtgacatacagttggccatggagctgattacgctgggtgctcgtttacaaatgctggaaagcgagacgcagttgagccgtggtcgtctcatcaaactgtacaaagagttacgtggtagtcccccgccgaaaggcatgctgccgttttctaccgactggtttatgacgtgggagcagaatattcacgcttccatgttctgtaatgcctggcagtatcttctcaaaaccggtttgtgtagcggcgttgacgccgtgatcaaagcctacaaactttaccttgaacaatgcccacagcaggaagaaggtcctctgctggcgctgacccgcgcatggacgctggtgcgttttgttgagagcggaatgcttgagctgtcgcgctgcaactgctgcaacggcaatttcattacccatgctcaccaacctgcaggcagcttcgcctgtagtttatgtcagcctccttcccgtgcagtaaaaagacgtaaactttcccgggatgctgccgatattattccacaactgctggatgaacagatcgaacaagctgtttaa

SEQ ID NO: 164315 - DNA, 351 bp, Enterobacter cloacae
atgcatacatccgagttgctaaaacatatctatgacatcaatttgtcgtatttactgctcgcgcagcgtttgattagtcaggacaaggcgtccgcgatgtttcgtctgggtattaacgaagagatggcaaccatgctgggcggtttaaccctcccgcagatggttaaactggctgaaacgaatcaactggtttgccagttccgtttcgatgactctcagactataacgcgtctgacgcaggagtcccgtgtagacgatcttcaacagatccataccggtattcttctctctactcgcttgcttaacgaaatcagccagcctgatgacgtagcccgtaagaaaagggcctag

SEQ ID NO: 164316 - DNA, 429 bp, Enterobacter cloacae
atgagttactcccatctacttgtttctgttgccgtttccccagaaagccatcaactcgtcgcccgggcagtttccattgccagacctcacaatgcccgcatcagcctcatcacgcttgcggccgaacccgagatgtataatcagctggctgcccccatgctggaggatattcgtgaggtacttcaggaggaaacgcagcaatttctgcgcgagctggtcgaaaagtcacactatcctgtctatgaaaccgtaattgcgacaggagaacttaatgcccatattctcgacatgtgccgtaaacagaatattgatttagtgatatgcgggaatcataaccacagctttttatcgcgcgcggcctgcgcggcgaaatccattgtcgcatcaagtcaggttgacgtgttattagtgccgcttggggggcgttaa

SEQ ID NO: 164317 - DNA, 1425 bp, Enterobacter cloacae
atgggtcgcttagtcgtcgtctctaaccgaatcgcaccgcctgatgataaaaaagccagtgcgggtggcctggcggtaggggtgttaggtgccttgaaagccgctggcgggctttggtttggctggagcggagaaatcagtgaagaagagaaaccgctcaaaaaagtgacgcgcgggaatatcacgtgggcgtcgtttgcactgaaagagaaagactacgacgagtattactcgcagttctcgaatgccgtcctgtggccggcgtttcactatcgccttgacctggtcaaattccagcgtgaatccttcgaaggctacgcgcgcgtgaatgcgctgctggcggataaactgctgcctttaatagaagaagacgatattttatggatccacgattatcacctgctgccgttcgccagagagctgcgaaagaggggagtgaataaccggattggcttcttcctgcacatcccgttcccgacgccggaaatttttaccgcgctgccgccgcatgaagagctgctggaagcgctgtgtgactacgatttgctgggcttccagacggaaaatgaccgcctggcattccttgactccgtgtcagggaaagcgcgtctggtgaccaaaggcgggaaaacccatacggcgtggggaaaaacgttccacaccgaagtgtatccaatagggattgaacctgacgaaatcgcggagcaggcctccggcccgctgccgccgaagctggcgcagcttaagaatgaactcaagcacgtgaaaaatatcttctcggtcgagcgtcttgattattctaaagggctgccggaacgcttcctggcgtatgaaacgctgctggataaatatccggagcatcacggtaaaattcgctatacccagatagcgccgacgtcgcgcggtgaggttcaggcctatcaggatattcgccatcagctggagacagaagccgggcgcattaatggccgctacgggcagctgggctggacgccgctgttttatctgaatcagcacttcgaccgcaagatcctgatgaaggtcttccgctatgcggacgttggcctggtgacgccgctgcgcgacgggatgaacctggtcgcgaaagagtatgtggcagcgcaggaccccgccgatccgggtgtcctggtgctatcccagtttgccggggccgcaaatgagcttacctcggcgctgattgtgaacccttacgatcgcgatgacgtggcgaatgccctgaaccgcgcgctgaccatgccgctcacggaacgtatttcccgccatgctgaaatgatggagacgatccggaagaacgatattaaccactggcaggcgcgttttattcaggatctccgcgatatcgccccacaaagccatgaaggcgatttacaaaaaaagatcgcaactttccctaaacttgcctga

SEQ ID NO: 164318 - DNA, 804 bp, Enterobacter cloacae
gtggctgacttgttaaccgcaccgcctgtactgcccggacattatgctttcttttttgatctcgacggcacgctcgccgggataaaaccgcaccccgatcaggtgtctattccggaggcggtgttacaggatttgcatcagctctcgctcatgaatgagggagcactggcattgatatcagggcgctcaatggccgagctggatctgctcgccagtccataccactttccgctggccggtgtacacggagcggagcgccgcgacatccatgatcaaacgcatatcgtttcactccccgacgcactcacgcaaacgctccagaagcggctctctgctgcgctggccgacctgcctggcaccgagctggaagccaaaggcatggcctttgccctgcattatcgccaggcaccgcagcacgaagatgccgtgctcgcgcttgctcatacggttgcggatgcgcatccacagctggcgctgcagccgggcaaatgcgtggtggaattaaagccgaaggggattaataaaggcgcagccatcaccgcatttatggcggaggcaccttttaagggccggacgcctgttttcttaggggatgacctgaccgacgaggccgggttccgtgtggttaatcaggccggagggatcgccgttaaggtagggcctggtgacactgtcgccgaatggcggctggcggatgtcgccagcgtctggcagtgggtatctgatatcgctaaccagcaacaacaacaaatagcgcaaaacaaagggggaaaccattatgggtcgcttagtcgtcgtctctaa

SEQ ID NO: 164319 - DNA, 987 bp, Enterobacter cloacae
atgtcctctgttactacatccggagtgccgaagtcgaagtcggcgttgagcgttgggcgtatctgggatcagtacggcatgctggtggtgtttgccgcactgttcgtcgcctgcgcgatctttgtccccaactttgccaccttcattaatatgaaggggctgggtctcgccatctccatgtccgggatggtggcctgcgggatgctgttctgtctggcctccggcgattttgacctgtcggtggcgtcggtgattgcctgtgcaggcgttacgacggccgtggtgatcaacatgacggagagcctgtggattggcgtttttgccggtctgttactcggcgtcatcagcggcctggtgaacggttttgttatcgcgcgcctgaagattaacgccctgatcacgacgcttgcgacaatgcaaattgtccgcgggctggcctatatcatctccgacggtaaagcggtggggattgaagacgagcgtttctttacgctgggttacgccaactggctgggtctgcctgcgcctatctggctgaccgtggcctgcctgatcctgttcggcttcctgcttaaccggaccacctttggccgtaatacgctggcgattggcggtaacgaagaggccgcccgtctggccggggtaccggtggtgcgcaccaagattattatctttgtgctctcggggctggtttctgccgcggcggggattattctggcgtcgcgtatgaccagcggccagccaatgacctctatcggttatgagctgatcgttatttcggcctgcgtgttagggggcgtttccctcaagggaggcatcggaaaaatctcatatgtggtggccggtatcctgattttgggcacggtagagaacgccatgaacctgctgaatatttcgccgttctcgcagtacgtggtgcgtggtctgatcctgctggcagcggtgatattcgaccgttacaagcaaaaagcgaagcgtaccgtgtaa

SEQ ID NO: 164320 - DNA, 1515 bp, Enterobacter cloacae
atgcgacagtctgatccgtatctctcttttcgcggcatcgggaaaaccttccccggtgtgaacgcgctgaccgatatcagctttgactgctatgccggccaggttcacgccctgatgggggaaaacggtgcgggaaaatccacgctgttgaaaatcctcagcggcaactactcgccaacaaccggcacgctggcgatccgcggcgaagaggtctcttttgccgataccacggcggcgctcaatgccggggtggccattatctatcaggagctgcacctcatccctgagatgaccgtggcggaaaacatctatttaggacagctcccgcacaaaggcggcgtggtgaatcgttcgctacttaattatgaagcggggctgcagctaaaacacctggggctggacgtcgatccccagacgccgctgaaatatctctccatcggccagtggcagatggttgaaattgccaaggcgctggcgcgtaacgccagaataattgccttcgatgaacccaccagttcgctctctaagcgtgaaatcgaaaatctgttccgcgtgatccgcgaattgcgtcaggaaggccggacgattttgtacgtttcgcaccgcatggaagagatatttgctctcagcgatgccatcaccgtgtttaaagatggacgctatgtgcgcacctttaccgacatggcgcaggtgaaccatgaccagcttgttcaggcgatggtcggacgcgatctgggtgatatctatcactggcagcctcgccagtacggccctgagcgtctgcgcctcgatagcgtaaaagcgccgggcgtcagaacgccgatttcgttatccgtacgcagcggtgaaatcgtcggcctgtttggtctggtaggcgcggggcgtagcgaattgatgaaagggctgttcggcggtacccgtattaccgatgggcaggtctccattgacggcgagcgggtagacattcagaaaccggctcacgcgatcggggcagggatgatgctctgtccggaagaccggaaagcagagggcattattccggtgcactcggtacgcgacaacatcaatatttccgcccgccgtaagtttattcgcgcaggttgcctgataaacgatagctgggagtcgagtaatgccgaccaccatattcgttcactgaatatcaaaacgccgggtccggaacagctgatcatgaatctgtcaggcggaaaccagcagaaggccattctgggccgctggctgtcggaggacatgaaggtcatcttactggatgagccgacgcgcggtatcgacgtgggggcaaaacacgagatttataacgtgatctatgagctggcaaaacgcggcgtggcggtgctcttcgcctccagcgatctgccggaggtgctgggcgtggccgaccgcattgtggtgatgcgtgaaggcgaaattgccggcgaattacttcatgaacaggcgaatgaacaacaggcgttgaacctcgccatgcctaaagttagccaggccgtcgcctga

SEQ ID NO: 164321 - DNA, 990 bp, Enterobacter cloacae
atgcacaaatttactaaagcgctggcggccatcggtctggctgccgttatgtcacaatccgctattgctgagaatttaaaactcggttttttggtaaaacagcccgaagagccctggttccagacggagtggaaattcgccgataaggccgggaaagatttaggttttgaagtgattaaaatcgccgtgcctgacggtgagaaaaccctgaacgccatcgacagcctggcggccagcggtgcgaaaggtttcgttatctgtacgccggatccaaagttgggctcggccatcgcggcaaaagcccgcggttacgacatgaaggtcattgccgttgacgatcagttcgtgaacgccaaaggcaagccgatggacagcgtcccgctggtcatgatggccgcgacaaaaatcggcgaacgtcagggccaggaactctataaagagatgcaaaaacgcggctgggacgtcaaagagaccgcagtgatggctattacagcggatgagctggacacggcgcgtcgtcgtacaaccgggtcaatggacgcgctgaaggcggccggtttcccggaaaaacaaatctacaaagtccccaccaaatctaacgatatcccgggcgctttcgacgccgccaactccatgctggttcagcatccggaggtcaaacactggctggtggtcggcatgaacgataacaccgtgctgggcggcgtgcgcgcgacggaaggtcagggcttcaaggcacctgacgtgatcgggattggcatcaacggcgttgacgccgtcagcgagctgtccaaagcgcaggccaccggcttctacggctcactgctgccaagcccggacgttcacggctataaatccagcgagatgctctacaactgggtcaccaaaggggctgaaccgccgaaatttaccgaagtgaccgacgtggtgctcatcacccgcgacaacttcaaagaggagctggcgaaaaaaggactgggcgggaagtaa

SEQ ID NO: 164322 - DNA, 504 bp, Enterobacter cloacae
atggctacccaaacgatgatgcaaaaacttaacgcgcagatgaaccttgagttctacgcctccaacctgcaccttcacttaagtgcctggtgcgctgagaatagcctcacgggctctgccaccttctttcgctctcaggcacaaagtaacgtcacccatatgatgcgcgtttttaacttcctgaaagctgcaggggcaaaccctgtcgttaaagcccttgatgggataaacgagagctactcttgtctggaagaactgtttcagaaaacgcttgaagagtatgaacaacgctgcagcaccctcaacaaactggccgatgaagccaaagcgcagcaggacattacgacgctgagattcttacgcgatatggataaagagcagcagcaggatggcctgctgctgaagacgctggcggatgagctgcataacgcgcagcaggcaggtttatgtcctgagcaaaccgaccgtcacctgctcgacattgtggcggtgcagcaccactga

SEQ ID NO: 164323 - DNA, 1344 bp, Enterobacter cloacae
atgatcaccattgagtttgttgtcattctcctctgcctgctgacgggtacgcgtttcggcggtatggggcttgggttaatcagcggtattggtctttttattttatgtttcgtctttggtctgcagccgggtaaacccccggttgacgtcatgttgaccatcctcgcggtgattggctgtgccgctaccctgcaaacggcgggcggtctcaacgtcatgatgcagtttgcggaacgtctgctacgcaaacacccgcagcacatcaccctgctcgccccgtttaccacctggatgctgacctttctgtgcggcaccggccatgtggtctacaccatgttcccgattattgcggatatcgccctgaaaaaagggatccgcccggagcgccctatggccgtggcgtcggtcgcgtcgcagatggcgatcacggcctcccccgtttccgttgccgtcgtgtcgctggtgtccatcctggcagcccagcatgggatcggccacgcgtggggaattctggaaattctcgccgtgtcggttcccgcttcacttttcggcgtggctattgctgcactgtggagtttacgccgcgggaaagatttggcggacgacatggagtttcaggaaaagctaaaagatcctaagcagcgcgagtttatctacggcggaacagagacgttaatgaatcagcgtttcccaaaacaggcctactggtccacgtggattttctttgccggcattgccgtggtcgttctgctgggggccttccctgagctgcgccccgcctttgaactgaaaggcaaaatgacggcgctgtcgatgaaccttgtcatccagatgatgatgctaattgcgggtgccgtgatgctgatggcctgtaaggtcaatgcctccgcgatttccaacggcgcggtgttcaaggccggtatggttgcgatcttctcggtattcggcgtggcgtggatgagcgatacctttttccaggcgcatctcgacgagttaaagctggccctggaaggcgtggtgaaaagccacccgtggacatatgcgattgtgctgtttctggtgtcaaaactggtgaacagccaggcggcggcgctgacggcggttgcgccgatggggttgatgttgggcatcgacccgaaaatgctgatcgcctttttcccggcgtcttacggctattttgtcctgccgacctatcccagcgatttggcctgcatcggctttgaccggtcaggcacgacccgcatcggtaaatttatcatcaaccacagctttattttgccagggctgattggggtaagctgcgcgtgtgccgcgagctacctgctggtccagacgttcttctga

SEQ ID NO: 164324 - DNA, 252 bp, Enterobacter cloacae
atgtcacaaaacctgagcgccgatcaggaactggtctctgacgttgtcgcctgccagctggttatcaaacaaatcctggatgttctggacgtgattgcgccggttgaagtgcgcgagaagatgtctacccagctgaaaaacatcgattttgccagccatcctgctgccgctgacccggtaacgcttcgtgcgatccagaaggccatcgcgctgatcgagctgcgattcacgccgcagggtgagtcccactga

SEQ ID NO: 164325 - DNA, 339 bp, Enterobacter cloacae
atgaaaagagtcattgtagccggcacactcctcctgctcgcggggtgcagcattaaccgccaggctgaagtcagcagcctcgatgcgccgaacggcatcgtccgccttaactacggtcaggcagcgctgcaaaatgcgtattccgatgagtatgtgaataacggtacggcggcaaaagcgtgtcagagcatggggtatgccacggcctcagcctatggtcagcccattaaaacctgcaccctcattagcggctcgttgtgtctgaacgagagcgtgactatccagtataaatgtatgggttatgccgtgaaccctaagtcaaacaatccgtggtattaa

SEQ ID NO: 164326 - DNA, 498 bp, Enterobacter cloacae
atgctgaaaactgaaatgatcgacaagctcaacgcacaaatgaatcttgagctgtattcatcccttctctaccagcagatgagcgcctggtgcagttatcacagcttcgaaggcgctgccgcgtttctgcgtcgtcacgcgcaggaagagatgacgcacatgcagcgtctgtttgattatctgacggataccggcagcctgccgcgcattgaaaccgtggcatctccatttgctgaatataattctctcgatgaactgttccgcgccacctacgagcacgagcagctgatcacccagaaaattaacgaactggttcatgccgcgatgaccagccaggattatccaaccttcaatttcctgcagtggtatgtcgccgaacagcatgaagaagagaagctgtttaaatccgtgctggataaattatctctggtggggaaatcaggcgaaggtctttactttattgataaagaactttccacgctggatacgcagaattaa

SEQ ID NO: 164327 - DNA, 342 bp, Enterobacter cloacae
atggcgggggagaatccttttaccgcggcatggagccgtggaggcaacctgttgtgccatggccactggataatccactggcagaaccagcccctgatacttccggagtcccgccgcgaaaaagatatgggcacctggggaatctattcggttattgatcctgaggatgagacctttgcacaaggcttacaggaagatgagtggatcatagcgaatgtcgactggttgacggatatgttctacgagaggggtattgcgctggagacggccagctaccgctatttttaccaggccgtgaatccccacgactggcgctgcaccagctgcgctgggtgtatgtaa

SEQ ID NO: 164328 - DNA, 1143 bp, Enterobacter cloacae
atgcctctggcagccgcgggcgtgggatttggcatgaccctgctgctgctggggacgctctgggcgctgatgtgctacaccgccctgctgttgcttgaggtttaccagcatgtgcccgccgataccggtctgggttccctcgcggcgcgctacatgggacgctacggccagtggataaccggcttcagcatgatgttcctgatgtacgccctgaccgccgcctacatcagcggggccggggagttgatcgcttccagcgttaacgactggtttgggtctgacattaccccggcgacgggcgccatcttctttgcgctcatcggcggcggcgtggtctgtgtgggaacatcgctggtcgatctgtttaaccgtttcctgttcagcgccaaaattctgttcctgattgtcatgctggtcctgctggcaccgcatgttcatcaggtcaatctgctgacgctgccgctggaaaaagggctggcgctctccgcgatcccggtcattttcacctcgtttggcttccacggcagcgtgccgagcatcgtcagctatatgaacggcgatatccgaaaactgcgccgcgtctttgttatcggcagcgcgatcccgctgattgcctatattttctggcagctggtgacgctgggcagcattgactcttcaacctttattgggctgatggcgcaacacgcaggcctgaacggttttctgctggcgctgcgcgaggtcgtcacctccccgcacgtggagctggcggtacacctctttgccgacctggcgctggcaacctcgtttctgggcgtggcgcttggcctgtttgactatctggccgacctgttccagcgccgcaataccgccgcaggacgattacagaccggggccatcaccttcctgccgccgctggcctttgcgctgttttatccacgcgggtttgtgatggcgctggggtatgcgggggtggcgctctcggtccttgccctgctcctcccttccctgctggcgtggaagagccgccagcagcatccgcagcagggttaccgcgtggcgggaggaaaaccgctgctgtgcattgtgtttggctgtggggtagtgattattctggtgcaggtgttgattgcagccgggatgctgccggaagtgggttaa

SEQ ID NO: 164329 - DNA, 669 bp, Enterobacter cloacae
atgactgaaggcccattaaatgaaagcgaaatggcgtggcttgaagagacgttaatgtcttacggtcatgacgatgcgtccgtgcttgacgtgtctgaactggacggcatgtttaccgcagtgctttccggtcctgttgtcgttgagccagatacctggctggtggcggtgtggggtggcgagaaatacattccgcgctggaaaaacgatcgcgagatgaaccgttttatcgatctttgctttaagcatatgaacgatattgccgagcgcctgagcgaatatccggaccagtttgaaccgatgtttggctataacgacattgacggtgagagctataccgtggtggaagagtggtgctacggctacatgcgcggcgtggcgctgacggactggtcagccttgccggacgagctgaaggccgatctggatgtgattgcgctgcacggtagcgaagagatcggcgaccagctggatgaattgaccgaagaagaatataccgccagcattgaacgtattcagcctgcggcgctgcgcttgtataactactgggtgaacaatccgcagcagccggaggtgaagaagccgatggtgaacggcacgaaggttgggcgtaacgatccgtgtccttgcggcagcgggaagaagttcaagagctgctgtttgcactga

SEQ ID NO: 164330 - DNA, 1122 bp, Enterobacter cloacae
atgtcgctgaaatttatcagaactccgctttctctcgtgttggccggttgcctggtgacggcgttttccgccagggcagatatcgtgattggcgtggccgggccgttcacgggtcctaatgccacctatggcgatcagtactggcacggcgcaacgcaggccgctgaagacattaacgccgccggcggcattaacggagagaagatcaaactggttcagggggatgacgcctgcgagcctaagcaggcggtggcggtggccaaccgcttagtcgaccaggataaagtcaacgccgtggtcggtcatttctgctcctcttccaccatgcccgcctccgaggtatacagcgatgcggggatcatcgctattacccccggttcaaccaacccgctgattaccgaacgcggcatgagcgacatgttccgcatgtgcggccgcgatgaccagcagggccaggtggccagcgacttcatcatcgacaagctgaaagccaaacgggtggtgattattcacgataaagacacctatggtcagggcctggctgacgccaccaaagcggcgctggcgaaacgcggggttcaggatgtgatgtacgaggggttatcccgcggtgaaaaagactttaacgcgctggtcactaagatcggcgcgcaaaaaccggacgtcgtgttcttcggtggctgtcatcctgaagccggcccgctggttcgccagatgcgtgagcagggcgtgcaggcgaaattcttctccggggactgtatcgtcaacgaagagatggtgaccgcggcgggcggcccgcaatataccaatggcatttacatgaccttcggtaaagatccgcgcctgatcccggacggcaaagcggtaatcgagaaattccgcgccggtaaattcgagccggaaggttacaccctctactcctacgcctcggtacaggcgattgccgcggccttcaaggccaccggcggcaaggactctgccaaagccagcgagtggctgaaggccaattccgtcgacacggtgatgggcaaaaaagcctgggacagcaaaggcgatctgaaagtctctgactacgtggtttaccagtgggacgacaaaggaaaatataaggaagtggagtaa

SEQ ID NO: 164331 - DNA, 915 bp, Enterobacter cloacae
atgagtacattcttcctgcaacagttaatcaatggcttaacgctgggttccgtctacggcctgatcgccatcggctacaccatggtgtacggcattatcggcatgattaatttcgcccacggcgaagtgtatatgatttccgcctatctctgcgccattggcctggcgctgctctcgttcttcggcctgcagtccttcccgctgctgatcctcggcacgctggtgttcaccattgtggtcaccggggtgtacggctggaccatcgagcgtatcgcctataagccgctgcgcaactccacgcgcctggcaccgctgatctccgccatcgggatatcgcttattctgcaaaactacgcgcagctgagccagggcccgcgccagcaaggggtgccaaccatgctggacggcgtgattcgcctgcatctgggcgaagggttcgtgcagataacctacaccaaagtgtttatcctggtggcctcgtttgccggcatgctggtgctcacctggataatcaaccgtaccaggctggggcggatgtgccgtgcggtgcagcaggatcgcaaaatggcctccattctggggattaacaccgaccggattatttcgctggtcttcgtcatcggcgcggcgatggcgggcctggcgggggtgctgatcaccatgaattacggcacctttgatttctacgtcgggttcgtgatcggcattaaagctttcacggcggcggtactgggcggcatcggttccctccccggcgccatgctcggtggccttatcctgggcgtggcggaagcgcagttctcgggcatggtgaactcggactataaagatgtcttctcgtttggcctgctggtgatgatcctgattttccgccctcaggggctgctcgggcgcccgattgtggccaaagtgtga

SEQ ID NO: 164332 - DNA, 1278 bp, Enterobacter cloacae
atgatgacgtcacacggtttttcacttaaacgctgcattctggacgcgattttctccgggctgattgcgctgattatcttcggccccattgcaggcgtggtgctggacggatatagctttaccttcgccgggcagcgcctggcctggatggtcggtatcgtcatggcggggcgttttctgctgagcgcttttttaggtaccgctgcaggtgctcgtttccaggcgcgcttcgaggccgacagcgcgggcgtatatgtccgccccccggaatataaaagccgcatgcgctggattattcccctggtgattacccttgcgatttgctttccgtttgtcgccaccaagtatgttctgaccgtcgccattctggggctgatctacgtgcttctcggtctggggctgaacatcgtcgtgggcctggccggtctgctggatctggggtatgtcgcgttctatgcgattggtgcgtacggcctggcgctgggataccagtatctcggcctgggcttctggagcatgctgccgctcgcggcaatcatggccgctgccgcaggtgccctgctcggcttcccggtactgcgcatgcacggtgactatctggccatcgtcaccctcggcttcggggagatcattcgcctgatactgaacaactggctgaccttcaccggcggccccaacggcgtgtctgcccctccccccacctttttcggtcttgagtttgggcgacgcgcaaaagaaggcggcgtgcccttccacgagtttttccacctgacctacaacccgaacatgaagtttatctttatctacgcggtgctgtttctggtggtgatgctggtgctttacatcaagcaccgcctgacgcgcatgccgattggtcgggcgtgggaagccctgcgcgaagacgaaattgcctgccgctcaatggggttgaatcatgttctggttaagctttccgcctttacgctgggcgcgtccaccgcaggcattgccggggtgttcttcgccacctatcaggggttcgtgaatccgacctcctttaccttctttgaatcggcattgatcctcgccattgtggtgctgggcgggatgggctcgacgcttggcgtggtgctggccgcctttgtgctcacggtaacgccggagctgctgcgcagttttgccgagtaccgcgtcctgctgttcggcatgctgatggtggtgatgatgatctggcgtccacgcggtttgatccgcattaaccgcagcgggtttgccgtgcgtaagggcatcgcaccatga

SEQ ID NO: 164333 - DNA, 876 bp, Enterobacter cloacae
atgaacgaaacgatattacgcgttgagcatctgatgatgcattttggcgggattaaggcgctaaacgacgtcaacctggacgtgcagcgcggctccattaccgccctgattggccccaacggggcgggcaaaacaaccgtgtttaactgcctgacgggcttctacagagcctccggcggcaacattttgtttaatacccgccataaaacgaccaacgttattcaggtcctcgggcaaaaattccagcccggcgactggattaaccccgcgcagttcgggcagcgtcttttctacaaaatgtttggcggaacccacctggtcaaccgtgccggactggcgcgcacgtttcaaaatatccgtctttttcgcgagatgtcggtcgtggaaaacctgctggtcgcgcagcatatgcgcgttaaccgtaatctgctcgccgggatcttaaatacgccggcataccggcgggcggaaagcgacgccctggacagagccttttactggctggaagtggtggatctggtggagtgcgccaatcgcctggcgggagagatgtcgtacggccagcagcggcgactggaaatcgcgcgggcaatgtgtaccgggccggaaatgatctgtctggatgaacccgccgctgggcttaacccggttgaaacgcacaagctgagcggcattattcgctttctgcgggatcatcacgacatcacggtattgctgattgagcatgatatggggatggtgatggacatttcggacgacattatcgtgctcgaccacggcgatgtgattgccaggggtaaacccgagcagatccagcaggatgaaaaggtcattgccgcctacctgggcaccgatgaaagcgaggtatccctatga

SEQ ID NO: 164334 - DNA, 717 bp, Enterobacter cloacae
atgagcgaaccgctgctggcttttcgcgaggtggatgtgttttacggcgtcattcaggcgctgaagcaggtctctcttgaggtgaataagggggaaaccgtggcgctgattggcgcaaacggtgcgggtaaatcgacattgctgatgtccatctttggtcaaccccgtatccgcagcgggcagatcctgttctgtggtgaagatatcagccatcaatccacccactacgttgcgtccggcggcattgcgcaggcaccggaggggcgacgaatcttccccgatatgaccgtggaagagaacctgctgatggggaccattcccatcggcaatcagtttgcggctgaagacatgcaaaccatgtttgaccttttccctcgccttaaagagcgacgtaaacagcgcgcgatgaccatgtccggcggagaacagcagatgctggcgatcgcccgggcgctgatgagccgtccgaagctgctgctgctggatgagcccagcctgggcttagccccgattgtggtgaagcagatcttccagacgctgcgcgagctggcccgcagcggtatgaccatttttctggtggagcagaatgcgcaccatgcgttgaagctgtctgaccgcgggtatgtgatggtgaacggacagatccggctgagcggcagcggtgaggaattgctggggaatcaggaagtgagaaaggcgtatttgggcggggtgtga

SEQ ID NO: 164335 - DNA, 678 bp, Enterobacter cloacae
atgcaatatgaagaacagcagcttatcaacggccttttcgagcgtcttaaacaggccggacaacaaaacagccaacgggatgcagatgcagagcgtcagatcgctgaatttgtcaggcagcagcctgcggccccctactatatggcgcagtcgattttgattcaggaagcggcgctgaaacgcctgcaggcccgggttcaggagcttgaaagcgaattagccgcgcaaaaaagcaaaccctcgacgggcggcagcttcctcggcggcctgtttggtggcgggaaaagtaacccgcagcctgacaacagctggaatgcccagccgcaacagccgccggcgcaggattactctcgggcgccagcgcctgctactcgcggcggcggttttatggctggcgcgctccagacagccgctggcgtggccggtggcatcgcgcttgccgagatgcttaccagcatgttccatcagtcgcggccggaagagatcgtgaacatcatcgaagagccgacaatgcccgtcggtggtgaaccgtttgtcggtaatcaatacggcgacgttaataacgtctctgacacccgtttcctcaaccagaacgatccgttcggcagtaataacgatgcctggcagaacgacgatgtagatgacgactacagcaatgacgacgacagttttatttaa

SEQ ID NO: 164336 - DNA, 549 bp, Enterobacter cloacae
atgcaatataacatccctacgttgctcactctttttcgtgttgtactcatcccgttctttgtgctggcgttttacctgccggttgtctgggcaccctttgcctgcgcattgatcttccttattgcagcggtaacagactggtttgatggctacctggcgcgccgctggaatcaaagcacccgttttggcgccttcctcgatccggtggcggataaagtgatggtcgcgattgcgatggtgctggtggctgagcactatcacacctggtgggtgacgctgcctgcggcaaccatgatcggccgcgagattattatctctgcgctgcgcgagtggatggcggaactggggaaacgcagcagcgtggcggtctcgtggattggtaaagtgaaaacgacggcgcagatggcggcgctggtctggatgctgtggcgtccgaacgcctgggttgagtgggcggggattggcctcctgtgggtggcggcagtgctgacgctgtggtcaatgctgcaatatttgaacgctgcgcgcggggatttgcttgatcagtga

SEQ ID NO: 164337 - DNA, 1833 bp, Enterobacter cloacae
gtgagtgatgtgtttgattcaaaagcatttctgaaaaccgtaaccagccagcctggcgtctatcgcatgtatgacgctggcggtacggttatctatgtggggaaggctaaagatcttaaaaaacgtctctccagctattttcgcagtaacctggcctcccgtaagaccgaagcgctggtctcactcatccagaatattgatgttaccgtcacgcatacagagacagaagcgctgctgcttgagcacaactatattaagctctatcagccgcgctataacgtcctgctgcgtgatgataaatcctatccgtttatctttctgagcggcgacacccatccgcgcctcgctatgcaccgtggtgcaaaacatgcgaagggtgaatatttcgggccgttccccaacggctatgccgtgcgagaaacgctggcgctgctgcaaaaaatcttcccgatccgccagtgtgaaaacagcgtttaccgtaaccgttcgcggccatgcctgcagtaccagattggacgctgcctggggccgtgcgtggccgggctggtgagtgaagaagagtatgcccagcaggtggagtatgtgcgcctgttcttagccggcaaggacgatcaggtcttaacccagctgattgcgcggatggaaaaagccagcgccgcactcgagttcgaagaggccgcgcgtatccgcgaccaaatccaggcggtgcgaagagtcacggagaaacagtttgtctcaaataccggtgacgatcttgatgtcatcggcgtggcctttgacgccggaatggcctgcgtgcacgtgctgtttattcgccagggcaaagtgctcggcagccgcagctatttcccgaaagtgcctggcggtaccgaactgggtgaagtggtggaaacctttgtcggccagttctatctgcagggcagccagatgcgcacgctgccttctgagatcctgctcgattttaatcttgacgataaaaccctgctggccgattcgctctctgaactggcggggcgccgggtcaatgtacaaaccaaaccgcgcggcgatcgtgcgcgttatctgaagctggcgcgaaccaacgcggcgacggcactcaccactaagctgtcgcagcagtcgacggtgcaccagcgtttaacggccctggcggcgctgctgaagcttccggaagtgaaacggatggagtgtttcgacatcagccatacgatgggtgaacagacggtcgcgtcctgcgtggtgtttgatgcgaatggcccactgcgcgccgagtatcgccgctataacatcaccggcatcacgccgggcgatgactatgcggcgatgaatcaggtgctgcgtcgtcgctatggtaaagccatagaagagagcaagatccccgatgtgatcctgattgacggcgggaaagggcagctcggccaggcgaaagcggtatttgaatcgcttgatgtcagctgggataaaaaccatccgctgctgctgggcgtcgcaaaaggggccgatcgtaaggccggtctggagacactgttcttcgagccggaaggtgagggcttcagcctgccgccggactctccggcgctgcacgtcattcagcatattcgcgatgaatcgcacgatcacgccatcagcggtcaccgcaaaaaacgggcgaaggtgaaaaacaccagctcactcgagacgatcgaaggcgtgggaccaaaacgtcgccagatgctgctgaagtatatgggcggattgcaaggattactcaacgccagcatggaggaaattgcaaaagtgccgggtatttcgcaagggctggcagaaaagatctactactcgttgaaacattga

SEQ ID NO: 164338 - DNA, 657 bp, Enterobacter cloacae
ttgatcaacgtccttcttgttgatgaccacgaactggtgcgcgcagggatacgacgcattcttgaagatattaaaggtattaaagttgccggtgaggcatgctgtggcgaagatgcggtaaaatggtgccgtacccactccgccgatgtggtgctgatggatatgaacatgcccggtatcggcggtcttgaggcaacacgcaaaatcgcgcgtacctttgtagacaccaaagtcatcatgctgacggtgcataccgaaaatccactgcccgcgaaagtgatgcaggcgggggccgcgggttacctgagtaaaggtgctgcaccgcaggaagtcgtcaatgctatccgttccgtgtatgccggacagcgttatattgcgtccgacatcgctcagcagatggcgctgagccagatcgagcccgagaaaaccgaatcaccctttgccagtttgtccgagcgtgaattgcagattatgctgatgatcaccaaaggtcagaaggtgaatgagatctcggaacagctgaatctcagcccgaaaacggtaaacagctatcgttatcggatgttcagtaaactgaacattcatggtgacgtcgaactgacgcatctggccatccgacatggtttgtgtaatgcggagacgttgttaagtcagtga

SEQ ID NO: 164339 - DNA, 225 bp, Enterobacter cloacae
atgagcacacctgaatttgccactgcggagaataaccaggaactggcacaggaagtaaactgcctgaaagcgctgctaacgctgatgctgcaggcgatgggacaggctgatgccggtcgtgtgatcattaaaatggaaaaacaaatcgcggagatggaagaccaggctgaatcagcggtatttgctaacaccgttaagcaaatcaagcaagcgtaccgccagtaa

SEQ ID NO: 164340 - DNA, 723 bp, Enterobacter cloacae
atgaaggatttagactttttcacctggcgacgggattgctccctccggtttcaggaattgacctgtgccgccgaggtatatcaggagctggagcgacaaactcaggcgctggaattcgattattacgcgctctgcgtgcgccatcccgtgccatttacccgccctaagatctccctgcaaaccacttacccaaaattgtggatggcgcaatatcaatccgcgaactatttcgcgattgatccggttttaaaaccggagaatttcattcagggccatctcccctggacagatgcattattcgccgaggcgcaggaattatggcacagcgcccaggatcacggtttacgctcgggaataacgcagtgccttatgctgccaaatcatgcgcttggtttcctgtcagtgtctcgtacgcgtgtacaggaagggccattagcccatgaagaaatagagctgcgattgcaaatgctggtgcaaatggccttaacctcgctgatgcgttttgacgatgagatggtcatgccgccggaaatgaaattcagcaagcgcgagcgtgaaattctgaaatggactgcggaagggaagacgtcagcggaaatagcgatcattctctcgatctcagagaataccgttaacttccatcagaagaatatgcagaagaaattcaacgcgcccaacaagacgcagatcgcgtgctatgcggcggcaacgggactgatttga

SEQ ID NO: 164341 - DNA, 753 bp, Enterobacter cloacae
atgagtgcaattgacgtcaaaaacctggtgaaaaaattccacggtcaaacggtgctccacgggatcgatctggaggtcgagcagggcgaagtggtggcgattattggaccgagcgggtcgggtaagacgacgctgctgcgcagcattaacctgcttgaacagccggaaggtggtaccatccgggtcggggagatcacgattgataccgggaaatccatcagccaacagaaagggttgattcgccgcctgcgccagcatgtcggctttgttttccagaacttcaaccttttcccgcatcgtactgtgctggagaacatcatcgaagggccggtgatcgttaaaggtgagccaaaagaagaagcgacggcgcgggctcgcgaactgctcgccaaagtagggctggcggggaaagagaccagctatccgcgtcgcctgtcgggcgggcagcagcagcgcgtggcgattgcgcgcgcgctggcgatgcgcccggacgtgatcctgtttgatgaaccgacctctgcgctcgatccggaactggtgggcgaggtgctgaacaccattcgccagctggcacaggagaaacgtacgatggtgatcgtgacccatgaaatgagctttgcgcgcgatgttgctgacagagccatctttatggatcagggacggattgtggagcaggggccagcgaaaagcctgttcgctaaccctcaacagccgcgaacccgtcaattccttgaaaaattccttatgcagtag

SEQ ID NO: 164342 - DNA, 669 bp, Enterobacter cloacae
atgcaagaaagtattcaactggttattgattctctgccgtatctgctgaaaggtgcggtatttacgttgcagctcagtatcggcgggatgttctttgggctggtactgggatttatactggccttaatgcgcttgtcgcctgttctgccggtgcgctggctggcgcgcttttatatctccgtgtttcgcggcacgccgcttatcgcccagctctttatgatctactacggcttaccgcagtttggtatcgagctggatccgattccggcggcgatgattggcctgtcgctcaataccgcggcgtacacctccgaaaccctgcgtgcggccatctcctccattgacaaagggcagtgggaagcggcggccagtatcgggatgacgccctggcagacgctgcgccgggctattctgccgcaggcggcacgcgtggcgcttccgccgctcagcaacagctttatcagcctggtgaaagatacctccctggcggcaacgattcaggttccggagcttttccgtcaggcacagctcattacctcccgtacgcttgaggtctttaccatgtatctggccgcctcgctgatttactgggtgatggcgacggtgctgtctgctctgcaaaactacttcgaaaaccagcttaaccgccaggagcgtgatccaaaatga

SEQ ID NO: 164343 - DNA, 987 bp, Enterobacter cloacae
atgtcactacagaatttaacgcgctttccccgcctggagttcatcggcgcgccgacgccgctggagtatctcccgcgattttctgattatttagggcgcgatatttttattaagcgtgatgacgtgacgcccatggcgatggggggcaacaagctgcgcaagctggagtttctggcggcggacgccctgcgcgaaggcgcggatacgctcatcactgccggggccatccagtccaaccacgttcgccagacggcggccgtggcggcaaaacttgggcttcactgcgtggcattgctggaaaacccgattggcacgcgggctgaaaactatctcaccaacggtaaccgcctgctgttagacctgtttaacgtgcaggttgagatggttgacgcgctgaccgacccgaccgcccagctcgatgagctggcgacgcgtctggaagcgcagggttttcgcccctacgttattcccgtcggcgggtcgaatgcgctgggcgcgctggggtacgtagaaagcgcgctggaaatcgcgcagcagtgcgagggggcggtgagtctctcctccgtcgtggtcgcgtccggcagtgcgggcacccatgccgggctggcggtggggctggagcaactgcttccggaggtcgaactgattggcgtgacggtgtcccgcagcgtggcggatcagaagccgaaagtggttacgctacagcaggcggtcgcagagcagctggagctgaaggcgaaggccgatattctgctctgggatgactattttgcgccgggttacggcacgccgaacgaagagggaatggaggcggtgaaactgctggcgcgcctcgagggcatactgctcgatccggtctataccggcaaagcgatggccggactgatcgacggcattgcgcaaaaacgctttaaggatgaagggccgattttatttgtccataccggcggagcgcctgcgctgtttgcctaccatcctcatgtctaa

SEQ ID NO: 164344 - DNA, 801 bp, Enterobacter cloacae
atgaaatttgcacttctgggtcgtcaggcgctgatgggtgttatggccgttgcgctggttgcgggcatgagcgtgaaaacgttcgccgcagaaaacctgctgaataaagtaaaagagcgcggtacgctgctggtcgggctggaaggaacctatcctccgttcagcttccagggcgatgacggtaagctgaccggttttgaagtggagtttgctgaagagctggcgaaacacctcggcgtgaaagcgtccctgaaaccgaccaaatgggacggtatgctggcgtcgctggattcgaaacgcattgacgtggtcatcaaccaggtcaccatctctgacgagcgtaagaagaagtatgacttctccaccccgtataccgtgtccggtattcaggcgctggtgaagaaaggcaacgaaggcaccatcaaaacggctgcggacctgaaagggaagaaagtcggtgtcggtctgggaaccaactacgaagagtggctgcgccagaacgttcagggcgtggatatccgcacctatgatgatgacccgacgaaataccaggatctgcgcgtgggccgtaccgacgccattctggttgaccgcctggcagcactggatctggtcaagaaaaccaacaacaccctggcggtagcgggtgatgcgttctctcgtcaggaatccggcgtggccgttcgtaaaggtaacgaagacctggtgaaagcgattgattccgcgattgctgacatgcaaaaagacggtagcctgaaggcgctttccgagaagtggttcggggcagacgtcacgaaataa

SEQ ID NO: 164345 - DNA, 552 bp, Enterobacter cloacae
atgacggtgcagcaatctaaaagacggcctttaagccgctacctgaaagactttaaacacagccagacgcattgcgcccactgtaacaagttactcgatcgtatcacgctggttcgccgcggcgaaatcgtcaataagatcgcgatttcgcgcctcgacacgttgatggacgaagcagcatggctcgaagagcaaaaagagtgggtggcgctttgccgtttctgtggcgatctccattgcaaagagcaaagcgacttcttcgatattatcggcttcaagcagttcctgtttgaacaaacggagatgagccacggcaccgttcgcgaatacgtagttcgcctgcgccgcctcgggcaacatctgaccgtgaacaacatttcccgcgatctgctcaaaaccggttatctcgacgagaacctggagccgtggctgcctgcgaccagcaccaacaactaccggattgcgctgcgcaagtacgcacaatataaggtacaaatgccgggtgccataaagcagaaagcccacgccggaacaacttctgatatatattaa

SEQ ID NO: 164346 - DNA, 690 bp, Enterobacter cloacae
atggataaacactcgctgtggcagcgttatgtcccgctggtgcgtcacgaagcattgcgcctccaggtgcgcttgccggcgagcgtggaactcgacgatctgctacaggcgggcggtatcgggttattgaatgcagttgaccgatacgacgctctgcaaggaacggcatttacgacttacgcagttcagcgtattcgtggtgcgatgctggatgagctgcgcagccgtgactgggtgccgcgcagtgttcgccgcaacgcacgcgaagtggcgcatgcgatggggcagctggaacaggaactgggacgcaacgcaacggaaaccgaagtggcggatcgtcttggcattgctgttgaagagtatcgtcagatgttgctcgataccaataatagccaactcttctcttatgacgagtggcgagaagagcatggcgatagcatcgagctggtgacggatgagcaccagcaagaaaacccgttacaccatttaatggaagggaatttacgccagcgcgtcatggaagctattgaagctctgcctgaacgcgaacagctggtattgaccctttattaccaggaagagcttaacctcaaagagattggcgctgttctggaggtgggagagtcgcgggtgagccagctgcacagccaggccattaaacgcttacgaaccaagctgggtaagttatag

SEQ ID NO: 164347 - DNA, 1206 bp, Enterobacter cloacae
gtgaaacaaatcagtgtcactcaaccaaagctggtcgcagatttttcatgtgtcggtggggaatgccgtgaacattgttgtcagggctggaccatcgcgtttgataaatcctccgttaaccgctatctgaacagtaaaaatgccgccattcgtcagaccgcaaaaacggcgataaaagtcaccaaaaaaaactatgaccactggggtgaagtgattttccatacggaaagtaaaaactgcccgtttatggatacggaaaaactctgttctgttcatggcgtcatgggcgtccaggccttaagcccaacctgttcgacatttccacggacaagccgggtctataaaaatgaaatcgaaaaatcgctgaacctctcgtgtccggaagtgacccgacttctgttgaacgatcgggagtctatgtcgatgatggaatcggttattgtccagcaggacgtcaataacgcgccaatgattgatttgaaggctaaggtcatcaatctcttctgccagaatatattcagcgttgaaagtgttagcgttgaagaacaggtttacgccatggtgaaattcctcatggtggctgaaaagctcgataatctcgaagagaatatcggcacgctcgaaacggtctatttctcgctggttaacgagctggtgagcggtaaaatcaagacggagcttggcgggtttaatcagaactacagcctgaaattcgcgctaatttcgctcatccagagctattttacgaagaaagcgacagcccgcggcggtgcggtattaaatcgttattttacccagctttatcaacagtttgagtctactggtgacaccgttccggcagagaaggtcatggaaaacatcgagtccgtctggcgcgatgtggcaagcggttacctggcgaccaatgaccatttatttaagaacttttttaaatacaaactctgggagcaggcctttccgcagaacaatggccgcagcatgttgaataacctttatttaatcgtcgcggagttctatttccttaaaacgttacttgccggtcaggcactcgtggcgggaaaaattgaacaagataatatcattgatgttatttacagcttccactcccttagccagcataatcaggaagcgggaaagctctttcatcaacatatagatagcgtcaaactcggcgacgatctttcattgttacaactgttaatttag

SEQ ID NO: 164348 - DNA, 825 bp, Enterobacter cloacae
atggcagttatcaatactaacctgttgtccctgaccactcagaacaacctgaacaaatctcagtcttctctgggcactgctattgagcgtctgtcttcaggtctgcgtatcaacagcgcgaaagacgatgccgctggccaggcgattgcaaaccgcatgaccgctcagatcaaaggtatgaaccaggcagcacgtaacgccaacgacggtatctccatggcgcagactgctgaaggttccctgaacgaaatcaacaacaacctgcagcgcgttcgtgaactggctgttcaggcaagcaacggcaccaacagcacctctgacctggcttctctgcaggacgaagttaccgctcgtctggctgaaatcaaccgcgttgcgggcaaaactgacttcaacggcatcaaactgctggacggcactgcaggtactgctggcgtagttaaaattcaggttggcgttaacgacggcgacaccatcgatctggacctgagcggtgctaaagctgacaccaccaccctgggcgtgaacgcaatcgacctgaaaactatgaccgctaccgacctgggcaccatcgacgcagctatcgctaaagttgataaagcacgttcaggcctgggtgctgtgcagaaccgcttcacttctgccatcaacaacctgaacaacacctctaacaacctgtctgctgctcagtcccgtatccaggacgctgactacgcaactgaagtttccaacatgtctcgcgcgcagatcctgcagcaggctggtacttctgttctgtctcaggcaaaccaggttccacagaccgttctgtctctgctgcgttaa

SEQ ID NO: 164349 - DNA, 1425 bp, Enterobacter cloacae
atggctactatcagtaacctcgggataggttctgcaggactcggggatttatataatcagttggaagcggcagagaaaaccaagctgacgacgattacttcccagcaatcaacgtataacgcacagttaagcgcttacggcaagctgcagagcgccatgacatcgctgcagactgccaccgctgcactgggtaaagccaccacctggaactcaacgtccgtgagcagcaccaacacggcctttaccgccacgacgacggcagacgcctccgtgggttcctttgtggttaacgtcaaccaggttgcaaaggcacaggcgctcacaaccggctcctatgcaaacaacacggatttgttaggcgatacgacaggtacgacccgtaaaatcaccatcacccagccgggcacgaaaacgcctttagaggtcacactggccgatggtgatacgtcgctggccgggatcgcgagcgccattaacaaagcgaacggcaacgtcaccgccagcgttattaaagcgaaagacggtgattaccgcctgatgctgtcatcaaaaaccaccggtaccgatggtgcgatgaccgtcagcgtcaccggcgacgccaagctgcaaagcgcaattggctacgattcaaccaccaaaacgggcgcgctgacggtgaacaccgacgcgcagaacgcgattgtggtggtgaacaacatctctatcgagcgccagtcgaataccattaccgatgcgctgcctggcgtgactttctcgctgaaagcagaaagcaaggcggatgaaacactagaggtgactcgcgcaacggatgctaaccagaaggcgattacggactgggtcacggcgtacaactcgctgcagtccaccattaacagcctcacaaaatatgtgccggtcgatgcaggctctggcagccagtctaccagcaacggcgcgctggtcggtgatgcgaacgtgcgtgggatccagtctcagctgcgcggtctgctgaccgaagtgcaggcaggctctgttcaaatcatggcccaactggggattacccaggacccggtaaaaggtgcagacggtaccgtcggtaacctgaagatcgataccgacaagctgaaaaaagcgctgaccgaaaacccgaacgccgtacagcagtattttgtcggtgacgggaagaaaaccggcatggcgacccagatgaataacacgctgacctccatgctcagcaccagtaccggcagcgccggtgtgatccagaacgcgaaagacgggatcaacaaaacgctgaaaactctgggtgaacgttacgatgccatggatgcccaaattgaagccaccatggcgcgatacaaaacccagttcaccagcctggacgtattagtcaccaaaatgaccagtacagccaattacctgacccaacagttctcacagaaatag

SEQ ID NO: 164350 - DNA, 405 bp, Enterobacter cloacae
atgtataacacctctggtgttcaatcctatcagcagataggagtcgaaagcgcagtgatgaatgccagtccacaccagctgattgtcatgttgttcgacggggcgcatagcgcccttgtccgcgcgcgtttgttcctggaagccggacaaattcgtgaaaaaggcgaagcgttatccaaagccatcaacatcatcgacaacggtttaaaagcaggactgaacatggaggttgagagcgagttgtccggtaaccttgcctccttgtacgaatatatggttcgacgtttgttactggcgaatgtcagtaatgacgtagacgcaattgttgaagtcgagggtttattaaacaacattgcggatgcgtggaagcaaatcggccccaatgcgtcctctatttcaggataa

SEQ ID NO: 164351 - DNA, 375 bp, Enterobacter cloacae
atgaataatcccagcgcagcgcttagccactggcaggcgttacatgctcagagcattgctatgctaaatctcgcacattctggtcaatgggatgcgcttatcgagcaggaaatgcattatgtacaactggtggagaggatttctcaaacacccattatgtcatgccctccggctcaggttgagcaagcgcgtgcgctgctggaaatgatccttgaaaatgagaatgcgctaaaagcgctgctgaaagtccgaatggacgagctgcgcaatctgatcgatcaaaccggcaaacagcaatccatcacgtctacctatggaaagctgtcagggaatattctttacccagaaagttttacccgcgacacacaactatga

SEQ ID NO: 164352 - DNA, 1491 bp, Enterobacter cloacae
atgatgaaaaaccccaccctgttacaatgttttcactggtactaccctgctggcggtgaattgtggcgagaggtcacggcgttagcccccaatcttaacgaaatcggcattaacatgatctggctcccgcccgcctataaaggtgcatccggcgggtattctgtcggctatgactcttatgacctgttcgatctgggcgagtttgaccagaaaggcagtatcgccacgaaatacggtgacaaagcgcagctgctggaagccatcgacgccctcaagcgcaacgacattgccgtactgctggacgtggtggtgaaccacaaaatgggtgccgatgaaaaagagcccgtccgcgttcagcgcgtgaacgagcaggatcgcacgcagatcgacgatgaggtcatcgagtgtgaagcctggacccgctataccttccctgcccgcgccgggcaatattcgcagtttatctgggactacaaatgcttcagcggcgtcgaccacattgaaaacccagatgaagacggcatttttaaaatcgtcaacgactacaccggcgaaggctggaacgatcaggttgacgatgagatgggtaacttcgattatctgatgggtgaaaatatcgactttcgcaatcacgccgtgaccgaggagatcaaatactgggcccgctgggtcatggaacagacgcgctgcgacggttttcgcctggacgccgtcaagcatattcccgcctggttctacaaagagtggattgagcacgtccaggaggtcgccgaccagccgctgtttatcgtggcggaatactggtcccatgaggtggataaacttcaggcctatatcgaccaggtcgaaggcaaaaccatgctgtttgatgcccccctgcagatgaaattccacgaggcgtcacgtcagggccgggattatgacatgagccaaatctttaccggcacgctggtggaagccgatccgtttcatgcggtcaccctcgtcgcaaaccatgacacccagcctttgcaggcgctggaagccccggtcgaagcctggtttaaaccgctggcgtatgcgctgatcctgctgcgggaaaatggcgtgccgagcgtcttttatcctgacctctttggcgccagctatgacgatacgggtggagatggagagacgtaccatattgatatgccggtcattgagcagctccacgagctgatcctcgcgcgccagcgttttgcccacggcgtgcagacgctcttttttgaccatcctaactgcatcgccttcagccgcagcggcacggaagacgatcccggctgcgtggtggtgatgtcaaacggggacgacggcgagaaggtaatttgtctgggggaaaactacggcaacaaaacgtggcgggattttctcggcaatcgcgaagaaacggtcaccacggcggcggatggcgaagggacttttacctgcaaaggcggaagcgtaagcgtgtgggtaattgaggatgcgttgtag

SEQ ID NO: 164353 - DNA, 414 bp, Enterobacter cloacae
atgaaaaaaatagcaattgctggcgcgctgctggcactgaccgggtgcgttcaggtcgataattataaagaggtgatcaagcatcctgtcccggcgcatctggcgggatactggcagtcaaaagggccgcagagcaaaatggtcagccctgaagcgattgccacgctggtggtgacggaagagggcgatacgctggactgccgtcagtggcagcgcgtgattgccgtgccgggtaaaatcatgctgcgttcagacagttattacaacgtgacgcgtaagctggatatctatccgctggagcgcgatggctcgacgcttgagtacgacgggctggagctgcagaaggtcgatcgcccaacggttgagtgtgccgattacctgagcaagcatccgctggagagtaaactaccgtag

SEQ ID NO: 164354 - DNA, 315 bp, Enterobacter cloacae
atggctatacagggcattgaaggggtaatcagtcagctgcaggcaacggcgatgacggcccgtaatcagaatgtggcagatcagcagccgagcatcagctttgcagggcaactgcatgccgctcttgaccgtatcagtgatacccagaccgcagcgcgcacgcaggcagagaagttcaccctcggcgagccgggcgtggcgctgaatgatgtgatgaccgatttgcaaaaagcctcggtttccctgcagatggggatccaggtgcgtaacaagctggtgtcggcttatcaggaagtgatggggatgcaggtctaa

SEQ ID NO: 164355 - DNA, 1680 bp, Enterobacter cloacae
atgagtgcaacagcatcgacagcgccgcagaataaatcactcgagtggatgaaccgccttcgcgcgaatcctaaaatcccgttgatcgtggcaggcgctgccgcaattgcgatccttgtagcgatggtcctgtgggcgaaaagccctgattaccggacgctctacagtaacctttccgatcaggatggcggcgccatcgtcacccagctgacccagatgaacatcccttatcgctttgccgataatggcggtgcgctggaggtcccggcagataaggtgcacgaactgcgtctgcgcctggcccagcaggggctgccgaagggcggcgcggtaggctttgagctgctggatcaggaaaaattcggtatcagccagttcagcgagcaggtgaactaccagcgtgcgctggaaggtgagctggcccgcaccattgaaacattaggcccggtgaagagcgcccgcgtgcacctggcgatgcctaaaccttccttatttgtccgcgaacagaaatcaccttcggcttccgtgaccgtgaaccttgagccaggccgcgcgctggacgaaggacaaatcagcgcggtgacgcatctcgtctccagcgccgtggccggtctgccgccgggtaacgtgacgctggttgaccagagcggtcacctgctgacgcaatccaataccgccggtcgcgatctgaatgacgcgcagctgaaatatgccgccgatgtggaaagccgtctccagcgccgtatcgaagcgatcctgggtccggtggtgggcaacagcaacgtgcacgcgcaggtcaccgcgcagatcgacttctcgaataaagaacaaaccgaagagcagtacagcccgaacggcgatgcggcgcaggcggttatgcgttcgcgccagatcaacaccagcgagcagattggcggcgcaaacccgggcggcgtgccgggcgcgctgtctaaccagcctgccccggctaacgcggcgccgatctctacgccgccggccaatcagcagaacggccagcagaataaccagcagaccacctcaacggcgacgaacagcggtccacgaaacagcagccgtaacgaaaccacgaactacgaagtggatagaacgattcgccacactaaactgaacgtgggcgatattcagcgtctctctgttgcggtagtggtgaactacaaaacgctggcggatggcaaaccgttgccgttgaccgccgagcagatgaagcagattgaaaacctgacccgtgaagcgatgggttactccgagaagcgcggcgataccctcaacgtggtgaactcaccgttcaactcggtggaagagaccggcggtgaactgccgttctggcaacagcaggcgtttatcgaccagctgatgtccgcaggacgctggctgctggtgctgattgtcgcgtggctgctgtggcgcaagggcgttcgtcctcagctccagcgccgtgctgaagccgaaaaagcggctcgcgagcagatgaatgcgcgtcaggaaacggaagaagcggttgaagtgcgcctcagcaaagatgaacagatgcagcagcgccgcgctaaccagcgcatgggtgccgaggtgatgagccagcgcattcgcgaaatgtcagataacgatccgcgcgtcgtggcgctggtcatccgtcagtggatgggtaacgaacatgagtaa

SEQ ID NO: 164356 - DNA, 999 bp, Enterobacter cloacae
atgagtaatacgcttacgggcaccgataaaagcgtcatcctgctgatgaccattggcgaagatcgcgcggcggaggtgtttaaacacctctcccagcgggaagtgcaaattctcagtgcggcgatggccaacgtgcgtcaaatttccaacaagcagctgaccgaagtgctgtcggaatttgagcaggaagccgaacagtttgccgcgctcaacgtcaacgccaacgactacctgcgttccgtgctggtcaaggcgctgggcgaagagcgtgccgccagcctgctggaagacattctggaaacgcgcgataccgccagcggtatcgaaacgcttaactttatggaaccgcagagtgccgccgacctgattcgcgacgagcacccgcagattatcgccaccatccttgtccacctcaaacgcggtcaggcggccgatattctggcgctgttcgaagagcgcctgcgtcacgatgtgatgctgcgtatcgccaccttcggcggcgttcagcctgccgcgctggcggagctgaccgaggtgctgaacaacctgctcgacggccagaacctcaagcgcagcaaaatgggcggcgtgagaacggcggcagaaatcatcaacctgatgaaaacgcagcaggaagaggccgtcattacggcggttcgcgaattcgacggcgagctggcacagaaaatcatcgacgagatgttcctgttcgaaaacctcgtcgaagtggacgaccgcagcatccagcgcctgctccaggaagtggattccgagtcgctgcttatcgccctcaaaggcgccgagcagccgctgcgcgagaagttcctgcgcaacatgtctcagcgtgcggccgatatcctgcgcgacgaccttgccaaccgcggcccggttcgtctgtctcaggtggaaaacgaacagaaagccattctgcttattgttcgtcgtctggcggaaaccggcgagatggtgattggcagcggagacgacacctatgtctaa

SEQ ID NO: 164357 - DNA, 708 bp, Enterobacter cloacae
atgtctaatgagctgccgtggaagcgctggacgccggacgatctggcccctcccctctccgagttcacgccagccgcgatcccgaccgaggcgcttgacccggacgtcgaacagcctgagctgagcgaagaagagcagcaagcacagatgctggctcagctgcaaatgcaggcgcacgagcagggctacaatgccggtctgaacgaaggccggcagaaaggccacgagcaggggtatcaggaaggcctggcgaaagggttagagcacggtatcgatcaggcgcgccagcagcaggcgccgatccatgcccgcatgcagcagctggtcagcgagtttcagcacacgctggacgcgctggacagcgtgattgcctcgcgactgatgcagatggcgctggaagccgcgcgtcaggtgatcggccagacgcccgtcgtggataacacggcgctaatcaaacaaattcagggtctgctgcagcaggagccgctgttcagcggtaagccgcagctgcgcgtccacccggacgacctgcagcgcgtggaagagagcctgggcgcgacgctaaacctgcacggctggcgtctgcgcggcgacccgtcgttacatcacggcggctgcaaagtttctgccgatgaaggcgatctggatgccagcgtcgccacccgctggcaggaactgtgtcgcctggcggcaccgggagtcgtctga

SEQ ID NO: 164358 - DNA, 1371 bp, Enterobacter cloacae
atgaccgcacgcctcacccgctggctcaccacgctcgacaactttgagacgaagatggcgcaactgccctctgttcgtcgttatgggcggctgacgcgcgccaccggtctggtcctggaggccaccggcctgcagcttccgctgggcgcgacctgcgtgattgagcgtcaggacggtctggaaacgcgtgaagtagaaagcgaagtggtcgggttcaacggccagcgcctgttcctgatgccgcttgaagaggtggaaggtattctgcccggcgcgcgcgtgtatgccaaaaacacgtccggcgatgggctgcaaagcgggaaacagctgccgcttggtcctgccctgctgggtcgcgtgctggacggcagcgggaagcctctcgacgggctgccctccccggacaccaccgaaaccggcgcattaattacccagccgtttaaccccctgcagcgaacccctatcgagcatgtgctcgacaccggcgtgcgcccgatcaacgccctgctgaccgtgggacgcgggcaacgtatgggccttttcgccgggtcaggcgtgggtaaatccgttctgctcggcatgatggcgcgctatacgcaggccgatgtgatcgtcgtgggcctgatcggcgagcgcggtcgtgaagtaaaagactttattgaaaacattctgggtgcggaaggccgtgcccgctcggtggtcattgccgcaccggcggacgtgtcgccgctgctgcgtatgcagggggcagcctatgccacccgcatcgccgaagattttcgtgaccgcggcaagcacgtgctgctgatcatggattcgctgacccgctacgcgatggcgcagcgtgaaatcgcgctggctatcggtgagccaccggcgaccaaaggctacccgccttcggtcttcgccaaactccctgccctggtggaacgtgcggggaacggcatcagcggcggcggctccatcaccgcgttctatacggtgctgaccgaaggcgatgaccagcaggatccgattgccgactccgcgcgcgcgatccttgacggtcatatcgtgctgtctcgtcgtctggccgaagccggacactatccggcgatagatattgaagcctctatcagccgcgcgatgacggcgctgataaccgagaaacactacgcccgcgtgcgtaactttaaacaactcctctccagcttccagcgcaaccgcgatctggtcagcgtgggggcgtatgccaaaggcagcgacccgatgctcgacaaagcgattaccctgtggccgcagctggaggcatttttgcaacaaggcatttttgaacgtgccgactgggaagattcaattcaggctctggagctgattttcccgcaggtgtaa

SEQ ID NO: 164359 - DNA, 444 bp, Enterobacter cloacae
atggcgcaaaacagcgcgttatcaacgctgaaagatctggctgaaaaagaagttgatgatgccgcattgcagcttggcgcaatgcgacgcgggtgccagcaggctgaagaacagttgaagatgttaatcgactatcagcatgaatatcgcaccaacctcaataccgatatgacacagggcattggaagccagcgctggattaactatcagcagtttatccagacgctggagaaggcgatagatcagcatcgccagcagctacaccagtggacccagaaagtcgataccgcgctgaatttctggcgcgagaagaagcagcgactgcaggcctggcagaccttacaggaccgacagattgcggcaacgaccctggcggaaaaccgcctggatcagaaaaaaatggatgagtttgcccagcgcgcatcaatgaggaaaccggaatga

SEQ ID NO: 164360 - DNA, 1233 bp, Enterobacter cloacae
atgatcacactgcaacaactgctgatgagcgacagcgacctgtcaggcggtacgcagacaggaaaaggcaccgacggtgcacaggactttctcgcgctgcttgcgggcgccctgtcggacgcgacgggcaagggcaacgatgcgcccctgacgctggctgacctgaaagccgccggcagcaaactgtcccacgttgctcaggacgccaaaggggataccaccctgcaggccaaaattgccgacctgctctcgcgtcaaactgcgctgaatggcgatgaaacgtcgtccgtcacgtcgcttgatacgctggtatccgggctggtgccgctgtcaaagggtgatgccctgaaaacgcttaatgcggtcaacagcaaagatgacggcaaaagcgagctgagcgaagaggagctggccgggttaagcgcgctgatggccatgctgccgcaccagcagaccagcacctcacgtgcggcaggcagtgacggtgtgtccgccaccgcaacgctgagttcagcggcgctgacgcaaaacggcgcgggccagccgtccctgaacgcgcttccgggaagccatgataaagcccagagtgctgcgccttatcagagccaggcgaaaaacagcgacccggccctgtcgggtaacgcgccggccacgccggccgtggccgcaacggcagagaagcaggagcttgccagttcctcctcctcagcctcaccgacggcgaccctggcaccgattatgtccagccatgcgaccagtcagacggccgccaccgtcgccaccgcgccggtgttaagccagcctctgggtacgcatgaatggcagcagtccctgagccagcacatcaccctgttcactaaacagggccagcagacagccgagctgcgtctgcacccggaagatctgggtcaggtgcaaatttcgcttaagctggatgataaccaggcgcagctgcagatggtttctgcgcacagccatgtccgtgcggcgctggaagccgcgctgccggtcctgcgaacctcactggcggagaacggcattcagcttgcgcaaagcagcgtcagcagcgagagctttgccgggcagcagcagtcctcatcccagcagcagcaccaggcttcgcgttccggcaacaccggcggctttaatgacgagagcgatgagttactgcctgtccctgccgctctgcaatccgccgcgcgcggtaacagtgccgtagacatcttcgcctaa

SEQ ID NO: 164361 - DNA, 471 bp, Enterobacter cloacae
atgactgactccgctatcaccaaaaaaagtaagcgttccatctggatcccgctgctggtgttgatcacgctcgccgcctgcgctaccgcgggctatagttactggcgtatgcagcaggaaccttcgaccgctgcggccaaagccgaacctgcaccaccgccggcgccggtatttttccctctggacaccttcaccgtgaacctcggtgacgcggatcgtgtgctgtatgtcggtattacgctgcgcctgaaggatgaagccacgcgcgcgcgtctgaatgattatcttccggaggtgcgtagccgccttctgctgctgttctctcgtcaggacgcttcggcgctggccaccgatgtgggtaagcaaaagctggtcgacgccattaaacaaacgctggcgaccccgctggtaaacggccaacctaagcaggaagtcactgacgttctgtatacagccttcattctgcggtaa

SEQ ID NO: 164362 - DNA, 1005 bp, Enterobacter cloacae
atgggcgacagtattctttctcaggcagaaatcgatgcgctgctcaacggcgacagcgataaaagtgatgatccgcaaccgggtattggcggcgatagcgatattcgtccctatgacccgaatacccagcgtcgcgtggtacgtgaacgtctgcaggcgctggagatcattaacgaacgttttgctcgtcagttccgtatggggctgtttaacctgctgcgtcgtagcccggatattacggtcggtgcgatccgcattcagccgtatcacgagtttgcccgcaacctgccggtgccaaccaaccttaacctgattcatctgaagccgctgcgcggcaccggtctggtggtgttttccccaagcctggtgttcattgcggtggataacctgttcggcggcgacgggcgtttcccgaccaaagtagaaggtcgcgaattcacccacaccgaacagcgcgtcattaaccgcatgctgaagctggcgctggagtcctacagcgacgcgtggaaagcgattaacccgctggaagtggagtacgtccgttctgagatgcaggtgaaatttaccaatatcaccacctccccgaacgatatcgtcgtgaacacgccgttccacgtggagatcggtaacctgaccggcgagttcaacatctgcctgccgttcagcatgatcgaaccgctgcgcgagctgctggttaacccgccgctggagaactcccgcaacgaagaccagaactggcgtgaaaacctggtccgccaggtccagcattcgcagcttgagctggtggcgagcttcgccgatatcccgctgcggttatctcagatcctgaaattacaacccggtgatgttttgccgatagaaaaacccgaccgcattattgcccatgtggatggtgtccccgtgctgacaagccagtacggcacgattaacggtcagtatgcgttacgcgttgagcacttgatcaacccgattttgaattcgctgaatgaggaacagcccaaatga

SEQ ID NO: 164363 - DNA, 414 bp, Enterobacter cloacae
atgagtgacatgaacaatccgtccgatgaaaacagcggagcactggacgatctgtgggctgacgcgttaaacgagcaaaaagcgaccccggccaaaagcgcagcggatgccgtattccagcagcttggcggcggtgacgtcagcggcacgctgcaggatatcgacctgattatggatatcccggttaagctgaccgttgagctgggacgcacccgcatgaccattaaagagctgctgcgcctgacgcagggctccgtggtggcgcttgacggcctggccggcgagccgctggatatcctgatcaacggctatctgattgctcagggtgaagtggtggtggtggccgataaatacggcgtacgcatcaccgacatcattaccccgtctgaacgtatgcgtcgtctgagccgttaa

SEQ ID NO: 164364 - DNA, 375 bp, Enterobacter cloacae
atgaaaacccaggcaatagtatcgcaaccttctgccgttcccggctcgcctctgctccaggtgagcggtgcgttgttcggtattattgcctttattcttatcgccgcctggctggcgaagcgctttggcctggcggggaaaaccgccggtgcccgcgggctgaaggtcagcgccagcaccacgctggggccgcgtgaacgcgtggtcatcgtcgaggtggacgatgcgcgcctggtcctgggcgtcacggcgtcaaacatcagcgtgttacataaactgccgcccgcccctgctgtggtggacgagcgtgcagaggcccctgcggatttccagtccgtgatgaagagtttgcttaagcgttccgggagatcctga

SEQ ID NO: 164365 - DNA, 738 bp, Enterobacter cloacae
atgcgccgtttgttatccctgacgcttgcgggcgttggcctgtttgctcccgcggtctatgcgcaactgcccggtctggtttctaccccgctcgcgggcggcggccaaagctggtcgcttccggttcagacgctggtgttcatcacctcgctgacgtttattccggccatcctgctgatgatgaccagcttcacccgcatcatcatcgtttttggtctgctgcgaaacgcgctcggcaccccttccgctccgccaaaccaggttctgctcgggctggcgctgtttttgacctttttcattatgtcgccggtgatcgataagatttacaccgacgcctaccagccgttcagcgaagataaaatctccatgcaggaagcgctggataaaggcgcgcagccgctgcgggaatttatgctgcgtcagacgcgtgaagccgacctggccctctttgcccgcctgtccaacaccggcgagctgcagggaccggaagcggtacccatgcgtattctgctgcccgcgtatgtgaccagcgagctgaaaaccgcattccagattggctttaccatctttattccgttcctgattattgacctggtgatcgccagcgtcctgatggcgctcgggatgatgatggtgccgcccgcgaccatcgccctgccctttaagatcatgctctttgtgctggtcgacggctggcagctgctggtcagctcgctggcgcagagtttctacagttaa

SEQ ID NO: 164366 - DNA, 270 bp, Enterobacter cloacae
atgacacccgaatcggtcatgatgatgggcacggaggcgatgaaaatcgcgattgccgttgccgcgccgctgctgcttgtcgcgctggttaccggtctgattatcagtattctccaggccgccacgcagattaacgaaatgacgctgtcgttcatcccgaaaattatcgccgtgttcgtggcgattatcgtggccgggccgtggatgctgaacctgctgctggactatatgcgcaacctgtttaccaacctgccgtacatcatcggctga

SEQ ID NO: 164367 - DNA, 786 bp, Enterobacter cloacae
atgctgcacttcaccagcgaccagtgggttcagtggctcggcgtctatttttggccgatgctgcgcatcatggcgctgatctctaccgcccccattctcagcgagaaatcgatccctaagcgtgtcaaagtggggctgggcatcatcatctccattatcgtcgccccgtctcttccgccggtggatattccgatcttctcggcgaatgcggtatgggtggccctgcagcaggtgatgattggcgtcgccgttggctttaccatgcagcttgcctttgccgcggtgcgtaccgcgggggaactgattggcctgcagatggggctatcgttcgccacgtttgttgaccctggcagtcatctcaacatgcccgtgctggcgcgcattatcgatctgctcgccatgctgctgttcctgtcgttcaacggccatctgtggcttatctccatgctggtggacacgttccatacgctgccgattggcgaaaatccggtgaacagcaatgcgtttctggccctcacccgcgcggcggggctgatcttcctcaacgggctgatgctggcgctgccgatcatcaccctgctgctgaccgtcaacctggcgttaggtttactcaaccgaatggcaccgcagctttcggtgtttgtcattggttttccgctgacgctgacggtcggaattttattaatgtcattactgatgccacttatcgctcccttctgtgaacatttattcggcgagatattcaacctgttagcggatattgtcagcgaactgccacgtaaataa

SEQ ID NO: 164368 - DNA, 624 bp, Enterobacter cloacae
atgtcaacgatcattatggatttatgcagctacacccggctagggttaaccgggtacctggcaagcagaggggtaagaaagagagacatcaacgatgcacacaccgttgacgaactcgcagccgcttgtgacgaactaaaaccaggcgtggtgtttattaatgaggactgtttcattcacgatccagccaacagtcagcacattaagcaaatcattaatcagcatccaaaaaccctgtttattgtttttatggcgatcgcgaatatccatttcgatgagtatttgttggtccgtaaaaatttattgatcagttctaaatcgattaaacccgagtcgctggatgacattttgggtgattatttgaataaagaagttaaaaatgtaggagcggttaacttacccaccctatcattaagcaggactgaatcaagtatgctgcgaatgtggatggcgggacaaggaactattcagatctccgaccagatgaatattaaagcgaaaaccgtttcatcacacaaaggaaatattaaacggaaaattaaaacgcataataagcaagtgatctaccacgtggtacgcctgaccgataatgtgacgaacgggattttcgtcaacatgcgttag

SEQ ID NO: 164369 - DNA, 189 bp, Enterobacter cloacae
atgaaggtcaacgatcgggtaaccgttaaaacggacggtgggccgcgccgcccgggtgtggtgctggcaattgaagagtttagtgaaggtacaatgtacctggtatcactggaagactacccgctcggcatttggttttttaacgaactggggcatccggacgggatttttgtagagaaagcagactag

SEQ ID NO: 164370 - DNA, 228 bp, Enterobacter cloacae
atgaagaccgataaagagtacagcgataccatcaagcgcgaagtcgaggtggatgtcgatgccctgctggccgccatcaatgagatcagcgagtcagaagtccgccgctcggacgacaattcggaccgcgtcattgtcaacggaagggattatcacacctatcgcgagctggccgaggccttcgagctcgatattcacgactttagcgtgtcggaagccaatcgttag

SEQ ID NO: 164371 - DNA, 801 bp, Enterobacter cloacae
atgccttcactgcgggataccttgctgattttttccgacctggatggctcgttgctggatattcatacctatgactggcaacccgccatgccctggctggacaggctgcaggataaccagattccgatcattctctgcagcagcaaaaccgcggcagagatgctggatattcagcaggatctggggctggaaggcctgccgtttattgccgagaacggcgcggtgattcagcctgacgtgcgctgggacaatatccagcgtcagattagagggatgacgcaccgggatattcgtccgcggatcgagcagattcgcctgcagacgggctttaaattcaccacctttgacgatgtggatgagcacgttattagcgagtggaccggactgacgcgctaccgttcgacgcttgcccgcaagcacgaagcctccgtcacgctgatctggcgcgataccgacgagaacttgcttcagtttgaagaggaactggcgcacagcggcctgaaatgcctgcagggggcgcgcttctggcatattctggacgcccgctgcggtaaagacgtggcggttaactggctgattgaacggtatcgcgagcaggaagacatagaacccaccacgctcgggctcggcgacggtcccaacgatgcgccgctgctcgacagcatggacttcgcggtggtgatcaaggggattaaccgccagggcatcacgctacgggacgataaccccgcgcgggtctatcacacccaacagcccgggcctgcgggctggcaggaggggctggatcatttcctgtcctga

SEQ ID NO: 164372 - DNA, 1701 bp, Enterobacter cloacae
gtgcagcgcgatacctttgttgtaagacaaacttttttgcaatggctgcataagcgtagcaatccggggcggattgttaatctctgttttctgatcgttctggtgttttccacgctcctgacctggcgtgaggtggtggtgctggaagaggcgtacatctccagccagcgcaatcatctggatacggtggccagttcgctggacaggcagttacagaacagcgtcgacaggatgctgttatttcgccagggtatgcatgatgcaatcgagacgccgctggcctttgatgtcctacaggatgcggtgtcacgctttaacaccgtccgcatgctccccacctggcagctcgccgttgataaaaagcgcacccttcccatcaacggggtctcggatgcgttcgtggataaaaccacgcttctgaaccgggacgctgagcgcatcagtcatgaaatttctgccgcgctcgaagtggggtatctgctcaggctggcgtcatcgagagcgcaaacggaagcgcgggtgatctacgtctcccgcgccggttttttcctttccacggatacgccggatcgggcgggtgatattaccgcccgctattataatctggtcacgcagtcctggtttacccagcagtcagagcgtaacaaccgcgcccgcgccgtgcgctggtttatctccacgccttcatcctggaccggggatgaacgcacgatcaccgccagcgtccccatctatttcgatcattactggtacggcgtcgtggcgatggattttacattagacacgatgcagcgtttgctgaccgacgcgacggaagaccggacggagggggagtatcagctgtacgatacccggcttaatatgattgctacctcagcccacgcgggaagtccggttaaccagtttgacgaacgcgaaacggcgcagattgcccaggcgattgaacatgataccggcggcggtatccgcctcgggagccggtttatcacctgggaacggctcgatcacttcgatggcgtcgtcctgcggatccacaccctgcacgaaggggtgcaggacgacttcggcagtatcagcattgtgctggcgctgctgtgggcgctctttaccgccatgctgttgatctcgtggctggtgatccgtcggatggtgagtaacatgtatacgcttcagcactcgctccagtggcaggcctggcacgatccgctgacccgattgaataatcgcggcgcgctgttcgaccgcgcaaaattgctggcggaaacctgtcgtcagcagtctctgccgttctcggtgattcagatcgatctcgactattttaaaaacatcaacgaccgtttcggccatcaggccggtgataaggtgctttcccatacggcaggcgtgattgccagcgcgttacgcaagaatgacgtggccggacgcgtcggtggcgaagagttttgtgtggtccttcccggtcttggtctggaggaggcgagaggcgtcgccgaacgcattcgttgccgaatcaacagtaaggagatcctggtgaagaagagcacaaccctgcgcatcagcgcgtcactgggcgtcagcagcgcggatgaaacgggcaattacgattttgaacagctgcagtccgtggcggacgcccggctgtatcaggccaagcagagcgggcgtaaccgggtcgtgtggcgggatcaggacaggaaatga

SEQ ID NO: 164373 - DNA, 183 bp, Enterobacter cloacae
atggtctttttggtcagtgatgaagttaagcctaaaaagggcggcccacgtatgatcgtcaccgggtattccagcggaatggtggaatgccggtggcacgatggctatagcatcaagcgggaagcattccgtgaagatgagcttcagccgggggacgggcagcacaaacgggacaaggcttaa

SEQ ID NO: 164374 - DNA, 912 bp, Enterobacter cloacae
ttggcaggaagtagcttattaacattgctggatgatatagccaccctactggacgacatttcagtgatggggaaactggcggcgaagaaaaccgccggcgtgctgggcgatgatttatcgcttaacgcgcagcaggtgagtggggtgagggcaaaccgtgaactgccggtggtgtggggcgtggcgaaaggttccttcctgaataaggtgatcctggtgccgctggcgctgctgatcagcgcctttatcccctgggccatcacgccgttactgatgatcggtggggcatttctctgcttcgagggcgtggagaaagtgctgcattcctttagcgcgcgcaagcagagcgatacgccggaggtgcgccagcagcgtcttgaagcgctggccgcgcaggatccaaaaaccttcgagcgcgataaggtcaaaggcgctattcggaccgactttatcctgtctgcagaaatcgtcgcgattacgctgggcattgtctctgacgcgccgctcctgaatcaggtcctgatcctctccggcatcgctattctggttaccgtgggcgtgtacggtctggtgggactgatcgtcaagctggacgatattggctactggctggaagaaaagtcgagctcggtggcaagaggcatcggcaaaagcctgctggtgctggcgccctggctgatgaagagcttgtcggtggtgggcacgctggcgatgttcctcgtaggcggcggaattgtggttcacggcattgcgccgctgcaccatgccatcgaacatttctcctccacccagggggccgttatcgcggcgattctgcctacgctgctgaacctggtgctgggctttatcattggcgctatcgtcgttgcggcggtgaagctggttgagaaaattcgcggcacgtcgcactaa

SEQ ID NO: 164375 - DNA, 915 bp, Enterobacter cloacae
atgcgtttccggcaattactaccgctcatcggggcactcttttcgctgtacatcatctggggctcaacctactttgtcattcgcatcggcgtggaaagctggccgccgctgatgatggcgggcatccgcttcctttcggcgggtatcctgctgctggccttcctgatgctgcgcgggaataagcttcccccgctgcgcccgatgctgaatgccgccctgatcggcctgctgctgctggcagtggggaacgggtttgtgacgattgccgagcaccagaacgtcccgtccgggatcgccgccgtggtcgttgccaccgtaccgctgtttaccctctgcttcagccgtcttttcggcatccgcacccgcaagctggaatggctggggattgggattgggctggccggcattgttctgctcaacagcggcggcaacctgagcgggaatccgtggggcgcggtgattatcctgatcggctcgatgagctgggcgttcggctccgtctacgggtcgcgtatcgaactgccgaccggcatgatggccggtgcgattgagatgctcgccgcggggattgtcctgctgctggcctccaccctgacgggagaaaagctgaccgcgctgccggacctgtcgggctttctcgcggtgggctacctggcgctgtttggctctatcatcgccattaacgcctatatgttcctgatccgcaacgtctccccggcggtcgccaccagctacgcctacgttaacccggtcgtggccgtgctgctcgggacaggactgggaggagaaacgctctcgcctgtggaatggattgctttagggatcatcgtgtttgccgtcgtactggtcacgctgggcaaatatttgctgccggcaaaaccggtggtcacgccttgtgaggtggagaaaccgtaa

SEQ ID NO: 164376 - DNA, 492 bp, Enterobacter cloacae
atgacggacgttcacgataaggccacgcgcagtaaaaacatgcgtgccatcggcacgcgtgacaccgccattgaaaagcgcctggccgcgctgctgacgcaggcgggctttgacttccgcgtgcaggatcccgccctggcgggtcgtcccgatttcgtcatcgacgcctggcagtgcatcatctttactcatggctgcttctggcaccatcacgactgctatctgtttaaagtccccgcgacgcgcaccgatttctggctggataagattggtaaaaacgtcgagcgcgacaaacgggatctctcaatgcttattgcgcagggctggcgggtgctgatcgtctgggagtgtgcgctgagaggcagactaaagctgaacgataccgatctgcgcgaacggctggaagagtggatctgcggcggcggtcagaccgcgcagatcgacacgcagggtattcacctgcttacggtttctccacctcacaaggcgtga

SEQ ID NO: 164377 - DNA, 1416 bp, Enterobacter cloacae
gtgaaagagcccgcgcccgcgcaggctgagaaatcaacggcaacggtgcaggccttactgcgccagctgttggatatctatgatgctaaaacgctggccagtctgctggtggcgcacggcgaaagccactggagcccggcgatccttaaacgtctgctgacaagcgagcgagcagggcgtcgcctgagtgaaggcgagtttcgttatctgcaaaacctgcttccgcgtccttctgccgcgcacccgaactatgccttccggtttatcgatctgtttgccggtatcggcggtattcggcacggttttgaagctatcggcggacagtgcgtatttaccagcgagtggaacaagcacgccgtgcggacctataaggccaactggtactgcgacccgcacgagcatcatttcaacgccgatattcgcgatgtcaccctgagccataaaagcggcgtgagcgatgagcaggccgccgagcatattcgtcagacgatccccgcgcatgacgtgctgctggccggcttcccgtgccagcctttttcgctggccggcgtctccaagaagaatgccctcggacgcgcccacggtttcgcctgcgatacgcagggaacgctgttttttgacgtggcgcgcattattgacgcccgtcgtccggccatttttgtactggaaaacgtcaaaaacttaaaaagccacgacggcgggaaaaccttccgcattatcatgcaaacgctggatgagctgggttatgacgtggccgattcagaggacatgggcgcggacgatcctaaaatcattgatgggaaacatttcctgccccagcatcgcgaacgtatcgtgctggtgggtttccgccgcgatctcaatctgaagggggatttcaccctgcgggatattccttctctgtatcccgagcgccgtcctaccgtggccgacctgctggaaccggtcgtcgacgcgaaatttatcctgaccccggtgctgtggaaatacctttaccgctatgccaagaagcatcaggcgaaaggcaacggcttcggttttgggatggtcaacccgaacgatccgcacagcgtcacccgtacgctgtctgctcgctactataaagacggcgcggaaatcctgatcgacagaggctgggacaaagcgctgggtgaaaaagatttcgacgatccgcacaaccagcgtcatcgcccacggcgcttaacgccgcgggaatgcgcccggttgatgggctttgaaacgccgcaaggctacggtttccgcattccggtttcagacacccaggcgtaccgccagtttggtaactcggtcgtcgttcccgcgtttgcggctgtcgcaaaactgctggctccgcgcatcagacaggcggtggcgctacgccagagtgaggccgtcaatgacggacgttcacgataa

SEQ ID NO: 164378 - DNA, 702 bp, Enterobacter cloacae
atggaactggcccggtggcagcatggctttgagcgctggctcaaggaaaatcatcagaacgacgataccgcacatgatatttcgcattttcgacgggtctggatgacggcgcaaaaaatcatggttcaccacacggtcgagccgcgggtgattctggccgcatgctattttcacgatattgtcagcctgccgaaaaatcatcccgaacgcagtcagtcgtcaaggctcgccgcgcgtaagacgagcgacattctgcgccgcgactttccggactttccgccagagcatattgccgccgtcgcgcacgcgattgaggcgcacagctttagcgccgaaatcgcgccgcagagtatggaagccaaaatagtgcaggacgctgaccggctggaagcgttaggtgctatcggcctggcgcgcgtttttgccgtctcgggcgcgctgggcgtgccgctatttgacgcggacgatccctttgccgatgcgcgccccctcgacgatcgtgcatttgccctcgaccattttcagaccaagctgctgcgtttgcctgatacaatgcagacggaaatgggccgcgaactggcacgtcacaatgccgatttcctgatccagtttatggcgaaactcagcgccgaattacacggcgactgcctcgggctggatagccaggtgctgagccacttccgtcgcagtttgcgcaactga

SEQ ID NO: 164379 - DNA, 1143 bp, Enterobacter cloacae
atgaaaagaaaagttctggcaattcttgtacccgcattattaatggcaggcgcagcaaatgcggctgaaatgtacaacaaagacggcaacaaagttgacctgtacggcaaggtcgacgcgcgtcataccttctctgacaaccctggcgacgatggcgatgaaacctatgtacagattggtttcaaaggcgaaacccagatcactaacgacctgaccggttacggccagtgggaatataaaacctacgctaacgataccgaaggcgcgggtgataaatcctttaaccgtctggcatacgctggcctgaaatttggcgaatacggttcatttgattatggccgtaattacggcgtcgtgtacgacgttgaagcgtggaccgatatgctgcctgtatttggcggtgattcctacacctggactgataactttatggttggccgtaccaacggtgttgcgacctatcgtaataatgatttctttggtctggttgatggcctgaactttgcgctgcagtatcagggtgctaacgaaggtgctaacgctaacgaagatcaggaaggcactaaaaacggtcataaagacgtacgcttccagaacggcgacggcttcggtatgtccacctcctatgacttctctggcgatctgtccggcctgagcctgggtgcggcgtactcttcttctgaccgtaccaacgatcaggttgcctacggcaaagccgcagaaagcatcggttttgcgggtggcgaaaaagctgaagcctggaccgttggcgcgaaatacgacgcaaacagcgtttacctggcgatgatgtatgcggaaacccgcaacatgacgccaatcggcaacgttggtatcgccaaccagactcagaactttgaagcggttgcacagtaccagttcgacttcggtctgcgtccttccctggcatgggtttactcaaaaggtaaagacctggacggtaaaggattcaatcaggatctggttaactacatcgacctgggcatgacctacagcttcaacaaaaacttctccacttatgttgattacaaaatcaacatgctggacaacgatgaagcgctgtatgacgcatacggtatttccaccgacgacatcgttggtgtgggcatgacctaccagttctaa

SEQ ID NO: 164380 - DNA, 864 bp, Enterobacter cloacae
atgagcattatgcttaccggttcggtcaaggaaagacggcacgccagcacgatgaatatcgatagattgtccacgctggacatgctgaaagtcattcaccaggatgatgcactcatttctgctgctatcaccccttgtttacagacgattgcccgtgcggtggataacgctgccgcgaccctcaatcacggtggtcgcctggtcattgtcggggcggggccgtctggccgcgtcgcgcaacaggttgccgatgactatgcgccgggcaaaacccctgtgatggccgtaacggcacaagagggggaagggagctacgagcgcggcgtttccgacctgcaggccattaaatttggtgaacacgatatgatgctggccgtgaccgtcagcggaaaaacgccgtgggtctggggagcgatgcggcatgcatggtcgctgggttcgccggtcgccgtgattaccggtgatgcgcaaagtgaagccgcgcagctggcgagtatggttatagcccccgaactgggtgccgatgtggtggccggctatctcaacaccaaagcggggatcgcgcaaaaaatgatcctctcgatgatcgctaccgggctggccgttagaaccgggcgcgtatacagcaacctgcgggtggatcttgaggcaagcaacaccaaatgggccgaacgtcaaatcgccattgtaatggaagcggggggatgctcccgggcggaggcaaaagcggcgctggagagctgtaaccatcactgtaaaacagcggtattgatggtgctgacagggctggatgcgtggaaagctcatgagctgctggcgcagaataacgggtttatccgcgtggcgctgcaggaagcgccgtaa

SEQ ID NO: 164381 - DNA, 1617 bp, Enterobacter cloacae
atgagcgatttgcagcctttccttccgacgcgcaagcgccccatgaaactcaatacgctggtcacgctgatggtgtgcgcgattatcggttcagttctgctggtggtttttgcgctctattcggtgcagatcacccgcgcaacgcgcgatgatgtcaaagacaccgcgctcggcattgcccgcaccctcgccgacagccccgagatccagcgcggcctcatgcaggcaccgcaggagaacattattcagcccatcgcccaggcggtgacgaagcgaaacgatctgctgttcaccgtggtcactgatatgcgcgggatccgctactctcatccgaatgaggcgctgctggggctacattttatcggtgacgatttaacccccgcgctggaaggcaaagagaacgtttcggttaaccggggcgcgctcgccgaagcgctgcgcgtttttacgcccgtctacgacgcgcagcacgagcagattggcgtggtggtcgtcggaatctccctgaataaggttgaagagcagatcgctcgcgggcggctaaacgccgtctggaccattttgttcagtatttttatgagttctatggcgatttggggtctggtgcgggttctgaagcgcattctgttcgggctcgaaccctacgaaatctccgccctgttcgaacagcgccaggcgatgctgcagtcgctccgcgagggtgttctggccgttgatatacacgggcgcgtgacgatgattaatcagaccgccagagaaatattgcttctccccgccggcaagcagaccgaaaacaccagcgcgcccctgctggccagcctgcgtgacgtttcgaagacgggcgtcgcacgccaggatcaggagatcagctgcaacggtcggctattgctgtgcaacatggtccccgtgaaaagtcaggatcgggtgatcggcgccatcaccaccttccgtgataaaacggaagtcagccagttgatgcagcgtctggacggcatggttaactacgttgatgccctgcgcgctcacacccacgagtttatgaataaactgcatgtgatactcggcctgctgaatattaagcgctacgacaagctggaagagtacattctccagacggcacatcattaccagacggatatcggtacgatacagagcaaggtaaaatccccggtggttgccgggttcctgctgggtaaaatcaaccgggcgaaagaagcgggcgtcaccctgacgctggcggatgaaagccagataccggataccgcaagtgaagagcaggtcgcggtgctgatcaccgcgctgggcaacctcattgaaaacgcgctcgacgcgatggaaggacagcaggagggcgagatcggcctgctgctgcattatcagaatggctggctcagctgtgaagtcagcgacgatggccccggcattgatcccactcagctggagtctatttttacaaagggcttctcaacaaaaggtgaaaaccgcggcgttgggctgttcctttctcgccagcagattcagaaccttggcggcgatatctccgtcgagtctgagcccggcgtatttacccaattttttgttcacatcccctgggatagcgagaggaaaatcgcgtga

SEQ ID NO: 164382 - DNA, 720 bp, Enterobacter cloacae
gtgataaatgtgttaattgtcgatgatgacgccatggtagccgacctcaaccgtctgtatgtcaaccgtgttgaaggctttagctgctgcggcgtcgcctccacgctaagccaggccgaggccatcattaataaccccagccagcccgtcgatctggtgctgctggatgtctatatgcagcaggataacgggctggatctgctgcccgtgattcgcgcatccggccgcccaatcgacgtgatcatgatctcctcggccgccgacgccgcgacgatccagacctccatccattacggcgtggtggattatctgataaagccgttccagttcccgcgctttgaagaggcgctgaacggctggaaggccaagcacagcctgatggggtcgcaccagtattacgagcaggcggacgtcgaccgcctgatccacggcggggcgccggaactggcggacagcaaaaagctgccgaaagggttaacgccgcaaacgctgcgcacgatttgccagtggattgacgctcacccggagacggagttttccaccgacgatctggcaaacgcggtcaatatttcccgcgtgtcctgccgcaaatacctgatctggctggcgcaaatcaatattctgttcaccagcattcactacggcgccaccgggcgtccggtgtatcgctaccgtctccagccggagcaaacgggcctgctcaagcaatactgtcagtaa

SEQ ID NO: 164383 - DNA, 963 bp, Enterobacter cloacae
atgcctgatagccatcgcgtttacagctactccgccgttctgatgggctcgcccatcctcctgaaactcttctcccatgacgaagccctcgcgtcccgcgtgtttcgtctgatcaaacagtacgaagatctgctcaccgttaaccgcgcgcactcgcaggtgatggacattaacgatgcggcgggccagcatccggtcaccgtcagtcggccggtgtttgatctgatccgctgtgcaaaagcggcaagcttgctcaaggacagcgcctttaatctggcgatcggtccgctggtgaagcgctggaaaattggctttcagggggacagcgttccgcctgccgatgaaatcgcgtcgctgctggcgataacccggcccgaggatgttctccttgatgaggccagcagcagcgtgtttctgatcagagcggggatggagatcgatctgggggcgattgccaaaggctatatcgccgaccgggtgcgggattacctgcataaagagggcgcggagctggggctgattaacctcggcggcaacattcagacgttaggctcgccggaagggggctggagcgtcgggctgaaaaaaccgttcgccggagatgcgctgatcggcacgatgatcgttgagaacgtgtccgtcgtcacgtcgggaacgtacgagcgctattttgaacaagacggcaaacgctatcaccacattcttgatccgcgcaccggttacccgctcgataacgaactggacagcgtcaccatcatttcgaaagattccatcgacggcgatatctggaccacgctgatgtacggcatgggcgtggagaagggctgtgccgcgctgcgtgcgcgccccgacattgaggccatctttgtgaccaaaacaaaagaagtggtgttctcttcagcacaccacttccgctttaccctgctggatgatacctaccgcgttactgacagtattgcttga

SEQ ID NO: 164384 - DNA, 2781 bp, Enterobacter cloacae
atgagcactaacgaacgtattcttagccccttcacattaccgaatggcactgaactaaaaaaccgtttgttaatggcccctatgaccacctgcaccggctattacgacggcaccgtcaccagcgaactggtggagtactaccgtgcccgttccggaagcatcggtaccattattgtggagtgctgcttcgtcgacgatctcggtctcgccttcccgggcgcgatcgggattgataatgacgagaaaattgccgggctggcgaaaatcgcggaggcgatcaaatccaaaggatctaaagccctgctgcagatctaccacggcggccgcatggtcgacccgaaactgatcggtggccgtacgccggttggcccaagcgctgttgccgcgccgcgtgagggcgcagcaacgccagtggcactgactggcgaagaagtcgaaggcatgatcggcaagtttggtgaagcggtgcgccgcgccatccaggccggcttcgacggcgtggaaatccacggggcaaacacctatctgattcagcagttctattcgccaaactctaaccagcgcgatgacgagtggggcggcagccgcgacaaccgcgcgaagttcccgctggcagtactggatatcacccacaaaatggtgcgccagtacgcggacgacgcctttattattggctaccgcttctctcctgaagagcttgaagtgccgggcatccgctttgaagacaccatgtacctgctggaaaaactggcggctcgcggcgtggactacctccacttctccgtcggcgcgaccctgcgtccttccattgttgacacccaggacccgacgccgctgatcgaaaaatactgcgcgatgcgttctgaaacgctggctcaggtaccggtgatgggcgtgggcggcgtggtgaatgccgccgatgccaatgaagcgctggaccacggttacgacctgattgccgttggccgtgccaccatcgcttacccggactggaccgaccgcatcgcggccggggaaaacctggagctgtttatggacagcacccagcgcgaggcgctgaacattcctgagccgctgtggcgcttctcgctggtggaagcgatgatccgcgacatgagcatgggcgaatcgaaattcaaaccgggcatgtttactgagaaggtgcaggacgacgcgaacgagctggtgattaacgtcagtctggaaacggaccgcattgcagacatcgagctggcctctggcccgagcgaagacgttgagtttgtcaccagctttgaagagatccgcacccgcattctggatgccaacaccccgcacgttgatgccatcaccggcgccaccagccagagcgaggcggtgaagaaagcggtctctaaagcgatgctgaaatccagcaaagcgctggccgcggaagagggcgttgacccgaacgaaacccgcagcgtggacgtggtggttgtcggcagcggcggcgccggtctggcggcggcgattcaggcgcacgacgaaggcgcgagcgtgctgattgttgagaaaatgccaaccatcggtggcaacaccattaaagcctctgccgggatgaacgccgcagaaacccgcttccagcgcgtgaagggcattcaggacagcaaagagctgttctaccaggaaagcctgaaaggtggcggcaacaagaacaacccggaactgctgcaccgcttcgttgagaacgcgccgcaggcgattgaatggctggcaacccgcggcatcatgctgaacgatatcaccaccaccggcgggatgagcattgaccgtacccaccgtccaaaagacggctcagcggtcggcggctacctgatcagcggcctggtgcgtaacgtcaacaaacgcaatatcgaggtgatgctggatacctccgtcagcgacatcatcttcgaaaacggcgaagtgaccggcgtgcgcctgaccaccgaagagaacgaaaccctcaccgtggcagcgaaaagcgtgattgtggccaccggtggcttcagcgctaacagccagatggtggtgaaataccgccctgacctggaagggttcgttaccaccaaccacaaaggggcgaccggcggcggcatcgcgctgctggagcgtatcggggcaggtacggttgatatgggcgagatccagatccacccaaccgtagagcagaaaacctcgtacctgatttccgaatccatccgcggcggcggggcgattctggtcaatcagaaaggggaacgcttctacaacgaaatgtcgacccgcgataaagtctcggcgtcaatcatcgcgctgccggagaaatacgcgtacatcgtctttgacgagcatgttcgcgccaaaaacaaagccgcggatgagtacatcgctaaaggcttcgtgaccagcgccagctcgccaaaagcgctggcggaagcgctcggcatggattaccacgctttcctggcgaccctggaacgttacaacggtttcgttgaaaaacagcacgatgacgactttggacgtaccaccgcgctgcgtgcgccaatcaatgaagggccattctacgccattcagattgcaccgggcgtgcaccacaccatgggcggcgtgaccatcaacaccgaaacctgcgtgctggacagcaaccacaacgtgctgccaggtgcgtttgcggccggtgaagtggtcggcgggatccacggcggcaaccgtatcggcggtaacgcagtggcagatatcatcatttttggtacccttgcaggacatcaggcggctctgcgttcgaaaaagatgtaa

SEQ ID NO: 164385 - DNA, 1509 bp, Enterobacter cloacae
atgaatacaaaaactgctgtaacgccccctgtggcgaaccaggcatcaaatggaaacgcaaaacgtctgctgatgatggcactgcccgtcatcgtcgccgtactgctgctgtttgttccggtaccggaaggcctgccaccttacgcgtggcactatttcgctatcttcgttggcgtgatcgtcggtttgatcttcgaaccgctgccgggcgcggtgatcggtctcaccggcgtggtcgccattgcgctgtgcagccagtgggtgctgtttagccctgaacagctggctgatccgaaattcaagctggcgggcgcctcctttaaatgggcggtgagcgggtttggtaactctaccgtctggctaattttcggtgcctttatgttcgccgcaggctatgacaaaacccgcttcggccgccgtctggcgctgattctggtgaaatacctcggccgtcgcagcctgacgctcggttacgcgattacgtttgctgacctgctgctggcaccgttcaccccgtccaacaccgcgcgcagcggcgggaccatctacccgatcatcgctaacctgccgccgctgtacggttcaaaaccgaacgacccaagcgcgcgtaagattggttcgtatctgatgtgggtggcgatcaccgcggcctgtatcaccagctcaatgttcctctccgcacttgcgccgaatctgctggccctggcgctggtgaaaagtacggttggaatcgatatctcctgggggacctggttcctcgccttcctgccgctgggtatcctgctgattctggccatgccgctgctggcctactggttctacccgcctgaagtgaaggtaaacaacgaagtgccgctgtgggcgacccgcgaactggaaaaactgggcaaactgtcccgcaatgaaatccttctgctggtgttcgtgtgctgtgcgctgctgatgtggatctttgccgccgcgtggattgaaccggctatggctgccctgctcatcgtcggcctgatgctgtggaccggcgtgctggagtggaacgacatcaccggtaataaagccgcgtggaacaccttcgtctggttcgccaccctggtggcgctggcggatggcctctcctctaccggctttatcagctggttaggtaaagaaggcggtctgctgatgagcggtatctctccgggcgtagcgaccatcgtgctgctgctggcgttctacctgctgcactacctgtttgccagcaccaccgcgcacaccacggcgctgctgccagcgatgctgaccatcgcctccaccatcccgggcatgaatatggaagtgttcgttctgctgatggtgacctcgctgggcgtgatggggatcatcaccccgtacggcactggcccaagcccgatctactacggtagcggctacctgccaaccaaagactactggcgcctcggtaccatcttcggtgccatcttcctggcggccctgctgctgattggctatccatggatgtccatgatgttctga

SEQ ID NO: 164386 - DNA, 1650 bp, Enterobacter cloacae
atgtcaaacaaaccgtttatctaccagaaccccttccctcttgcgcatgacgacaccgaatactacctgctgaccaaagagcacgtttccattgccgagttcgaaggccaggaagtcctgaaagtcgagccagaggcgctgacgctgctggcacagcaggcgttccacgatgctgcgtttatgctgcgtccttcccatcagaagcaggtcgccgccattcttaacgacccggaagccagccagaacgataagtacgttgccctgcagttcctgcgtaactccgaaatcgccgctaaaggcgtgctgccaacctgccaggataccggcacggcgatcatcatgggtaaaaaaggccagcgcgtctggaccggcggcggcgatgaagccgcgctgagtcagggggtgtacaacacctacatcgaagacaacctgcgctactcccagaatgcggcgctggatatgtataaagaggtgaacaccggcaccaacctgccggcgcagattgacctctacagcgttgacggcgatgagtacaaattcctgtgcatggctaaaggcggcggctctgccaacaaaacctatctctaccaggaaaccaaagcgctgatcaccccggcgaagctgaaaaactatctggttgagaagatgcgtaccctggggacggcagcctgcccgccgtaccacattgcctttgttatcggcggaacctcggcggaagcgacgttgaaaaccgtgaagctggcctctacgcgctactacgacgccctgccgacggaaggtaacgaacacggccaggcgttccgcgacgttcagctcgaacaggagctgctccaggaagcccagaacctcggcctcggcgcgcagtttggcgggaaatacttcgcccacgacatccgcgtgatccgcctgccgcgccacggcgcctcctgccctatcggcatgggggtctcctgctccgcggaccgcaacatcaaagcgaaaatcaaccgtgacgggatctggattgagaagctggagcacaacccgggccagtacattcctgaatcgctgcgccagcagggtgaaggcgacgtggtcagcataaacctgaacaagccgatgaatgagatcctggcgcagctttccgcacacccggtctctacccgcctgtcgctgaacgggaccatcatcgtggcgcgcgacatcgcccacgcgaagctgaaagagctaatcgacaacggtgaggaactgccgcagtacgtcaaagatcacccgatctactacgcgggcccggccaaaacgccggaaggctacgcgtctggctccctcggcccaaccacggcagggcgcatggattcgtatgtggacttactgcagtcccacggcgcgagcatgatcatgctggcgaaaggcaaccgcagccagcaggtgacggacgcctgccataagcacggcggcttctacctgggcagcatcggcggcccggcggcggtgctggcgcaaaacagcatcaagagcctggagtgcgtggcgtatcctgagctaggcatggaagctatctggaagatcgaggtcgagaacttcccggcgtttatcctggtggatgacaaaggcaacgatttcttccagcagatccagaaccagcagtgtaaaggctgttcacagcgctga

SEQ ID NO: 164387 - DNA, 894 bp, Enterobacter cloacae
gtggcgggactgatttactcttttgcacagctcgaggcatttaccgccgtggccgagaacgggagcctgagtaaagccgcggtggcgctgaagaaggaccgaacgacgcttcgcgatctggttgattttcttgaggatgggttgggctacgcgctgtttattcgcgacggccgcaccctgcggctcacgcccgaaggggaactgcttcagcgccaggcgcacctcctgatgcggcaggtaaaagcctttgaggcgtttgccagagaggtgccgcacggtgccacgcaggacctgacgctggtctacgatccttttacgcccagagcctttctgcacggggtgattgctgaaatggcggtgcgaaaaatccgcctcagccttatctgcgcctcgcgggatgaatcggaacggctgctggcgaataacgacgcggatctggccatctgccaggcacgcaaccgcagcgtgggcaacgacatggagtggcgtgccctgggggccatcgagatggatttttatgccgccagcgggctgtttgcggacagtgcttcccctctgtcgctgctcgatctctccctggtacctcaggtcatcatgcaccccgcctcggacgagccggtggcgcgccgcctgcagatttcggggcataccctctttaccaatgaaccggagatgctgcgcggtctgctggagcgcggctgcggctggggattcttaccgacgcattttcacgccgggcagtggcaaaacgtaaaaaggctgcacaccgaagtgggcagccaggggattggtcagacgatggtcaccatctggaagccggggagcgacaagcgcagcacaatcgctgaaacgctgtcgctcttgccggacgtatggaagcaatcagcgctgtga

SEQ ID NO: 164388 - DNA, 1299 bp, Enterobacter cloacae
atgaaaaacagaaaagtaaaccatgccctgctggcgggccttgtcatcagcaccctgctctcccctgcggcagtggcggcctgtaaaggcaccgacctcagcgcctgccctgcccccttcgacaccacgctgcctgacacccataagatgctcacctggagtcaggccgatcgggtggtgggctttcgcaatgactaccgcaactacaccggggatgttttccaccacggtaacgctgtgccgctggaaatgtcggacaagccgctcacggacgcacactatcaggtcaacggcaggcgctacggccttaaggactacctccagcggcagaacgtcagcggcatgctggtgctgaaggacggcaaaatcgcctggaagtatcttggagagggcaataccgactcgacgctctggacctcgcgctcggttgggaaatcggtggtatcggcgctggtgggcgtggccctcaaagagggaaaaattcactcgctcgacgatcggatcacgcggtatgaacccgacctgaaaggcaccgcgtgggacggcgtgacgcttaagcagcttatcacccatacctccggcgtggcctggaacgaggattacaccaaccctaaatccgactttgcgcagctcaccgagtgcgaggcgaagccgggtacctatgactgcgtgcgcaagctggtgaaggggctgcgcagggcgcacccggccggagagagctggtcttactcatcgggcggcgcctggctgctgggtgacgtgctggagcgggccaccggcatgacgctcgcagcctatctggagaaaagcatctggcagccttacggcatggcgagcgacggcgtgtggcatgcctacagcaaaggccagcacgacgtcggcgcgcacggctttaacgccacgctggaggactggggacgcttcgggcaatttatcctgaacaacggtacgttaccgaacggtaagaccatcctgccggaaaactggatccggcagtcgtcagactggacgaaggccaaaggctcggtctcagacgcccatcccgaggggctgtacggctatcagtggtggaacaatgaagtgcccgccaacgccgcgggcgtagagccgacggcacaggattcgctgaaaggttcgctctgggcgctgggcattttcggacagatgatcgtggtgaacccgaaggaaaatctggtcatcgtccagtggtctacctggccgcaggcggaaccgtccttcagcgcccagccgctggaagcctctctgatgtttagcgcgattgccagggcgctgcgctaa

SEQ ID NO: 164389 - DNA, 1314 bp, Enterobacter cloacae
atgttttcctcaacctcacctgcaaccgtacggtcgaaggcgggcgcgatacttcgcgtcacgtccggcaactttcttgagcaattcgatttctttctgttcggcttctatgccacctacatcgcccacacgttcttcccggcgagcagtgaatttgcgtcgctgatgatgacctttgccgtcttcggcgcgggctttttgatgcgtccaatcggcgccatcgtgctgggggcttatattgacaaggttggccgccgcaaagggctaatagtgacgctttccattatggcggcaggcaccttcctgatcgtgctgatcccgtcttatcaaagtattgggctttgggcgccgctgctggtgctgacgggccgtctgctgcagggcttttccgccggcgcggagcttgggggcgtgtcggtctatctcgcggaaatcgccacgccgggccgcaagggcttttacaccagctggcagtccggtagccagcaggtcgccattatggtcgccgccgcaatgggctttgcgctgaacgcggtgctggaagagagcgccattcgcgaatggggctggcgcattccgttcctgttcggctgtttaatcgtgccgtttatctttttcctgcgccgcaagctggaggagacggaagagttcagcgcgcgccgccatcatctggagatgcgccaggtctttaccaccctgctcgcgaactggcaggtggtggtcgcgggcatgctgatggtggcgatgaccaccacggccttttatctgatcaccgtttatgcgcccacctttggcaaaaaggtgctgatgctgagcgcgtcagacagcctgctggtcacgctgctggtggcgatctctaacttcatctggctgccggtgggcggtgccctgtcggaccgttttggccgcaagccggtgctgattgccatgaccctgctggcgctggcgaccagctacccggccctgacgctgctggcgaacgcgcccagcttctcgatgatgttgagcgtgctgctgtggctctccttcctctacggcctctataacggcgcgatgatcccggcgctgacggaaattatgccggctgaagtgcgcgtggcgggcttctcgctggcttacagcctggcaacggcggtgttcggtggctttaccccggtgatgtccaccgcgctgattgaatacaccggcgacaaagcctcgccgggctactggatgagcttcgccgcggtatgtgccctgctggcgacgctctacctctaccgccgccgcgcggtatcgctgcaaaacaccgtcaagtcagagggggcaatatga

SEQ ID NO: 164390 - DNA, 789 bp, Enterobacter cloacae
atgaaacgcacgtctcgctataccaccagcgcgctggtgctgacgttcctgagcgtcaatgcctttgcccaggacgtgaaggtgatgatctcaggcggttttaaagccgcccttgaaaagctggccccggaatatgaacaacggaccggggataaaattgtgatcatccccggtccctcaatgggcaatacgccgcaggcgatcccaaaccgactggcgcgcggcgagaaggccgacgtggtgattatggtgggcgatgcgctggagaagctcgaaaaggccagccagacccggccgggttcgcgaacggaacttgcggactctcccgttggcatggtggtaaaaaaaggagcggatataccggacatcagcagcgacgcgaaactgcgtgaaacgctgctgcaggccagctccatcgcctactctgacagcgccagcggcaggtacgtcagccaggggctgttcaaaaagctgggcattgaaaaggaggtcgccgataaagcgacaatggtcgagcgcattccggtcgcgtcggaagtggctaaaggaaaatacgccgtcggtttccagcaggttagcgagcttctgccggttcagggcgtcacctttgtcgggaaaatccctgacaatgtgcaatacatcacgcgcttcgcgggtgcggtcactcgtcacgctgaacaccctgacgaggggaaagcgctgttgacctatctcgcctcaccgccctcacgcgccgtcatcgagaagacggggatgatccccgttacgtccggcgatactgctcggtga

SEQ ID NO: 164391 - DNA, 900 bp, Enterobacter cloacae
atgcccgtgaattttgaccttaacgatctttatgctttcagagcgttagtggaatacggtaacttccgtgtcgccgctgaatctatctgcttatcccagtcggcgctgagccgcaggattgaaaagctggaagccgcgctgggaaacaggctgttcgatcgcaccacccgccgcgtggcgctgacgctctacggacagaactttgccgagcgctccgcgctgctgctcgacagcgtggagtcaatgctcgcggatgtcgataaggccagcgaagagcggacggggctgatcgcggttgccgcggtaccttccgcggcctgttactttatgcccgacgtgatccggcgttttcaatctcggtatccgcgcgttcgcatcaagctcatcgacagcagcgcggggaatgtgattgacgccgtggcccgcagccaggcggatttcggcatctgcttcgcaggaaacctgccgtctgaaatcgagtttttcccgctggtggaggatgtctacgtcgcggcgtgccgaaaggatcaccccgtggcgcagaagagtcacctgacgtggcaggcgttttatcagcaggactatatctccctcgataaaacgtcaggcaaccgcaacctgctcgatcggatgctgggggatattattcccgggcgccccagcgtctgcgagacacgtcacgtcaccacgatgctcggtatggtagaggcggggattggcatcgctgccgttcccgccatgtcaatgccgacctctgagcacacgatgttgacgcatctgccgctggtggcgccggaagtgaaacgcaccgttgggcttatccggcgccgggggcgcatccagtcttacattgcggctgaactggaaaagcagatcaccgagcagtatcgccggacgtaa

SEQ ID NO: 164392 - DNA, 1530 bp, Enterobacter cloacae
ttgacggagctacgtctgatcctgggcgaccagcttaatccgcatcacagctggtttgatacctgcagtccgaacatcatttacgtgatgctggaactccgggcagaaaccgcctatgtgcttcatcacgcccagaaagttatcgctatcttcgccgccatgcgcgcgtttgcctctgcattaaaggagaaggggcatcgggtgaggtatgtccgactttctgacagctcgaaccgcggcgcgctggaagacaatctcaacgcgcttgtcgcgcattacggcgcgggcagggtgatatggcaggagcccgacgaatggcgtcttgatacgcagctgcaggcgtgggcgaaaacggtctccgttgaaacggcctgcgtcagcagcgagcatttcttcaccactcgggaacaggtcagcgcgttttttgcgtcgcgcaaaagctggcgaatggagtacttttaccgggaaatgcgtcgtcagcacggcgtactgttgacgtcagcaggcgagccggaaggggagaaatggaatttcgatgctgaaaaccgcaagcgctggtccggcgagcctcccgcgccgggggacgcgcgtccttgccacgatcgttccgtcttatgggcggagatccagcgctgcggcgtaacgaccttcggcgaaccgcaggccgacaattttcgctggccgctcaaccgtgcggaagccaaagccaggctggatgaatttatcacgcacgtgctcccgcagtttggaaactggcaggacgcgatgcacacggaggaaccttttcttttccattcgttaatttcatttgcgctgaatactaagatgcttaatccgcgggaagtggttgccgccgcccagcaggcgtggcgtttgggccacgcgccgctgcctgccgtcgaagggtttatccggcaaattctcggctggcgggagtatgtgcgcgggatctactggtcgcagatgcccggctatcgggagctgaatgccttagaccagcacgccccgctgccggactggttctggacgggcaagacgcagatgcgctgcctggcgcatgccgttgggcagtcgctcaccgaggcttacgcccaccatatccagcgcctgatggtcattggaaactttagcctgctcagcggcctgtcgccgcaggcggttcatgaatggtatctgggcgtctatattgacgcctttgagtgggtggaactgcccaataccctcggcatgagccagtttggcgatggcgggttgctggccagtaaaccctacgtctcaagcgcgtcatatattcataagatgagtaattactgtcaggggtgccggtatcagcacaaccagcgtaccggagagcaggcctgccccttcaatgccctttactgggatttctttgcgcgcaatcaggcgcgtctcggtaacaatccccgcctgggcattgtctttaaacagcttgcggacatgacggaagaggatcggcaggccattaccgaccgcgccgggtacgtccgtctgcatctcaacgacctctga

SEQ ID NO: 164393 - DNA, 798 bp, Enterobacter cloacae
atgataaagtggccctggaaaacgaatgaggctggccgggatgtggcgctgccatgggatgacgcgctgacgatccctgttctggctaatctaaacccggatgaacaatcgaaactggttcagctggcggatcgttttttacagcaaaagcgcctggtgccgctgcaggggtttgaactcgatcccctgaaaaacgcccgcatcgcgctgcttttctgtctgccggtgcttgaactcggcattgagtggctggacggtttccacgaagtgcttatctatcccgcgccgttcgtggtggatgatgaatggcaggacgatattgggctggtgcataaccagcgcgtggtgcagtccggacaaagctggcagcaagggccgataatcctcaactggctcgatattcaggactcgttcgacgcctccggttttaatctgattatccatgaagtggcgcacaagctggatacccgcaacggcgatcgcgccagcggcgtcccgcggatcccgcttcgcgaggtcgcgggctgggagcacgacctgcacgcggcgatggataacatccaggatgaaatagacctggtgggcgaaagcgcggccagcattgacgcctatgcggcaaccgacccggctgagtgctttgcggtgctctccgaatacttcttcagcgcgcccgagctcttcgcgccccgtttcccggccctctggcaacgtttctgccagttttatcagcaggatccgctacagcgcctgcggcagaatgaagcgtccggcgggcattcgtcccgccagtttcattaa

SEQ ID NO: 164394 - DNA, 1212 bp, Enterobacter cloacae
atgcgcgctgactctgaaaccttgacggaaaacgtcacttcaaaagctaactggcccctggcgctatctgcggggttactcggcatcgggcaaaacggcttgctggtgatgctcccgcagctggtcaccctgaccgggctgtcgctctcggtctgggccgggctgttgatgttcggatcgatgctctttttaccggcctcgccctggtgggggcgtcagagcgagcgaaaggggtgtaagtccgtcatgctggcctcgctaagcggctatctggccagtttcgtcgtgatggcgctggtggtctgggcgatggcggccggaaggctggatacggtctgggggctggcggggcttatattctcgcgcctgctctacggactgacggtctcggggctggtgcctgcggcccagacgtgggcgattcagcgtgcggggctggagaaaagaatggcggcgctggcgacgataagctccggcctcagctgcgggcgtttgctcggcccgccgctggcggcgctgatgctcagcgttaatccggtggcgccgctctggctgatggcggttgcgccgcttatcgctctgctgctggtgcttcgtgaagtcgctgacccgccgctgccgccggtagcccaccaggcaacccgcctgcaggcctccatgctgccgttcctgctgctggcgctgctgctggcggcgctggtgagcctgatgcagattggcctgtcaccgcatcttagcccgttgctggacggtaacgcccgggagatcagccatcatgtcgcgcttctgctgagcctggccgcgctggccacgctcgcggcacagtttctggtggtccgccctcagcatttcagcccggtgacattgctttgcatcgcggcggtgctgatggtggccgggcttgggctgatggctgtcgccggtttagcgctgttctacgtggggattgttatcacgtcactcggggcggcgatggccacgccgggctaccagctgctgctgaacgatcggctaaccacggggaaaggggcgggcgtcatcgccaccagccacacgttaggctacggcgtcagcgcgctgatggtgccggtcgtgacgcgcttttacggggagcagtctttaacggtggccgcgtggggaatggcattgctgtttttagccctgagcataggggtatggtcaaccgagcgtacccctgctgaaaaagcttaa

SEQ ID NO: 164395 - DNA, 1743 bp, Enterobacter cloacae
atgcgtgctctgctccgcgccgccggtacagacgttgcagcccagtgctttttaaacgccctgttgcgtgaaacgaaggactggcgctatctccccgctaccgatgcggatgcgctatctgagatccatatcccgctttcccaaacccaggcgcttcgggtgccggtacgctatttctcacccacccagcatcatcagtaccgtttcccggcaacgctgattcagagcaacagcgacaggggtgacgccgtcactttccctcaactggttgatttaattcttgaaaaaccgtccgtaaaaggctcgctggatgccgatacgctggcgcgttttaagcagcgcgttctcgaaagccatgcccacacctggcaggcgattgatttacgccacagttgggcaaccctgcgcgataagccgctgacgtttgccgaagcggaacaggcgctgctggtcggccatgcgtttcacccggcaccgaagtcccacgagccgttcaacgaagccgaggcgcgccgctatttgcccgatttcgcctcccgcttcccgctgcgctggtttgccgttgagagcacgctcgttgccggcgacagcctgaacgtctccctgcgtgagcgtctgctgcgctttgcggcccagagcgcgcccgagctgctcggccactttaccgacacccgctggctgctgccgatgcacccgtggcaggccgactatctgctggagcaggactggtgccagcgtctggtggaaaacggttcgttgcaggacctgggtgaagcgggcgcacagtggctgcccaccagctcctcccgctcgctgtacagcgagaccaacagcgacatgattaagttctccctcagcgtgcgcctgaccaactccgtgcgcacgctgtcggtgaaagaggtgaagcgcggcatgcgcctggcgcgtctggcaaaaacggaacgctggcaggatttacaggcacgctacccgaccatgcgcgtgatgcaggaagacggctgggcggggctgcgtgacgaaagcggcactattcaggaagagagcctgatggccctgcgcgtcaatctgctgttcgatacgccagacacccagaccaacgtgctggtgagcctgacgcaggccgcgccggacggcggtgacagcctgctcgccgcggcggtgcgccgtctgagccagcgtctggatctcccgctcgcccaggccgcccgctgctggctggacgcctactgcgaccgcgtattgcttccgctgttcagcgccgaggcggactacggtctggtcctgctggcgcaccagcaaaatatcctcgttgagatgcagcaggatttcccggtcgggctgatctatcgcgactgccagggcagcgcgtggaccgaaagcgctgacgcgtggctgaaagaagctggcgaaactgaggtggaaaaccgcttcggcgagagccagctgctgcgctacttcccttactacctgctgctgaactctacccttgccgtcaccgccgccctcgccgccgccggtttcgacagcgaagagagcctgatgtcccgggtgcgcgacgcgctggcagaactgcgccgcacggcgaagcagacccgctgcctcgactacgtgctcgacagcccgacctggaactgcaaaggcaacttcttctgctacctgcacgatcgcaatgaaaacaccatcgccgatccggcggtgatctatttcgactttagcaacccgttctacaaggagaaggcgtga

SEQ ID NO: 164396 - DNA, 948 bp, Enterobacter cloacae
atggctatcgcgaatatcgtccattccggctacggctttcactgcaccgcaacggatcgcgccctgccgctggcgttgggtctcgacggcagcgcggtgctggagcgtctgaaggggatcccggacggctggctggtggaagccctggatcagctgtttgtggccgcccccgcgctgaccggcattacgttgccgtgggcggactggcaggatgaaccccaggcgcaggcgctgtttggcctggcccacggtgattatctggcgcgcgacgccttctggcagctgccgctgtggctgaagggcgaacgcccgcaggcgagcggcggaatgcagtttgacgagagccgtcaactgtacttcccgctgcgccctcgccgcccgcagggtgaggtgtatcgccgttacgatccgcaaattaagcgtaccctcagcttccgcgtggccgacgtggcgctggacggcgagcgttttacccgctggatgaataacccgcgcgtgaacgccttctgggagatggcgggcccgcaggccgagcaggaaaactacctgcgccgtcagctcgactcgacctactgctacccggttatcggctgcttcgacgatcaaccgtttggctattttgaactctactgggcaccggaagaccgcattggccgccactaccgctggcagccgtttgaccgcgggctgcacatgctggtgggcgaagagaactggcgcggcgcgcagtacatccgcagctggctgcgcggtctgagccactatctgtatctcgacgaaccgcgcaccacgcgcatcgtggccgagccgcgcttcgacaaccagcgcctgttccgtcacctttcctctgccgtttttgacacggtgaaagagttcgacttcccgcataaacgctcgcgcctcattatgagccagcgtcaccgcttcttcagcgaggtgggcctgtga

SEQ ID NO: 164397 - DNA, 1743 bp, Enterobacter cloacae
gtgaacgcgctctgggaaaaagtgaaccgcgagatggtggcgaagatcctcgccgagctggaatacgagcgcaccctgcgcgccgagccgctttcgtcggacgcctggcgcatcaccatgggcaacgcgtcctggcagttttgcgccacgcgcgggatctggggctggctgcatatcgacccggacagcctgaccaccgccagcggcgatgccgtcgaagcggaaagcgcgctgctgcagctggcgacggtgctggagatgagcgacgcgcaaacggcagagcacatggaggacctctacgccacgctgcgcggcgacatgcagctgctgcaggcgcgtgacgcgctggatgcggacgcgctgatccacctcgatccggacgaattacagtgcctgatgcgcggtcacccgaagtttattttcaacaaaggtcgccgcggctgggggctggacgcgctgcgccagtacgcaccggagtaccgcggacgttttcgtctgcactgggttgccgttcagcgagagcatctggtctggagcagcgacgccgattgcgatatcagcgccctgctggcgagcgccatggacaacgccgagcgcgcccgctttgacgcccgctggcaggcgctgggcctcgacgagagctggctgccggtgccgctgcacccgtggcagtggcagcagaagattgccattcatttcctgccgcagctggcgcgcggtgagatggttgagctgggcgagtttggcgatgagtacctggcgcagcagtccctgcgcacgctcaccaacgccagccgtcgtgcgccgtttgacattaagcttccgctgacgatctacaacacctcctgctatcgcggtattccgggcaaatacattgccgccgggccgctggcctcgcgctggctgcagcagcagtttgccaccgacgccacgcttgcccgctctggcgcacaggtgcttggcgaacccgccgccggatatctgtcgcatccgggctatgcggcgctgccgaaagcgccgtaccgctatcaggagatgctgggggtgatctggcgcgagaacccgtcctgctatctgcaggagggcgaacaggcggtgctgctggcggcgctgatggaaaccgataacgccgggcgcccgctcatcgacgcgtggatcagccgttccgggctaagcgccgaagcgtggctggaaaagctgtttgaggcatcggtgatcccgttctatcacctgctctgccgctacggcgtggcgctgatcgcccacggccagaacgtgacgctggtgatgaaggactacgtcccgcagcgcatcctgctgaaggatttccagggcgatatgcgcctggtggatgaagatttcccgcaggcggaaagcctgccgcaacaggtgaaggccgtcacggcgcgcctgagcgcggattacatcatccacgatctgcaaaccggcaacttcgtgacggtgctgcgctttatttcacgcctcacgctgcaaagcggcgtcagcgaaacgcgtttctatcagatcctcgccggggtgctgcaccgctatatggccgcgcatccggagcttgcggagcgctttgcgaaattcgatctgtttaagccgcaaattattcgggtgatcctcaacccggtcaaactgaccttctccgaacacgacggcggcagccgcatgctgccgaactacgtcaccgaccttgataaccctctttttctggcctcccgggagtccgcgcaatga

SEQ ID NO: 164398 - DNA, 1326 bp, Enterobacter cloacae
atgaaaacctatgatttcatcggcattggtatcggcccgtttaaccttagcatcgccgccctcgcagaagggctggacggctttagctcgctgtttcttgagcgcaaaccgcacttttcctggcacccggggatgatggtgccggactgccacatgcagaccagctttctgaaggatctggtcagcgccgtggagccgaccaaccgccacagctttctgaactacctggtgcagcgtaaaaagttctaccgcttcctgaccaccgagcagcgcaccgtttcacgggaggagtttgccgactacctgtactgggcggcggacaacctcaccaacctcgccttcagccagcaggtacagcaggtgagctttgatgagaaaagcggcctgtttgaggtagtgacccagcgcgatcgcttcctggcgcgccacgtctgcgtggggatcggtaagcagatcaacctgccggactgcgtcacgacgcaggacgatagctgcttccatgccagcgagatgatgctgcgcacgccggatctcgcgggcaagcgcgttaccgtcgtcggcggcggccagagcggtgccgacctgttcctgaatattttccgtggcgaatggggccagccgctgagcctgaactgggtctcgcgccgcaacaactacaacgcgctggatgaagccgcctttgctaacgagtatttcacgccggagtacgtggacagcttctccacgctcggtgaagaggcgcgtcgtcagatgctgcacgagcagaagatgacctccgacgggatcaccaccgagtccctgctggcgatttaccgcgccatgtaccaccgctttgaagtgctgcgcgaaaaaccctgggcgcacctgatgccgtcccgctcggtgacggccctgacgcgcctggaaaacggacagcgtctgagcatacagcaccatctcgacggcggccgtgagcagctggagagtgaggttgtgatcttcgccaccggctatcgcgccgtgcagcctgcgttcctggcgccgctgtctcaccgcctgcatctggatacggacgaagccttctgcatcaacaatgatttcaccctcgaatgggacggcccgcagagtaaccgcctgtttgccgtgaatgccgggatgcaccgtctcggcattgccgaaccccagctcagcctgatggcctggcgcgcggcgcgaattctgaatcgcgcgcacgccgacgagccgtttgagctggctaccacccctggcgttatccactggcgaagcaccaccagcccggagaacagccaggtttttaaatcattagcaaaaaccaccgagtactga

SEQ ID NO: 164399 - DNA, 2190 bp, Enterobacter cloacae
atgaaacgttctcatctttgggttttaaatccttgcttgcttgcaatgctttctacctctgcgtgggcggaagaacaaaaggaagaaaatatcgttgtctccgccagccgcgcgcaccgcagcgtggcggagatggcgcagactacctgggtcattgagcgggctgaaattgagcagcaggttcagggcgggaaagagattaaagaagtgctggcgcagctgattccgggcatggacgtcagcagccaggggcgtaccaactacggcatgaacctgcgcggccgctctatgatggtgatggtagacggcgtgcgcctgaactcgtcccgcagcgacagccgtcagctggactctatcgatccgttcaacattgaccgtatcgaggttatctccggtgccacgtcactctacggcggcggcagtaccggcggtctggtgaacatcgtcaccaaaaaaggccagcctgagaccgaagtcgaattccagaccggggctaaaagcgggttcaacagccacaacgaccacgatgagaacgtgtcggcagcggtcagcggcggcaacgataacgcgtccggtcgtctgtcggtgtcgtatcagcgctacggcggctggtatgacggcaacggcgacgaggtgatcattgataatacccagaccggcttacagtattctgaccgtatcgatgtgatgggcacaggcaccctcaatattgacgatcatcaacagctgcagctgacgacccagtactacaagagcgagtccgacggcaagcatggtctctatctcgggaagaacttctcggcggtcacgggggatgcgaccgcgtacaacaaaggtaacctcgattctgaccgcgtgccgggtaccgagcgccatctgatcaacctgcagtactccaataccgacttctggggccaggatctggtcgcgcagatttactatcgcgacgagagcctgacctactatccgttcccgaccctgaccaaaggtgtggtcaccagcatcggcgcgtcgcagcagaaaaccgatttctacggcggcaagctgacgctgaacagcaagccggtggacgatttgacgctgacctggggtatggatgccgaccacgaaaccttcgatgccaaccagcagttcttcaacctgaaaaaagctgcggcgagcggcggcatggagctggataacgcctacaacgtgggccgctacccgggctacagcatcaccaacctcgccccgttcctgcaggccagctatgatattgacgccatcaccctgagcggcggcgtgcgctaccagtacaccgagaacaaggtggacgactttgtcggttacacccagcagcaggccatcgctaccgggaaagccacctccgccgacgcggtgccgggtgggaaaaccgattacaacaacttcctgtttaacgccgggatactcggtcgcctgaccgaacagcagcagctgtggtttaacttctcccagggcttcgaaattccggacctggcgaagtactacggctccgggacctatcagctcagcaacggtcactatcgcctgctgaacagcgtcaacgtcaacgactcgaagctggacggtatcaaggtcaacgcttatgagctgggctggcgctacaccggggataacctgcgcacgcaggttgcggcgtattactcgctctcggataaaaccatcaccatcaacaagacggacatgaccattaacctggaagacgacaagcgtcgtatctacggggtggaaggtcaggtggactatttcttcacagacagcgactggagcacgggcgcgaactttaacgccattaagtctgaaacccgcgaaaacgggaaatgggagaagctgacggtcgacagcgccagcccgtcaaaagccagcgcgtgggtcaactgggcgccgggcgactggaccctgcgcgtacagagcacgcagacctttgacgtctctgacgccgacggcaagaagatcgatggctataacacggtcgacttcctgggcagctacgccctgccggtgggtaaagtcagcttcagcgtggagaacctgctggacaaagactacaccaccgcctggggccagcgcgcgccggggctgtatagcccaacctacggtgcaccaggtctgtatacctataaaggccgtggacggacgtttggtctgaactactccgttctgttctaa

SEQ ID NO: 164400 - DNA, 402 bp, Enterobacter cloacae
atgacagcacgcgaagccgtttttccctccggtcgtcaggcgctctatgagcgtaatcgctattcaccggccatcaaatccaacggtttcttgttcgtttcggggcaggtgggtagtcgcgaggatggttcgcctgaacccgatctgagagcgcaggtcaggctggccttcgataatcttaatgctgtcctcgcggctgcgggctgcacgttcgctgacgtggttgacgtgaccctctttgtcgtcgatcccgagtcaaacctcgacgctatctggagtatcctgccagaatattggggggacgcgccttatcctaccttgaccgggatcggcgtgacgtggctgtacggatttaagtttgagattaaggtgattgccaggctggatgcgattcagagttaa

SEQ ID NO: 164401 - DNA, 939 bp, Enterobacter cloacae
atggatcgtttcgacgcgatgcgcgcctttgctcgcgtggttgaggcaggtagtttcacaaaggctgcccaaacgcttcatatgagcaaaaccacggtgacgcagctcattcagcagctggaagcgcgcctgcgcgtcaaattgctccatcgcaccacccgaaggctcggtgtgacccccgatggcgcggtctactacgaacgcgtcatccacctgctggcggacatggaagatgctgaaaacagcctgtccagcgcgacgatgacgcccaggggacggctacgggtagacgtgcccagtccgctggcccgcctcatcctggtgccggcgcttccggcttttcacgcacgctacccggatatccagttcgatatgggcgtgagcgaccgggtggtggatctgatcggcgacaacgtggattgcgtcctgcgcggtggcgaaatcaacgaccagtccctgatcgcacgccacgtcggcgatttgcacatcggtgtttacgtcgcaccgagctatgtggaacgcctcggcgccccggcgcacccgcgagagctggaaaacaccgaccatcgcattgtagggttcttgtcctcgcgcaccggtaagattgatcctctggtactgcgcagtgagagtgaacatattgacatcacgggcagctatgtccttgccgtggatgatggcaatgcttacctcgaagctgggttagccgggttaggcgtgattgcgctgccggtctatatggcagaagcgcatcaggcttgtggttccttgattcggctattcgaacattggcgtattaagccaatgcccctgtacctggcatttccccctaaccgccacgtcaacgccaaactgcgcgtttttattgattggatcgttgaattgatgcagcagcatgtccctaattccaataataagtcactccctcccagcccctga

SEQ ID NO: 164402 - DNA, 282 bp, Enterobacter cloacae
gtgtatgaacacaacctgcgcccggtagaaaagcagcacgtttcatgggtcgaacgcattacaatccagctgctggaggcctgcagggaatggaataccttactggaggggcgtcccgccaccgccgttcccgatcaggttgccgtcacgagcacggttgtctggacatttattcagtcgatgatcccgcaggtcgttaacgcagcggattttagaacgatccaggcgtttgccgaatcattcgaatcgcagccggccttcaaaaaatatccgttcaattaa

SEQ ID NO: 164403 - DNA, 951 bp, Enterobacter cloacae
gtgaatttccagcagcttaaaattatccgtgaggcggccaggcgggactacaacctgaccgaggtcgccaatatgctttatacctctcagtccggcgtcagccgccatatccgcgagctggaagaggagctgggcatagagatctttatccgtcgcggcaagcggctgctcggcatgacggagccgggtaaggcattgctcaccatcgctgagcggatcctcaacgaggccagcaacgtgcgtcgtctggcggatctcttcaccaatgatgcctccggcgtgctcaccatcgccaccacccatacccaggcgcgctacagcctgccgccggtgattaaggcgttccgcgaactttttccggaggtgcgtcttgagcttatccagggcacgccgcaggaaattgaagtgctgctgcaaaacggtggggcggatatcggtatcgccagcgaacgcctgagcaacgacccgctgctggtggcgttcccctggttccgctggtatcacagcttactgctcccggtcgatcacccgctgaatcaggtctctcccctgacgctggaagacgttgcgaaatggccgctcattacttatcgccaggggatcacgggacgctcgcgtatagatgaagccttcaatcgtaaagggttaacgcccgacatcgtgctgagcgcgcaggactctgacgtcatcaaaacctacgtcgagctgggtctgggtattggcctggtggcggaacagtccagcggagaacgcgaggacggtaacctggtgcgtcttgatacgcgtcatctgtttgacgccaacaccgtatggcttggcctgaagcgcggacagctgcagcgtaactatgtgtggcgctttatcgagctctgcaacgccgggctgtcggtggatgagattaaacgccaggtgatggagccggaagaagtggcgattgattatcagatttag

SEQ ID NO: 164404 - DNA, 918 bp, Enterobacter cloacae
atgaacttaagacgactgaaatacttcgtaaaaatcgtcgatatcggcagcctgactcaagcagcagaagtgctgcatatcgcgcagcctgcgctgagccagcaggtggctactctggaaggcgagatggatcagcagctgttgatccgtaccaaacgcggcgtcacgccaacggaagccggaaaaattctctatacccatgcccgcacgattctgcgccagtgcgagcaggcgcagctggcggtgaataacgtgggccagaccctgagcggacacgtttctattggcctggcgccgggaacggccgcgtcctctattaccatgccgctgctgcaggccgttcgcgctgagctgcctgaagtgctggtgtacctgcacgaaaacagcgggtccgtactgaatgacaaactgctcaacggccagctggacatggcggtcctttacgatcgctccccggtggccgggatcaccagccagccgctgctgaaagaagatctctatctcgtgggcacccgcgactgtccgggccagagcgtagaccttaccgccgtggcagagatgaacctctatctgccgcgcgactacagcgccgtgcgcgtgcgcgtggacgaagcgttctccctgcgccgtctgacggccaaaatcatcggcgaaattgactcgatctccacgctgaccgcagccattgccagcggcatgggcgtcaccgtgctgccggaatccgccgcgcgttcgctgtgcagcgcggcgaacggctggatggcgcggatcaccacgccttctatgagcctgccgctctcgctgaacatgtccgcacgcggttcgctgtcgccacaggcgcaggcggtaaaagagattctgatgtcgctggtcagcaagccatcgcttgagaaccgtgaactccagctcgtgagctga

SEQ ID NO: 164405 - DNA, 900 bp, Enterobacter cloacae
atgtgtcgtaaaaaggcgttgggctgtcttgctgcgttactcatcagccagagcgtgcaggcggtgagctatcctttaccgccggcgggcagtcgcctggtggggagctcgcaggtcattaccgtgccggatcataatacgttaccgcttgaggcgtttgccgcgcagtacgggcaggggttgagcaatatgctggaagcgaacccgggcgtggatccttttttgcccaaatccggcacccggctggtcattccccagcagctgattttgcccgacaccgttcgcgaggggattgtcgttaacgtggcggaaatgcgtctctactattacccgccgggcagcaataccgttgaagtgctgcccatcggcatcggtcaggccgggcgcgaaaccccgcgtaactgggtaacggcggttgaacgtaagcaggtgggacccacctggtctccgacgcccaatacgcgccgtgcctatgcggcagagggaaaaacgctgcctgccttcgtgcccgccgggccggataacccgatggggctgtatgcaatctatatcggcaggctgtatgccatacacggcacaaactccaatttcggcatcgggctgcgggtgagccagggctgtattcgtctgcggaataacgacatcaaataccttttcgataatgtttccgtcggcacccgcgtacagcttatcgatcggcccgttaaagtcaccacggaaccggacggcagccgctgggtggaggttcacgagccgttatcgcgtaaccgcgcggaatttgaatcgacccggaaagtgccgctgccgatatcggccgcgctgcggacagagttgatcaacgagggtgcaggtgctgagctggaacggcggtcagggatgccggtgaagctcggcaattga

SEQ ID NO: 164406 - DNA, 1314 bp, Enterobacter cloacae
atggactccactctcacctccacacatcccaacgaggagacaccttcgctcaatcgtgcccgccgcgccgcactcggcagcttcgcgggtgccgtcgtcgactggtatgattttctgctctacggcattaccgccgcgctggtgtttaaccgcgaattttttccgcaggtcagccccgcgatgggcaccctcgccgcgtttgccaccttcggcgtcggttttctgtttcgcccgctgggcggggtgatcttcggccactttggcgaccgcctcggccgcaagcgcatgctcatgcttaccgtctggatgatggggatcgccacggcgctgattggcattctcccgtcgttttccgcgattggctggtgggcaccggtattgctggtgacattacgggcgattcagggcttcgccgtgggcggtgaatggggcggcgcggcgctgctatccgttgagagcgcgcccaaaaataagaaagcgttttacagcagcggcgtgcaggtcggatacggcgtgggtctgctcctttctaccgggctggtctccttgatcagccagctcaccaccgatgagcagttcctgagctggggctggcgcattccgttcatcttcagcatcgtgctggtcatcgccgcgctgtggatccgtaacggcatggaggagtcggcagagttcgaaaagcagcaggaaaaaccggccgtcaaaaaaaggctgccggtcatggaggcactcgtccggcatcctggcgcttttctgaaaattattgccctgcgcctgtgtgaactgctgacgatgtatatcgtcaccgcgtttgccctgaactactcgacgcagaacctcggcctgccgcgtgaactgttcctgaatatcggtctggtggttggcgggatcagctgcctgaccatcccctgcttcgcctggctggcggaccgctttggccgccgtcgcgtctatatcaccggggcgctggtgggcaccctcagcgcctggccattctttatggcactggaggcgcagtcgatcttctggattgtcttcttcgccatcatgctcgccaacgtcgctcacgacatggtggtctgcgtccagcagccgatgtttaccgaactgttcggcgccagctaccgctacagcggcgcgggcgtgggttaccaggttgcaagcgtggtcggcggcgggtttacgccatttattgccgccgcgctggtgaccttctccggcggaaactggcacagcgtggcgatttatctgctggccggttgcctgctctctgctgcgacggccctggtgatgaaagagccccgccacacctga

SEQ ID NO: 164407 - DNA, 1455 bp, Enterobacter cloacae
atgaataataagggctccagcctgaccccggctcaggcgctggaaaaactcgacgcgctgtatgaacagtccgtcaatgcgctgcgcagcgccatcagcgaatatatcgaaacagggaaacttcccgaccaaaaggccagaaacgagggcctttttgtttatccatcgctctctgtgacctgggacggcagcgccagcacgacgccaaaaacccgcgcctacgcccgttttacccactccggctgctacagcaccaccgtcacccgcccggctctgttccgcccgtatcttgaagaacaacttacgctgttgtaccaggattacggcgcgcacattgccgttgagccctcgcagcatgagatcccctatccctacgtaattgacggttcggcgttaacccttgaccgttccatgagcgcggggctgacccgccacttcccgacgacggaactgtcgcagattggcgatgagaccgccgacgggatttatcacccggcagaattttctcctctgtcgcactttgacgcccgccgggtcgatttctccctggcgcgactgcgccactacaccggtacgcccgctgaacattttcagccgttcgtgctctttaccaactacacccgctacgtcgacgagtttgtccgctggggatgcagccagatcctcgacccggaaagcccgtatattgccctctcctgcgcgggcgggatctggatcaccgcagagaccgaagcccccgagcaggccatctccgatctggcatggaaaaagcatcagatgccggcctggcacctgatcaccgccgacggtcagggcattacgttgattaacattggcgtcggcccctcgaacgccaaaaccatctgcgaccatctggcggtactgcgccctgacgtgtggctgatgattggtcactgcggcggcctgcgtgaaagccagctgattggcgactacgtgctcgcccacgcctatctgcgcgatgaccatgtgcttgatgcggtgctgccgccggatatcccgatcccgagcatcgccgaagtacagcgtgcgctgtatgacgccaccaaagcggtcagcggcatgccgggtgaagaagttaagcagcgcctgcgcaccggtacggtcgtcacgacggatgaccgcaactgggagctgcgttactcagcctccgcgctgcggttcaacctgagccgcgcggtagccattgatatggagagcgccaccatcgccgcacagggctatcgcttccgcgtcccgtacggcacgctgctgtgcgtctccgataagccgctgcacggcgaaattaagctgccgggccaggccaaccgtttctatgaaggggccatctcagagcatctgcaaattggcattcgcgccatcgacctgcttcgggcggaaggtgacaggctccattcccgcaagctgcgcaccttcaacgagccgccgttccgctaa

SEQ ID NO: 164408 - DNA, 1773 bp, Enterobacter cloacae
atgtccagcacatctccgctctctgccctacgccactggcttgaggccagccatctcgacgggatgatcgtcccgcgtgcggatgcgtggcagagcgaatactgcgcgccctgtgacgaaaagctggcctggctgacgggctttgacggttctgccggcgtcgcgctggtactgaaggataaagcgctgctgttcgtcgacgggcgctatcaggtgcaggcccgcgttcaggtgaatctggacgagattgaaattcaccacctgcacaacgagccgctggctgaatggctaacagaaaacgtggaggcaggcacgcgcatcggttttgacgcactgctgatgaccaatacggagtttgagcaactgtccgccacgccgtgcaggctggtaccgctgaaggcttcgacgtttgacgccttatggaccgatcgccctgccgcaccggcggggcttattcgtgaaatgccggttgaagtaagcggtgaaagcagcgaggacaaacgtcagcgcgttgccgccgtgctggccgcgaacaatgctgattatctggccgttacgctgccggataacattgcatggctgctcaacgtaaggggctcagatatcccaaccagtccggtaccgctctcatttgccctgctgagtcgtgacggccacgttgagtggtttgtaaacgacaacaagctcggcgccctgcctgaagaggtgcgcaatgcgtttaccattgcgccgcaggacgccttcatcgaacgctgtcagcagattgctgcaggcaaacgggtgatggttgatgcagattccgctccggtcgccctgcgctttgccattgaaccacggggagagattgtctggcgaaccgatcccatcaccctgatgaaggccaccaaaaacccgatcgagctggctgggtatcgcgcgtgccatcaccaggacggtgccgcctgggtcaacttcctggcctggctgagccgcgaagtgccgctgcgcgaggcggcaggaaatcccctcaccgaactggaagtgcaggcgcagcagctcgcgttccgtcaacagcagcccgggtttatcgagcaaagctttgcgaccatctccgcctcttcgagcaatgcggcgatgtgccactatcattcgagcgaggccagcaacaagcccatcggccatgatcatttttacctgaacgattccggcggtcagtacgttaatggcaccaccgacgccacgcgcacgctggcatggggtaaggtcgacccgcagcagcgcctgcactacaccgccgtgctgagaggctttctgtcgctcattaccctgcagttcccctctggcactcaggggcatcagctggatgccttcgcgcgtcgtccgctgtgggagatggggctggattacgatcacggcacagggcatggcgtggggcatcagcttctgatccatgagaatccgcatcgcatcgccaaaaaggtcaacccgtggccgctggtggcgggcaatatcatgacgattgaacctggctactatctgggcgatagccacgggattcgcattgaaaaccaggtggagattgtggagagccgtccgggattctgtaaatttgcctcgctgacgctgatcccgattgatttaagccaggtcgagctggatctgttgagcgaacaggaaaaagcgtggctggatgcgtatcaccagcaggtgcgtgaggcgctgtcaccacgggtgaacagcgatgcgcgttcgtggctggaagaggcgacggcaccggttcgtgtgaacggatag

SEQ ID NO: 164409 - DNA, 1422 bp, Enterobacter cloacae
ttgaacgtcactgcctccttacgccaggcgatcgcgcgcacgccatggtatgcaaaacgtaaaagctatcgtgtcctgttctggcgtgaaatcacccctcttgctgtgcctatcttcctggaaaatacctgcgttctgctgatgggggtactgagcaccttcctggtgagctggctggggaaagaggcgatggcgggggtcgggctggcggacagctttaacatggtggtgatgtcattttttgctgccatcgatctcgggacgacggtggtggtggcttttagcctcggcaagctcgatcccaaacgtgcgcgcgaggcagcccgccagtcgctgatgatcatgactgtcttttcgattgttctggcggcggtgattcactatttcggtaaagagattatcgactttgtcgccggggaagccacgaacgaggttaaagacctggcgctgacctatctggagatgaccgtcatcagctatccggcggcggctatcgccctgattggcagcggcgcgctgcgcggggcaggtaacaccaaaattccgctcctgatcaacggcggaatgaatatcctgaatatcatcatcagcagcgtgctgatctacggcgtgttctcgtgggacgggctggggttcgtcggcgccggactggggctaaccatttcacgctatatcggtgcagcagcgattatcggcgtgctgatggcggggatcaccccctcgctgcgcctcacgctgaagagctatttccgcccctttaacttcgccattatctgggaagtgatggggatcggcattcccgccagtattgagtcggtgctgtttaacggcggaaagctgctgacgcagatgtttgtcgccgggatgggcaccgacgttatcgccggtaacttcatcgccttttctatcgcctcgctgattaacctgccgggtaacgcgctgggttcggcctcgactatcattaccgggaaacggctcgggaaagggcagatcggccaggctgagcggcagctgcgccacgttttctggctgtcgaccattggactgaccgtgattgcctggggaaccgcgccgtttgccgggctgatggcctcgttctatacccacgaagaggacgttaaagaggtcgttaaaatcctcatctggctcaatgcggcctttatgcccatctgggcggcctcatgggtactgccagccgggctaaagggcgcgcgtgacgcccgctttgcgatgtgggtgtcgatgctcggcatgtggggatgtcgcgttgtggcggggtatacgctcggggtgatgctcggatggggcgtggttggcgtctggctgggtatgttcctggactgggccgtacggggcgcgctgttctactggcgcatggtcagcgggcgctggctgtggaaatacccgcggaaaaatgcctga

SEQ ID NO: 164410 - DNA, 336 bp, Enterobacter cloacae
atgaacgctctgtttgtctacggcacgctgcgtccgggccattctaatgcgcatatccttgaaaacatcggcggtgaatggctggccggtttcgtctccggtacgttctacgaacgcggctggggtgcggcggcggacttcccggggatcgtgctccaccccgatggcccccgcgtcgaaggctatctgtttatctctgataacctttccgcacactggcaaatgctggatgagtttgaagacggctatgaccgggttgaggtcacggtgaccacctctgaaggcaagcaggttcaagcctggatttatcagctacagccacattctgagtcataa

SEQ ID NO: 164411 - DNA, 336 bp, Enterobacter cloacae
atggaaactaccaagccttcgttccaggatgttctggaattcgtccgcctgttccgccgcaaaaacaagctgcagcgtgaaatccaggacgttgagaagaagatccgtgacaaccagaaacgtgttctgctgctcgacaacctgagcgactatatcaagccaggcatgagcgttgaagctattcagggcatcatcgccagcatgaagagcgactatgaagaccgtgttgatgattacatcatcaaaaatgctgaactgtccaaagagcgtcgcgacatctctaagaagctgaaagtgatgggcgaaatcaaaaacggcgaagcaaaaagcgagtaa

SEQ ID NO: 164412 - DNA, 1059 bp, Enterobacter cloacae
gtgcgtcccgacaaatcattaaccccttttgaaattcggttgtataaacactaccgcgtggtgcacgggtgtcgcatctcgctggcattcgtattgacgtttgtactggtgcgtttgctggaggttccggaagggacgtggccgctgatcacgctggtggtggtgatggggcccatctcgttttggggcaacgttgtcccgcgcgccttcgagcgtattggcgggaccgtgttaggttcggccctggggctaatcgccctgaagctggagcttatctcgttcccggtcatgctgatatggtgcggtgccgccatgttcctgtgcggctggctggcgttgggcaagcgtccttatcaggcgctgctgattggtatcacgctcgcggtggtggtcggcgcacccgccggggatatgaccacggcgctgtggcgaagcggggatgtcattctgggttcactgctcgccatgctgtttaccggcatctggccgcagcgggcttttctgcactggcgtatccagatggccaactatgtcaccgcgtttaaccgcgtctatcaggccggtttttcccctaatctggttgaacgcccccggctggaaaagcatctgcaaaccatcctcaacgacgtggtcaaaatgcgcggcctgatcacgcccgccagcaaagagacccatattcagaaagcgattttcgaagccatccagacggtaagccgcaacctggtctgcatgcttgaactgcaaatcaacgcgcactgggcctctcgcccgagccatctgttgatgcttaacgcgcagaccctcaaagagacccagcagatgacgcagcaaacgctgttgaccatcgctcatgcgctctacgaaggtaacccgcagccgatactggcaaacagcgagcggctgaatgagatcgttgcggagctgaagcagttaatcaatgagcggcagggcgataacgtggcggaaacgcccattcatggctatgtctggctgagtatggaactggcgcgacagcttgagctgctatcgcatctgatttgtcgggcgctgcgcaaataa

SEQ ID NO: 164413 - DNA, 474 bp, Enterobacter cloacae
atggactacagcattacgcagcaacagaaacgtaagattgccggttttcatttggtcggtccgtgggaacacacggtaaaacagggctttgaacagctggtcatgtgggtcgacgggcgtcacattgagccgctggagtgggtggcggtctactacgataaccccgatgaggtcccggccgaaaaactgcgctgcgatacggccgttaccgtaccggacgattttgtgatcccggaaaacagcgaaggcgtcatgatgacggaaatcgcgggaggggattatgccgtggcgacggcgcgtgtggaaaactacgactttgccacgccgtggtatcagttcttcaattccctgctgcaggacaatacgtatcagatggcgctcaaaccctgcttcgagcgctacctgaatgacggcaacgcggacggctactgggatattgaaatgtatatcgcggtagagcacaaaccggtttag

SEQ ID NO: 164414 - DNA, 1167 bp, Enterobacter cloacae
ttgaaacgccgtctgtttattgctgtttctttactcgcttcgagtgtctcatctgcttttgcggccgaaccactggatttttcgccgcagcctccggccattcaggctggctcctgggtgctgatggattacacgactggtcagattttaacggcgggcaacgaacatcaacaacgtaatccggcgagcctgaccaagctgatgacgggttatgtggtggatcgggccattgatagccaccgcattaccccggatgacatcgtcaccgtagggcgcgatgcgtgggcaaaagggaacccggtgtttgacggttcgtcgctgatgttcctgaaggagggcgatcgcgtcaccgtgcgcgatctgagccgcggcctgattgtcgattccggcaacgacgcctgcgtggcgctggccgatcacgtggcgggcgggcagccgcagttcgtgaagatgatgaacgactatgtgcagaagctgaacctgcgtgatacccacttcgaaaccgtccacgggctggacgcgccgggccagcatagctcggcgtatgacctggccgttctctcccgggccattatccacggtgagcccgagttttatcatatgtacagcgaaaagagcctgacctggaacgggatcacccagcagaaccgtaacggcctgctgtgggataagaccatgaacgtagacgggctgaaaacggggcatacctcgggggccggctttaacctgattgcgtctgctgttgacggtcagcgtcgtttgattgccgttgtaatgggagcggacagcccgaaagggcgtgaggaccaggcccgaaaactgctgcactgggggcagcagaatttcgatacggtgcagatcctgcataacggaaaaaaagtgggaacggagcgcatctggtacggcgacaaggagcaggtaaaactgggcaccgaccaggacttctggctggccttgccgaaagcggaggtgcccaacatcaaagccaaatacgtgctggataaaaaagagctggaagcgccgattgccgcgcatcagcgtgtcggggagatccagctttacgatcgcgacaaggtggtagcccactggcctctggtcacgctggaagccgttgataaaggcggcctgttctctcgtctgagcgattatctgcatcacacgctttaa

SEQ ID NO: 164415 - DNA, 1425 bp, Enterobacter cloacae
gtgtctgactctgccgctcgcccgacttttttatttcatgactacgaaacctttggcactcatccggcgctggaccgaccggcgcagtttgccgccatccgtaccgacgacgaattcaacatcatcggcgagcctgaggtcttttactgcaagccggcggatgattacctgccgcagcccggcgcggtgatggtcaccgggatcaccccgcaggaagcgcgggaaaaaggcgttaacgaggcagaatttgcccgccgcatccacgacctgtttaccgttcccaatacctgcgtggtcggttacaacaacatccgcttcgatgacgaagtgacgcgcaacatcttctatcgcaacttttacgatccgtacgcctggagctggcagaaccgcaattcacgctgggatctgctcgacatcatgcgcgcctgttatgccctgcgccctgaaggcattcactggccggaaaatgaggaagggctgaccagcttccggctggaacacctgacgcgcgccaacggcatcgagcacagcaatgcccacgatgcgatggcagacgtttatgccaccattgccatggcgaagctggtgaaaaccgcacagccccggctgtttgaatatctgctgagccaccgaagcaagcagaagctcatgacccttatcgacgtaccgcagatgaagcccctggtgcatatctccggcatgtttggcgcctggcgcggcaataccagctgggttgcgccgctggcgtggcacccggataaccgtaatgcggttatcatggtggacctggcgggcgatatttcaccgctgctcgaactcgacagcgatatcctgcgcgaacgtttgtacacgccaaaaaatgaactcggcgatctgcccgcggtgccggtcaaactggtgcacataaataaatgtccggtactcgctcaggcgaacacgctgcgcccggaagatgctgacaggctgggcattaaccgccagcactgcctcgataatctcaaagtgctgcgtgaaaatccgcaggtgcgcgagaaagtcgtggccatttttgctgaagccgagccgttcgtgccgtctgaaaacgtggacgcccaactctataacggtttcttcagcgatgccgatcgcgcggccatgaatatcgttctgcaaacagagccgcgtaacttaccggcgctggatatcaccttcgccgataagcgcatcgaaaagctgatgtttaattaccgcgcgcgtaattaccccggcacgctggatgaagccgagcaggaacgctggctgcagcatcgtcgcaacgtgtttacgccagagtacctgcacagctatgcacaggagctggagatgctttacggccagaatgaagggaatgctgaaaaacaggcgctgctgaaatccctgttccagtacgcgcaagagatagtttga

SEQ ID NO: 164416 - DNA, 1359 bp, Enterobacter cloacae
atgtcgcataacgcaactccaaacacctctcgcgtggaattacgtaaaacgcttacgttgattccggttgttatgatgggcctggcctatatgcaaccgatgacgctgtttgatacattcggtatcgtatcaggcctcacagacggtcatgtgccaacggcatatggcttcgcgctgattgcgatcctctttaccgcgctgagctacggtaaactggtgcgtcgctatccgtctgcgggttccgcttacacctatgcccagaaatccatcagcccgacggttggctttatggtgggctggtcttcgctgctcgactatctgttcgcgccgatgatcaacattctgctggcaaaaatctattttgaagcgctggtgccgtcgattccatcctggatgttcgttgtggcgctggtggcctttatgacggcctttaacctgcgcagcatcaagtctgtcgccaactttaactccgttatcgttgtgcttcaggttgtcctgattgcggttattcttggcatggtgatttacggcgtattccacggcgaaggcgcgggcaccctggcgagcagcaagccgttctggtctggtgatgcgcatgtgatcccgatgattaccggggcaaccattctgtgcttctcctttaccggttttgacgggatcagcaacctgtctgaagaaaccaaaaatgcagagcgcgtaattcctcgtgccatcttcctgacggcgctgattggcggtctgatctttattttctcgacctatttcctgcagctgtacttcccggatatctctcgcttcaaggatccggatgcgtctcagccggaaattatgctgtacgtggcgggtaaagcgttccaggtcggcgcgctgatcttctccaccatcaccgtactggcgtccggtatggccgcgcatgcaggcgttgcgcgtctgatgtacgtaatgggccgcgatggcgtattcccgaaaagcttcttcggctacgtgcatccaacctggcgtaccccggcgatgaacattatcctggtcggtgcgatcgcgcttctggcgattaactttgacctggtgatggcaacggcgctgattaacttcggtgcgctggtggcgttcacctttgttaacctgtcggttatctctcagttctggatccgtgaaaagcgtaacaagacgctgaaagatcacttccagtatctgttcctgccgatgtgcggtgccctgaccgtgggcgcgctgtgggttaacctggaagagagctcaatggtgcttggcctgatttgggcgggtattggtctggtttacctggcctgcgtcacgaagagcttccgtaacccggttccgcagtacgaagacgtcgcgtaa

SEQ ID NO: 164417 - DNA, 930 bp, Enterobacter cloacae
atgaaaccgctgctggatgttcttattattctggatgcactggaaaaagaggggagctttgccgctgcgtcggcaaagctctacaaaaccccttcggccctgagctataccgtccaaaaactggaaagcgacctcaatatccagatcctcgatcgctccgggcatcgcgcacgctttacccgcaccggacagatgctgctggaaaaaggccgtgaagtcctccataccgttcgtgaactcgaaaaacaggccgtcaagctgcatcagggatgggaaaacgagctggtgattggggtggatgacacctttccgttttctctcctgacgccgctgattgaaatgttttaccaacatcacagcgtcacccggcttatattcatcaacggcgtgctgggcggttcctgggatgccttaacccagggcagggcggacatttttgtcggtgcattgcatgagcctccccaactcagtgaatttggttttgcccgccttggcgtgctggagcaggtatttgccgtggcgcctcatcatccgctggctcaggagcccgagccgcttaaccgccgcgtgattaaaggctaccgcgcgattgtagtgggtgacagctctcgcccggaatgtgcggtctcctcgcagctgcttgatgagcaggaagcgattaccgttttcgactttaaaaccaagcttgagctgcaaattagcggtctgggctgcggctatttaccccgctatctggcgcagcgctttattgacagcggtgcgcttgttgaaaaacaggtacttgctcaaaacagccatgaatcggtgtgggtgggctggaatgaacagaccgccgggctggcgagtgcctggtggcgggacgaaattttagcaaatagtgctatcgctgctgtatatgctcagggcagcgtcgagaaatcagccagttag

SEQ ID NO: 164418 - DNA, 825 bp, Enterobacter cloacae
atgaaaaaggtcgcgattgtcggtttaggatggctgggaatgccgctggcgatgtcattagccgcgaaaggctggcaggtgaccgggagcaagaccacccgagatggggtcgaagcggcgcgcatgtgcggtattgagggcgttgaactgcgtctggagccggaactggtgtgtgatgcggacgatctggacacgctgatgaacgtcgatgcgctggtgattacgctacccgcgcggcgcagcggcccgggtgaatcattttatctgcaggcgatgcaggagatagtcgacagcgcgctggcgcatcacgtaccgcgcattgttttcaccagctcgacgtcggtctatggcgatgctgaaggcgtagtgaaagagacctccgagcgccgtcccgttaccgcgagcggtcaggtcctgaaagagctggaagactggctgcacaatcttcccggcacgcaggtcgatatcgttcgtctggcggggctggtgggccctggccgccatccgggacgcttctttgccggaaagactgcgccagacggccagcatggcgtgaatcttgtccatcttgaggatgttattggcgcaattgagctactcttacaggctccgaaaggcggacacatctataatatatgtgcaccgactcatccggcgcgcagcaccttttacccgctgatggcacgtcagctgggcctggctccgccggtctttggtgaggcaaaagatggcagtaaaggcaaaattgttgatggcaatcgcatttgtcatgagctggggtttgagtatcagtatcccgatccgctggtgatgcccatggaataa

SEQ ID NO: 164419 - DNA, 900 bp, Enterobacter cloacae
atgttagataactcacgtttacgcatagctattcaaaaatcaggccgtttaagtgacgattcacgcgaactgctggcccgctgcgggattaaaatcaacctgcacacccagcgcctgattgctctggctgaaaacatgcccatcgacattctgcgcgtgcgtgatgacgatattcccggcctggtgatggatggcgtcgttgacctcggcatcatcggtgaaaacgtgctggaagaagagctgctgacccgccgcgcgcagggcgaagacccgcgttacttcaccctgcgtcgtctggacttcggcggctgccgcctgtcgctggcgacgccggttgatgaagcctgggacggcccggccgcgctgaacggcaaacgtatcgccacctcctaccctcacctgttaaagcgctatctggatcagaaaggcgtgcagtttaaatcctgtctgctgaacggttctgttgaagtggcgccgcgtgcgggtctggcggacgccatctgtgacctggtctctaccggcgcgacgctggaagcgaacggtctgcgcgaagtggaggtgatctaccgctccaaagcgtgcctgatccagcgtgacggagagatggccgacgctaagcagcagctgatcgacaaactgctgacccgtattcagggcgtgattcaggcgcgcgaatccaaatacatcatgatgcacgccccaaccgagcgtctggatgaagtgattgccctgctgccgggcgccgagcgtccaaccatcctgccgctggcaggcgatcagcagcgcgtggcgatgcacatggtgagcagcgaaaccctgttctgggaaaccatggaaaaactgaaggcgctgggcgcaagctccatcctggtgctgccgattgagaagatgatggagtaa

SEQ ID NO: 164420 - DNA, 1305 bp, Enterobacter cloacae
atgagctttaacacaatcatcgactggaatacctgtagcgacgcacagcagcgcgagctgctgatgcgcccggcgatttccgcctctgaaagtatctcgcgcaccgtggcggagatcctggttaacgtcaaagcccgcggcgatgacgcgttgcgtgaatacagcgcgaagtttgataagacggacgtcggcgcattagaggttaccgagcaggaaatcattgatgccagcaatcgcctgggggatgacatcaagcaggcgatggccgtcgcggtgaaaaacattgataccttccacaccgcgcaaaagctgcagaccgtggatgtcgaaaccctgcccggcgtgcgttgccagcaggtcacgcgcccggttgcgtccgtcggcctctatattcccggcggctctgccccgcttttctccaccgtactgatgctggcgactcccgcgcgcattgccgggtgtcagaaagtggtgctgtgctcaccgccaccgatcgccgatgagatcctctacgcggcgaagctgtgcggcgtgcaggcggtctataaagtgggcggcgcgcaggcgatatccgccctggcgttcggcacggaatccattcccaaggtcgacaaaatctttggcccgggcaatgcgtatgtgaccgaggctaagcgtcaggtcagccagcgtctggacggcgcggccatcgatatgcctgccggcccgtctgaggtgctggtgattgccgacagcggcgccacgccggatttcgtcgcgtccgacctgctttctcaggcggaacacggcccggactcgcaggtcatcctgctgacgccggataccgatatggcgaaacgcgtgggtgaagccgtggagcgtcagcttgccgacctgccccgcgccgacacggcacgccaggcgttagcggccagccgtctgattgtggcgcgcgatctcgagcagtgcattgccatttctaaccagtacggtccggagcacctgattattcagacccgcaatgcgcgcgatctggtcgacagcattaccagcgcgggctcggtgttcctcggcgactggtcaccggaatccgcgggcgattacgcctccggcaccaaccacgtgctgccaacgtatggctatacctcaacctgttccagcctggggctggcggatttccagaaacgcatgaccgtgcaggaactctcccgcgaagggtttgcctcactggcgtccactattgaaaccctggccgccgccgagcgcctgaccgctcacaaaaacgccgttacgctgcgcgttgcagccctgaaggagcaagcatga

SEQ ID NO: 164421 - DNA, 1062 bp, Enterobacter cloacae
atgaacattgaagaattagcccgcgaaaatgtccgtcgcctgacgccctatcagtctgcgcgtcgtctgggcggtaaaggggatgtctggctgaacgccaacgaatatccaacggcggtgcagtttgagctgtcgcagcaaacgctgaaccgctatccggagtgtcagccgaaggcggttattgagaactacgcgcagtacgctggcgtgaagccagagcaggtgctggtcagtcgcggcgcggatgagggcattgaactgctgatccgtgccttctgcgagccgggcaaagacgcggtaatgtactgccagccgacctacggcatgtacagcgtcagcgcggaaaccttcggagtggcgtgccgcaacgtgctctcactggagaactggcagctggatctgcaggggattgccgacaaccttgacggcgtaaaagtggtgtttgtttgcagcccgaacaacccgaccgggcagattattaacccgcaggatatccgcaccctgctggagatgacgcgcggtaaagccctggtggtcgcggacgaagcctacatcgagttctgcccgcaggcgacgctggctggctggctggaagagtacccgcacctcgtggtactgcgtacgctgtcgaaggctttcgccctcgcgggtctgcgctgcggattcacgctggcaaataaagaggtcatcgacctgctgctgaaggtgatcgctccgtacccgctctcgacgccggttgccgatattgcggcacaggcgctgacgcctcaggggattaacgcgatgcgcgagcgcgtggcgcaaatcctggaggaacgtcagtacctggtgaccgccctgaaggatatcccgtgcgtggagcaggtattcgactcagaaaccaactacatcctggtgcgctttaccgcttccagcgccgtatttaaatctttatgggatcagggcattatcttacgagaccagaataaacaaccttctctgagcgggtgcctgcgcattaccgtcggcacccgtgcagagagccagcgcgtgattgacgccctgaaagcggagaaagtatga

SEQ ID NO: 164422 - DNA, 1068 bp, Enterobacter cloacae
atgacccagaagatccttttcatcgatcgtgacggcacccttatttcggagccaccagctgattttcaggtcgaccgattcgacaagctggcgtttgaacctgacgtgatcccggtgctgctcaagctgcaaaaagccgggtacaagctggtgatgatcaccaaccaggacggtctgggtaccgacagcttcccgcaggcagactttgacggcccgcataatctgatgatgcaggtgctgacctcgcagggcgtggtgttcgatgaagtgctgatttgcccgcacatgccagccgacgagtgcgactgccgtaagccaaaggtgaagctggtcgagcgctatctggcggaggatgtgctggataagaccaacagctatgtcatcggcgatcgcattaccgatattacgctggcggagaacatgggcatcgcggggctgcgctatgaccgcaacaaccttaactgggcgatgattggcgagcagctgacaaaacgtgaccgctactcgcacgttgaacgcaacaccaaagagacacagattgatgtgaaggtctggctggaccgcgaaggcggcagcaagatccacaccggcgtgggtttcttcgaccacatgctggaccagattgccacccacggcggtttccgcatggagatcgcggtaaaaggcgacctctatattgacgatcaccacaccgtggaagataccggcctggcgctgggtgaagccctgaagctggcgctcggcgataaacgcggcattaaccgttttggctttgtcctgccgatggacgagtgtctggcgcgctgcgcgatggatatctccggccgtccgcacctggaatataaagcagacttcaattaccagcgcgtgggcgatctgagcaccgaaatggtggagcacttcttccgttcattgtcctacaccatgggcctgacgctgcacctgaagaccaaaggcaagaacgaccaccaccgcgtggagagtctcttcaaggcctttggccgcacgctgcgccaggcaattcgcgtggaaggcgacgccctgccctcatcaaaaggagtgctgtaa

SEQ ID NO: 164423 - DNA, 591 bp, Enterobacter cloacae
atgaacgtggtgattctggataccggatgcgccaacctgaactccgtaaagtcggccatcacccgccacggctacgaaccggtggttagccgtgacccggacgtggtgctgcgtgccgacaagttatttctgccgggcgtaggcactgcgcaggcggcgatggatcagatccacgcgcgcgagctggtcgatctcatcaaggcctgtacccaaccggtgctgggcatttgcctgggtatgcagatcctgggccgccgcagcgaagagagcaacggcgttgacctgctgggcattatcgacgaagacgtgccgaagatgaccgaccacggcctgcctctgccgcatatgggctggaaccgcgtgtacgccaaagcgggcgaccggctatttcgcggcattgaagatggcgcgtatttttacttcgtgcacagttacgctatgccggtgaacgtcaataccatcgcccagtgcacttacggcgaggcgtttaccgcggcggtgcagaaagacaatttcttcggcgtacagtttcacccggagcgctcgggcgccgcgggcgcgcagctgctgaaaaacttcctggagatgtga

SEQ ID NO: 164424 - DNA, 738 bp, Enterobacter cloacae
atgattattcccgcgttagatttaattgacggcacggttgtccgtcttcatcagggtgattatgggcagcagcgagactacggaaacgacccgctgccgcgtctgcaggagtatgccgcccagggtgctcaggtgctgcatctggtggatttgacgggcgcgaaagatccggcgaagcgacagatccctctgctgaaaaatctggtcgccggtgttgatgtgccggtacaggttggcggcggcgtgcgtacggaagatgacgttgccgcgctgctggacgcgggcgtggcgcgcgtggtggtcggttcaaccgcggtgaaagagcctgagacggtgaaggggtggttccgccgctttggcgccgacgcgctggtgctggcgctggacgtgcgcattgacgaacagggtaataagcaggtggcggtcagcggctggcaggaaaactccggcgtgacgctggaggcgctggtcgagatgtatctgcccgttggccttaagcacgtgctgtgcacggacatctcccgtgacggcacgctggcgggctccaacgtctcgctgtatgaagagatctgcgcgcgttatccgcaggtagcgttccagtcttcgggcggaattggtgatttaaacgatattgccgcgctgcgcggaacgggcgtacagggcgtgattgtgggccgagccctgctggaaggtaaatttacggtgacggaggcgatacaatgctggcaaaacggataa

SEQ ID NO: 164425 - DNA, 777 bp, Enterobacter cloacae
atgctggcaaaacggataatcccttgcctggacgtacgtgacggccaggtcgtgaaaggcgtgcagttccgcaaccacgagatcattggcgacatcgttccgctggcaaaacgctatgccgatgaaggcgcagacgagctggtgttctacgatattaccgcgtccagcgatggccgcgtagttgacaaaagctgggtcgctcgcgtggcggaagtaatcgatattccgttctgcgtggcgggcgggattaaatccgccgacgacgccgccaaaattctctcgtttggtgccgacaagatttccatcaactcccctgccctggccgacccggagctcattacccgcctcgccgatcgttttggcgtgcagtgtattgtggttgggatcgacacctggtatgacgccgcaacgggcaagtatcacgtcaaccagtacacgggggatgaaagccgcactcgcgtgacgcagtgggaaacgctcgactgggtgcaggaagtgcagaagcgtggcgctggcgagattgtcctcaacatgatgaaccaggacggcgtgcgtaacgggtatgacctcgaacagctgaaaaaagttcgtgaggtctgccacgttccgctgattgcctccggcggcgcgggcaccatggaacattttctcgaagccttccgcgatgcgaacgtggacggcgcgctggccgcttccgtgttccacaaacagattattaatattggtgagttaaaaacgtacctggccgaccagggcgtggagatcagggtatgttaa

SEQ ID NO: 164426 - DNA, 612 bp, Enterobacter cloacae
atgttaacagagcaacaacaggcgcagctggactggaaaaaaacggacggattactgccggtggttgtccagcatgccgtctcaggcgaagtgctgatgctgggctatatgaaccaggacgcgctggcgaaaacgatcgacagtggcaaagtgacgttttactcccgcacgaaacagcgcctgtggaccaaaggggaaacctcgggtcacttcctgaacgtggtcagcattacgccggactgcgataacgataccctgctggtgctggcaaaccccatcggtccgacctgccataagggcaccagcagctgcttcggcgaggcgagtcaccagtggctgttcctgtatcaactggagcagctgctggcggagcgtaaaacggcggatccggagagttcttataccgcgaagctgtacgccagcggaaccaagcgtattgcacagaaggtgggtgaagaaggcgttgagacagcgctggccgcgaccgtgcatgaccgtgaggagctgacgaacgaagcgtctgacttgatgtatcacctgctggtgctgctgcaggatcaggcgctggatttgacggcggtgattgagaatttacgtaaaagacataaataa

SEQ ID NO: 164427 - DNA, 999 bp, Enterobacter cloacae; identical to SEQ ID NO: 163681

SEQ ID NO: 164428 - DNA, 939 bp, Enterobacter cloacae; identical to SEQ ID NO: 163680

SEQ ID NO: 164429 - DNA, 834 bp, Enterobacter cloacae
atggcaacaaactatgaacaaaacaaagaacagccgacaaaaaccaactcaaaaagaacaccattcatagcgcttttaattaaaaaaataaatgaacggagatgccttaaaaaaaaccaacacccagacatttacaaaatattacaccgacgttcgaggaataccagattcataagcacaactttaataatcatattaatcattgccgcaactctcatttctaatatgatagttagctggaaagataatcaagaaagttggataagtgcgatttatgatgcatatcataataaagagtcactgaaaaaaggtgaccttgttatatttagaaataatgaagacggaaaacgtcatgttggggtgtttataggaaacacatcattaaacaacctgacattgcctaattcttctgttgagaacccaacagaaacatcgggtgttatcactccgaatttcactctaccatccttaaatgaatttataactggaaaaactgacacagaaacaaacaaaaccgaatctgaaagagttgccgattctatagcaactgttttaataacattttctttggtgatatttatcggttttgtaatgcgagcagtactaatattcacaaggtattatatgcagctcgcaacagattatgacaatcaaaaaattgcctatttactatgcaagcttgaaggtaaggaatttggggctactcttgaggagctaagaagtaataaaatccactttgagaaaacaccactaccgccacaagaaaaaatagtattggggcttatcgatatattaaaagatagattacctaattctaaagaaaaaaaagaataa

SEQ ID NO: 164430 - DNA, 450 bp, Enterobacter cloacae
atggctacgaccccaacccagactcacccgctatttacattggcgttaacccacaacaccgatttcaccgaactagcggacaactgcgagcgatttattgatgctctggtggagtgtaacgaatccgccacaaagcttgccctgttcggacggctctctgtctgcctggcattattacaatccacactacttgaacctgtgccggagcatttgaaggagaacctgaccgtggagtccctcccaacgcgtctgcctgtattcgagccggaagctgatcagttaggccattactgtcaggttctgacacagctgttaatgagtggagctctgatggcagatgcagaacgtgtgatgcaagatctgttgtttgaactagtgacctactactctgacacgctgaaaatgccgcgctggctcagaacggaggaaggaatgattaccttggagtaa

SEQ ID NO: 164431 - DNA, 729 bp, Enterobacter cloacae
atgaaagttgtgagcgaaatgaaacaatttagaaggcatttttttattttcaaaaaaatagtcaaaaatggatggagactagaaagtgaggggttctttctctatttcttcggtggtgtgtgtctgattactttcgttttgttaaatgagtatttttctatttatttatcagaggacgcgttttcagaagcgttgctaagtttctttgttttttatcctatattgattctttttttgctaaatagcgcattgatggttcttaggttttattttaagagaagattgtttcaaaggtatttatacaaaagttcacggttagttgttcttaagatgtggcaaatatgcttgcccgcagcattcgtttttataggtgtgggtgttgtttgcatttgtatttatttatactctttgttttcaatttctcaggataaatatcttaggtatgctgtattgttttttggttatcctttagctctgttgatattattagttttatcacatgttattagctcgttaagattcttatttcgacgtgataaatgggttaggtatattttcagtgtggggttgctttttttgttttttatgctttacaaaagctctggcgcgagtcataaggttgagtttgaaatagataatgtgcaatatgaaaaactgcggaagttgtctaatgataatgtaaaaaaatatgcacaagaattatttaataacgctctgcatagagaataa

SEQ ID NO: 164432 - DNA, 549 bp, Enterobacter cloacae
atgaatgtaattaatacagcaattccagatgtgtttatttttgaaccaaaagtatttggtgatgcacgtggatttttctttgaaagttttaatcagaaaattttcgaagagatagtaggtcgaaaagtagaatttgttcaggataaccactcgcaatcccagagaggagtgcttcgtggactacattaccagttgactccccattctcagggaaagttggttcgttgtgttgaaggtgccgtatttgatgtcgctgtcgatatccgtaaaaactcagctacatttggcaaatgggttggagcagttttaagtgctgagaataagcatcaattatggattccagaaggttttgcacatggttttctgacacttagtgagactgcacagtttctttataaagcgacaaatttttatgccccacaatcagagcgtagtattatctggaacgatccagatattgcaattgagtggccaacagtcgaagctataattctctctgcaaaagatgagcagggtttgcctttatctaaagcagagttgtatctctaa

SEQ ID NO: 164433 - DNA, 891 bp, Enterobacter cloacae
atgaaaatcttattaattggcaaaaatggccaagttggttgggaattgcaacgatctcttgtgacattaggggatgtggttgcagttgattattttgataacacgctatgcggagacttatcaaatccccaaggaattgcacaaactattcaaacagtaaaaccggatgtaatcgtcaatgcagcggcacatactgctgtagataaagcagagacagaacaagaactatctcgtttattgaatgcagatagtgtagaagtaattgctaaagagtcagcaaaactaggggcgttactgattcactactctactgattacgtattcaatggcgaaggtacgcattatcgtaacgaagatgaacagactggtccgttaaatgtttatggcgaaactaagcttgctggggaactcgcggtagctaaacataatgcacgccattttatttttcgaactagctgggtttatgcaacgcgtggtgcgaatttcgctaagaccatgctgcgtttagcaaaagagaaagaaaaattatctattattaacgatcaatttggtgctccgacaggagccgaacttcttgctgacgctacagcaattgcaattcgcacggcagtgcacaatcaaaaactctttggaacttatcatttggtcgccagcggtgaaacgacctggtttgattatgcgcaatatgttttctccatagctaaagagttgggtgaaacactttcaataaaagaagtaataggtgttgatacatccgcttatccaacgccagcaaaaagacctcacaattcgcgtttgtcaaataagaaattccagactgcatttgaggtacaattaccagactggaaagttggtgttaaacgtgtcgttactgaaatactcggtaagtaa

SEQ ID NO: 164434 - DNA, 834 bp, Enterobacter cloacae
atgaaagtcaaaaagtccttaaacaacagtatgttgcttgctgagaatgacggaaaagagattatactctttggcaaaggtataggttttaacaccaagccaggtacaattatcgacttgcaaagtgtagaacaggtctttatgcctttggataccctcaagtcgcgacattatctgtcactaacggacacaattcccgcggatttttttgaagtcacacatgaaatagtcaaacaggctcaagcacattacaacgaaaagcttaattcagttttattatttactttggctgaacacttacattttgctgtcgagcgttgtaagacgaatacaaatattgcgaataaattgacctgggaaataaaacgttactatcagaaagagtatagcattggcgagttggcaagagatttagtatcagctaagtttgcagtgagccttcctgatgatgaggctgtacacattgcttttcatattatcaatgcaagttttcaatttgatgaaactaatgcacataagcaagtggagttagtgaatagaattgctgggatcgttcgctataaactcaatcaaaatattgatattaattcaattcattatgccaggtttattacacatttaagatattttgctgagagagtattaaataacagtcttgcaatagaagaaactgacgacttctataatgaattaattcgttttcatccaaaagcgatgggggttgctgaggtaattcgtgactttataaaaagcaattacgctattgctattcctaacgatgaacttacctggttaggcatacatatcagtaaactcagtaagtattcaaagtga

SEQ ID NO: 164435 - DNA, 1461 bp, Enterobacter cloacae
atgtcggaatctattcttcccaagaattttttatggggtgcagccattgcagcaaatcaggctgagggcgcatggaacgttgacggtaaagggccttccgttgcagatgctatagcctataaggcgcatttgagcacaagcgattatgccggccatatggccgtatctgatgagaacgttaatgatgcgcttaagggggagaatgataaaaattatcctaaacgcagaggcatagatttttatcatcgttacaaagaggacttagccctttttgcagaaatgggtataaaagtcctgcgagtatcaatcgcatggtcacgaatcttcccaacaggtgaagatgagcaaccgaatgaaatggggttacaattttatgaaaatatgttcacggaaatgcgcagacttggtattgaaccactggttactctatcacattatgaaatgccattagtattgagtgagaaatataatggttgggtccaccgaaaggttgtggatgcgtttgtgcgctattcaaatgtgtgctttgaccgttacaagaatttggtgcgttactggttaacatttaatgaaattgatagcattcatagacatccttttacgactgcaggtgtccgcgaagaaaaaagtttaccgggagaaagcacgcaggatatttatcaggcattgcatcatcagtttgttgcttcggcgttagcaacacgagactgccacgaaaaaataccaggtagccaggtaggatgtatgcttaccaagttaacaacttacccgctgacctgtcatcctgatgacgtggaagctactctgaaaaaaaatctggaaaactatttttattctgacgttcagattaaaggtgaatatccacaattaatcaagcgggacctggaactgcggaacatcaaaataaaaatgcagcctgatgatttggaaacgttacgtcgctatactgtggattttctttcattcagttattatatgtccatcacggagtctgttcagtccgatgccgagcgcactgcaggaaacactatcatgggtgtaaaaaatccgtatctacctgcttctgaatggggatggcaaatagatcctgtagggcttaaaatatcgctactggagctttatgaccgatatcaaatacccttatttattgttgagaatggatttggtgctaaagatacagtggttggtgggaaaattcatgacgattaccgtattaattattttcgtgcgcattttgagcagatgattgaagctgtcaaagaaggtgtcgatttaatagggtatactagctggggaacaattgatattattagcgctggaacgtcgcaaatgaccaaacgctatggttttatttatgtagatcaagatgacgaggggaacggttcattgaaccggttacgcaaggactccttctattggtatcgcaaggtcatagcgactaacgggactgatttaagttaa

SEQ ID NO: 164436 - DNA, 1869 bp, Enterobacter cloacae
atggatcatctaaatactggacgtacaattcttaaattagtcggcggagcaggtaacatcgaacacattgaacattgttcaaccagattacgattaagcttgtatgacaacgctaaagttgaagtgtctgagctcaaaaagttacctgaggtaatgggggttgtgataaatgtgcagtgtcagatagtcattggcaaagacgttatcaaagtgtttgattctattagaacattaatgggtaatgatgttgacgcgaaacagaaaccagcgctgaagaaaaaatggaatgcatggttgattgattttgttatcagtatttttcaaccactcatacctgcaatcgctggtggcggcgtgctgaaatccattttaattattatgaatatggctggatggctaactaaagacagttcgacatatcaaattttggactgcattggaaccgcgcctatttattttttacctttacttatcgcaatcactacagcgaataagcttaaagttaatccattagttgcattgactgctgtatcagtcttgttgttgcccacatttactacactagctaaacaaggtgcaacattaatgaccttcgatattacgaacgtctcctatgctgcgcaggtatttccggctatcctttgtgttattttttatgcacaaacggaatctctttttaatcgttacacgcctaatgcattacgtggcttcttatcgcccatgttatctctggtcaccacggttcccgtaacattgcttatccttgggccattaggttttgaaatgggttctctgttaactcatctgattctttggatgcatggcaaatttggattcatcgcaacaggcttacttgctggtggactaccatttattgtcgcggctggaatgcataaacctttcctcccttacgcaataatgtcaatggggcaaacgggtaaagaatctttgtataatccagcttctttagctcacaatatagctgaagcaggtgcttgtcttgccgtttctctaaaaagtaaagataaaatgtttaaaggtactgccctttcctccggtatatccgctctgtttggcattactgaacctgcactttacggtattactttactgcataggcctgtactgatctctgtgatgctaggtgcaatggtcggtggatccttcatgggatttatgatggtctcagcttatgcaatagtagcgccgagccttgccagtatctcaatatttgcttccccggataatccaaccagtttgatatatgcaatcatcggtgcacttttttcattctgcctggcatttttatcaacattattcttttggaaagaaaaaacggcgacaccctatccagaggaagaaaagccccaatttgaggagactgaagccactgctaatccagttttaatgaatgactttacatttaccagcccggttgaaggtaaagttatccccctgacagatgttaacgacgatgtattttcttcaaaaatcatgggggatggtatcgctatcgttccaacggtgggagcactatatgcacctgcagatggcgttattgagcatgtgtttgaaagtggccatgcagcaagcatgatgactgaccatggagtagagattatatttcatattggaattgatacgatacaaatgaacggcgaaggctttcacccgaaaattacagatggccaacgcgttaaagctggtgaactattaatcgaatttgaaattgatgaaataacaaaggcgggttatgacccagtcgtagtaatggttattaccaatagcgatcgttttatgatgaagccgtcaaacgagcaaaccaatacaccccagcaatttaatattttttcattaaaagaggcttaa

SEQ ID NO: 164437 - DNA, 879 bp, Enterobacter cloacae
atggaactagatgaaacacttgaagttatcaaaaataattttagtaataatcagaagaaactattgaaaaggattgagccagccactaaccgtcaagtagctatcggtcttattagtttacaaggagtggaaaaaacctctcaggctgagatagaggtaattgccagcctcatatctcagtttagtccattggaaatcgataattttcaaaattcaccacgacgaataactctgaaaggtcaattcccaaacggacatattgtttatatcgaacctcagtataaggttggcaatataaatccaaaagcccagccttgggcaatagaccttgtcctcagactaaatagatggattggtcaagatttggttgagatagcagctattggcatcgagtatgatggccacatagctcattatgtggaaagtaaaattaagtctacttacaagcgtgatgcaataataactagtaacgaaggatttcaatcacttagaatctcaccagaacaatggaaatcgtctaaagaggatcttaagaaggcaattaaaaagtattttgaacatcacataaaaaaaattgaaaaagttcaactaagcacaataaacgcccaagatttcaacaaatttatctatgaaaatgaaaataaaaatgaagtgatatccactgtaacttgccctttatgtaacggaaggggcagtttagcgggagaagattgtccgatctgtaatggaatgggatccgtaaaaagatatattgctgcaaaggtgaatctttctaattatgaaaaattcacttgccctgactgcaggaatataaaattagattgcagaacctgcaatggtgaaggatcaattagcagagaaaaagcattagaaatgtaa

SEQ ID NO: 164438 - DNA, 210 bp, Enterobacter cloacae
atggaagtgtctaacatgaagaatgccaacccggaacattacaaatcactagctttaattgctagtgctgaagatgctgttaataagaatgatgtcactggtgcgaaacaatatctcaaaggagtaatgaaatggtgtgtggatgtcagtactaaaatagatgtgaatgttgcaacagaattcattaaatcatcaatgggcgtgaaataa

SEQ ID NO: 164439 - DNA, 789 bp, Enterobacter cloacae
atgtctgtaactgggatgaatgcaggtgatattatcttgataaacaatgggacttggtacaacatttttttgcaaaaatcgcttcgcaaaaaatcatctgttaacgctacccatgttgcgctaagtctgggtgaaggtgcttttatacacgcggatacttcctgtggtgttggttttgcttattttccggacttactggttgattctaaagggagatggaaagtcataaggaacaaagaaataaattctgattttgaagaaaaaatagaaaaggccgggatttttcattttaataaaacttacaactacggcttccttcttaaagagaatgaaaaatcactattttgttctcaacttgtagatttagtttataaatccgttggagttgatatttttggccgtaataaaacaaaatccttgttgaatttaaataatgccttccccgttgattttgaagaactgcttattaaggatgaaagatggtgcgaggtgtctaatgtttatcaagataatttaaatagtggttttattgaactacaaagaaccaatttcctaatgcggcaagctcttataatgagtgagcgaaatacgcgtaaatttcattctgacatgcttgatttggtaaatactttaaatgaatcgcataatttattaccgaaggagtttaaaagcacagaactggaaacccatttatctgaaatgattacagggctcaatgagagtgaaagtgcatttttttacaacttttggaatatacgatcaaataaaaacaggcaattaaggtcatga

SEQ ID NO: 164440 - DNA, 459 bp, Enterobacter cloacae
atgctattagcgatcctgggtatgcacttgctggttaagcgggatacttacaacgattcttgccgtattcacagtaagcactctgtttggcgtatttttattcaaatagcaaacaataataaaaggaattttcatgaacaatattccacctatgccgcggttagggatttatgtctcaaaaatcgatccccccttcgcatcactgtaaccgacgttgatattgttgatgactctcctgatgatgaattgttttatttagtccgccgggtcgagggggaagatgaaagtgatatgtctgcgatggaatttgagctagacccagtagagtggcaggctttcgttgagtctgagaaattagtgtttgagcgcgatccgtacatggattcagttcccgaaaattcaaaccttgcgaaaattagggatttactcatgaagactaaacagaatgaccgttcgtaa

SEQ ID NO: 164441 - DNA, 504 bp, Enterobacter cloacae
atgggagttaagtatagacaattttttgaagagcaagttaaatcaaacggtaaggttaactgttttgcctcattaataccatcagaacagtggttgatatttatcggtgttgcagcgctaagcggcgttattggaaatgcaacatatgatttagtaaaagttataatcaagaatattatcgagaaagcaaaaaaagaaggtgcaaatgaaatcgcagaaaaatatgactcagatgaaaaaattgaaattttaatagtccagattaatgagtatattaacttcccggaaaaaatccatcctgaggtactacgagaaattaaagaagaggaacgagttgatgactatatgtatggatattcagagataatggagattacaggaaatataaatatttcttccgaagaggtggaagaaaaaattaaaaaaataaaaagcagaaaatccaagattaagtcaattgatgaaaaaaatttcgcccatttctgggataatttcaagaaataa

SEQ ID NO: 164442 - DNA, 618 bp, Enterobacter cloacae
atgaaaaatctccttgagcaagctttccaggaagcagcgcacgcagcagatcgcgcagtcagagctgcgatgcagaagtattcgaacgggttggtcacggatgaagacgatatcactggggctctgatcggccgtttggacgctgcttttgacgaaaaaattggtggtatcacttggtcttcatccattctcagacaccgtaagggtgccgctgcacaagagaagagagctggtgcagacatgctgtttcacgtctcaatcgaaacgcctcagctcacctattcaaagggggttctgattcagtcaaagagaattgatgaaggtactgcaatgacagcagatggtcacaaagaactgctgggtcagtgcgacaaaatgctgaatatcaccccggcttcgttcgttttcaactatacaaagtcagagatgcgctgcgcttccgcaacgaagatttctgggacaagtagtcgaatattaaacgactcgtgcaacctgacctcatatcgattcttcttagaactgttccgatgcactactggggatcgtaacattacatcggccaaatttgatgatcttcagatacctcaaggcatcgccatcaagggaacactagagtaa

SEQ ID NO: 164443 - DNA, 1041 bp, Enterobacter cloacae
atgagttctgaaaaagcaaatcaatacgaacaccttatgaagaacaggccacatgtcgttatcctgggtgctggcgcgacaatggcggcgattcctaacggggacaaaaacggcaggaaatcatctgccatgaacggattcataaaatcgctaggaatgactgaaatcctcaaggaagtcagtcttcaaactagcagcaataacctagaagacatttactccgagcttcacgatcgccctgaatgtgatgccataagggaagacctagacagacgaatacgtgagtatttttcagaactggagatcccagatgaaccgaatatttatgacttgctgctcttggcactgagaaagaaggaccttgtcgcaactttcaattgggatccgctgttgttacaggcgtatcaacgcgcttctcagatcactaaggatttacccgatcttgcattcctgcatggaaacgtacttgtaggctattgccgcaaacacaagtgcggtggaattctcacggcatgctgtcgggaatgcggtgaaccttttgatcccgctccgctgctctatcctgttacacataagaattacgctgccgatccttacattcaggacaactggaaggccattcaaaacaagctgaaacgcgcatatttagtaactgtcttcggctatagcgctccaaagactgatgttgaggctattgctcttttgaaggaggcttgggggacagttaacgagcgcaatcttgaagattttgagttcattgacatctgcgacgaagacacccttatttcaagttggcaagaatttattcattcgcaccattaccaagtgcataaaaatttcttctcgtcgagtttggcacagcatccgcgtcgaacgactgtagaactcttcgatcgcactatgaattgcatgtttactaaagcagttggaaagtttactcccggtatgcgatgggaaaacatcaattcccttgtaaccgagcttgttattgaagagaacaagctttcggctgagggctttttggtcacacaaaaggcctag

SEQ ID NO: 164444 - DNA, 1428 bp, Enterobacter cloacae
atggaaatattattcgttgaagataactcatcttacgctgacacactagtttctgctgtaaaagacaagtttcctgagataacttgcgtcgttgtcgataactctagctcagcagaagctcttttggataagaattattacgatcttattattctcgatctttgcatgccaagcgtaccgtcagggcttgaaaaagtagtagagaatgggcaacagctattttactctgtgcaacggttaatgccgggtacccctatttatattctcacaggttccgaactggatagcttcgctactaaccttttaagacacggagaaaggatcaaactctggggggcggtgagagaattctctaccgttctatactttagaaaagatgaaaccctagagctgatgaaggaattgtcagaggtgtatgacgaggtagtatccgtaaatgctacagttataaacacccgaggtaaaaatatagctttcggaagagggcaagagcgagcactgcaaagctttgtaagaagcatggggggatttgatggagtctactatccattgagtgggctatctggctcgttggtcggcagaatcgaagtccgcgatgatcgttttaatgtaataggtgtattcgtagccaagcttggattgtcatcaaagattcagaaagaaaatgaatcatatgcgcggcatgtaagacttatgcctatgaatacatttacacctttattacttagtatggacaaggggcttagagagtatagcgcgattttctatacgctcgctgagggttatacagatactttatttcaggttgtccggaatgatccatgcaaggctgtagatgtgattaaaaaggttcgcaatagcatggagcgttggtccactgcgcgaaaagtttcaagagttaaagtcggtgaaattagacgggctaaattaaatgatactgattttaataaactagcgactcagtatgatatcgaagatataaaagatgttgaggacattttcgtgaatatttccgaatcgtgcattcacggagacctccatggtggtaatgttcttgttaataaaactggaacaccgatcctaattgattttggtgatgtcggttttaactatacgagcctcgacccaataaccttagagatgagccttatttttcaccctgactgtgtagtgtcaaaagtttctcatgagatacgtccctctataaataattggccgaacattgatcagtattgccaagataatccttttaaagaggtgattaagtactgtcgagactgggcttacgacataagtggtgacgataaatctgtattagctgctggctatgcattcgcagtgaggcaactgaaatacgacacagttagcgctgatgagactattgtacttataaaacgaattgttgacgctatccaaacgggaagctaa

SEQ ID NO: 164445 - DNA, 927 bp, Enterobacter cloacae
atgatggatcgtgagcaagcagctatttcacttttgagcacctcagtagatgaacgactcggagctgctcgctttttcaccaataatgcggagccaactgatgcgaccatgttgatgctagcactttcgaaagaaaattctagatgggtgaagagagcgcttgagcgcgctattgaaagattacaggttggaccaccaaaaaaagagattagtgaagcggccacagaagaatacgttatggataccaattcggatcggctccttaaagatctccgagcgcaggcggtagacgaagtttccaggacaattctgcatgagttttctccgctcatagggtccctccgtctagccgcagcaatggagttcgatgcttatgaaacctctaaaaccaaacattgtgtagaacgtttaagtggcctgctagacgctgtcggaaagttaaaaaaagcggcagctactccgtcgtttaatgaattcgatctctcagagcttatcacagaatgtattgaggttctgaatattaacaatgaaaacatagtgttacgagttgctggtatcaaaccttatatggtacaagcggatcgggattcgttaggattagccatagataatggaatccggaatgcagtagaagcagttagggaattttcaagactcgacccagcagaaattttaataaactggggccctgccggagccgaaaattggcttgtcattcttgattgcggcccaggattttcgggaaatcctgaggaagcgttgaagcttggagcatcaaataaggatggacatttcggttatgggctagctactgcacagctgtcaatgcgctctatggaaggggacgtttacgtctccaacaaagacgaaggtggagcacgtttcgaattaagatggtacagggattatggaaatattattcgttga

SEQ ID NO: 164446 - DNA, 1839 bp, Enterobacter cloacae
gtgggcatcgagcggctacaaatcgaaggtggttttttggatggtttggatctcaaattctccaaaggtctcaatgtgatcattggtgctagggggactggaaaaacttcagtaatagagttaatcaggtatgctctagcagctcgtagccacactaccgaggcaaaaaaccgctcattagaccatgccagagcgatactggatgggggggaggtgactgttgtgctaaatgatctggtggatgatatcaccatttcccgcacagctgacgacgacaaaccacgctctacagctagtttcgttgcgccaatagttttgtcacaaactgaagtcgagactctagggcttagtgatgcaggtcgcttatcattgattgatggatttatccatggtcggaacattatgtctgcgacagaggcggagctgatcagttctttaaagagcatttataaagaaattttagccatggaggcggagattacttcgctgtctgaggaggttagtaaggttccgaaccttacatcacagttgcttgattttgaacggcagcttcgggaccttcagggaaattcagatgaggtagccataaaacaagctgagttatcactgctcacagaagaacttgctacagcctctgctcgcgaggatatcatcgcgagattcggaaaacatgcttccaaatggggaacgaccttagataatttgcttcttgagaactatggtccagatgcttggattggtgagccagaaaatgatccggttgctgatcttcgcgggtcttatgactttgctatttcaagaattgctgaggtatcgaaagtttttcaaaaaattgagcatacatctaagcaacgacaggaggagatatctgctaaaaatttcgaagtcgagcgtaaatctcgggtattgcgcactgaacttgataaagtctccgaaggtaccggagcgttaagccgtaatatttctttaattaaatcacaattatctcaaataaatatccggcaaagtctcttggatgaaagaggtagaaggctggacgcgctacgcaaacgacgtgatgagactgcaaatgagcttgaagatattcgccaaaaacgctataccatgcggagtgaagtaacacagaagatcaatttggccctcacaccgtatattaaagtagatattgagcaattatctcagttaggcgagtattccaaagccttaactgatgcgctcaaaggaagtggcataaagtataatgacttggcctcaaagatttcagaatatatcagtccacgagaattagtgacgatcgtagataaggctgatttcgaaaagttggcagatcttgtgaatatacctaaagagcgggcagctcgggtactagcacagctacgtgaatttggtcttgcagatatattgacctgcgacattgaagatgatgtaaatatgtatcttcttgatggtgtcgactataaagaaatttcagcactctctgctggacagcgctgcacagtaatactatctatagttttacagcactctgaaagaatattgataattgatcagcctgaagaccacttagataatgcatttgtggctaatacaataataaaaacattaaagaaccgtaaaggaatcggacaaataattttgtctactcataatgccaatattccagttttgggagaggcggacttgataattgagttgacttctgatggcagaaatggatttgtacaggtaaataaacctcttaatcaccctgaagccgtagacgctattacaaacgtgatggagggtggttccattgcgtttgccaccagagcaaagttttacgaagataattcgctatga

SEQ ID NO: 164447 - DNA, 999 bp, Enterobacter cloacae
atgaaagaagaacagcttttgtctgatgcaatagagaatctgccaaaaggattccatttgcagtatgaacatagcggtagacatggtaggcacgatgcctggggtaagctaacagggccggatggtgagtcagtgacatttgctctggaagtaaaatttatccaccgtaaagagtcactgatgtctgttcgcgaacaaatggttcgctttcctgcggattttcctgtgctgctggtgtgtaaccgcctgacgtctgcactggcggaatattgcgccgacagccagatcaactttatcgatacggcagggaatgcccgtatccaggttccggggttgtatgtgcggatcgaaggccgctatgaaaagaaacccgtttccgccagcagtcgttttgctgaaggggtgatgaagcttctttttgttttgctgtctagcccagagaccctgaacgagacttatcgcagtttggccgggaaggcgggtatttctctgggaatggtcagcaaggcttttgattatctcgaagcgcaacgctatttccgcaaatcgcagaaggggcgtcgcttaatcaatgaaggcgagttagaggttttgtggctgaaagattatgctaccgctctgcgccctaagctggattcgctttctttatccgcgcctgtttcatgggatgagttgacgcttgtgtccggggaatactggagcggcgagattgcggcggcagagctgagcggaggatacctgataccagaaaatggcgtgatttttacatcccatccgttgttacaaaggcgaaaggaactgggactaaaacctgttccggaggggaaactacagctgatcgccggtttttgggggaactttgtactgaaccacaaagccgaggcgatgctatgcgtggctgaattgctggcaagcggcgatgacagaaactgggaaacagcaaggataatcaatgacaaataccttcaccttaatgaatccgatctcttcagctactga

SEQ ID NO: 164448 - DNA, 813 bp, Enterobacter cloacae
atgacaaataccttcaccttaatgaatccgatctcttcagctactgaaaagttactgagccagatcaaccgtatttgcatcgcacaggggatcccgttttttattgcaggtgcaacggctcgtgaaattctgctccatcatgtacacggcagaagtattggtcgccgaacccgtgatattgatattgccgtttttgtggatagctggccgagatttgatgcgcttaaaaatgctttccttgctgaaggtgcagaggctgtccgtgataacgcccatcgtatgattgtcaaagggatcgaactggatattattccttttggtggtgttgctgaagggaatcaaattgcctggccgccagagcgtgagatcatcatggctgtggacggatttgccgaggtattttctcatactgtaaccgtacaactggataatggtgaaaatcttccgttttgttccttaccagggctggcgctgttaaaactttttgcctggcgcgaccgtgggcatggaagcaccaaagacgcgaccgatctctttaagattatccgtgaatatggtgctattgaggatgaacgcatctatgagtcgcccgtagaaggggaacgcctggattgggatcccacacgtatgggggcttttctgttgggaagcgatatcgcaacaattagtgagcattcatccttgctggatttacggcatcttgataaagaacgcctgatagatgcgatagtacgacaacatggcgtgggtgatatcgccgggattgagcagatcatcaatgatttctgggatggtatggttagcgatcgttga

SEQ ID NO: 164449 - DNA, 795 bp, Enterobacter cloacae
atggataatttaacgctgcttttttctgatgtggcagatgctcttggtattgagtccgccgctattgtagaaaaagatcactatatcgttgagcttctacatttactgaaaccgctaacatttgacactcatcaactggtgtttgccggaggaactgcactggcaaaatctggcattgtgcttaaccgaatgtcggaagatgtagatataaaactggtacccacagatactttcttgtctctttcgcgcccccggcgcaaaggtattcgtaaagagattatcgagacaatttctaatgcaataactgcaacagacatgttcagctttgacgatgcccaaccaaaagcgacgcgggatgaatatcgttacaacgacatacccgttcgctatccgcagcgggtagcgcaagcaccttacctgcgtccttttatccggctggaattgatggaagcaaatttgcttgaggcaccagagttgagggatattcatacactggtgacgacacttactggaaaagcacctgtcatttcagccttcccctgcgccacaattaccagtactcaggcagaaaaactggtggctatgctgcgccgtactgcagcagttgcgcgtaatattgaacgccaggatgacgcttcgctggtacgtcatatctacgatacatactgtattgccgaggcggaaaaagttgatatgcctctgcttactgatttctttaagcgaaccattgagcaggtatccagcgttatggcaaccagtatccacagttttgtgcttcaccgaatgatgagctaa

SEQ ID NO: 164450 - DNA, 396 bp, Enterobacter cloacae
atgacgataaaaacacgcattcagtcacgactgaaacgctcaaaacgttatgtattcactcgtgacgatttcaaggatattgcaggctatgatcagattggcagggtattgcgcgaccttctcaaagaggggcaactactgaaggtgggctacggtgtgtacaccaaagcgcgtcggaacagcatcactggaaaagtcatgcccgccgcaccagggggatcttcggcagtgatcgttgaaacgctggagcgcctgaaagtacgttaccgctatgaaggagctacacaggcatataatagtggcgaatccacgcaaatccccgtgtcaccggagatcaaaacatctccgcgctttaaacgcacattgtctgtggggaacagcaaactaaatggataa

SEQ ID NO: 164451 - DNA, 444 bp, Enterobacter cloacae
atggccgaagccattacgatgaacagcggcgtgacgctgcgccatcgccgccagtcgaaagcgtattacaaacccgcgaccgacctagtgatgatgccgcacccgcaacagtttgaaagcagcgaggcgtactacgccacgctactgcatgaactgacgcacgctaccggtcacgcttcacgcctcaaccgtcccggtattgctggagcggaacgcaccgaagcactctacgccgctgaagagttagtggcggagatgggaagcgccttcctgtgcgcctattgcggcattcagggcaggctccagcacgccagctatatcggctactggctggatatcctgcgccaggacaagcgggcagtgatccgcgccagcggtatggcgcgccacgccagtgaatggctgctcaacgctgtaccacaaccctgtcagcttagcgcctga

SEQ ID NO: 164452 - DNA, 1284 bp, Enterobacter cloacae
atgattaggttcactaatggagacatgttttctgtaaatgcagatatattaattaatactgttaactgtgttggagttatgggtgccggtgttgcattagcatttaaagaaagatatccttcaatgtacattgaatataaagaattatgcaataaaggtttaatcaagccaggtgaattacacgtatggcataccaatgataaaataatagtcaattttccaactaaaagacattggcgaaataaatctctttataaagatatagaatcaggattagttgcactaaatcattttttaaaaactaaaaataaaggtcgtgttgcattaccagcattgggttgtggtcatggaggtttagactggaatattgtatcaaaaatgattaaagatcatctttctgaaatcaatttagacattatggtgtttgagcctaatgactctcgcaatattacaaaaacaaaaaaaacagaaagcattaagcatttggatttagaacaacttaatatatcacaattgcaaacatcaatcttctttcaggagaaacaatatatacaaggcaatacggatttattaaaacaaaaccccaaaaatatttttattttagaccataagaaagataatacatctaaagcaacttctgcgttaataaaatccatcatgaatattaactctcaaggcgatgtaagtgcaataatctatcgctctaacaaggatgaccatataataaaaaaaatacttgagcagaagcagtcaattataataattttacctttcggtatgttcgcttacaataacaatatagtgcaggaattaaaaaccgaaagtaacatactttttatatccccatattctttacacgaggaatggtcagaatataaattcatcaacatgctagtatctttatccactagtaattttaatataatttcttctgatgatcctccgctatggataaaagatctttacaataacacaaaaaacatcaataacatttatttaataaaatataatgatacattatcctatttaagtgcgattggtatcgaaaaagctaatttgttgggaaaacaaagtaaaactggtgatgtaaacttaaaacctttatatcgtgaaagaacgcaacacgacaataatttattctcactcaacttccatgaactaaagaaagttatttatgcattggagcaatctggaattgaagatgaatttgaatacttgttaaaattcaaaagcgaccatcaaatatctaaagacataataaaaaacattctaaaaacaaaataa

SEQ ID NO: 164453 - DNA, 1317 bp, Enterobacter cloacae
atgactctaccagctaaccactctcaaagatatgtttatcatttcacacatatagataatcttgaaagtttattttcaaataatatgctttcaaataatgagctcatgcgtagaaccactcccacacttagcattgcagaacccgacatccaagcaagaagagctacaatgcaagttacttgcggtcctggtggcgtggtgcatgactatgtgcctttttatttctgtactcgtagtccgatgttgttaggtgttgtaaataaaagaaatatcgatcagcttgatattatttatttagagtttaaattatccaagttaataaattataacttcgtatttacagattcttctgcaaatgctttcactccccccaatttttatgataatttagcacacttagataatctagaatgggacttaatcgactcattgaaatgggctcctcccgcaaataaaaagcaacaaaaaatggcggaatttcttgtatacaatagagtctcaatatctgacattgagaatatagtggtttggaatgaaggaattaaggaaagagtaaaaaaaattgcagcatcgctaaatataacaatacccacaatttcatttgaagagggtcccagatggcattattacacaaacttcatgaataatggcagaaaatcatgctcgcccgggcccaaagaaactaaccaagccttcaaaaacgctttaacaaagatacactcgagaactcaaaaaatctcttacgaatttaattcgctggatgaattaataacaacacttagaacaaatattagcaatattaattatacaaatgagttagttgggttgcattctgaaaatgctctccatagagaaaccgtagcagaacacactttaactgttatttcgaattgtgctaaaaacaaatattatttgcgtttaaacaatcgttcaaaaataattgtcgaattagcagcatttttacatgatataggaaaaggtcccaaaagtcgctggcctgatggtacgcaaaaagttgatgctcgtcatccactacttgcaatgccaatgcttgaagatttaattataaatagaattaaatatatcgataacagtgaaatagaacatcttttaaagttagtttgttatcatgacctgattggtgatatacttggccaaggacgtgacgagaaacaattattagatttagttaaatcagaaaatgaattaaatatgttattttgcttgtctgaggctgatgtcagatctttaaatccctactggtggaaggagggtgaagctgatgcaatataccaaagagcactagccaatatttaa

SEQ ID NO: 164454 - DNA, 228 bp, Enterobacter cloacae
atgacttctatctactcaaatgactaccagatggtgatcagagttctgcgtgaagcgcggatggcttgtggcattactcagcaggaggttgccagtgctttcggaaggccacagtcatttatcgcaaaggtagagagtggagaaaggcgtctggatattgttgagtttgtcagactctgccgtctcttaaatattgaacccgcgagtatactgaataaactagagtag

SEQ ID NO: 164455 - DNA, 1278 bp, Enterobacter cloacae
atgaataatgatgattatccatggttcagaaaacgtggttatttgcatttcgatgaacctgtttcattaaaaaaagcggttaaatatgtttcctctccagaaaaaataacaaaacattcttttctaccatttttaagctttgaagttaaatcgtttaaaatcaaaaaagacaaatcaacaaagcaattaagtaaaactgaaaaattaagacctattgcctactcctcacatttggatagtcatatctatgcattttacgcagaatatcttactggacattatgaattattgatccaagaaaacaatttacacgagaacatccttgccttcagatctttaaataaaagcaatatagaatttgccaagagagcatttgatacaattactgaaatgggtgagtgtagcgctgttgcattagatctttctggtttttttgacaatttagatcatcaaattttgaaacaccagtggtgcaaagttattgggactgaagcgttgccgcaagaccattttgccatatataaaagtataacaagatattctaaagttgataaaaatagagcatatgagactttaggtatatcgaagaataaccccaaatataatagacgaaagatctgcacccctgttgattttagaaataagattagaaaaaatggtcttattatagttaataaggcccaaaaaggtataccccaaggatcgccaattagcgccctactttcaaatatatatatgcttgactttgatattgaaatgagagattacgcacaggaacttggtggccattattatcgctattgtgatgatatgttattcattgtaccaactaagtataataaaactctagcaggtgatgtagcccaacggattaagaatcttaaggtagaactcaatactaagaaaactgagattcgagattttatatacaaagacagtaccttaatggcaaatatgcctttacagtatcttgggtttatttttgatgggaataatatatttttacgttcatcttctctcgcaagatattcggaacgaatgaaaagaggtgtccgcttagcaaaagcgacaatggacagcaagaataggattagacaaaataaaggcgaagctttaaaagctttatttaagaaaaaattatatgctagatactcacatattggaagaaggaattttttgacttatggttatcgcgccgcgaagatcatgaattcaagagctataaaaagacagttaaaaccattgcagaaaagattggaaaatgaaatactaaaataa

SEQ ID NO: 164456 - DNA, 156 bp, Enterobacter cloacae
atgaatatcatccaagtgttgcttaccgtcgtcacagtgattggtctcaccaagaactgtgggaggcttgacaacctgtacaatacccctaaacctttgtttagggcattatttttatatcatcgtaaattaaaaaaaacaaggtttacctattaa

SEQ ID NO: 164457 - DNA, 705 bp, Enterobacter cloacae
ttggcaagtaatattagtgatccttcaaatgttataaatttttttgttgcacttggaacctgtgctgcagttctggtggcattaatagcaaaaaaacaatcttctgtggaagcaacattttcgttgttgctatcacaacataatcaatccttgcaatctctaaaatccgcgaagaattatcaagaaaacataaataaagtaatagatgctcattcaattttaattgagcgagactcacttcccaatgaaacaaagttcattgatagacagaatgaagttatgcacgaaatggatgacttttatggtagttattttaggattctgtatcatatgattaagtttatagacagtgatgtgggatattatccatttgattttaaaagaaagaagaaatacacaagcctagtgcgtgctcacatggatagtgaaatcacatacttactggctattaattgtgcacatgctaagccaggaggtcaatattattcatataaaatattaattgaacgctatgcattattagaacacttgatttttaataaaagttttttagggaaatactatcatccagacttacaaaatcgttcgcaaaaagatttaaggttaattaattgcctgaaaaaacatacccctttaggagagattgcaatcaggtataacgataacgcttttggttgtaaccctgatcgtattgatttcctatga

SEQ ID NO: 164458 - DNA, 246 bp, Enterobacter cloacae
atgttaagttatttttcaaaagatgaggagttgacaaaatcccctcctgttgtgggggcaaagatccttaatttatttgatgaaactaaaaaagaaaaaattagtattttcgatttagcaaaggaattaaagaaaaacaactctttaggagtgcgtgcaatttattttggaatgatctttctttatacccttgatcttatcgattttgatgagccatatgtgataaataaaaatgttaagaattaa

SEQ ID NO: 164459 - DNA, 258 bp, Enterobacter cloacae
atgatgatacatttcggcaaatggtgtccaaagattatgatacccggcctgatgaacacgtatacagaaatcaacatcattgaaggctacagcaaaatctttttcattcagcccaccgacgttttcataaatttctttacgtattacaagacatgcagcagtaaccgctataaaattttggacaagattagctcttccaaagtagcctgggtcgttacgatgtatccccagatgcgcatgaccggcaatcccccctaa

SEQ ID NO: 164460 - DNA, 126 bp, Enterobacter cloacae
atgttcggcagagaagcggtattcaacgacaacgtgtttactcaggacttctttactgaaaatgccacacataaacagaactgtacctcgtttgacccaaaacgtgttatcacacacaacgtttaa

SEQ ID NO: 164461 - DNA, 603 bp, Enterobacter cloacae
gtgcaattcgccagtcgacaaattcgactcttcaagctcagcaactgttacccttacaacaatctccatacccttaccctctgtcgttacccgctgatgcgggagaaatgctttggtgctggctccccactttcaagcagcagggaaggccgtcgtcgccttggtgagccattacctcaccaactagctgataaccgtctgccagcccaaagcactcaccaaaaaccccgacatcgccggggtttccgaaagcatttgtggtaccgattatttgtgagcgatatagctttgccgtcgcatagaagctcctttgttgcgtgggttgatgaatcgaaatgctttggtgattggatggccgtagtaggattacggcgccatgctgttctttcgcttaaagcttttccaggctgcgtctttctgacggcagttcagcccgcattcatccaatcccaaaacattccctgtattggtcagcgccaactccctgccagtgttgcccgttctcacgccgttctcgctctcgcgcggggatactctctcaccgaccggatcgcacccggtgatacagcacgtttacgtgtaggggtcttaacaggtcattga

SEQ ID NO: 164462 - DNA, 1485 bp, Enterobacter cloacae
atgcgaaataaattatctctaagcataatattgacatacctttcaattggtgttgctgcccttctgcttagagagttctggttgatatcaagaaacggtttgcatgtcgatgagtccctaagctttgttctatcgtcttacagtaatattggatatctcgattttcctaaagatatatctatcactggagatcagttgcgtgcggccatgtggtttagtgatggaacaattctcggcctgttcaaggacgtctcggatctttgggtatacaatagagaccagccacatagcaatctgtactacaccttgttaaggatatggtttggattgtcaactgactccagatcttctttcataatgatgtgggctggtcagttaaatatactgctatacattatttcattttcttttatggcggccctgtcatataaaatatctaaaaatcattttttaacatgtctatgtgtaataatagcattcttcaatcacgaggcaatttcaaactctatatttcttaggccttatcaactccaggagacattgttcatagtttatctatatgcaactgcgagcttgatgtcaaacaccaacaggaactatatttattatttgttatatggtttaattactgccctaactctattgactggttatttcgctataatattagttggaattatgtcaatattcatcgtaattttttgctacttagacatgaggggagatattcgaacttttgttaagagggctgctacatattcattatctacaattgtattagggtacattatatatccaccatatctttttgttaaaaactatagaaaagatgaggctatgagcaaagcatctagcctgtatgacaatgccttgctgtcattaaagtctatgcagataatggataatgtttattttatgtttgcgatagcgtcagcggcatgtcttgcttacgctttatatagatacggtaaatgcagggattggagatcatactttgtaatttcatttgttaccacgattattttgtggtgcctgcttgttatgtttttctctccctataaaatatcaagatacatatatccaatcatccccttggcatccatagtatatgtttttgtgatatcttcgctaagctctcaggctctaaaagtggcctccatgtctgttgtttctttggcttgcctattcacatcatattctaatggatttgtagattatcaattcagagaaaagcctatcgagtgctcattttcatctaaaggtaatgtggcgtttgtgatctggagggtgtataggatgaatgaattcgccgagtgtctaggctcttccgatgtttattatttcactgccgatctcgacagagctttaaaatcaggcgctaaatacattatatcagatcatgattttaaaaataataatctccaaaaggttaagagtgatagtaaagctccgtcatactacaacgtttacaaagttgtagaatag

SEQ ID NO: 164463 - DNA, 288 bp, Enterobacter cloacae
atgttgggtatctcacgcttgcgctctctcattccatgcatcggtaaactgaacgttgccatcgcagtatttccacgtgattttttcatagcgaagttctacacactcgaggtggttgtgcttctctttggtcggatctttggtgtcgtgcatcactggagaaacgccgacaactctcacactttcaagcaggatgttgaagtattccgcttcctgtcctgcgtcgttgatcttataccatttgaactcagcagatttaagcgtctgccagtagcaacagctttataa

SEQ ID NO: 164464 - DNA, 531 bp, Enterobacter cloacae
atgagcaccggggagtttgatataaatagcaagatcgctggtattaataaagcgattaaactaaccatagagaacaacccagagattcatggttttattattatattagatgagtatgatgaacaccttcatccagagtggtcaagattatttttagattacctactacaatacttgagcaaaggttacaataattatttcttccagatacttttatcaacacattcaccatatgtcatcagcgatctgttaaaagaaaatgttataaaaatagaatacatcccttctgaaggtaaatattatagtagtaaagcaaaccgtagttttgcaagcaatatatatgatataataaatgattcattctttttatcgcaaccaattggtgagtttgctgtacgaaaattaaatgaattattgactcaagtagataatgtaaacatgaataccacttcaaaaacttatactagcctacgtaatataatacctgtctcttatacacatctgacgctgccgacgactccttacgtgtag

SEQ ID NO: 164465 - DNA, 147 bp, Enterobacter cloacae
atgggggatgaaagcctgccgttcgcgataagcaatgaccagaccaccctggcgctgcatttttacgcccgctacctcgccgtgacgaacgccgttacgccgggggtggctaacgctgccgccacctttgtgctgacctatgcgtga

SEQ ID NO: 164466 - DNA, 552 bp, Enterobacter cloacae
atgtgtatcaagggattatctcttttcttctgtgctgtttgcgttggttgtagtgggtattctcagcaacaagagcacatagatgtgccgacttactcggagaactatgataaggcgcttggatggctcgtgacagctaaatacactgatgttgataactcggaaatcgtaatgtcactggttggagacttttgcaggagcaaaggaaaggaagccactctttataagacgacctctggtagcacatccactattcaacaagtttgggcttgtcagactcccccaatattgaatgataccgacatactgagcgggatctattgtcatttcattgttaacgcgccccgctactcggtagatttcacgaacccccagaaagaaattgcagaaaaaatatttgttaaaactttcattaaaaagggaattgaatatccagttggtggtttttacgaaaagtacctgaataacttttcttcctgggcagtaaccaaacacgaagagagcgctactactgataaggtacgcgagtggtttgacactcattgccagtag

SEQ ID NO: 164467 - DNA, 441 bp, Enterobacter cloacae
atggtcacgatcaccaaaacctacgagaagatagccccgaaacttgatgacatggtgcgccgtgggttcagcagcatagagctaaggcatggaagccaaaatgagatctacgcgtatggtgaaaggaaactctcagcagaggatttccgcactctctaccctgaaaaggttagggatattccgcaagacttcccgccagatgccacagtgatcgtggaagacatggtattgctatacaagccccgtagcggtcaactcaccagaaccgcatcagagacacaacttaagcatcaccaagctttcaatgattggtgtcatgtcaatgttggaaagggaaaaggctacactcaggcaactaaaaacaagattaacgcagtttacataatagggatcgtcatgataattgggcttgctttctgggctgtgtcatacactcgctaa

SEQ ID NO: 164468 - DNA, 393 bp, Enterobacter cloacae
atgactaaagatgaatttattcggctggtcattggtatgccgtgggctaaccgggcctgttctttcgagaaagtcgactgctggggattgtgcgtgctgtattaccggcacgttctcggcatcgagctgcaccagacgccggactacgaagccggggccgacttcttcacctgctatcagggcgacgtcgtattctggcgcaaggtcgataaaccggaagagggcgggatattcgtcgggtaccgcggcgcgcaaccggcacatgttggcctgatactgaaccggcaggcgctgcactcgcgtggagagaacggaagcgtgcgaatggactcgttgctggtcattcagcgggcattcaccaaagtggagtatttttcttatggcgctggttga

SEQ ID NO: 164469 - DNA, 2334 bp, Enterobacter cloacae
atgtctgaaaaagcaggcgagatttattacgacatcgaggccgatgtttctggcttgctcaaggcgcagggaaaggccaataagtcgctcgactccatcggcaactcggcgaccaatgcagccaaaaagatggatgagttgcagacgaatatcaaccgcgtcgccggggcaattgccgcctcactcgttgttgactggggtaaggcattcatcgttgctgctgacaacatgagccagctcaacgcgcgtatagagaggctaactggtagcgcaacaacagcctcgcagacgatgcagaatctgatccgtatcagttcggcaacgggtggttcgctacaggatacagcgaagctgtgggagactctcagcactgcgttgcgcgataccggagcgacaaacggccagatcatccagctcaccgaaacacttcagaaaataggtcgcattggcggatcctcgacagaagaaatggcgaatgctcttcgtcagttcggccagtcaatttcatccggtactgtccgggctgaggagttcaactccatccttgagcaaatgccggaactggcgcgccagattgccgccgggatgggggtgagcattggagaacttcgccagctgatgctggacgggaaactgacggcagaagatgctctcaacgccattcagaagcaaaccggctcagtgaatgcagagttcgagaaactcccacgcacactgtcgcaggccaataccgccctgacaaactcatttctgtcgatgattgactctgttaaccaggcaacgggtgcaagcacggggctggttgcagttatcgactcaatgaccgctgcgctcgaccggctggtggggaaggcaatctcagcggattcgcaaatttcagatctgaacagcacagcagaaatgtttacccgccgggcacggacctggtcatggcttggtcttgatggctgggaggcgcaaaacaaagcgctggccgggctgagcaataaagccgccatgctggttggcgacctggccgctgtttccaaagcatcgcagacagcggctaacacaaagccgatcgagataaagaccacggcaacgaccatcgggagcaagtcgaagggtggagcgtcagccgctcagaaagaggcagatcaatacgctaaagcgcaggaaactgttaaccaaaaactggacgagctgaggcagaaggccgagctctcagctggcagtgtcggtgaactgtccagagctcaggccgtgcttaatgcacagcagtctctcggtaacaccgccactcaggagcagctcattcttgccggacagctggcaggcaaagcctgggacagtgccaacgcattgcgtgagcaggccaaggctgagcgggagcgcacagaggctgccaataagttcagtaccatccagggtaaaaccagcaaaactgccgggctggatagccagtaccagaaagacattgctgacatccagctttacgcgcagctttatccgcagaggatcggggaggctgaggcagcgcgcgccgctatcgagcagcagtatcgtgatcagcgtaacgctgcgatgtgggaagagtgggcgcaacagaacgcggccactcaggcagcggctgcggctttcgactctcttggttcggtggccagcaatgcgctgaccggcattgtcaccggaagtatgtcggccagcgatgcgatgagaagcattggcatgaccgtcctgaacagcgtggttaactctttcgtgcagatgggcctcgagtgggttaagtcggcgattatgggtcagaccgctacgacatcagctgtggcagtttcgacagcagctcaaaccgcaggcattgccaccactacggcagcaagtactgcggcggcggcgacacaaacggcggcatggacacctgcggcaatgctggcgtctatcagtacactcggtggagcagctgccataggaattggtgctgttctcggtgcgctggctatgggagttgctggtaagcgtaagaatggcgggcctgtctctgctggcgggatgtatcaggtcggcgaaggcggcatgccggagatttaccaggccagtaccggtaagcaatacatgataccgggcgacaacggcagggtgatcagcaacaaggagatgaatgccggcggaggtggaggggtggtaatcaacatccagaactacacgtcatcctcggtcgatgcgcaggcaggtacggatgctaatggtggagtgacggtggatgtaattgtcgctgatctgaacaacggcgggccaatcagtaacgccataaccagcaacatgaacgttaaacgcacgccaagagggcagggctga

SEQ ID NO: 164470 - DNA, 741 bp, Enterobacter cloacae
atgacccctttgaaagaaattggtgagtgcctgattggtgctggcggccgtgaatacttcttccggccatcgttccgtaacatgactcggatcggcgagccagaacatatcgttcgcactttctatgcgctgttcaatgacgatgtggcaaatatgcttgaagcggcgcgcgaaattcacagtgagataccagagcatcagcgcagattttacgcccactatttcggtgacgtttcactgccacgctgggcgcttgatgcagcaggttctgccgcatttgtgcgtgaggcattgctctcggctattaacgtcattcagtcatgctgtgacgaggacgtttcagaattgacaggctggcacgagccatcacgcactggagggcgtacgtttgtatggcgccgcggagcgctttatccggagaacctgattctgatagctcagtcactgatcatgcatggcgttattggccggtcgaaggttcgtaagttgcagaagcacgaaaacaaggaaacgacgccggagtttcatgcgactgaatacatcatggcggcgcgcaaccatttcgggataagcagggaagaggctgaaaaccttactatgaccgaatttgccatgatgcttaacgccaaatatcctgaccagaaaggcttcaccagggaagagtacgacgcggttatggacgatgatgaacgccgttggcaggaaatgatgaaacgcgaaaatttaaaaaaaactatatag

SEQ ID NO: 164471 - DNA, 756 bp, Enterobacter cloacae
atgcaaggctgtgctaatgattttggcaagctgatcgggaaagtagctgtgctacgcatggcctttggctgccccgacgcagtgccagcgctttccgagtggaagcgtctcggcgctatgacgaccaagggcatcgactattcgatgaacaccatcaactccgaggcagatgatgctaaagggctggtggagaacctggtcaacaacatggatctgacgatctccggcgaaggtgagtttcgcaagtctgataaagataacgagatcggcgcgtggcgtctgtcgaagtatatctttgatgaagtccaggcaggtcgtcagcctaatctgtgggtgcggttcgactttgcgggtgagaacgccggtacttacatccagggttacatgaacaccacgtcatggtctggtgatttcggtaccaacgatatctccaccttctccggcgagtggaaggtctacgacgctgacaccgttgtgtttgaagtcgctgactccatcgcggccactggcgttgaagtaactcctgcaactgcttctctggtcgttggcgcaacccagcagctgagcggtgtagttcatccaaccgatgcgactaacaaggcgataacctggacgacttcggcggcatctatcgcaacagtcagttcaaccggtctggtgacagcagttgccgagggtaccgcgactattactgctaccactgctgacggtgattttaccgacacctgtgcagttaccgtgactgccgcgccgtaa

SEQ ID NO: 164472 - DNA, 384 bp, Enterobacter cloacae
atgacaccagccatgtatgagcgcgtgcgtaactatttcgttgatgccgggcttaccactggattcatcgttcagctgctggcgtggggcgacacaacgaagttaaccgacgctttcatcgtgttccggcctaacggcggtaccgacatccgaaatgacctcggatctgatcactacgtgctggtggatgtcatttccgccaaagataagcgccgcgcagccgctgagaaggctcaggaaatcatcaattatgtcgaacagaacgacattaacgacgaatgccttggccttattcaaaacctcggcaatatgcctgcacccatcctgaccgaagaggggcgcctggtcttcagactccagttcatgtgcgtttacggcgaataa

SEQ ID NO: 164473 - DNA, 582 bp, Enterobacter cloacae
atgggaaataatatgaagaaacaacgttgcggttattcattaatcgcattagcaatgttagcgatgacaggatctgctgcagcaaccgatctgaatgttaatttcacggccaatattcgcgaaaccacctgcgatatgaagctggtcggcggtgaaggttcagatacgcagcaaacgctgactatcggtactaacggtcaggtacgcatagatgatgtcaaagcaggaacggcaaatgccgctttcaaaatcgtgatggttgaatgcccggcatcgctgacttcgctgaaaacaacggtaaaaggtacggcatcaggtattttaccgaccgggcttactaaccagattaccggagccaatggcggttctgactatgctgccgttgaaatcgcccgagagtctgcaccaacagcgccctttaccatcaactcaaagacagattctcaacgtctggtctggacttctacagaaatcgagaataaggaggttcctttggtggccacattacgtgaaaccaaagcgaacagtatgacaataggcgattttcaagccgtggctacctttgaatttagctacgaatga

SEQ ID NO: 164474 - DNA, 597 bp, Enterobacter cloacae
atgacactgcactactatcagaaccacgcacaggatttcttcgatggcacggtcaatgtcgatatgaccccgctttacgaggccttcacccaacatcttcctcactccgcacgggttctggatgcgggctgcggttctggtcgggacgcaaaagcctttaatgagatgggttatcaggtggatgcttttgatgcctcttccgcgatggtggaactggcaaagcaacataccggattacccgtgcagctgatgacgttttcagagatcgacggtaaagcgcagtacgatgggatctggtgctgtgcctctttgctgcatgtcccctcttctgggttacctgctgtaatgcagaggcttgcggatgcgcttaaacctggcggcgtctggtacgtgtcgtttaagtatggcaacggtgagcgcgtgcagggtgaaagacggtttacggatctaaacgaaatggaattgcggagattacttaataacatgactgaaatagatattttttcgcaatggattacgaaagataatcggccagaccgagatgaactttggcttaatgcaattctaaaaaagaaaatagagctacaagagacctga

SEQ ID NO: 164475 - DNA, 2178 bp, Enterobacter cloacae
atgagcttagaaactaaaattacattcaatagtaacgggataaattgggctccaaagtcgggggaagaaactagagactttctcggacagagcgggatgccagaagaagcaaaaaacaaattattagaagatgctatttcgattctatcacgtggggttccgcctcaagaaaaaaatggttttgaaaccgggctagttgttggttatgtgcaaagtggaaaaacaatgtcgtttgaaactgttgcagcgcttgcaagggataatggatttcatatagtaatagttatagctggtacgtcaaatcctttacttgcacaatcttctaatagattaagaaaagacttaggtttaaatgatgtaaatagaggccgtagatgggtacaactggaaaatccgacatctttagactctgatggtcaaatgattcggaatacactttccatatctaaggattcatcaaccgatgcaatctataagaaaactattcttatcacggtattgaaaaatcatacacgaataaaaaaattagctgaaattttagaagcaatagatctaaatggtacctcagtcctgatcattgatgacgaggcagatcaagtaagtttaaacactgaagcatcacaaggtgaggaaagcgcaacatatagttgtttgataaggcttagaagctctctaccaaatcatacttatttacaatataccgcaactcctcaagctccgttattaattaatattatagattcattatcacccaactttgtaaaagtattagaaccaggtgattcttatattggtggtcgagatttttttgatagaaactcttcgtatataaaacttattccttcaaatgaagttccaaccaaagataatcccttatcttatcctccgtcatcgctacttgatgctctgcgtatatttatgctgggagtagctgtaggcattaaagaatctggtaatactggtaatcgttctatgcttgtccatccgtcgcatttaacagcccagcatagagaattttatggatgggtaaggagtatatttgatgaatggcaaacctgtttagcattgccagataacgatttagataaaatagatcttttaaacgaatttagaaaatcctataaccacttgaaagaaacagcatgtttaccgccctttgaacaagtggctaattccttcggcattgcttttaaaaacactcaaattgttgaagtaaactctagaaaaaacaaaactccagaaattgattggcagcataattatggatggattttagtggggggaatcgcagtcgatagaggatttactgttgaagggttgactgtaacttacatgccgaggggtgtcggtgttggaaatgctgatactatccagcaaagagcaagattttttggttacaagaaaaattatttgggcttctgtagagtttatttagaacaaagcacacttgaagcatttagaaattatgtcacacatgaagaagatattaggaagcagcttaaggttttagaagtggaaaataaaccgttgaactcttggaaaagggcttttcttttagatttggatttaaaaccttgtagggatagcgtccttgaatttgactacatgcatacaaagttttctgataaatggattgttccaaaattaatgttttcctccaataatatagttagtgataacagggagactacatcagaatttttaagccatttatctttggtttcggatgtcgggcataatgaacgtactgagacccagaagcatttagtttgtgataacgttcttttaaaagatttatatgaaaacttgcttatcaaactgcgagtagctggcagtaacgattctcaaacaaacactgcaatgttattacatttagcaaaagcaatggaaaatgatattactgagagttgtattgtttacaggatgagtcctaatgagcgtagagttcgtaaaataaactcctatttgttccaaggagcttatcccgttgagtcttcacgccggggtgaaatttatcccggagatgcaatgataaaagatcctgtaagaataagtgtacagattcattacattgatttaaagatggataatgaaagaatgattagcgacgtaccagttgtagcagtgtggatccctcaaagattagcatgttctgttcttgtgcaaaatcataactaa

SEQ ID NO: 164476 - DNA, 1515 bp, Enterobacter cloacae
atggcactttcgaaagtagatattcgtccagggattagtatattggcagttttgcgacatctcaattataaaccttggtttgccatcggagagttcgtagataatgctttgcaaagttttttagcgaactgtcaaaaaaatgctcagaagacgctcacagtagatattcaaattgatgcaactctgcctgcaagaatatcaattaaagataatgcttttgggattccgatagaggattttcctcgagctttcaagccagcatcgatacccccagacaacacaggattatctgagtttggtatgggcatgaaaagcgcagcctgctggttttcaccaaaatgggaagtgcgcacatcagttataggtgaacctataataagaacaatatattttgatattgataatatgattgcagatgattcctatgaagtcgttatagaagaatcgtcaggccttaatgaacaacatttcacagaaattattttaaatgatgtttttcatacccctgttaaacgtactatttttaaaattaaaaaacatctggcaggtatatatagggagtttattagaggtaaggttctgatattaaaggttaatggtgaggaattaacttttaaagagcctaaaatactgaatgctccctattttaaaagtactgatgaaatatcgcttgagtggcgaaaaaacattagtttcacgttcggtgaaaatatacaagttaatggttttgctgcgatcaggtccgttggtaataccagtgaagcgggattttcactttttagaagaggtcgagttatacaaggaagcgctgatgaaacttatcgtccctcctatattttcggaaattcaaatagttataggtttcagcgattgttcggtgaattccacattgatggcatagatgtcagtcatactaaagatggttttaggtggggtgagttagagcaatattttcttcagaacctaagggataaattagatagtgatgatttgcctttgttgcgtcaagctgaaggatatagagctagaggtaataatagtaaattattttctatcattgaaaaagcagttactggttcagttgaagaaatgagaattggattgcctttgtcaatacctaatatactcgattctgatttagtagatgctccagttgagactgatgtatctaaatctcaaataatgaataagatatttgacatttcattccgagatcagaaatggtcagtatgtattgaaatatctaatgagttttccagtagtgagtggttggcattaagtgatacagggagaataggcgatgaaattaggcgtttacatattcgcatgtctatgtctcaccccttgatgatccaatttgcgcagagagatggagatgtatcagaagctgtatttcgtttaggagcagcattggccattgcagaagttttagctagagattgtggcgtgagtaaagctggtactattcgtagaaatgtaaatgagatattacgtaatgtattttctaaaaggtga

SEQ ID NO: 164477 - DNA, 1362 bp, Enterobacter cloacae
atggaaactaaaaaaaactttactttcatagacttatttgcaggtctgggaggttttcatctagcgttaaaacgattaggtggcgtttgtcgttttgctgtggagtggaaggaaccattacagaacctatacgtagaaaattttgggattagacctcaaggtgacattacaaaagtacctcttgaggaaatacctgatcatgatgtattaactgctggctttccttgtcagcctttttctaaagctggtgaccaattaggcttcgaatgtacaaaacaaggggggttatttttcaacgtagttgaaattttaaaacataagcgtcctaagttttttattttagagaatgtccccaatcttttgaaacatgatgaggggaagacatggataaaaatccaacagcttcttggtaaggaaggccttggctataatattgatgctgcaaaactttcaccgcatcattttggcataccacagattcgtgaacgtatatatatcgttggatcattgctgccccttgaaaattttagatggcctgaaacttcgaatttagttacctcaatagatagtattttagatgttaacccggttaatgcaaaatcattatcccctcaagtgatcgattgcttaaatgtttggagcaagttcttagaactatgtcctcctgacgttgagataccttcttttcctctatggtcaatggagtggggagcgacttatccttacgaaaatgaaaccccttatgctaggaaagttcgcttgggaaaagatggtttaaaaggttttagagcgagccatggatgcaaaattggcctgagaagaaatattgatgatcgctggaagttattaccgagccatgcacgaacagaagaatttgaattccctaagtggaaaaaaaactatatcaggcaaaataggcagttttataatgataataaagcctggattgatcaatggttacctgacattttgagatttccttcaagtcttcaaaagcttgagtggaatgtgcatggcgaagagaggaatatttggaaatatgtcctacaatttagggcatctggagtgagagtcaaaagaagaacaactgcaccgagtttgattgcgatgactgatactcaagtacctattattgcatggcaaaaacgttatatgaccccccgtgaatgcgcaaaactccaaagtcttgatgagttactgaaattgccagaaagccctactcaagcatttcaggctttgggaaatgcagtaaatacaaaagttgttgagtgggttgcaagtgcattattgggtgcatttatagatgaaaaaaacatcattgaagtaaatattttagaaagtggttgtgttgccaataattaa

SEQ ID NO: 164478 - DNA, 1311 bp, Enterobacter cloacae
atggctagtaagttcgtgagggataatcttctttctataattgtattggtatcagtattcatattggttctaattatgaacaatatgactatgtatgttgcggacgatttcgtatacagatttgtataccagaccaacccatcgcctgatgcagttcctattgatgggatttattccataatcgaatcacagattcgtcactatgaaatatggaatggccgcttcgtggctcattctctcgttcaatttttcatgcagtttgacaaaacaatatttaacatttttaactcaattgcctttgtaatgataggcgtgctagttataatggtggcaaattcaatatctgctatcaaagatattaatttttcattcgtaatagcgttcatgttgctgtggttaattataccagaatttggatcgtcagttctttgggtctccggatctatgaactatctctggatgtctctaatttacaccacatttatattgataagcattagagccgagaggcctcgtgcagtctaccttactatttacctagttttaggcttccttacaggagcaactaatgaaaacagtggcccggcatctgcattgatagtcataatggtggtggtttacgattatgtaacatataggaaggtgagtttgtggaaggcctctggcgtcgtttttgcgatcgctggttttttactaatgattacctcaccagggtcacagaaaaggggtggaaataacttttcattgaatgttttagcggatcactttgtaaacatattacattccagtatttctttgttcttctttttttatgttgccttggctttcttggtggcattttgcatctataaaaaaacagtcacaaaaagggatgtggcgtttactttaatatttctaactggtcatttcgcttcaatatacagcatggtagctgcgccatcgttccctgaaagaacggcatttggagcctcaatcatgcttttaatattattggtacactacatctgtaaaatcccagtgtcatcattgtatagcaaggcttttgttttcgtattatacacagcatccattagcacctatacatatgcatttacagacattcatagcacatataagcagttacgcgctcagcaggaagttattgaaaatgcagagttggggtcagatatatctgtaccaatgataaccaagccaagatcagatgccaatgcttataaaaatacaatatatttgacgtaccgtaaaaattcatggatgaatatgtgggcagctagattttataacttgaattctatatcaggaaaagattaa

SEQ ID NO: 164479 - DNA, 1623 bp, Enterobacter cloacae
atgattgattttacccatgagcaaagagtagctatagattatccatccagtatggtactaacagcgtgtcccggtagtggtaaaacagctgtaatagtagagaagatcgttctcgatttgtctatttgtaaggaatttcagggtgttattgccatatcatacactaacaaagcaagtgatgaacttaaaagaagatgtttaaaagcattgccagattcaaaatcaagcttttttggaacaattgataaattttatttaactgagataattcatccttttattaatcacctgtggggaagtgtaaataatttacaggtagttaaatttaatgatttagattcttttgccaaagatagtctttctattttttataatgatgaatatgtttgtgaaaacatcgacacatttgattttaaagaaatcaagaatctatacgctaaaggttttttagttttggaatttgttccattgcttgcatattttatattgtgtaagtctttggcttgtcgtagatatctttgcaagaaatatacttcgatgtatatcgatgaatatcaggatgctggatttattcaacatcttatatttttgaagatatttggatttggagtaaaagctgttgccgtgggtgatattgaccaatcaatattcttatacgcaggaaaaagttctaaatatttaatgtcattattaggcgaggatagtggattcaaaccatttgaaataacgatcaatcagagatctcattcttcgatagtcaactatgcatcaagaatgttgagtgaaaactgtgaattgttagttaccgatgatactcaggtatacagaacaacaattaatggttcacagcaagaggtcgctaaatggattgacgataatatcaacaatgtaaaacaaacttttgggatttctaaagaaagagaaattgcactgcttgcggcaacaaatagctctgttttattgatgtctggcctcgttcgaacaaaattgagagcatatattgatgacgatctgtccaaacttggaggggacgtatctcttctaataaaggaattattgagttatcggtttaatgttcttgttacagctcaggagattattgatggtttaagtatcaaagtggttgaacgaaatgcattgagagaaatgcggaatgtcattaaatgtgttagaaaagccgatgatttacattttattccagcattacgtcaggctgtaaagttattaattaataaagatctttcggctcagcacatcgatgctgtcaacgctgtattgcaaaataaaatgatgttgaataattacttaccggttggtgatgatgaattacaacttatgactcttcataaatctaaagggttggaattcgactttgtgtttcatttagatctttatgattggatacttccgcgtcgagagtttatcgagggaagttttgatatagttttttcaaactatgaccaatgtcttaatctgcattatgttggagttactagggcaaaaaaagcggtggtgctaattaactccacagagcgtttaaattatcagcatgaattaaaacgcgcgaagccttctcaattcttgtcgttaagaggtgttgaagggctatacagaaatatttaa

SEQ ID NO: 164480 - DNA, 1704 bp, Enterobacter cloacae
atgtatattgataatgtttatttgaaaggttttaggaactactccgatagttttataaaattaaaccattcaacattaataataggaagtaatgatgttggaaaaaccaacctattgtattcattacgtattttgttggataaaagtttttctgatttggatatagaacctaaaaatagcgattttcatattgatgaaaaaggtaatcaatgtgatgtcctagagataataataaattttcgagaggtaaaagaggatgctgttctttctaagttagtggggtatgtaagtgaagattcacaaacattcataaaatacaaagcgcaaagaacttcattagattataagttgtttataggtcacacccagtttgacatggttgagattagcagtagattttatcttaagtatttaaatctacgttatgtaaactcccaaagggaccttgctaaatatatatctacagagaaaaaacatctgcttcggcttgcacaggaaatgagaaatgatgagcaagttaaaaaggatgaagatactttaaattcattaagcgatttgctgaatagtgttaacgataaagtaaaagaaattagttatgtttcgagtgcaaccaaagaattaaacgatgagttaaagaaattatcatataataatgagaagatttctgtaatgctggattcaggtgcaatcggggttgaccagtttattgaaaaattagagttaagttcaaacacaaatggcaaaaaggtaatgcttggtggtgatggattcaataaccaaattttacttgcattatggaaagctaaaagtgtacgcgagcatgatattgaaaatgaagtggtaatatattgtgttgaagaaccagagtcacatctctacccacatcaacaaagaaaattatctgagtatttgattaataagttaccagggcaatctcttgttaccactcattctccgcagattgctgtaaactactctccagattcgataataaaaatatgctcttctgaaggagaatcttacgcagcaagcgaagggtgctctaattgcatcagtgaggcttggcagggaatgggatatagaataagtatactgccagctgaagcatttttcgctagtgttgtttttttagttgaaggtccttcagagatgctcttttatcaagctcttgctaaagaatgcaaaatcgatctggatttctttaatataagtatattatcagttgacggtgttcaattcgaagtttacagaaaaatacttgatgcattcgagattaaatgggttgctcgaacagacaatgattcatcaaaagtgcctagaaaaaatgagtggcaatactcgggacttaacagagctttagttctttgcgggatgaatcccctcgaaaacgaattaatggaaatctcacaagaacaaagactcaaaaagtattatcattataaggacgaattaaagaaaagaaatgtttttgtttcagttaatgatttggaaggtgatattagtattgaattaagcgaacaactaaaagaatatgtgggagtagatgatgaagaaaaggctgctgaatatttaagggggaagaaagcaatccgtatgcaagatttcttaaaggagtattcccatacgctaaaaactatttctacaggtgaattaattgcacctcttttggctgctgtaatgctagctacggaggagatgaaatga

SEQ ID NO: 164481 - DNA, 219 bp, Enterobacter cloacae
atggccgatatcatcgacacagcagcagagattgaagagcttcagcgtaacgccgccctttccgctcaccgcatcgaccgcaacgccgtatcagctgagcgttgtgaagaatgcggatcacaaattcctgatagcagaaggaaggtcattccaggcgtcaagttatgtgtcgattgtgcagagttttccgaaagacaggccaagatatttagggggtga

SEQ ID NO: 164482 - DNA, 231 bp, Enterobacter cloacae
gtgattataagactgaaggcaacgatggtgtcagataagcatggatccctcatccaggtgtctgagcgggatatttacattaacggagataacatttctagattcttaggaaaagaagaaggcactctaataacgttggtcgatgggttcaaaacagtagttagcgaaaagccatatgaaatttattgtaagctgaatggaattcaagaccaaacaaaagccgtatattga

SEQ ID NO: 164483 - DNA, 150 bp, Enterobacter cloacae
atgcctaacccattcgacgtggtgatgttaagtgttatgcaaagtgataaattaatctactcaataagcgaaagactgaaaaaagtacatcattcaagaataggagatttttgtgattataagactgaaggcaacgatggtgtcagataa

SEQ ID NO: 164484 - DNA, 240 bp, Enterobacter cloacae
atgaaaaaaataattgtaagttatgctgacatgcacaaagacggacacaaacatgcgatgaacgttatcaaagagctaaatattacgtatcgcgcagttgttccacagcccctgggggaatgctggatattttacggatgtgaaaacatccccgagcaactcccggccagcgtgagtgtatgggatatgaacgaccgcgacttcattaattctggaattaggcgggaggtgaatccgtga

SEQ ID NO: 164485 - DNA, 456 bp, Enterobacter cloacae
atgagcaacaaatacgaagatctgattaaaaacgccagggtgaatgccgaatgtggtgagcacatgtcgccagaagaagttacggctctgcttaacgtagtagaaaccacattctcggcgctggctgcggagaatgcggggctgaagtcaaagggccgcgagcttctcggtgaagcgtgcgccgtttacgcaaagttcaataaactgatcgacccggcgatcagggattttatcgatggtcagacgcttcatgaattccagtatgtgctcgactgcgaaacacaggccaccgacgctttcctggctgaagtgcgggcaggtgcggtagatgaagtttgcctgaaaattagcaacgcaattgttaattgctatcaggacgaacaagttggtcttgatgcagcagcaacaatctgcggtgactttgccgaccagcttcgcaaaggagaggagtcatga

SEQ ID NO: 164486 - DNA, 246 bp, Enterobacter cloacae
atgcgacttggggaagccgctgccgtaaatccagaggatttggtccctgatttcgaaaccagcatcctcaacgttaacgacaagtcggtgatatgtacgggagccgccaaacgccagaacatgcccgccaggtttgagaacgcgcaggcattcctgccactgctcaactgtcgggacgtcgtaatcccatttgtggttcatgaaactcagaccatagggaggatccgtcacgatggcgtcaactga

SEQ ID NO: 164487 - DNA, 207 bp, Enterobacter cloacae
atgacagcgaaaataggacccattaccgtaactcttgatatgagatggcatgttgcgcgttcacgcgaagtgcttgaagaattgcaacgtcgggtgagtgagcttagccctcgaatttcagaggatgacgcgctgcgcactctattgctcgatatgacctttgattacctgaaggccaagagccaggtcgaacaaacaacggagtaa

SEQ ID NO: 164488 - DNA, 966 bp, Enterobacter cloacae
atgattatcttcaccctgcgccgatttttgctgctactggtcactctgttcttcctgacctttattggattcagcctgagctacttcacgcctcatgcaccattacagggagcatcgttgtggaacgcctgggtattctggttcaatggtctcattcactgggatttcggcgtatccagtatcaacggtcagttgatctcagagcaactgaaagaggtgttcccggccacaatggaactgtgcattcttgcctttggttttgcactaatggttgggatccccgttggtatgctggccggtatcacgcggaacaaatggcaggaccgctgcatcagtgcattggctctgatggggttttcgatccccgttttttggctggcgctgctgctgacattgctcttctcactgaccctcggctggttacccgtttcagggcgttttgatcttctctacgaggtgaaacccgttaccggttttgccattattgatgcctggatctcagactcgccatggcgcgatgaaatgctggtcagcgctattcgtcatatggtgctcccggtgctgacgctctccgttgcgcccaccaccgaagtcatccgcctgatgcgtatcagcaccattgaggtctttgatcagaactacgtcaaagcggcggccacgcgcggtctgtcacgattaacgattctgcgtcgtcacgtcctgcacaacgcccttccgccggtgatcccgcgtctgggtttacagttttccaccatgctgacgctggcgatgatcaccgagatggtctttagctggccaggtcttggtcgttggctgattaacgcgattcgccagcaggattacgcggcgatttcagcgggcgttatggtgattggttcactggttatcatcgttaacgtcatctctgatattctgggtgctatggctaaccctctgaaacataaggaatggtatgccttacgatag

SEQ ID NO: 164489 - DNA, 915 bp, Enterobacter cloacae
atgccttacgatagcgtctacagcgaaaaacgtccgccgggtacgttgcgcaccgcatggcgcaatttctatggcgatgcgactgcgatgatcggcctgtacggctgcgcgggactggctgttctgtgtatttttggtggttggtttgccccttacggcatcgatcagcaatttctcggctatcagcttttaccaccgtcatggtcacgctatggcgaagtctctttcttcctcggaactgacgatctgggacgtgacgttttaagtcgtctgctcagcggcgcggccccaaccgttggcggcgcgtttgtcgtcactcttgccgccacgctgtgtggcctagtattgggcgtagttgccggtgcgacgcacggcttgcgctcagcgatactgaatcacattctggacactctgctgtcgatcccttctctgctgctggcgattattgtggtggcgtttgccgggccgcatctgacacacgccatgtttgccgtctggctggcgctgctgccgcgcatggtacgctccgtctacagcatggtgcatgacgagctggagaaagagtacgtcattgccgctcgcctggatggcgcaaccacactgaatattctgtggttcgccgttctgcccaatattaccgccggtcttattactgaaatcacccgcgcactgtcgatggcgattctggatatcgccgcgctgggttttctcgaccttggcgcacaactgccgtccccggaatggggggccatgctcggcgacgcgctggagctgatttatgtcgcaccgtggacggtcatgctgccaggcgcagcgattatgataagcgtgctgctggttaacctactgggtgacggcgtgggtataggaagtataaaccacctttttgctcctcatccgaagtatcttacctga

SEQ ID NO: 164490 - DNA, 492 bp, Enterobacter cloacae
atgctcttcaccccgtttatcttccatccgcagcttgttgttcgtcggcgtgcggatcacgttacgggtgctgttcttctccgtcacatggtcaacatgccgcgagtcatgcagcgcatgggcgatatagggccggtcggggtcgccttcatggaatgctatcgccacttccgtgccctgaatgagcgggaagtgaaaaccgtacacgtcgccgccgtagggtttggcgagacgtaccggcatgctctcctggccctgcgacttgtcatcccggtcggcgtcaaatttcacccggtacagtccggatgcatcctgccaggcgtagatatcgttggcttttgcgctggtgatacgcgccgtcatcgtcccggtcaccttcgggcgcggcagcagcggcggacgccagcacaccgtttcgctgtacggtaccgccagcagggtcacccgcagggcatttttgcggctggcgctaaaacccgtcccggtgattaa

SEQ ID NO: 164491 - DNA, 399 bp, Enterobacter cloacae
atgatcaaaatgaatatcgttgaaattgagcaaggcttaaaacatctggcggagctgcaattaaaatctactgagtatggttatgaatttttaaatttcttctcagggggctcaaaagcgaagctcgtccggatcatgaacggcgactctggtaaatctgatattgaaggcggctatatatggaagttaaaacttcactatgcgccagcaccagtaggcaaagcagacgaaatcctggcactgattaaaacgagcaaacgaactatcaaaaataagcctcgactcttggttgtcaatgacggcacgaccctgcttgttttcgatgttaaatatcaagagctgacatcaagcaccgtaagctcgattcatacgtatgtctttagcgaactaacatcatga

SEQ ID NO: 164492 - DNA, 315 bp, Enterobacter cloacae
atggaactgaatttaagtttatcaccctctcaagctaagtttgcgctctggatagagcaaaacacgccttatctactccctttgtttgattttaaacagaggattttaagggtgaataatgtagagcattttcttggggcggcttcacacgggcagtccattatggcgcgatttgttttaggtgtgtggattggtagtgacggattcgattttgactttacagaagctgccgctgtccttgatagagagcagcgccaggtaataacagattggattcttgatccgtttggccctaatcaacagagcagaaaatag

SEQ ID NO: 164493 - DNA, 633 bp, Enterobacter cloacae
atgaacaacacacattattctcagtttccacccgagtacggatttaaaccggatctgatgcctgctggccagtcaatgaatcagacagaagctcagactcaggaacagcgggagccgggcatgaagcttgttgcctatggagggaaatacgcatttcagtgccagcaatccaacaccatcgctggctggcaaactattcagtttgagtcggcaccgaaaagtagtagctcaccgagtgaccgcacatataattggtcaaaaaagattgcattccagatcactgatactgaactgcctttactggtggctgttttgcttgggtttttaccggcgattcgttttgatttgcacgggccggaaaagaataaatggttagaaatcatcaaccaagggccgaatttttacatcaaatccggtatgggtagcactttgcattcagcgcctgtgacccttgtggatgcttcgatgtttggtttattggcgcttaaccagtacaccgccaatttccctttattaagttccgatgctgtccttgcgtcagtgaaaatgcttgccaggcagtcatttgagaacaaaacctacaagattcccaaagagccgcaaaagtctggttaccatcatcaaggcgcttga

SEQ ID NO: 164494 - DNA, 492 bp, Enterobacter cloacae
atgataaacaaaagcacattacagatgataggactgttaacggtagtcgggttgtacctgagctacgcacatacacggtatgtcatagcggcaaacagcacagcaagcaactgcctgcaagcgacctattttctggttgatacgtgggacaaagaagtaaaagccggtcaactggctgcgttcacaatgaacgttgaaaacaaactttaccctgtcggcaggaagtggattaagcaagttgcggccaccgaaggcatgacagtgaatgtcaccacggaacaaaccaccataagcgatggccgggtcattaaaaataacatggaacacaccatggcgtacctgaatatttcacctgatgagattaagcaaaccaccacacttgctgcaggtcagctgttcatgatgggtgataccaaaacaacgtatgactcccgctattggggtccaattcaacaggcagatgtgattggagtggcctatgcactgttttaa

SEQ ID NO: 164495 - DNA, 1317 bp, Enterobacter cloacae
atgcactgttttaaccgaatcatggtttgcgctatcgcagcgctcggaatttgtgccgcgtcagctcaggacaccacaactatttttgataattcagaaaaagccaatgcaatagcagagaagttaaaaaaagaaggttttggccagacgcagcaacaacctgctggccaagacgaaaagtggctgcatgccaaccagaaaaaggtgcttcagcaagctgaggcactaaagcagcaaatgcctggtgttgcagaaggggaatccaatgaacgtgtccagtattaccaacaggccgctgaagaactatcagctacatccatggcaggtatgcgtaacggtcttgaaaagcaggtcgggcttagcaagcaagagtcatccctgttcggtggtgatgaatttgctgtaaaagaagatgtctttgctattttcatcagtttctctatgtcagacgctgaaattaaagatgcgctgcaggctgcatccagagcgaatgccaaagtgtttttgaagggcatgaaaaatggccatacgagtatcacggacacaatgaagacgatccggcagattgcttcaggcatggataatccgccagaaacccgattcaacccaaaagcatttgaaacctttggtgtaacacaggtgccaaccattatttaccaggataagggcaaggtgtacttagcgaaagggatcatgaaccttggatggcttaaagctcaggtccaaaatggtgtggaagttggagatctgggtcagaagggaccaacgaagccggtcaaagagcgcagcattatcgagactatgcaagagcggctggcgaaatacgattgggagggtcagaagaaaaagactattcaatcgttctggagccggcagcagtttgaacagctacccgccgcaagactcaataagatttggttcatcaatccaacggttcgcgtgaaggctgatgtcgtcaatccgcggggtgatgttctggcccgggctggtgatgttctgaacccgctggacattccaactggacaacaaaactttctgctctttgacgcgacagacacgcgccagctggagtgggccaccaaggaagcggcaaaaaaacatacgggccccgtggtgatcatgacaagtcaaatttcaaaagagaagggctgggatcaccttgaagcactgaggcagcagttccagcaagaaatttatctcatacccaaagagttaattaagcgattccacatcgcagcgttaccggtgatgatcaccccggatatgaccaaaaaggtatttaaagttgagcagtttgaaatggagttagcaaattga

SEQ ID NO: 164496 - DNA, 258 bp, Enterobacter cloacae
atgaaaaaaatcctctattcagcccttttggttttcatcatgctgagcagctctgcaagagcagaagtgaatcctgcctgtccggatgcaaacgtgttttcaaaagtgtttacacaaatatgctgggactgttttttagactcgctgaatttgtttgggatcgggaaaaagcccaatggtgctaactcgtcggtattagcttgtacctgcatggacgaattgggggttctagggattttcccctctaaagtaacataa

SEQ ID NO: 164497 - DNA, 432 bp, Enterobacter cloacae
ttgtttgcgcacgacttctacaggttcgccgacgaattgggccttgccgtcatcgtcgatgatgtacttctgtttgaaataacgggaatcatcccggtatacgaaggtgtcaggccataccgactctggccaaagccagttgtcatcagatcgaccctctcgcagcttttcactaattgcgcgctggatgtcgtcgaaggaaaagttggaggcgttggtgaagaaaaatttggttttgttgagcaggccgtcgcgagtgcagtcgataccatcagccaggcgggcaacttcgagctgctgctcattgccttcagagttaacgaagatgccaacgccctcctccggcgttccggcacctggctcatcaagcagcacagccacatggtcaaacatcatgttggtggcgatttcgttgtactttttgccctttga

SEQ ID NO: 164498 - DNA, 507 bp, Enterobacter cloacae
gtgggcgactccacggccatctggttcgttcgcgaggtaggcaatgagttccacatcatcgactactacgaaaactccggcgaggggttgaggcactacatgaaggtactgaaagaccgcggctatgagtatggcgagcactggggcccgcacgacatcgaaaaccgcgagttcggcgctgatgctaaatcgcgcaaagaacttgctcaggaaggctatgaaattgacggccaggtgtactcgatgacgttcaatgttgttccgaaaacgggtgtcgataccggcattgagtcggtgcgtgaaattctcccatcctgcgtcttcgatgaggagaaatgtgccgagggcatatctcacctcgaaggctaccgcaaggagtgggacgacaagcgcggttgctggaaagacaaaccgcttcatgacttcacatcacacggtgctgacggcttccgttactttgcggtagcgaagaacaaccacaagcaggtcggcgcagtattcttctaa

SEQ ID NO: 164499 - DNA, 210 bp, Enterobacter cloacae
atgagactctctctttatcagttccggacacgctaccgcccgtcgctgttccctgttattcaggaacccaaagcgcatcaggtcgggcaggcagattgtgttttctttgctgaccacccgtcagtgcaggcgctcagcaaaaaaagcagacggctgaccgtctgctcggggacttacgcagtggcgcgttcgttccaggaatcggaatga

SEQ ID NO: 164500 - DNA, 927 bp, Enterobacter cloacae
atgaatgtcatcacaaaatgtgttttcaccgcttctgctctgctgatgcttggcttaagttcatttgtagtatcagcccaatcccctttgttaaaagagcagattgaaaccatagtgacgggtaaaaaggccactgtaggtgtagcagtgtgggggcctgacgatctggaacctttgttgctgaatccatttgaaaagtttccgatgcaaagtgtgtttaaactgcatttagctatgttagttctgcatcaggtcgatcaggggaaactggatttaaatcagtctgttactgttaatcgtgctgcagtattacaaaatacctggtcgccaatgatgaaagatcatcagggcgatgaatttactgttgcagtacagcagttactgcagtattcggtgtcacacagcgacaatgtggcctgcgatttgttatttgaactggtgggcgggccgcaagctttgcatgcttatatccagtctttaggcgttaaagaagctgccgtggtagcaaatgaagcgcaaatgcatgcggatgatcaggtgcaatatcaaaactggacgtcgatgaaagccgcagcacaagttctgcaaaagtttgaacagaaaaagcagttgtctgaaacctctcaggccttgttatggaaatggatggttgaaaccaccacaggaccacagcggttaaaaggcttgttacctgctggtactatagtggcgcataaaaccggtacttcgggcgtcagagcaggaaaaactgcggcgactaatgatgcgggcgtcattatgttgcctgatggacggcctttattggtggcggtatttgtcaaggattcggctgaatcagaacgaaccaatgaagctattattgcgcaggttgcgcaagcggcttatcagtttgagctgaaaaaactctctgcagtgagtccggattga

SEQ ID NO: 164501 - DNA, 576 bp, Enterobacter cloacae
atgcagttattaggttcagtcgcttcgccttttgtgcgtcgtttacgtttagtgctggctggtcagccttatcagtttgtggctttgaatatttttgaatccgaaggccgttctgtgctggtaaaacacaacccggcccgaaaggtgccggtgctggtggataatgaacaggttatttttgattccggggtgatttaccgttatctgacgcaaaagttgaaactaccgcctttaagctgggatcaggaaaacagcctgacgacgatcaacgcctgcacagattcgctggttgaactgttgctttgtaaacgttcaggtttcgatgtgactgaagataaattgttttttaatctacagcatgagcgtattcaggcaactctggaagccttagagcaacagatcagggcagggcaatttggacgctgggattatctgagtatcagcttatttacgctggtcgactgggtgttatttcgtgatttggtcgacttaaaacctttcccggtattactgcaattcagaaacgagcatttaaaacaaccgatggtagctgaaaccgaccctcgtttgagctaa

SEQ ID NO: 164502 - DNA, 495 bp, Enterobacter cloacae
ttgctgcaccggactgtgcgcgaaaacattctgtatggccgccctggtgctaccgaagcagaaatggttgaagcagctcgcttggccgaagccgatgcctttattcaggaactgaccgaccctaaaggcaatagcggctacgacgctcaggtcggcgaacggggtgtaaaactatcaggtggtcagcgtcagcgtattgctatagcgcgggtgttattgaaaaacgcccctatccttattctggatgaagcaacctcagcactggattcagaagtggaagctgcgattcagcacagtctgactcagctgatgataggaaaaactgtgatagcgatagcacaccgtttatccactatcgcggcaatggacaggctgatagtactggaccagggtcgtatcgttgagcaaggcagccatcaggaactgatcgccaaaggtgggatttacgctcagttatgggcgcatcaaaccggtggttttattggcgtggaataa

SEQ ID NO: 164503 - DNA, 300 bp, Enterobacter cloacae
atgctcttcgccgcgtttgtcctccatccgcagcttgttgttcgtcggcgtgcggatcacattccgggtgctgttcttctccgtcacatggtcaacgtgccgcgagtcgtgcagcgcatgggcgatatacggacgatcgggatcgccttcgtggaacgcgatcgccacttccgtgccctgaatcaacgggaagtgaaaaccgtacacgtcgccgccgtagggtttggcgagacgtaccggcatgctctcctggccctgcgacttgtcatcccggtcggcgtcaaatttcacccgatatag

SEQ ID NO: 164504 - DNA, 861 bp, Enterobacter cloacae
atgtcacacctgacgatctgcgaggattcacgcagtgccacttcttcgccggaattggcgtctggtctcattcactgcgcctcgccggatggcctgacgataaaccagtctggacaggctcctgcccgtgccagcctttcagcgcggcaggcaaaggagatgggtttgctgacgagcggcacctttggccccacttcttccacctcatcagcgagcgcagacctcagcatgtctttggcgaacaggttgcaagcggtaacgcaaacacatggttcgaccttgtacaagctgacctggaaggaatggaatacgccttcgggcttgtgccgtttacgtcagcgagcatcggtgcgccgcacatccgagaacgcgcttactgggtggcccacgccagtggttggagacatgacgggcggaccgagacctccggacaaaaagcgaggacctgccccggggttgcagtcagcgactgcgttagccgggtggccaactccaactgctgcagcgacgaccggagctgggacgtccgggcgaatgggtgggatgaacattcagacggcagtcactttaacgggatggcccactccaaccaccgaatcagcgatgagggagaaaaggtacgcacagggcgggatgccgttctccatggcagcgagtctgtgcggacccttgaggttaacggtttttggcgagatgcggactggctcttatgtcgagatggcaaatggcgtccagttgaacccggcacattcccgctggttgatggggctgccgcgcgcctgggacgagtcgagtccggggtggcaagagtggcaagcagcaaccgcgtcggccgactcaaaggctacggtaacgccataa

SEQ ID NO: 164505 - DNA, 369 bp, Enterobacter cloacae
atgagcccagccgcggccgccggtacgagcgtaatcgtaacgagactgctcaattcgcacggagcgagagagcggcatcagatcgttcagcagggtgaattcggtatttggctcgaactgctgaagcacagttgtgtcgaaagcgcgatacaggcggcggatatcgtcaactgcgttcaccgcgtcgagataaggggcgttttctgcatcaccacggaactgagtgcgcgccagaaaatcagctgctgcctgagcactggcgtttcgctcaagttcgagggcgcgccattgcgcctggttcaccgcgaggttaccggtcttctcgccgatagacttggagaatacaaacattcagtgctccttatttga

SEQ ID NO: 164506 - DNA, 267 bp, Enterobacter cloacae
atgataatcggcagctcccaagccgcgctttatacgccgatcgacacctcaacgctgcttaatagccagtatcgggagttgattaacaacggcgttcgactcaccgggcgagttggatacaccgctaactacgccgtattcgttcacgatcctaatgtgccgcaaaccttccgtcgcgccaccgcgcagaaagagttcctcaccaaaggctttgaagacacccgcagtcagattgatgccgtaatgcgcaaggagcttttagtatga

SEQ ID NO: 164507 - DNA, 384 bp, Enterobacter cloacae
atgacaccagccatgtatgagcgcgtgcgtaactacttcgttgatgccgggcttaccactggcttcattgttcagttgcttgcgtgggacgacacaaccaagttaaccgacgcattcatcgtgtttcggcctaacggtggtaccgacatcagaaacgacctcggatctgaccattacgtgctggtggatgtcatttccgccaaggataagcgcagagcagccgctgagaaggctcaggagatcatcaattatgtcgaacagaacgacattaacgacgaatgccttggactgattcaaaacctcggcaatatgccagcacctatcctgaccgaagagggccgcctggtcttccgactccagtttatgtgcgtctacggcgaataa

SEQ ID NO: 164508 - DNA, 384 bp, Enterobacter cloacae; identical to SEQ ID NO: 164472

SEQ ID NO: 164509 - DNA, 267 bp, Enterobacter cloacae
atgataatcggcagctcccaagccgcgctttatacgccgatcgatacctctacgctgcttaacagccagtatcgggagttggtaaataatggcgttcggctgacaggtcgggtgggatatacggcgaactacgctgttttcgttcacgaccctaacgttccgcaaaccttccgtcgcgccaccgcgcagaaagagttcctcaccaaaggctttgaagacacccgcagccagattgatgccgtgatgcgcaaggagctttcagtatga

SEQ ID NO: 164510 - DNA, 384 bp, Enterobacter cloacae; identical to SEQ ID NO: 164472

SEQ ID NO: 164511 - DNA, 372 bp, Enterobacter cloacae
atgaacaccacctcatggtctggtgacttcggtaccaacgatatctccaccttctccggcgagtggaaggtctacgacgccgacaccgttgtgtttgaagtcgctgattccatcgcggccactggcgttgaagttgcccctgcaactgcttccttggtcgttggagcaacccagcaactgagcggcgcggttcagccaaccgatgcgactaataaagcgatcacttggacgacttcggcgccatccatcgccaccgtcagttcaaccggcctggtgacagcagttgccgagggcaccgcgactattacggctaccactgctgacggtgatttcaccgacacctgtgcagttaccgtgattgccgcgccgtaa

SEQ ID NO: 164512 - DNA, 741 bp, Enterobacter cloacae
atgcctctccataaattttctggagcatttttcaaagatatgcaggttgaatggccttgcccagaatgtggtcagaagactctagagatcatccaagaaactttctttgttaatgacacgcatgacaccaataaacacagccgagaagattggttcgagcctgaaatgcatcgagcaatttttagctgtacagctcgctgctcaaggagacaatgtggtgaaattgtggcctgttctggtgatagtgggtgggagcggagaggatgggacgatccggatgatgatgaagaatattaccagtggtttcaccctaaaacctttttcccttcattacatccttttgaactaccggccaagtgccccgaggaaataaccgatcctctattggcttctttttctatatttcttatgcaaccaagcgctgccgccaaccttatcagaatctcagtggaaaggatgctgacagcaatgggggtgccagagcataaaaaaacaggctggcgcatcggactcaaagagcgacttgaaaatttaccagaaatctatgcagcatattcaggacaacttatggcaataaaatttctaggtgatgctggaagccatgattacgataaggtcaaattgaaagatattgaagatgcgtttgaaataatggaccacgtggtaaatgatttattttcggggcgaaaggaatcgattgaaattctgactaagagattaagtgagaaattcaaacaataa

SEQ ID NO: 164513 - DNA, 285 bp, Enterobacter cloacae
atgtcgtgcatttttcactatccagtaccctttgcatgtctatgctgcatgaattcgcatgatcgtttgaggatcgttttaggtaaggttcgccagagatggcgggctaatgctcaagtcttgcaggtgcatgaaaaccactgcgtaaagcgggcaggcgtggcggggctacgagcgcgcggttttggggttaatcgcggttttggcgcctcaatgttgggcgggcatggtcattttttggggctggtcgtgcgcgcctgcgtcgtggtgatgcgctgcgtttaa

SEQ ID NO: 164514 - DNA, 369 bp, Enterobacter cloacae
atggaaagtaatgtactgactttagttttaaaaaatgattgggtgactttccctttggaacatacctataacggaaaatacactctcggacaatttcatctgacagatacgttcatcgttgaatatatgaaactgatacatggaatagaaatacctgattcgtggattattagctgtttcactaacatatcaaatctcgatacccgtaaggttatgtatatggaaggttgtgatatgttgactaaaaaaacaattaatgagatccgcaatgcagtgaaatttccttctgacgacctgaaaatatatcgcaatgataagaagattgttgagataaaatttatggaatataacaatgaactcaagaattga

SEQ ID NO: 164515 - DNA, 597 bp, Enterobacter cloacae
atgaactcaagaattgaatgtcgcattaaacaatcagtcataactgttgctatcgccttcaatttttacgtgtttcaggggattgctttaaacccatgccaagcgaaatcaactgaagtaaaaccgacttcaaacgcagatactgtttctttacaacaaaccacgcaattatccagaccgtctatcatcgatatacttccgagactttatacagtagacgagatttattcacgatttaaagaacatgagtttcgggcaactaacgactttaaaaattgtcgattaatggttacaggtaaaatagtcaatatcggcactcttacattcagtaataatccattagttacattgggtatttctggttcgaatgaagggctaaagtttatttttgagaatacggactatgataacgataaggtagcggcattaaacgtgggagatacagtaattattgcgggatggaatgcacaccctggaacattcgaaggtgtttttttagagcattcgaaaatcatgactaatatgatttcaaagaaaaaaatgcaaatgcttgctgtaaatggtggcgtctatgatcgggagatttgccataagtaa

SEQ ID NO: 164516 - DNA, 1428 bp, Enterobacter cloacae
atggaggatttgattcttgaaagtaggttgagttccatcgttgcgcctgcgggatgtggtaaaacgcaattaatagttaacattttgcgtagaaatcaacccaaaccttatctcgtgcttactcatacaactgctggtgtttctgctttaaaaaaacggcttactcgcgagcacatcccttcaaaaaattactctgtggcaacgattgatggttggttgataagaattgcgtactctttcagaggctcgtgccacgttggatctacaatggaaaatccaaaactattttaccctgaggttcgtcgagccgtacttaaatatctcaattctggcgcactaaattgcattttaaaagcttcctattcacggcttttagtagatgagtatcaagattgtgatgttacccaacacgatttgattaaggctttggctacgattctaccgacgaccatttttggtgatcccatgcaatgtatttttgattttgggcgacgtaatgcaatgcccgaatggaatatgtgcatagggcaagattttccgcttttaggggagttgtctacgccatggcgttgggaaaatgctggaacacctcgtttgggtcggtggattttagatgtaagagaagaactcatgcgaggaggacaagttgacttactatcttgtcccgagtatgtgacatggcatcgtttgactgggctgcaacaagttgatctggctatgcagaggaatgttcaacattctattcttaacaagtatccaaatgattctctgttggttataggaagttcagtaaatgaattatctcgccatcaatatgcacaaggtacctctagaatcgaagttgttgaacaagttcagttatgcggtgtgatattagctgcgactatgttcgatcaacaagtcggttttcagctaataaaatcactgcttgatgttacagcttcaatgattacgaatattgaagttacccatacccttagacgagttacctccatacttgctaagagaaataaaacagctcctttcccccatgaacaagcattatgtacattagctattgaggggaccaggcgtaatctactgactgtactggaactcttgccccttaagtcaggaacaagaatctaccgtaagacagcttatgaagcgttgaaagatgccgttagccattctattagtcagccatctcaaacaatagctgaagcggcatctgtcatacgagaaagaatacgtcacaatggggataaacgaataccaagtcgagcaattggttcaactcttttactaaagggacttgagaccgatcattgcataatattagatgcgcaaggtaaaggtatgaatgcaaaaaatttatatgtcgcgctttctcgaggtgcaaagtcaattacggttttctccgctgatcggtacatcggttacccatga

SEQ ID NO: 164517 - DNA, 1728 bp, Enterobacter cloacae
atgccagtaatccgtcaattagaaatccttaacttccgtgcagttagacaactaaaatggtcaccatcaccgggtcttaattgtttaatcgggccgggagacactggcaaatctactgtacttgatgctattgacctcgctttaggggcaagaagatcctatgccttcaatgatgctgatttttttcagatgaacgtggactccccaattgtcatcgctgtcacattgggcgagttaaacgatgaattattaaatattgaaagatatggacctttcttacgagcgttcaacgtaaacgataagttaattgttgatgaaccgcggcctgaggatggttttgaaacagtcctgactgtaaagttggttgttgattctgacttggagcctgactggagattattttcagagagagcagaagctgaggggattgagcgtcgtctgccatggaagcatcgtgaattgatatcaccgtctagacttggagcaacatcccatcatcatttggcttggggaagtaggtcagtattaaataaactaactgaaaatacttttgatgtttcgtcagtactatcccaactaggtaggcagactcgacaggccttcgctgcacagcaactcccagaaatcactactatattgtcgcaaatacaaacaatcggcgaaaacctgggggtgccagttaccggagtgaaagcttgtttagatgtgaatggtgtatctctctcaaatggtgcgataagcctccacaattcagacgagacaccgctaaggctcttaggaactggctcatcccgtctcctaattagtggcatacaaaaggcagctaatcgctccagcatacttcttgttgatgaagcagaatttgggttagagccataccgtattacccgatttcttcatgagttgggctctaaggatacagatccagagaagcaggtttttatcaccactcattctccgcatgttcttcgcgagttacaagcacaccaacttcatgtaattcgacgtttacctccgccacctccagctaacgatgtagctactgcatcacaccatgtttacgatcttggaagtggaaatgatgaacaatccacattaagagtttgtgctgaagcttttttgagcaagaaagttattgtttgtgaagggaaaactgaaataggcttaatgagaggtgttgacttattctatcaagatagtggaattccaacgaactgttcaaaaggaataagttttgcagatggtggtggagatagcatgtttgcccgtgcaaaagttttctcttctttaggatatttaacagtcttatttaaagattcagataaagaacaagttcataagccattcacacaggaagtattagctgcaggtataaaagttgttgagtggggcaataataattctacggaagacgcaatttttcaatcatgtcccgcagaactaatcgctgccattcttacgatcgctattgaccgtaaaggttttgattcggtagatgcagctatccagagtgcttctcaaaatcgttacagactggatgattgtctccatcgctttgaagaagaacatcgtaagatactggcagccgctgctggtaaaaaaagttggtacaaagatattgatccttcggagcaaatattccgtcatattgtatgtccttcatacaaagaatttggcccagctttaacaaatacattgtacgatttgctcacttgggcacgacagtaa

SEQ ID NO: 164518 - DNA, 798 bp, Enterobacter cloacae
gtgagcgccacccgacacacagaccgcacgaacattgtaggtcgggtaagcgtaagcgccacccgatacacagaccgcacgaacattgtaggtcgggtaagcgtaagcgccacccgatacacagaccgcacgaacattgtaagtcgggtaagcgtaagcgccacccgatacacagaccgcacgagcattgtaggtcgggtaagcgtgagcgccacccgacacacagaccgcacgaacattgtaggtcgggtaagcgtaagcgccacccgatacacagaccgcacgaacattgtaggtcgggtaagcgtaagcgccacccgatacacagaccgcacgaacattgtaggtcgggtaagcgtaagcgccacccgatacacagaccgcacgaacattgtaggtcgggtaagcgtaagcgccacccgatacacagaccgcacgaacattgtaggtcgggtaagcgtaagcgccacccgatacacagaccgcacgaacattgtaggtcgggtaagcgtaagcgccacccgatacacagaccgcacgaacattgtaagtcgggtaagcgtaagcgccacccgatacacagaccgcacgagcattgtaggtcgggtaagcgtgagcgccacccgacacacagaccgcacgaacattgtaggtcgggtaagcgtaagcgccacccgacaccacagaccgcactatcagtacagcagacgcgcgcgaatcgtccccggaatggccttcatgctctgcaatgctttctcagcaatgtcttcatccgcttcaatatcaatcaccacataa

SEQ ID NO: 164519 - DNA, 663 bp, Enterobacter cloacae
atgagaaccgacaacttaagaatgattgcgagtggggaatatgttttcgatatgttattggatagtggtgaattatactatacaagtcacacttttgacacgaaggaagatgcaaatagctggatggaagagtggcaaacttgggcaaatagtgtatcgagtggaaaagtaagtagtatttattatattttacaagcacctgatacttgggccggttcttcagataaaaataatccttattcggggctttatgtgaaaataggacgttccaataatgtgctaaaaagattatctaacttacaaacaggtacatttggtcaattaatattacacgctttggaacctggtggatcagaaaaagaaaattatctacatgaaaaatttagcaacgaaagacgtcaaggcgaatggtttatatgtactaaagaacttactaagcatatatttacaacatggtttagaaataaggtgctcccaccagaacatcaaatgaaactaatgcaactcgcagaaaggattggtgtttattcgcacatacatagtctaatgggggggaagcccgatttagtaaacccatcaattagtgaaccttgggaatgcgaaaaatatgttttcgttgatttggtttatagctctttagcaaaacaagttaataataaataa

SEQ ID NO: 164520 - DNA, 2085 bp, Enterobacter cloacae; identical to SEQ ID NO: 105639

SEQ ID NO: 164521 - DNA, 369 bp, Enterobacter cloacae
atggccttattaatttcactggttgtagtggcaggtctttactatcaattttggtataagccacatagagcgccgatcttgcgtatatgggggatcgcgcctgatggacaagaatttcgattattgctaacagagcatggagaaaaagaggctgttttactgttcggaaagaaatcttttgttgccgtgccagatacgcagaacctttatggtgggtgttattacctttatttagaggatgctcacaagaacgagcttttaattgagttaaacgaaagtgatttataccccggtggcgcaatagaacttcaacacaacggcggtcggaagattcattgcgagatactaaaagtaaggtggagtcgttaa

SEQ ID NO: 164522 - DNA, 243 bp, Enterobacter cloacae
atgttgtttgtgaggcatcgttataatggcaccacgaaaattctgaatacatttcagaccattgacagcggtttgcagacctacagagtttatatggagagggaccatcaaagtgtcggggatttgtttttcaaggatggcggcatttatcatgagtggagcgctgacctgagcgatcgggtcacctatgatcgacaacagttgcaatttaccactaacaatactgagttcattcatcactga

SEQ ID NO: 164523 - DNA, 585 bp, Enterobacter cloacae
atggcgggtgatttacgcaggttaaggggagatcgtgacaaaaaaaagcgttcctcactgtatcgttcatgcctgcatgaacgggttattcttcctgactacagaattacatcgctccttcagttcatacatcacttttacaacacttttacaacactccttcggcctgtacatcacttttacaacacttttgcatcacttttacatcatttatacatcacttttacatcattccttcagctcatacgtcactttcatcctctgtgccatttgtacatcacccccttcctgaacgtgctgacagcgggttttccggctgcgccggcaacgcttcacggccacgcaataaattgcgtccccgttcaccgttttcggatgggaagaacgccggaaacaggacttcccctggctgaatggtgtgaatttccgcgctatgcacttgcgcgcatactcatgcatgccgtaaaaacagagcctgcgcgtttctggcgggttttcgggtggtttgttgcctgttttaccggtttcccgtcagaaacgccctcagagcctctcaggcggtgcacgcaagggatgttatggtaa

SEQ ID NO: 164524 - DNA, 324 bp, Enterobacter cloacae
atgaaaaaactagtagcgatcggtttaggcgttttaattctttcaggctgcgcaacgcaaaaacaaatgaccccgatgggggggagtaaagctgatggtacagtgaaaatgggttacacctttgggatgtttgaaaaacccgttgttgatctgaactcagctaaagatctggctggacaaaaatgtaaaacatggggatacactggggctgaggcatttggcggccaaacatccacctgcgcacaggtcggggcttatggttgtgagatgaccaacgtttcaatcgagtaccaatgcaccggtgggaaagcttcagaaaactaa

SEQ ID NO: 164525 - DNA, 882 bp, Enterobacter cloacae; identical to SEQ ID NO: 162874

SEQ ID NO: 164526 - DNA, 471 bp, Enterobacter cloacae
atgaccagtaagtatgaagttacaaaggggacaaagattggtgtctcaagctcccctatcacagttgagactttcaaatcatctacattccctgatggagttacttttcttgaggctgagtgtgcaaccaaagagattacgtacacaggtggtcagaaaggggacattgacgtaactacgctttgctcagaagagcaggagcaaaccaacggtctcgctgcgcctgcggagatgagcattagccgtaactgggtaggtgacgaagaggcgcaggaagctcttcaggatgcttacgataacgacgaactccgtgtattgaaggtggtattcccgtctggtaacggattctacgtactgatggaggttcgtcagagctcttggtcggcggccacctccgcggtagtcggtgccacctattcgctccgcgtgaagggcaagccgaaacgcatccgtgttcagcaaggttcctga

SEQ ID NO: 164527 - DNA, 264 bp, Enterobacter cloacae
atgtcttacatccatagtcgtgagtgggttgattcagggagcatagtttcagttcagtgctcacatcagataaatgtgttggtcatggatgacacaaactacagtaagtacaagcgtgggcagagcgcgaaggtttacggtggattttataccggtttccctgccaacatttcagttccacactctggaaactggaatgtagttctcgctctccctccaggtcatcgagcaaatatcaactactcaatcaacatcattgggtag

SEQ ID NO: 164528 - DNA, 180 bp, Enterobacter cloacae
atgaaagtcgaaattaaaaaaaatggtgaagtaatctgggtacgagattctgcttctttagaggggatggcttctttaggatacttgaaggacggcacacagcaaaaaataattgccgtccttgaagatgctctatatcaagcaaaagctcaattacttctacccaatgatgttgattga

SEQ ID NO: 164529 - DNA, 300 bp, Enterobacter cloacae; identical to SEQ ID NO: 119517

SEQ ID NO: 164530 - DNA, 1119 bp, Enterobacter cloacae
atgtctttggctcctggtgttgttcgtgactcgataattgaatgttttttaaggcttggaagagaagcttctattgaggagataaccaacgctgtttatttgaaaattggagaaatttcaaaatcttctgtacgttcatatctgagtttaaatacccctggtctgttcgaacgagtagatcgcggtgtctatcgcttaaatggtgatgctggtattactccctccttagatttgacgtcttcacctaaggctgttgggaaatcgacgattttttttgatgatgcaattgaatggttaaaaaggcaaaaagataattcaattcatgcagttgtaaccgatcctccttacggattagtcgagtatacaaaacagcagactgagaaactaagggcagggaaaggtggtatttggagaaagccgccttcctttgatggacataagcgtgcgccattacctcgctttacggttttgcgggaagaagatcttagaaatatatcattatttttcaaagaactatcctcgcaagtcgaaagggtggttgttcctggcgggaatatagttatcgcatccaaccctcttctatcgcatatagtcgcggactctatgtctacgtctggcttagagctacgaggttacatcgcgcgtcaggttatgaccatgagaggaggggataggcccaaaaacgcccatgatgaatttggagatgtttctgtcatgccacgttctcaatgggaaccatggatagtgctgagaaagcctctagatggaagggttcaggataatctacgaaagtggaaaacaggtggattcaggagaatttcagctgacaggccatttggcgatgtcattaaatctcatccgacgccagcacatgaaaaaaagatagcgccacatccgtcattaaagccgcaaaatttcatgaggcaattagtgagggcagtgcttcctttaggagaggggattattctcgatccatttatggggggcggctccacattagcagctgcaaaccatataggttatgagagcattggagttgaaatagaccgggagttctttgatttggcggagaaagctatccccgcgctatcagcccttccaagcaaggaaaataactaa

SEQ ID NO: 164531 - DNA, 606 bp, Enterobacter cloacae
atgcaagacaggtcagtagttaatcgacaggggtttaacccagagctcgatctgccgtattcgctaaggattagtgattttgagcacgcaatggaagatatttatgacttcttccatgatgtgaacaatttactatcaaacaaaggattgcataggcttgatgacatgatgagaccagcagctatgtctggcctcatttcagatatgatcacagcttccctcgctaaattttcaagatcacttgttgaaaacaagcatttcaatggacatccagacctagttgttagaggcaagtatccgaatgacagtatctcctcaggggaagacggcattgaaataaaaaccaccaggaaaaatgggggtgccgtcgatactcatggggcaagatctcaatggatgtgcgtatttgtctacaatgtagataatgagactgaaccggcctcagacagaaagtcgatgaaatttaccgaggtatatctttgccacgttgatgaaaatgacttccgtcgtaatgatcgtggtgcattaggaaccagaacagcaacccttcacaaagaagggttgaagaagctcagagaaagctgggtttacaaggatttagtttag

SEQ ID NO: 164532 - DNA, 459 bp, Enterobacter cloacae
atgaaaatagaagccgatgtaaaaaatatatcaaaattaagcgattattattttttagttcccgattatcaacgtgagtatgtatggaaggttgatgatcaggttgaacagtttatcatggatttagacaatgaataccaaccagagcagaaagatcaaaatggttattttctcggttctgttattatcgtaaagaatggggaaaagcatgatgttattgacggacagcagcggttgaccactattgtcatcactatgtgtgccttacgggatctattaaaagatagattggatacacttgacaaaaaagggctggaatatctgaaaactattgaggaatggctctctagttatgatattaatagtgaggaaaatctaattagactagatcttcaatatgaagaaagtcgaggatttatttcgcggttaattgaagggcaaaccaatacctttgcgtaa

SEQ ID NO: 164533 - DNA, 216 bp, Enterobacter cloacae
atggaggcggcgataaatcactgtggtattgccatgctgcccgagcgcgaggccgacgcggcgctacggcagggaagcctggtgccggtgctcagcgcctatacgccaaaaccgatcggcatttttggtatttatcagtcgcgagactatcagcctgcggcgcagcgtgtgttcctcgacgcgctggcaaaccaccttgccacgcgatcggactag

SEQ ID NO: 164534 - DNA, 351 bp, Enterobacter cloacae
gtgattcaggagaaaaccggcggcgcacatgcggcagtggtgacggcggtagcgaaagcggccttcaactctgctgttgacgcggttcgcgccggaggccgcgtggtggctgttggcctgccgccggaagcgatgagcctggatattccacgtctggtcctggatgggattcaggtggtgggctctctggtgggtactcgtcaggatctgctcgaagccttccagtttgcggctgaaggtaaggtggttccgaaagtcacgatgcgcccactggaagatatcaacgccatctttaaagagatggaacagggccagatccgtggccgtatggtgattgatttacgttcttaa

SEQ ID NO: 164535 - DNA, 210 bp, Enterobacter cloacae
atgctgaggcggtacgctgtagcacacgccgtgtataaggcgcggcagcgtgatgaagtcagaccgtgtcttgtcagcaacaatcagacgttcggctacctgcatctgatactgtggtggtcggccagtgcccaggtaaaaactcaccagcgattccgggaagcggttaagccattcgctaacctgctcaataaaatctggaacaggtga

SEQ ID NO: 164536 - DNA, 369 bp, Enterobacter cloacae
atgggtaaatatgaaaaagcattcaatgaggttaatgtacttatgagtgagatacttgataacttaaatattaccttggaagaaactgatttgtttcctacagaagatatatttataatagttgtaaggaaaatcgaagttgataacttgaagttaatatcctctatttttactaatgatgaatatcatgaggttaaagagggtatgacacctgcagtgaacaaattcatgcattggtggggagataatcttgattgtgataatataaatataccggctttaattgcaaaaaaagaagaaagcgttctttctccagttatgtcagaaaatttaaaaagtgaaataaaacagagcaagaaaagactttga

SEQ ID NO: 164537 - DNA, 192 bp, Enterobacter cloacae
atgatgtgtcaagttgtttgtaaagtgagaggtttatttttggaagaaatgcttaagagaagtatgtatgatattttcctgagtataattattgatatgcaaggttggcagaggttttctttcttttctaaccgaagggaagaaaagcaaggggaactcgaagaagcaagcgcagcggcttcgcagagttag

SEQ ID NO: 164538 - DNA, 1095 bp, Enterobacter cloacae
  misc_feature (972)..(981): n is a, c, g, or t
atgagtgagtgggaatttttacaaattaaagatctggtaagtgatggtagccttgaaaaaccactagatggtaatcatggcggcatacacccaaagggtgcagacttcgtatcgtctggaattcctttcgttatggcttcagatataaacaatagccaaatcgatttggttggatgtaagtttatatccaaacaacaagcattgtctctacgtaaaggattcgcaaaaacaggggatgttctattaacacataaagcaacattaggccggacagctatcgttccgccattaaaaaccgactttataatgttaacaccacaagttacttattatagagtaaaagacaagaacagaataaataatcattatttaaaatattattttgacacccctgatttccaacaaactcttgctaatcatggagatgctggttcgacaagagcttacataggtataactgctcaacatgatctaccagttattcttcctccaataaatgagcaaaaagccatcgcatctgtgctttcctctctcgatgacaaaatagacctgcttcaacgccagaataaaactctggaatccatggccgaaaccctgtttaggcagtggtttattttagatagcactggtgtatcagttagtatagatcagataattgactttaatccaaagcgaactttaattaaaagccaagacgctacttatttggacatggctggactgagcactgttatttttcgtgcaaatggatattacagacgtccattttcttcaggaactaaatttactaaacgagataccttgctagccagaattaccccatgtttagaaaatgggaaagcggcctatattgattttttagacgacaatgaaactggatggggttctaccgaattcatagttatgcgtcctaaaaaagaaatccatccttttatctcatatatcatgtgccgaaacccggacttcaaagannnnnnnnnntcaaagaatatgcggaaagctgtatggaaggttcaactggcagacaacgagttaacttggatcatcttaagaagttcaatattaatctgccaacagaagcttccctacgtataa

SEQ ID NO: 164539 - DNA, 276 bp, Enterobacter cloacae
atggacaagtttgaaggaacgccaggcgcttgggatatagatattaacggccagaccattctttcagatgcgggatataaagtggcggacatcgacctgattcatgggtctgattctgatgtggctattatggttgctgcacctgaattgctggaagcgctacagaaacttcacgtttacgcagaagacgtctgcggagtttgccctgatgactgccacgaagaacacccgttgatgcttgccacatcagctatcaccaaagccctcggcaagtaa

SEQ ID NO: 164540 - DNA, 228 bp, Enterobacter cloacae
atggctaaatcacaaatgaaattagctaatcgtgcatggcgtacagaaacaaaggctttgggctggcatgaagggcatgggatgaatcgcaagaagtggaaagcgttctgtcgggataatgccgctataaccgttgaggcacaaaaatacagcgattgtcctatctttggcgatcagcaggaagccaatgaaatcgttgccgaagaactcactgaatggacactatag

SEQ ID NO: 164541 - DNA, 582 bp, Enterobacter cloacae
atgaccaaattcaccatagaagacctgagagatatcgcatatcgcggcagttatgatgaccttgaacgtgaactcgctctacagttgctcgccagcatggagcaggcacctgtctaccttcgcccctttggcgacgacggcgaaacattcgttgcttgcgatggcaatgatgaacgcgctatcacactctacgcagcgccacagttaccgcagccaactatgactgaacttgaacagtttgctgaatttatggcagcagaatccatcaaatctggcgactaccccgacggatggcaatgtaaggcgtcaaatgctgctcacgagtatgctcagacctgccgcgccgccatgcttcatggtgccgaacctgtacaggggtggattccgtgcagtgagcggatgcctacacctaagactggcgtcatggtggggtgctggtttggccgggaatgggcagttaagtgggctacatacctgccatatcacccagacgcccaccagagtggattcttaatgccaggcggctcatggacaccaacccactggatgccactaccagcagcaccgcagcaggaggcatga

SEQ ID NO: 164542 - DNA, 414 bp, Enterobacter cloacae
atgaagaggctgattattactttaagtttggcatttactttagcgggctgctcagctggtccaaaactaaccgactttcctccgccaccatctcagcaacaaattgcgagcgcaagctatggagagcttcctgcggactataaagaaaaaatatctcaatacgtttcctcccggctgctagacccttacagcgccaaaattgagattgggaaaccttacaaggcttatagtcaggataatgtagctggaggaggattggtaagatttggctgggcagtccctgtgatgactaatgccaaaaatgcttatggcggctataccggatacaagcctagtagatttatattcgaccacggaacaatgtacgatgtaacgctaatttacggtcttggacatctggtcgaagttaagtaa

SEQ ID NO: 164543 - DNA, 606 bp, Enterobacter cloacae; identical to SEQ ID NO: 147199

SEQ ID NO: 164544 - DNA, 240 bp, Enterobacter cloacae
atgaaaatttcagaagtaaaggtctctgatgttgtttggtatgacaacgaaaacggaaaggcgatcagtgccttcgtgacattctatggcccagacgattgcactcgcattgcaagtgtccctgttaacctgccatatcagctagacctgacccttaagcaagttgaagagcttgccattgccactgcgaagggtacgctaaggaaggtgcgaataagcggggaaattcttctcggctga

SEQ ID NO: 164545 - DNA, 144 bp, Enterobacter cloacae
atgcaaactgagaaagacaaaactgtcaccctgaccgaggctgagcgcaaattcatcatgattgcgatgattgcctatgccttatctggtgagccgtcagaagagaacgcaaaaatcgcagagcaaataatcaataagctctga

SEQ ID NO: 164546 - DNA, 297 bp, Enterobacter cloacae
gtgagtctctataacgattttgtacgtgtgagcttccctgatgttgagggtgacgagctgctgagattatctggccgcgccgagtgcgctgctgactcaatccttaacggtgtcgctgctgttggcaaaatgatgttctatgccggtgatatcgataacagcgtttatgagcccacagcctcagatttcagtgatatcggcgggatgttgatggagctgatgccactggcccgggcgcttacggatactgcagccaatgcggaatgtcagcaccggcagatgaataaacgtaagtga

SEQ ID NO: 164547 - DNA, 966 bp, Enterobacter cloacae
atggcgcgtgaatttttcattgtcgaccgagacgtgttcctgcaggcgtgtgaactcgggatgaatgcggcagttagctacctagtcatggctcgcggtacccagggaaacaacagaacaacgaagtggagcgccaattcaattgccgatcgagctggtatgactcgccccagggcaacgtctgccattggtgatctaatcagtgtcggtattgttgagctggttgcagccggtgcacggccgcattaccgacttagattacctgacaatgacaacggttacttataccttccaaacagcatcatcgatgcggcagcagatgaaaccccgccaatagagcgcctgcgccagacacggaatattacgaacctgattgtgtttgtcttgctgtatggcatccaagatctggataacgccggcggcctaccagctgatatgtttgatgatacttcatcagaagctcaggtgctgtatgagaataagaccatgcgcttggaggtggtgaccaaacatacttatgggctcagctgggcatggtatggcagatcatccgtcttttcccttatcgatatggactttaacgacttcaactccgcgttcgcagagctaaggggtatggggctagtatccgttaacgctgcagtattcgaccaccacgaatacgacggagagataattggctcgacacatggatatgattacgttgaagagttggatgacgctattcggcgtaagcgtaagaccatggctaaatggcctaatgggtattatatgattgttccagcacacataaaaacggcctgcataagatgcgttggggttatgcgctatcgcgcccaaacaggcaagacagctcgctgggtggcgctatctacaaagaatggggctcgagaactaaagctatataacgacgcattaagactggagcttgcccttgccattgagcgtgaagaaagaaccgcttag

SEQ ID NO: 164548 - DNA, 297 bp, Enterobacter cloacae
atggatggtcgaacgccaactgttgcagctagcatgactgaacatgcggccatgttaagactgaagcgagtgctcaaaaagcaagggaagacgatccgtagaaacaaggccagcaccgaggcagcaaaaaacgcgggtcgtttctatatcgtggatgaagcgcaaggattagtaatcgctacggcagaacaaataacgccgtggatgagagagtatggggcaatggaagattgggagtatgtgataggagaggaaacactccagacggttataaaaaggcatatgccgcccctgtaa

SEQ ID NO: 164549 - DNA, 138 bp, Enterobacter cloacae
atgtctatgagcaatattctaacactggcattgcgcatgcaccaggggaaacctgtgcacgtaccagcactgagtaagtctgattttaataatttacttgatgccttaactacgctgcgtaaggagctggctgtatga

SEQ ID NO: 164550 - DNA, 516 bp, Enterobacter cloacae
gtggaatttttcatcatagctgcatttctggggctgatacctgccgccatcgctaaaagcaagggccgatcattcggcgcttggtggttgtatggcagcttgttgtttatagttgccatcatacacgttcttttaataagtggtaacgcgcgggatattgaagaaaggcagatcaccgaaaatgacatgagacgatgcccatactgcgctgagcttgtaaagaaagaggcgataaaatgtaagcactgcggtagcgatttgaataaaatccagtctttgccgtctgaatcgctgattccttccagctattacaccattgatgacggcgcaccggagttaaatcgtggcgctgttgcagatctggcttgcagaattttttcttcagccaatggccttgaaggagatgagttaatcaaaaaacatgataatcagatacaggcgatagccaaaggattaccacctcaggttagagtcgagtttttgaaatattacaccgagattattcgcggatgttag

SEQ ID NO: 164551 - DNA, 543 bp, Enterobacter cloacae
atgcattcacttgcgtatcaacacaataccggaatacacccgggagcggtgataaaccgcgctcaagctaaagcggcgccagaccacgaaaagatccgcgacgcggtccgggcatggtcatcggcgctggacaatcaggacgtcgtttcggcgttgatcatcaacgaataccgggagcagggcgggaccgccatcagcttcccggaagatatcagcagggcgcgccagaaactgtttcgcttcctggataaccgcttcgactctgagcagtaccgcgagaacgtgcgccagctgacgcccgcaatcatggcggtacttccactggaatttcgcaaccgcctggcgccgcagaacgacacgatgtcgctgatcgcctctgcgatgaaagagtgtgccgaagctaaacaggccgtgctgctggacgctccagagcatcagaagctgaaagaggtaagcgaaggtatagcgtcgctgttccgcctcatgccggagcaagtaggcccgctgatgacgatggtcacgtcgatgctcggcgtcatgtaa

SEQ ID NO: 164552 - DNA, 504 bp, Enterobacter cloacae
atgccgggcaactgcccgcattatgggcgttggcctcaacacgattttacgtcacttaaaaaactcaggccgcagtcggtaacctcgcgcatacagccgggcagtgacgtcatcgtctgcgcggaaatggacgaacagtggggctatgtcggggctaaatcgcgccagcgctggctgttttacgcgtatgacaggctccggaagacggttgttgcgcacgtattcggtgaacgcactatggcgacgctggggcgtcttatgagcctgctgtcaccctttgacgtggtgatatggatgacggatggctggccgctgtatgaatcccgcctgaagggaaagctgcacgtaatcagcaagcgatatacgcagcgaattgagcggcataacctgaatctgaggcagcacctggcacggctgggacggaagtcgctgtcgctctcaaaatcggtggagctgcatgacaaagtcatcgggcattatctgaacataaaacactatcaataa

SEQ ID NO: 164553 - DNA, 345 bp, Enterobacter cloacae
atgaccataacaattcgtgggcagattcttgcagccctgcgtaataacccgggcctgaacagcgggcgtattgccaagatgatcggcatgaccaccaaaaagatgtcaggcacggtcagctcgcttctggcagacggcctgatcacttgtgagggcaagcacggccagcggctttatcggctgaccagttacggcatgaaatacgcaccggaaaccatacctgccatgccgaaggggaattcgaagttggtgcagcgtacagagacgaacgtgatctgccaggagtgccggaacagcgcggccatgaagcgagtattgatggtttgggggagggtaggggtatga

SEQ ID NO: 164554 - DNA, 345 bp, Enterobacter cloacae
atgaccataacaatccgtgggcagattcttgcagccctgcgtaataacccgggcctgaacagtggtcgcattgccagcatgatcggcatgaccaccaaaaagatttccggcccgttaagcacgttgtttgcagacggcctgatcgagttcgaaggcaagcacggccagcggctttatcggctgaccagctacggcatgaaatacgcaccggaaaccataccggcgatgccgaagggaaattcgaagctggtgcagcgcacagaggcaaatgtgatctgccaggagtgccgcaacagtcaggcgatgaagcgagtattgatggtttgggggagggtaggggtatga

SEQ ID NO: 164555 - DNA, 177 bp, Enterobacter cloacae
gtgataaataacaggcggatctggtctgtgacttatcttgagggaacccgtgaaaaacaggtgcaattttataataatctgacggtgtttaatcaaaacttcgctgcgtttttagaggcagtaaaacgcgtgaaccctgaggcagatattaaagccgtgtcattgttcaacctgtga

SEQ ID NO: 164556 - DNA, 132 bp, Enterobacter cloacae
atgaagcataccatgatgacgaagggcgggagacggatttatctccttgattacttagatgttaatgaaattatttacacctgtgcggtggattgtttttacattatgctgatttataaggataaatcatga

SEQ ID NO: 164557 - DNA, 177 bp, Enterobacter cloacae
atggcaaaaacaatgggagtgctggctgcaatctttgcattgggttccgctttaatgtggcacctgtcaagtaaggctccaactcaagagcttgcgaacacagagaattactgggcagccgggttatgcgttattgctgctattttcgcgttcttaggcttgttcagcaaaaagtag

SEQ ID NO: 164558 - DNA, 435 bp, Enterobacter cloacae
atgtttaaatatccggctactgtatctttcgatgaagatacgggccaatacgaaatcgcttaccgtgactttaacaatctgcactctgttgctttaacagaggatgacatcgagctggaagcccgcgatggcattattgcaatgattggagatctgattgattcccgcatacctgtgccagaaccttcagttgcgcaagaaagagatattgttattcatctccctgtgctaatttgcctgaaagcagcgttgcataacgcgatgatcagcacaggaacgcgcaaagctgatctggctaggaagctgaaccagaaaggtccacagattgaccgcctgctggatgttagccacgcatcaaaagttgagacactggaacaggctttatatcttcttggatatgagacctcagtcagcgtcatcaaattaactaaatag

SEQ ID NO: 164559 - DNA, 156 bp, Enterobacter cloacae
atgtccgacatctacatcatcaaactgacgacgaacgacggcggcgagtacacgggcaagtggctgtatttcgcacctgccgatgtgaagcgcgtggagttcacgccagtacccgcagaggaagacaccaatggcgacatgcagactgtcagttga

SEQ ID NO: 164560 - DNA, 183 bp, Enterobacter cloacae
atggctgttaaattttctgatggaactgttgttcagctcaactcaggtggtccgctgatgaccgtcagctattatgatgatgagcgcgatcagtactattgcgaatggttcgttaaggaagagccaaaacaccaattcttcaacgaggcatctttgaaggaatacaaggaagaaagttggtaa

SEQ ID NO: 164561 - DNA, 279 bp, Enterobacter cloacae
atgaaacatatactttgtgcgctatttgttttcgtatcatcttctgctttcgctgatgttgaacagcatctggccgagttagagcaaaaaagtaatgcggtccgaacaaaaattattaacgaagtaagcagtgagcaaatcaggcaacaaaataaacttgccattcaaatgaaaatagataaattgcgcgcaaaaatcggcggcgaatcagattcgcaaaagaaagtagaaatggaagagcagctcaaaaatttacagtctcaaaaaaatagtctctga

SEQ ID NO: 164562 - DNA, 126 bp, Enterobacter cloacae
atgctgcaaaattctaccatatggattttccctatccagataccacttttacttattgtggatatgttaatggtaagaattcatacggcgcttatgccggaaaacaactgtttgcaacattcttag

SEQ ID NO: 164563 - DNA, 663 bp, Enterobacter cloacae
atgaaaatttcacagttacaacttgcttttttttatgacgtaaatacgccaattgatttcgatggtctgtcatactttgctcgactgggaataaaaaatatttacgatcgaaatttaacaaacaatcaaatgcttggtattgttcctaaagatgctccaccagaaataccgagattacagctttcctctgaagataataaaattcgtatgctatctacacttcagcgcagcgatttgtttgtagatcgtttgtttgaggaagaccaaaccaatttagatagttttacaaaaatttttgatagcttcatcaatgtacatgctcaacttaacaagcaacctgtaagaataggtttagtggcttataaaactgaatatgatgattatccaggggttacaatagcaaaaaaatatcttaacttggttaatataggtggccttgacaatttagcagatgctaatgttatgttcaataagcgatttgaaatgaatgggcaaacatttaattgccatttaattcatatggctggatttgatcaggataaacagaagaatttattattgaggcaagtggatgttagcacagatgaaagtagaaatttcgcagcaagctatacaccagacattcttaagaaagcttttttaactaaagtggcagaattttaa

SEQ ID NO: 164564 - DNA, 1035 bp, Enterobacter cloacae
atggatactgataaaaaaaatgaaaaacttggatgtaagtcagttgaaaaaagcgctgatagcgaagctaatccttctctatctaacatgggattcacttcttcgctaaataatacatcttcgatccaagtaaaaatcggacctaccggtagtataaaaagccaaacattaggtccgtcaccatcctccattataattgacgaatctttgtccggcgaaggagatgtggcggataagttcattccaaaagataaaagcgttacgggcgatgaaactaatggagaggatgttaagaaagttttccagatgtattctggtataacatacaccaacaataactccattaaaaacagtgacttatacgattatgaaaaatatggtcgttactccaaaaaatggacatcctcaaatgcaactagcaataattccagtgcatttaagttttcattaaacgggcagaaaacatcttctaacagtgaagtaaataatggttttactaaaagtgaaattgaaagccttgtttggatggatctgaataagaaagtaaatgatttttcaaacgaattaaatgcaaataaaagatctatggctgataataaacggaagttaaatagccttatttcgaaagttgctatacaaactaataaaattaccagttttgatacttcattaaaagatgctgaagaaaagttgagtgataaggttgcggattttgaaaaggaaatagttactgcacgtaattctttattggcagttatcgctctttttgcttcattttttacatttatctcgatttcggtaaatattttttctcgtgatatgtcattaagtacatctatatctgtactattagttatttggtgttgtctaattagttttatctttgtttttatggcaggtataagcaagggagggcgtttttttacaagtttcacttttgtaaagcatgctctttttatggtggtgcttttcatctgtgcatttgtattacctcgcgttatattttctgttttaccgatacagtggtttccataa

SEQ ID NO: 164565 - DNA, 123 bp, Enterobacter cloacae
atgacaatcatcagagcaaatatttccattccacagtgttacatgtccggttgcatcataccagccatgtccggtaaatatgatgatgccctgcttgcctgcaaattgtgctggagttggtga

SEQ ID NO: 164566 - DNA, 1107 bp, Enterobacter cloacae
atgtatgcaagtctattatcttacaaaaacttaaagttggcacatcaaggaagtgacttacggtctattactgagttttctctctattccgatagtcaaccaattggggcggttgatgatgattccgtttactgttttctgaatatgctacccaggataaccaaacaatccactgttgcatcttcaattacagtgcgcacaaagtggtatagtgacttaaacaatatgattctttctagttctcaaagtcatacaaaggattatcatggtgggtggtataatgatgaaatagctgcgctttcaagtttattacttggtgtccgttttcatgctgggtcaattacgcgtcactatgattactacacaggtgatttcggaaggattcaagcggagagttcttttcctcctgttttagagtttaaacataacaaacccatagtacctaatgctatcaaagaaattgatataactaatcttaaagtacttaacaatttacatctcttaagtgaaaagaatttcaaccatttaattagagcagccagaagctatcaaaatgcattatggatctgcgagtcatctccaaatatgagttggctattgatggtgtcagccctagaatgtgcggccagtcaatgggcaaaatccaatgcgtctaaggaagaaagatttaaacatgccaagcctgaattatatgaaaaattggataccaatgaatttagacatttaatccctattattgctaatgagtttaaagattcatttggagcgacaaagaagtttgtagatttttgcctctatttccttccagatgaacctcatgtgaggccaaaagcaggaagaattgattgggaaaaagaatcgttatcagcaacttttaaaaaaatatatagctaccgttctaaggcattacatggaggacaaccatttcctgagccgatgtgctcccatcctgaagtatgggatgggtatactgctgagcgagcgagagcatgttcaaccttaggtggaacatggttgaatgaagatgtgccaattaatttaaacaccttcaactttatgacccattccattttgaataagtggtggcaatctttattaccaagttaa

SEQ ID NO: 164567 - DNA, 789 bp, Enterobacter cloacae
atgagtaaaggtaaattagagcgcagtttatatcccagtgtggtatgtcatttcacgaggcgctctaatgtgttaattagcatattagagagtatgttttttaaagtttcatatgcgaaagaagaaataatagggacggatgcaagtagaacatttggtattccaatggtttcattttgtgacatccgtctttctcagttgaatgagcatataaccaagtatggaaaatatggcatagcacttaataaaagatgggcaattcgtaaaggattaaatcctgtcagttacatcagtaaagactgttcaatgtttgctcgtttagatactagattacgtgaattaagagacttcatgaagcatcttaaagcagagggttctcttgaagaatataagatagctctagagcaatacaatgactttattaatacaatgagatatatgaaaaattatgaaggtgatttagttagaactaaaaaaccattgattgaaaattatcgctttgcgaatgaacatgaatggcgttatatccctgacatagacgcagatattatcccaataagaaaggttatacccaataccaactggaaaactgaggctaataattcaataagcaaagagaaagtctctcaattgaatttttcactggatgatgtgaaatacatattcattaaagatgaaattatgagtcataaaatagtaaaaaaactacagtctatttttaatgagaaagaatttgccttgattatgccgaaattgctaataacaacacaagtatttgatgatttttaa

SEQ ID NO: 164568 - DNA, 684 bp, Enterobacter cloacae
  misc_feature (658)..(667): n is a, c, g, or t
atgtttaatgaaaagcaggcattgattcaaaaaacttggcaagattcagagattaaagtctctatttgttgtataacgtataatcatgaaaaatacattgctacagcgattgagagttttttatcgcagcaaacaaattttgcatttgaaatattaattggcgaagacaagggaaccgataacacacttactatcatcaaagaatatagggataaatttccgggaattgttaaggttattacctcagataaaaatcttggtgcgaacggtaatatcaggaatgtcatttcacatgcgcaggggtgttatatagctttttgtgaaggagatgattattggatggaccctaataaaatccaaaaacaatacgatgcgatgattctgtctccagatgttaacttctgctttcatcctgcctatgcgttacatcctgatggcagcaaagtaaagcgctttgacaaaggtgatttggttcgtcgttttagtgtagaagatgtcttgaatacaaatgggcaattctctcctacgtcttcatacatgttcaaaaaaaaggttgtggcatcgcttccggcatggtttgaaaatgcgcctgtgggcgatctctttattgaactctatgcaatgaaagatgccggtgggctgtatttaccttcacccnnnnnnnnnntatcgcctgtttgctga

SEQ ID NO: 164569 - DNA, 432 bp, Enterobacter cloacae
atgtcacataatacccgacctctgaatcgacaggactacaaaaccctcacgctcgctgccctgggcggcgcgctggagttttacgatttcatcatctttgtcttcttcgccgccgttgtgggggcgctgtttttcccggcggatataccggaatggctgcgtcaggtgcaaaccttcggcattttcgctgccgggtatctggcgcgtccgctgggcggcattgtcatggcgcactttggcgatctggttgggcgcaagaagatgtttaccctcagcatcctgcttatggccgtgccgacgctggcgattggccttttgcctacctatgagtcgatgggcattatcgccccgttattgctgctgctgatgcgtattctccagggcgcggccatcggcgggggaagtgcctggcgcgtgggtgtttgtcgctga

SEQ ID NO: 164570 - DNA, 234 bp, Enterobacter cloacae; identical to SEQ ID NO: 118656

SEQ ID NO: 164571 - DNA, 981 bp, Enterobacter cloacae
atgacaaaatatcggctcagcaatgaaacgcgtctctggcgctggcaggacggttcaacaccgtgcacaacgcctctaagacaaattattgccgtgaaggattttaacgatgtgaccagcgggactaaaggcggttgggttgaggatgaacacgcgctcgcccaggacggggattgctgggtttacgatgaaaacagcgtggtgtttgccggggccaggatatccgctaacgcccgcctcacccaaccttgcatcgtaagccaccgcgcacacgttggcggcaacggctggcttgacgcggctgaggtgagtcacggcgcggtaataagtgacaacgtcaccattcagcactccaccgtacgcggggaatgtcgtatcgcgggtgacgcgcgggtgctgcataatagtttggtgattgcagccaaagggctgacacccgaccgtcagcagatcctgcaaatttatgaccgagccacggtcagccagtcgcgtattgtgcatcaggcgcaaatctacggcgatgccatggtgacctgggcctttgttgagcaccgtgccgaggtgttcgatcgcgccattcttgagggcaacgcgctgaataacgtctgggtgtgcgactgcgccaaagtgtacggcaacgcccgtctgctggccggtctggaggatgatgccatcccgaccgtgcggtacagttcacaggtcgcggaaaacgccctcgttgaaggcaactgcgtcattaaacaccacgtattaataggcggcgaggcgtggttacgcggcgggccaatcctgattgatgacaaagtggttattcaggggcgggcgcgtatcagcggcgatgtcctgattgagcatcaggtggaaataacggacgatgcggttatcgaggcgctggagggtgaaagcattcacgtccggggagccaaagtgatcaacggcgacacgcggatcacccggacgccgctgctgggggcgctatag

SEQ ID NO: 164572 - DNA, 1173 bp, Enterobacter cloacae
gtgctcgcgcaggtagctgatgcggtagtcgtcgttaatctcaccgttttcatcaacgacatctttcgcccccagaccgttttccaccaggaacagcggcttctggtagcggtcgtacatcatgttcatagtgatgcgcaggccgagcgggtcgataccccagccccactcgctcacctgaatgtgcgggttgcgcagggacttcacgatgttcgccgcgctggtgttggccgcgttcatgtccgccgacgcgcagcgcgaggcgtagtagctgaacgagacaaagtcgacggtatttttcagcagttcgtcatcgcccgggtctttcacaatcacgacgcctttttcgcggaatacgcgggcagagtaggccggatagctgccgcgcgcctgcacgtcgataaagaacaggttctcgcggtctttctccagcgccatccacacgtcttccggcttgcaggagtagggatagaagttaccgcccgccagcatgcagccgacctggttttccgggtttacctcgtgggcaattttggtcgccagcgcgctcgccaccagctcgtggtgcgcggcctggtatttcacctggtcttcgttttcaccttcctcaaacaccagccccgcgccggaaaacgggctgtgcagcatgatgttgatttcgttgaaggtcagccagtatttcaccagctcgttaaactcttcgaagcaggtgcgggcgtagcgggcgaagaaatcgaccatcttacggttgcgccaggagccgtactccgtcaccaggtgcatcggcacgtcgaagtggcagagggtcaccagcggctcgatgttgtactttttgcactcctcgaacaccgcgcggtagaaggcaatgccttcctgattcggcagcggttcgtcgccgttcgggtagaggcggctccaggcaatcgaggtgcggaacaccgtaaagcccatctccgccatcagggcgatgtcttctttgtagcgatggtaaaaatcaatcgcctcgtggctcgggtagaattcgtcgtcccgcaacgaaaaccgtttttccttgccgacttttaccgccaggcggtttgcgccgtgggggatcatatcgaccgtcgtcagtcctttgccgccttcacggtaagccccttcactctggttggcggcaagcgcgccgccccataa

SEQ ID NO: 164573 - DNA, 846 bp, Enterobacter cloacae
atggcaaacgactggcttgagctgcgtcagcatgcagaaacaggtattgagacaattaaggcgcatttcgaaggacatgcctttgatccccactggcatgatagctatctggtcggaataaccctttccggtacgcagcagttccactgtcgccgtgaacgccaccgtagccagccgggcgatgcttttttacttgagcccggggagatccatgacggtgatgcgccggtagagggcggctttacttatctgaccttttatctggatgaacactggctcacccatacgcttcaaggcctgtatgactctactcccgggagttacactctccactttgcccaaacgctgacgcgagagcctcagttggtgcgcgctatcggtgatacatttgcctcgttgcataacgatgagatgaagatcgtccaacagagcacaatggataacctgctctctcagataactacccactgccactggcgtaagaaactcccgtcgcaattacaaagctccgctgtggcgcatcgtgcccgcgactatctctatgcgcatatcggcgagaacgtggggctatcagaccttgcccgcgagacgggtacggatcgctttaccctcacccgctgttttaaacgcgaatttcatctggcaccgcacgcctggcttatccagctgcgactggcaaaggcccgacagatgctggcgtgtggggaactgcctgttgatgttgcgacggcagtgggttttgccgatcaaagccatcttggtcgctggttccagcgtgcataccgtatttctccggcacactaccgccggttgtgcacaaaccttccagacgtttccagaaaataa

SEQ ID NO: 164574 - DNA, 417 bp, Enterobacter cloacae
atgaatacaaatgtagggcaaataacgctcatcgatcttatttcaatgcttgatcgtcgtgaattgattataaataaggattatcagcgtggaaatggaatatggcctccttttgcaaaaagttattttatcgacacaatattggaaaactatccttttcctaaaatttatctttatcaagtatttgacagaacgaatgaaagacctattaaagaaatagttgatgggcaacaacgtgtaacaactttagttgagttttacaaaaataaattcgccttgacttcagcgtcgaaaaaatatgcaggacttaagtttaacgaattacccgaagacgctaaaatgaattttataagctatcaggtcgaaacttccacagtttattctgctagggaaggtgcgaacaagttcctgatatga

SEQ ID NO: 164575 - DNA, 465 bp, Enterobacter cloacae
atgataatttgggttgatgcggatgcctgtccaaaagtaattaaagaagttttataccgagcagcagatagggaaaaagtgcaaataacatttgttgcgaaccaacgcttaacagtacctccatctccttttttaaaaaccttgcaggtgcccgcaggatttgatgtagcggataatgaaattgtattacgagctcaaaaagatgatttagtgatcactgcagatatcccattagccgcagaagttatggaaaagggcgccaatgcattgaatcctcgtggtgaacgctatagcgaagcgactattcgtgaacgtcttaatattcgtgactttatggataccatgagagccagtggcatccaaacgggagggcctgcaagtctaaaccagaaagacaggcaacaatttgctaatgagttagataaatggctgttgcaacgtaagaaatcactagcgtcatcataa

SEQ ID NO: 164576 - DNA, 264 bp, Enterobacter cloacae
atggctgcacataccagcgaaacagtgaagtttttacaaagcgtcagtagcgatcaaacatggtggaagtcacgatataatccaggagacagcgttccctattctggaatttatcgttgtacggtctgtggaaaagagatcaccagtaacggcagcgacccgttcccgccgcaaaaccaccatcagcacagtcagcaacaagcaatcaaatggcagttgattgtcagaacggacactaaaggtgaccgtttcggaatcaaatga

SEQ ID NO: 164577 - DNA, 294 bp, Enterobacter cloacae
atgacaattgtaatcagtaaagaaattgaagaaaaactaaccaaaaaacataaagtaactaaaaaagaagtacatgaaagccttgcaaaccttaacggtaacctgttgatagataacagggaacaacacagaaccaatcctccaaccaactggtttatcgctgaaactaaccagcgtagagagttgaaagtgtgtttcatgattatcgatggcgacattcatatcaaaacagccttcgaaccgaacgaactagaacgtaaaatctatgctacgcatggaaaaaagacgacataa

SEQ ID NO: 164578 - DNA, 345 bp, Enterobacter cloacae
ttggcagacaaacgcagcaaaatgctcacgatatgggtaactgaagacgagcaccggcgtctgctggatcgctgcgacggtaagcagctcgcggcctggatgcggcagacgtgtctcgacgagaaacctgctcgtgccggcaaacttccgtcgatctcgccggcgttgcttcgtcagcttgccggtatgggaaacaacctcaaccagattgcccggcaggttaacgccggtggtggtaccggacatgatcgcgtacagattgtcgctgcgctgatggccattgatgccggacttgagcgcctgcggcacgcggtactggaaaagggggcagatgatgatcgttaa

SEQ ID NO: 164579 - DNA, 402 bp, Enterobacter cloacae
atgcctgtacttttcagggtgaaagttattccgctggttttacttctggcaatgatctttgcgtttttacttaactggccaatattgctgcatttttacgagattttgtcgcatttagagcatgtcaaaattggttttgtcatttctattccctttgttctggttgcggcgcttaacgttgtttttatgcctttctcagttcgttttctgctgaaacctttctttgctttactgtttatcactggctcactggtcagttattcgacactaaaatataaagtaatgtttgatcaaacgatgattcaaaacattattgaaactaacccccaggaagcgcattcctatcttaatggctcaattattatatggttcgtctttacggtaatgactccaacttattga

SEQ ID NO: 164580 - DNA, 147 bp, Enterobacter cloacae
atgcccggcatgcctgatttttatcgtcagcatcctgaaatcgatatcattccgagcagctctgaacaccgccgggatatgttctggtgctgccttgactgtgtgctgtgggtgggcgaactgggcgacggcgactatatggcctag

SEQ ID NO: 164581 - DNA, 429 bp, Enterobacter cloacae
gtgcctgcgttgcggcacatacgcctgcaacttatctcccgaccgcttccggccaatgccgctctgtttgtcgtcgccgacagctgcgccgcgctggtgagcgtactggtcgaaaccgatgatgtcgcaagccgtgcagcgctgtgcgaacgtctcctgcagaccctgcgcaggctgcgtgaactctgtgatgtcgatcttcctccatacctgattgaacagttgatcatgggtgagaaaatcaactcctgcgtgccggactgctggcaggacaccttaacgcaggtggactacgttctggcgctgacgcaggtggtgatgggtggaacgctactcgctcacgtagcgaaagagctgacgagcctgctgcacgatatggtgtggctgctggctgagtttgtgaaggagccgcgcatcactacacattaa

SEQ ID NO: 164582 - DNA, 612 bp, Enterobacter cloacae
atgacaactattaaagacgctttccagttcggcattgagccagcccgtatcaccaacactgacaacattcaggtctctgagcaggccgctaccgagccgcaagtctacgcgcttcagttagctaagaccgtcaaggctatgctgaatgcagcacttcaggacgctgagtcaaacatccccttcccggtggaactgctgccgacccgtaacagcttaccgaccccgattattgctcatacgctggctgaccgttctgtggtcgttccgattggtggtggtaaggctcctgctgtagtcaatgctgcggctgggactgaggtaactgtcgaacctattgagcaggcaatccttgtcagctatcaaaccaagctctgggacgctaagaccctttcaggcttcaccactggcacacttcagcaagacgccctgaacatctgcgagtctgtcgttcggtccattaactccaagatggttgacgtgctgatgacctcccgtctggtgaagacacaccatgaagtccctgtgactactggtaagatggtcgattacgcagaatccctgctggatggactgaatcgccacgcgtttaacagacacctcagagtcatttaa

SEQ ID NO: 164583 - DNA, 1569 bp, Enterobacter cloacae
atgactaattaccatgcatgggaagccagcgactgtgaacactttactaatgtaaacatttcggaaaaaacaattgtttgtaaacgaaagcctgttccaggcattaccatcacgatcgggatgttctttgatggtacagggaacaatgttttcaatacagatgaacgtttgttaaaaagttgcactcaccttgatgttggcctcaaaaaagaagatcttgaactttgtaccaaaaaactgggaatgagtactgatggttccaacagctatatggggtactattcaaacattcattggctgaacactctttattccattgatgatgaaatcgttgaagataaatatcaatttcagcgggcagtttatgttcagggtattggcactcaaaaagggaaagaagacagcctggttgcgatggggacagggactttatcagaaggtgtagttgataaaaccgatgaaggtgtttctcaaattacaaatgaaattcgaacgctgctgggtgaaggaaatggcataacaaacgcaatagagaaaatccagttcgatatattcggtttcagtcggggggcagcagcagcccgtcattttgcaaatcgcatcagaaataatgataaagcgatacagcaggcaatcactaaggggcttgatggccgaaatcagcatggtaagcctgctggtgaagtgaggtttattggtttgtttgacaccgtttgtgccgttgggcttgacccgcatgatgccataaacccgggagtggatctggatttaccccccgatattgcacagaaggttttccagattgcagcaatgcacgagtgtcgatataactttagcctgaatagtataaaagaatcctggccagagttgaccctcccaggagtgcattccgatattggtggtggttataatcccaaagagcaggaatattattttttaactaagccgaaaaatgaaacagtcagggacagtgttccttcagaaattacggacgtttatcgacaaactgcagctgaaacacctgatttgaggacatttcctaacctaagcccagtaatggcgagtggagaagtaaaaactgaaacttggtatgactatctggttaaccatgagaagcggcgccaggagatcacagaaaagcgtgtcggcgcggctgtaacgcttaaacgagtcgttcccaatgactggagtaaggtcagcttaagggtaatgcttgattctgctcttgaggcgggggttgacatgaaagaaattgaaccgacaaatgaaaaactccgtttgcctccagagctcgaagaattgagtcaaaaggcaatagatcaaggaaaagctgtcagaagtggcagtgttccagcatcttatacttcatcggaaattcaagttattggaaaatacatacactgctcagcaaactggaatcccgttgagtttaaaacggtatggcttgatggcaagcatgttgaaaaaatatatggagcagtaaaagcgacagaagtgtttggctttattaatcgaccaaacttcggttggacccgtgctgtatggaatatgaaaggagaaaaagcatga

SEQ ID NO: 164584 - DNA, 648 bp, Enterobacter cloacae
atgagattaattacgatactcttatcattttcttttttggtgagctgcaatatcagttcggctaatgaccagcaagggaagattaaagccccttttgatgagtggtactttaccttttcgacacctaaagcactacctgctcaggtgacacttgtaaagcttattgatgtcaacgggtatggaaaggtttttagaacaatagaccagccacaagggcaaagtgtggggacatggagccagcatgccggaaagggaacttcgccttttaataaagcatcctcccccccgcaagttatacaattttgctgggattcaattattgacaaaatggtttatgaaaccacattagtgttctcatctgaaactaagaataaaatgcttactacggaacccagtaactacagtcctcaggaaacttattattttcaatatatggtgattggtctggcacctgaaggaaaagtcagggtttggttaaaaaacaatggtagacctaatcttgaacaaacaggtacagaaatcacaactgtttccggtaatgagctgagtatgtgcaaaggcgttacggaaagtgatttttcctatggatatagcaatgcaactaaagagtttataaaaggcaaagaatatccctatgggaagtggtaa

SEQ ID NO: 164585 - DNA, 567 bp, Enterobacter cloacae
atgaaactagcttcctacttgttgttgttttttatctccctcccatgtttttctgaaactgtcaatttagacccaacatcatcgactaaagcagacgatgcaaactcaatggccaatatgtatcgtctgggcatgggtgttccgaaggatatgaaaaaagcatttgaactctatcagatcgctgctgaactcggaaacacggatgctcaggtcgatttaggtgatatgtattattctggcgaagaaacttctcagagttacgaaaaggccaattattggtatgagaaggctgcgaagaacaacagtgctaaagctcagatgtatttaggttacgcataccttagtggtaagggcgtcgctgtagattatgataaagccaaaatttttcttgagcttgcagttaaacaaggcgatccttcagccatgaatcatttgggcacgatgtattttgatggtaaaggagtaaccaaaaataaaaataaggctatcacgctattccaaaaaagctgctcggaaggtgattcgaatgcgtgtgataagttaaaagaaattaaagccgagaaataa

SEQ ID NO: 164586 - DNA, 1155 bp, Enterobacter cloacae
atgagctgggagcgtcagaaatcaacaatatcgactaggcctgaagaaccttcattcctcctgtggatgatgttggggattttcgcgcttgtcggttgtgtactgctgtttgtcctgcatgccaataaactggcaggcccatttcaaacatttaatctttgggttgtcactgcgtgccctgcagttgtctggtttttctttctgtgtctgcgtggctggctctataacaatgcatttgacagacacgaatttgaaaccaatgaggcagagtatgcgcaacaacagtggatggagtggtctggacgcaatatcgcagtattacatagtggtgtaatgctgcctgcaaatctgacacctcaaaattttattgcagccccgtctacgcttgagcagagcacatctctgacccaacgaatttgtctgcaagatcatgagacacatttttcagttctgttggccgggttaagtcatgtactggcaaatttgcctttagatttagtaccagctgtcacgctactgacagattctcacgatgacatactggtattgcaggatgcatttgctcaggcctggcagacagccattctggatcgccctgttccacagttgacgatacttacgtcaaagaccttcctctcactggatgcgcgaattaaatcaccgacgctggatgtggatttgatcctgattcaccagacacaggggcgggatacgtacagtgatgtgctggcagccctgttgctgacctccgatgatgtcgccacaaaatataatctctcctttcacgcccgtattttgcgtccaatggcacttgacatggcgatttcagaaaagtcactggatacatttttctcgacccagactcaggcttgtgccaccgccagtattgtcggcgacagcgtggagtggggtgatgcattttctgatttacttgcagcggcacaagattatgacggttactggaaacctgaacaactccactggctggaaaaatatgccgggctcagcggccccttttctccatggataatggccgcagtcgccagcgatatcgtgaacatacaaaaagcagactgtctgatgctttctacagatggtgagcagaaatttattaatacagtgcaaacagggaaccgaaacgatgaccacggatga

SEQ ID NO: 164587 - DNA, 147 bp, Enterobacter cloacae
atgctgctcaacttgcacaatcagcacataagcattttcctgaaggctgcactcaggttatggatgctgcgggtcgttgtgacagcaagcctgccaaagcaagcggcgatgttaaacagttttcaggtgaagcggatcgcgttatga

SEQ ID NO: 164588 - DNA, 597 bp, Enterobacter cloacae
atgacgcaggcaaaattaaacagcgaactgattgccacggtggcaggtgatattaccgtctataactacgatggtgaaacgcgcgaatacctttcctcatctgttgaatatctggcggtgggtgtaggtcttccagcaaactcctgtactgaggtaccgggcgaagctaaagctggttcggctatttgcaggactgaagattttaccgcctgggaatacgtcgccgatcatcggggtgaaacggtatacagcactcaaacaggtgaggcggtgattatttctgcgcctggcgattaccccgagggcactaccatcctggcacctgcgacgccttatgatacgtggaacggtagcgagtgggtgacggatacggaagcgcagcaagctgcgaacgtggaagcggcggagcaaaagaaatctgcgctactccttgaggcgcaggcagcgatcagtctctggcagacggagctacagttaggcattatcagcgatgaagataaagccagcctgatcgcctggatgaactacatcaaagccgtgcaggcggtggacacctcgaaagcgccggaaatcacctggccggataaaccggaataa

SEQ ID NO: 164589 - DNA, 993 bp, Enterobacter cloacae
gtggcgactaaatattttgccctgttaaccaatatcggggcagcaaaactggcaaatgccacggcattgggtgtgaaggttgagatcacccagatggccgtaggtgatggcaatggtgcgctaccgacacctaacccgacacaaaccgcgctgacgcatgagctgcgccgcgcgcaacttaacatgctgactatcgacccggtaaataccaatcagatcattgcggaacaggtcataccggaagacgtgggcggatggtggatccgtgaaatcggcctgtttgataaagacggcgatatgattgcggttgctaactgtgcagaaacatacaaaccgcagttgcaggaaggtagcggtcgcgtgcaggtcattcgcgtgatcctgattgtcagcagtaccgaagcggtaacgctgaaaatcgatccgtccgttgtgctggcaacccgtaaatatgttgatgatgctgttattgaagttgaggcatatgtagatcagaagctggccgagcatcttgctgccattgacccacatcagcaatatctgcttgaggcggatattgataaatatatcccagctggtttccctctcccatggcctgcggcgaccccgccaaccgggtggctgaagtgcaacggcgcggcattcgacaaagtaaaatatccgaaactggcggtgatctacccttctggtaatttgccggatcttcgtggtgagtttctgcgtggttgggatgatgggcgcggagtaaaccctacacaggcgctccttgcgtgggcagcagatcagtttaaaacacacaatcatcctttccgtggctcaggtggttctggagcaaatgacacggtttttggcgtgaccagcggagttaaagctatctatacagcaggaataaatcagccggatggctctgtcgcactcgcgtttcaggatcctggcggttctgaaacgcgaccgcgaagtgtggcatttaactacatcgtgagggctgcataa

SEQ ID NO: 164590 - DNA, 2205 bp, Enterobacter cloacae
atgatggaaaggaacttacttttaggtaatggtcatgttctgacaaaaaaggaacctttgcctaaaggaagggatggtaaacgctatccctatactcttgaagaagttagggagcatttaaaccccgagattgatacgttactctcacactttcgcagtttggatgatgcggctaagccaagaggtgagagtgttttcaatttaacattacacccagcctttttaggtaaaagctactttcctgaagggttgcttagagcgacaggtttacgggatgtcggtagccgtcaggtaatcattcgcccacggaaagcggcacgtcagtgcgatcagaataaggacttagtaacggcgcaattgtttgtcagcggtgatgatgatgccgttataagatttaaggaaattttaaattctcctacagctccgaagggcgtacaaaaggatttgatcgaaattgaaagtgttagcttttttgaaggaaaagagagagcacgcaattttgagcatgcgaagtgtgatttgataaaatttgaagtagttcttcatgctggggctgaagacgatgatattgttaaagcctatattaactatgctgcacaatatggcatctctgttgattacaaaagtaaaattcaagtcggtgggctgactttcatcgttgcacacgcgcgacctgaagatatgaaaaaatctctcgatttttcattaatccgtgttgtgcggccgatgccgtctctaaggtgtacccagccaaacattgtcagaaagttatcaaatatagccacgccggatttccctgactctaaagccattcttgaatctgaacgtattgcaatttttgacggtggtttggggacagctgacttgagtaattgggttacggaatatgtgtatccagacacaaaagagactagtggattattattgcagcacggtaatgaagtaacttctactttcttattcggacgtgtcgaggaaaatgcaccttcttttgaaagaccgtttatgaatgtagatcattatagagttctttctccaacatcaggtgacaatggcgattgggatttgtttgatgtccttaaaaaaatacagtccgttcttgatagtggtgactataagttcgctaatctaagtatcggtcctcatcttccaattggcgatgatgaggttcatgcatggactgctgttttagaccaaatttgtgcgaagcatgggatattgcttactgttgctgttgggaatgatggtcatgaggatggtgatgcagcgagaatccaacccccttccgacatggtaaacgcgctagcgattggtgctgctgaccgtagtggtgaaaaatgggggcgggcaccatatagctgtattggccctggcagaagccccggattcgttaaacctgatggtattatttttggtggaagcgacgacgagcctttttacacttacaatccgctgcttggttctatagtaggagttcaaggaactagttacgcatccccattagcattgagaacagccgctggagttgcggccctatcaggaacgccattgaacaccatcgcattgaaagcgttgctcgttcatcatgctgaaacatcaagaaaatattcgcgtgaacatataggttgggggcggtttagtgaggatcctaacgttttaatcgattgtgcaaatgatactgcaacagtaatttactatggttcattagcaaaaaataaatatttaagggcaccgatcccattccccgatgtcccctttgaggaagcattcgaacttaccgctactttgtgcattcaaaccccagtcgatcctgaacattcagtaaactatacaagggcgggtatgcaggtaactttccgtccaagattcggcttggacgatgccgatactgatgatttctttggtcaaaaaagccaatataagacagaaagggagtgtaggagtgaaggacataagtgggaaacttgtctacacagaagcaaaaaattcagtgctgaaacattattaagtgatccagtttttgatatacggtatcacgcccgagattcctcgcgtcatgttaagggtgtttcagcccctgatatgcagtatgcgatggtaatcagtgtaagagtgaaagactttgatttatataatgttattcgccagcgatatacaattctaaatcctattcaactacgcacacaaatttctctcgatacgtaa

SEQ ID NO: 164591 - DNA, 1083 bp, Enterobacter cloacae
atggtaaacgtgcgggaggatgaacttttcaaactcatcgagcaaggcatcaaaggcaacgcaaatgcatttacactcctatgcagaaagatgattaacaacatccgtaaaaatgatgagaccttagcttccaatctggcttcgttagttgctgaaggaacagtattgcgtggggcatctagtaatgctcctctgcctgtggatggagactccagacgaagtcttttgcaggaaacatctgtcaacgcaattgttgaagaacctgtatggaatacagatatatcaaagaagctggagtcaattgttaacgaaagagagaatgcagtttctttgtttaaagctggtcttgaacctgtaaagacggttttactttctggcccaccaggcgtaggcaaaacaatgtctgcacattggcttgctgcaaagttaaacttacctcttttgacattggatctctcatctgtaatgagttctcttttgggaaaaacaggtaataatattaaatccgttatggattatgctaaagagaaaccatgtgtccttttgcttgatgaatttgatgctgttgcaaaaagacgtgatgatgacagggacgttggagaattaaagcgtttagttactgtacttctacagaccatagatgaatggccagcgacctcgcttcttgttgccgcgactaatcaccctgatatcttagatccggctgtttggcgtcgatttgagcacatccttaaatttaatatgccatcagtagaactgatagatagatatttagttaatcatgatattgagcccgaattatctaaaaaacttgcgccattactagatggcatgtcctttgctattattaaccgcattttgaattcttcaaaaaagaatgaagtacttagaaatattccatttgaaagttcattaatagaaatggtagttactgaaagggtttcactggatgattttagcgataatgacctaaatataatcaaatatcactttgatggtttttcaaacaggaaaatagctgaattaattggtgtttcacatccaacgatcgcgaataaattacaaaagtggggggttaaatga

SEQ ID NO: 164592 - DNA, 267 bp, Enterobacter cloacae
atgacgactaacattcattgggctggtaaggccgttaaggacttactctcgttaccgtcaaaagatcaaaaagctgttcgcgagaaagtcaacgcgatgcagtcatatccagacctaaaggggcttgatgttaaaaagcttacagatggcgatggtcagtatcgactgagggttggaaactacagagtgttgtttgcttttagtggcaacacccctgtagagatcgagattctgcgtgtattgcgcagaacgtccacgacatattga

SEQ ID NO: 164593 - DNA, 375 bp, Enterobacter cloacae
atggctaacattcaattcatcacagacagtagaggtcaaagaatttctgctgttgtgccgattgaactgttcgaaaaattgacccgtgatagtgatatcgcagagttatacgagcctgttcaaaacgaaaccggcacatctgataacgttcgatatccaaacgaagttatcaacattctttctgagaagggttgcaccatgcaggctgcatggcgtgtttacagaggcttgacacaaaaacaagtcgctgaagcattgggaattaagcaatctacagtgtccgagttcgaaaagtctgagcgtcctcgcaaagacaaccttgagcggctagctacactgtacaaatgcagtcccgagcaactaacgctcgagtag

SEQ ID NO: 164594 - DNA, 963 bp, Enterobacter cloacae
atggttaactcccctcttatctgggcgggcggcaagtctcgcgctatgtcgcatgtgcttgatgctttgccccacggtgattgcctggttgagcctttcgtgggaagtggtagcgtcttccttaacactgattataaaacctatgttctctgcgatagcaatgcagcgttgattaatttcttttcaatggttaagcgtaacaccgaggcgcttttaactgcttccgcaaagatattcgaaaagggtaataatgagattgcatattatgaatatcgcgacgaatttaatgtaatcaatcgtgagtttaaatatgaccgccgcaaatataatgatgaagcgttggttagatatgcggcgctgttcctttatttaaaccgccattgctataacggtgtatatcgcgttaatttgaaaaatgaattcaacgttccttttggttttcgtaagaaaccaattttccctgtggctgagattcagcattttgctaaaagagcgtgggaaaagggcgctatgttcctgcatggtgatttcagagaaacaatcccgctggcgattggtcattcgggctgcgtggtttattgcgatccgccatacctgccagccagcgaaactgcgaattttacggcttacggcaagccatttaccgatgaagatcaccgcgccctggttgcgttgctttcacgcctctacaacaacgcacaaataccctctgtcatatctggcagtgatacacctgagacgcatcaaatttattacccgttcaccctaaaagctttcgacgttcggcgctcagtgggggccaaaactcgcaatcttgctggcgaggtaataggcacgctgcgtgtatgtgattgctgtgggcgcgtgggcggtggctgtcctgattgtggggcggtgatgggcgatgcgacttattcagaaatggttgcttctggtgcttttgacgatcaggaggtgttctga

SEQ ID NO: 164595 - DNA, 174 bp, Enterobacter cloacae
atgtggcaattatcctatgaccttaacttcccagtccgtggctgggtttattcaaaacctttagaaatgcgccgggataatggaagcgttgagaatgtgcgcttatgccatttcttcccagtaaagccaactaagaaacaactccgccaggctcgcaaaaacaaaatccattaa

SEQ ID NO: 164596 - DNA, 381 bp, Enterobacter cloacae
gtgggtttcttcatttgcccgatccctgataggattaatcccatcttttctaatggggatagggacgtgagaaagttaattctggttggcttcgctgcttttactctcgctggctgcgcccaagagcgcccgctgacatcttatgatgatgtaggtctgtgtacgcttaaagggcaggctattgggtatggaaatactgaaatcatgccgaaaattcaggcagagtttgcacgaagaggaagtttatcgattagccaggctgactgtgatctctacacgcagactggccagcaagatgcgaaggtgaggatgaaaaccaccgacagcatcattcagcagtcaaaccagactcaaacgataaatgccattaaaggctattaa

SEQ ID NO: 164597 - DNA, 3492 bp, Enterobacter cloacae
atgaccacgaacgttggcgaaatttactacgaagtaagcgctgacgtagcgccactgctgcaagggcagcgccaggctgataaagctctagacagcatggagcagagcttcaacaaaacgaacaaggcggctgatgcgcttgataccggactatcgaggctgtcatctgcaatcaaaggtgtgattgcggcctctgcgctgcgtgaaatggctggcctggtgcagaagtatcaggaaatggccgagcgcgtgcaaatggctacttccagccaggctgagttcgaaatggtgcagcagcgtctgctgacaacagcaaacggtacatatcgttctttgcaggaggcacaggagctttacatccgcacggctgacagtctgcgcagcatgaagtacacaaccaaccaggctattgatgtgcaggactcaatgtcctatgcgttcgtgaaaaacgccacctctgctgatcgcgcaaacaacgcaattgatgccttctcaaaatcaatcaacaccggcaaggtggcggcggaccagtgggagacaatcaccaccgctattccgtcggtgattaatgacatagccacggccagtaacaaatcggcagctgaaatccgagcgatgggcgccgcggggaaactgacggctcagcagcttaccgaaggactccggcaatctcttgaagcaaacacagcagcagcggctgggatgtctaacaaccttgtcgatgccagtgtgcgaattaagactgcgataacatccatcctcgttgccttcgagaatgagactggagttatccaggaatttaccaacgggctgatcgcttctgctgattcaatgcttaagttcagccagaactctgaaaagatgactggcttcattgatgcagcgacaactgcggcgactgtcttttctggtgtcattgctgcgagatatgttggagcaatgacacagggtgtagcggcaaaagttaagagcattgcagcttccaggcagcaggttattgctgactcccaatcttcacaggctgcattgatttcagctaactctacattgcgcaaatccgtggcagataaggaagccacaatgtccgcgcttgctttggcgcaagctgaatataacgtagcgagagggagcgctgctgagatgacagcgatggatgcgcttgtggccgcaaaaacacgggctactgccgcagccattgaacacaagattgctgaagatgcgcaggccgcagcatctacacgagctgctgctgcggtgcgcgccgcttccgcgagtatcggactagccaggggtgcactttctctcatcggtgggccgatgggtgcggcaatgctggccggggctgcgattttctacttttggcagaaatcacagcaagcaaaagaggaagcgatcgccttcgctgacggcctggacaagctcaatagctcaatgaaatcaatgagcgtaacctctctcaggggttctatcgcagatgccaataccgcgatagaggggcaaaaaagcgcgatcgctgacctgactggtgagattgactccctaatcgctaagcgcgatgaatatgtgtcaaaaggcaagcagtttggcactacagcagagcaaggtaacggactactcaagatcgcagccaggctaaccgacgaaatcaatcagaaacagcgcgaccgctccgacattgaaggcaagctgaacgacacgatcagaaccagagacagcgcgcagaccatcctcaataacaacatgctcgaatcgatgggtatccacgatagcctcatcgaaaagggaacggtgcttgagcaggttcaggacgctgtagcgaaagcatttggcaataccgccaatgcaatcaacagggccaatcaggcggggcagaacttcaatccaaaggcactggaaatctcaccgccaactcaggccggtgacaaaataatcctgaacctggaggagcaaaacgagcttcttaaaattcaggatgagcgcctgcgtgccgttaccaaagctggcatggaggccgcaaaggcaacggagaacccgaaccagatcgcagctgctaaaagactagctggagaaaactacgacctccagaaagctgaagaggctaggaataaggctgcttcggaagctgagtcccaagggaaaaagtcggcaagtcaggctgagtcaattactcagaagttatccagcttaaagcaacagtccgagctagcagcagactctacgaaggagttgagccgggaacaggcgatcctgacggctcagcagtctttgggtaagggggctacagaaggccagatccgtcttgcggggcagtatgcggcaaaaaaatgggatacagccaacgccatcaaagctgaagctgcagcccagaagcttctccctgaagcggctgagaacgctagttacaagcaggatgttgaggatctgaatacggcgctggctgcgaagaaaatcagccaggagcagtataaccagacctcagaaagactggcggcaacgcaccaggctaacctcgcgaaaatccaggctcaacaggctgtgacgccacagcaggaggctgtcggcggggttgaccctgttcagcagctggctaatgagaacgccaagaaactcgcgcttattcagtcatacgagcagcaggggttgattactcaccagaacgccatggcattgcgtgctgcaactgacacgcagtatgagcaggcgcgtatcgctgcccagtgggagattttccgtaaccagagtatgggcaatgagttgcttgccgcgagctttgattctctcgcaggcaatgcatccaatgcctttaccgggatccttaccggaagcatgtcggcgcaggaggctatgcaatctctcgccagcaacgccctgaatagcctgattaacggcttcgttcagatgggcgtcgactgggtgaaatctgccgtcatgggcgctgcggcgcaaacatctgcgattgccacaaccactgcggcgcaaactgctggtttagcgacaacaactacagcaagcacctcggcggccacgacaactatggcagtctggacgccagctgcagctgtcgcatcaatcggttctttcggtggtgcggcggcgatcggtattgcagccctgattgctgctatggcgatggctggcggcattgccggaaagcgcaagaacggcggaccggtatcggctggctctatgtaccaggtgggtgagggcggtatgcctgaaatctaccgggccagcaatggcagtcagtacatgatccccggcgacaacggaaaggtcatcagcaacaagcagatgaatgccggagtcggaggcgggtctgttcctgtcactatcaacattcagaactataccggcgcgactgttgatgcccaggccacgcaggacggcaatggggtgaccatcgatatgattgtggctgatatcaataacggcggtcgagtgagtcaggccatccagcaaaaccatcaggcaccacgcaaagcaaggggataa

SEQ ID NO: 164598 - DNA, 1908 bp, Enterobacter cloacae
atggctacgcaaccgacgcaagatgcagtacccagcgaatcacctcgcgacctgaaatttaacgctggtaaaattgacgaattcgctacgtcattagctcagcaatatatcgaccgtttcggtcgtgctcactacaccattgaagggcttaagcagctggtgttgaaccttggttggaaccctgtaggttctttccaggatggggcaactgttaatgctgcgggtgatataatccaggacgagtcaacaggtgtgtggtatcgatgggatgatattgcgtccctgccaaaaaccgtaccatcaggatcaaccccagactccaccggtggaactggcgagggcaagtggcaggcggttgacgtcagcgatgttcttcgtaagcagatttctgatcctgatggggcgacgaaatacccggagctccagatcgcacgctggagagatgagggagatatacgtggttgggggtgtaagtgtgatggcataacaaatgacactgttgatttccagagcgctattaacgataacaaaataacgggtaagccgtgcattgttccagaaggaactactctcacaggcccattgacgctgtactctaagacaacaattagagggaagggacaagagagaacaaagctaaagcttcttactggctcaataaatgccttgctctatggtgctaactcagatgcgctatggggaaccaactccctctcgggagaggatggaatcattgttgaaaaccttaccattgatgcagataaagtaaatagcccaaatggttctgccatagcaatatatgggccaaggaccagaattgataaggttaatatcattaacgcaggaaagaatgggctgagaactgagtgggctgattcaggtaatgctgatggtggcatggaaggctcattcagtaaaattgttatcgataaaagtggggaggatggctggagatttgcagggccgcacgatagtgtggttaatgatgttattatcatcagctcagggcaggagactgcgagtacttactcaggtctctggatagagaaaggaaatgcacgatggtcaggaatacactgctggaccagtgcgagcgacttacgatctaaatatgcgctaaaagtaagcaggccagccgaagggaatgaatttaacacctcacatttcgaaggtgctgatacaaacgtattcgtagaggcaaacaactttactttgagtgagtcttgcaaggtttattatccgtgggctggctctaatatagttttgttgggttcaaatccacgaatctcatgttacatcggtgaagagtacaagggtattgggcttccattgtccacaggaattacatttggtggagggtttggtggagtctcaggggcggtaatagatgttatcgcaaatggacaagatcagaatgcagtttattttggcgatagcgcaggttataacagcgtcagggttagaggatactcagtcgctaccaccccaaccgcatttggtggaactcctcatagtactgatgatattgacatcaccatttcaggtggttattcacaggttgttcgcaaagtagttaaggcaagcaatttacctgtagcatcaatcactggaactggaggaggtcaatctggcgctgcaggatatggtgtaacagcagggtgtgttgctgttaatgctagtggccctggaactggagcgaaactaccatcgactactgatgttggcacaggttatagtgtacagatagcaaatgtttccgctaattctataaacatttaccctacgttaggtcaacaaatattaggtttaggggtaaacaccccttaccctttaccagctctatcttcagcagtatttactgtttcagattcatctggcgggaagtggattatgattaaaggagcataa

SEQ ID NO: 164599 - DNA, 1563 bp, Enterobacter cloacae
atgagttcgcgtattggattaatatcaatctttattgtgtttttattggtgttaataattcaattgttaacaccatttcactctgatgatttcggtttttatctgaaagggtactcattcgagaccctgcatcatgtttacatgacgtggagcggaaggctgttctccgattttactggaagccttgtaatgtccatcaaggacaaaacaataatttcatttataaatgcatgtgcttttacatcgttaattgtcgttttaacaaagctaccgcttgaaaacaaaaacaactggcctgtttttattctgttgttcatgctttattggatcgacaatccaagtttgagccagacaagcttctgggtagtaggctctgctaactatctatggactaatctcttagcctattcatggttatatctttacttcaggtatggttcaacttcagatgtaaaaatgaaagctttgttattgctaatggctttcataacaggtatgacaacagagaacctaagcacttcaatattcggtgttttgttcctctataatgccttaaatttctatagagaacgaaaaataaactggttatccgtttctcaaatgctgttgctgcttgcaggtgttggggtattgctacttgctccaggtaactttgtgcggtcatcatcttgttgttttgatttttattcccagcctctgattacaaggataacaaatcatttccccggtaagttcatatcagaaatgatggagtataagcatgttattgttctaactgtcatttcaattggttatggactgtataaaaagaaagatatgacgttaccattactttttgtaattggtgcaatagcttcaaacgccatgctgttcgcttcaccaacaaatacaggtagagtgttaaacacgggattggtaatgatgttggcatctctttcctttgctttaaattcaatatctgaattcaagacaagtagatttctaatttatgttgcatctattttatctttggttctttttgctcagtcgtatgctaacaattaccaaagcataaagagtgtgtttgctcaggatcagatcagaacgcagatgataaaagacgggtatgatgccattccatacttttatcaaggaagcatagagaaagaatcagataagcttgacatattttttaattcaagcgctatttctaaattttatggagcaacaaaggatgttggcctaatcgatcttccttttgattattctttgatgacgcaacaaaagacaaatattaatgatagctatttccttaacttcaggaagcttgatgacgtattcctttttgaagtatccaaccctgatgttaaatttgaaaactatattttgtttttcagattaacaatggatgatggtagcgttgagaatcatgatttcatacctgttctacgtaattataaaggacatttgtatttgaactcatggaaagttgatacaaaaggtaaagaaataaagtcattcgagattggattctatgatccggcacttaagaaaaatgtaaggtctgtcagcgtccctatgtaa

SEQ ID NO: 164600 - DNA, 2043 bp, Enterobacter cloacae
gtgggaaatgttcaattacctaaagatgctttacagagggtacagcttggccagtcctttgccgagtatgacattattaggaaatcaacggagctttttgtatcaactcccgcgacactagctgcattaaacgtagataatactagttgtttttttattggaagacgtggtgcaggtaaaacggcaattacaattgaagttgagaggcggatatctaaatctattaccatagttcctcaaatttttgatttgctaagactgcctttacaacatgaagagttccttgatactcgccaacggccgttcaaatcattgatgcattcaatggaaagagcattaattgatgaagtaataaaagcatggaatgaaaaattaggattcgatttctctaaggcccctgagtctatacgaaaagaaagaagtcttattgaggattgtgactttgaccagcgagtactaaatttagttgaggaaatttttgaggcctacactaaagaaaatgaaaaactatggttgcgacaaataaataggagtaaaaaattaatccaagaagttaatagtttagaacttaatgctaatcataattttattcttttgattgatagacttgatgaatcatgggatggttcggactcagctataatatgtctaatggctttgatgcatgccacagttaggttaatagcatctacgccttatgttaagccatatgtgttcattagagagaatatttacgatcgcattcgtgcacgtgataacgaattttcaagattagaaacatcagttgtttttcttgagtggacaactgaaaagcttacagaacttgttgagagaagacttgtgagacctttcacagccaaacctaaattaggaggggaagcgtggggacatttttttgatggtgataaagacaaaagtatagagcgggttatgcagatctgtcagcatcgtcctagagatgtattaatgcttacaagttattcaattgattcagcaataagccgtaataataaaacaatcactgaagatgatttggtctatgctgcgaaaagatatagtaccagccgacttaaggatttaggcgatgaatatgctgagaattatccaaatattagtttggtaatagagtatttctttggtcttggcaatgagtttacattggtcgccatagaggattttattcagaaacttttagttaatgatgctatttctaaatattgtaaatcatggttctacgacttttcgaccccatttaggttcatagaattactttatggtattggttttttaggtattaggcgtaaaaatacaattgaatataaagattcgggtaaagactctaattcaaaaccttcctttgaacactcatctaccttttacatccatccaacttatcatcaggctttaaatttaagggctgttttgttaaatgatttgaaagaacaaacaacattaagaaacgaaggtgtattagaagatttaccagatagttttaaacttgatgagtataaaatggccttagaagatacattggataagctgaaggccttgccaacaggaaaggagtcggccaaagattttgaagatattgtaggcaatgttattcgtttgtgtttcttcagaacattgaccaatgttcaacctcaggctcgttctcacgataacacctccgttagagactgggtagcttcaaatagagcatcggatggcttttgggaagtaattagggccaaatatggagcaactcagattgtctgggagtgtaaaaattacactgatttgagcgcggatgattttcatcagctgggatattacttgaatgatacattcggacattttggtattattgtttacagaggtgatgagctaaaatcacaatatttcagacatatttctaatattgccaatagaaataaaagtggtttgattctaatcttaaatactaaagatttagaagtgtttttaagacaggcgataaaaggaacgtttaaagagtctcacttgcaagacaaatatgattatatggtaaggcaaatatcttaa

SEQ ID NO: 164601 - DNA, 258 bp, Enterobacter cloacae
atgtcgcgactggcacaggatatgaaaaaactggcgcaccgcgcagatggcagccacaaaaccgtccacgaccgcgaacagatggcgcagcgttttgcccatcatctgctggcgcagaatattcaggtaaccagcaccagccagctcaaagccagacacatcgcaggatatattcatgaacgactggcgcagggtatttccctgcataccttacagaatgagaacaacaggaaaaaggcgctgaacgtctgcccgtga

SEQ ID NO: 164602 - DNA, 393 bp, Enterobacter cloacae
atgattgcgtatcagtattctttacttattgctattgatgagctcccaggttcgcgtcgtcagaagtatgcagctgatgcaattcggcgtatcaatatggacctcagtagcacaggtttccgggccaataaaggttttaaagatgatgttatgcgcttgcctggtggttttagctggcggttcgataacaaagaacagcgagatacggccatagattgcttgaaggcacatcctgctgcttgttcattgatctttatgaaaacgagaaagcggaaatctgcttctggtaagcgtaagcagtgttttgcgggtaagcctcgcttatccaaggcactgaaaatccaatggcaggccctgctttctcagtcttcggtcaacgagattatccactag

SEQ ID NO: 164603 - DNA, 306 bp, Enterobacter cloacae
atgagaacaccttctgacgtcgctgaactcattcgcattgcgatggaaaaacttaacgatgaaaaaccgatcactcgctttcagatgtcgttgaagggatttggggcgctcgctcaacgtgacttcgttgaccagtattatttggcttcgcttatatctgaattaaaagaccgtggctggtgtatgtttcagatcacccacactagctatagcttgatccggcatgagtcagcctcaaaattccgcaagctaagcagcgaaactttgttggcctccatttatgggaaagaaggagaggaatcataa

SEQ ID NO: 164604 - DNA, 369 bp, Enterobacter cloacae
atgaaaatatcaatagctatgtcagacacagccattgcaaaagaactgttcgaacgcctggaggcttaccgaaaatctcggggtatttctcaggaaaccctggttgaaaatctcggcattagtcggccaacctacgcacggttgaagaatggagcctgcagtctggcaacatttattgcagttctgcgcgaaatgcggctgcttgaagggcttgatttgcttgtaccaactctggaagtgcgcccatctgatgtgttcagggcgcagaaaaaacagagcaggagagtttccggcatctcggcttcaaaagaaaatcccgttttgaacagagtaggcgcaatgctggccctcaggaataaggtaaaataa

SEQ ID NO: 164605 - DNA, 1308 bp, Enterobacter cloacae
atgatcgctaattcatgtgaagtgctgttcgatgggattactgccggatatctggcgtatacaggagacagcaaaattgccacctttgagtacacggaagactggaggactgctggtttcagcctatcgccacggtatctgcctcttgagaagggaatatttaccttccctgcactgccatgggaaacatatcgcggtttgccagcagtttttgcggactcgctcccggatgattttggtaacactctgattgatgcctggctggcacgagaaggtcgtgacaagtcccaatttcttgcaatagaccgtttgctatataccgggagccgcggtatgggagccctggagtacctgcccaccaataaccctgatacaccctatagcgagcctctgttaattgctgagttggtaagcatggctcaaaaggtcctagatacgcgaaacggccttgaactgaacgatcatgaagaatcttctctttccaagttgttgcagattggtacttcagctggtggtgcaagggctaaggcggtaatcgcagttaatcaggatagaacggaaattcggtccggccaggttaatgcgccaacaggatttgagcattttctccttaagtttgatggcgtcgaagaacacaaaactgaacgtcaaacctttggtgacccgaagggttacggcctgatggaatatgtctatcatctgatggctaagcaagtggggatcaacatgtcgcactgtgaattgctccgcgaagaagggtcccagcgggcacactttatgacgaagcgattcgaccgggaaaacaacaagaaatttcatgtactgagcttatgcggattggctcatgcaaacttcagaaaggctggtgagtacagctatgaagagatgctcggaattgctcgtgagatagggttaacgaaccatgagcaggaacagatttatcgcaggatggtattcaatgtaatcgcaagaaaccatgatgatcacacaaaaaactggtcatttatggtcaatgataattatcgttggacgcttgctccggccttcgatattgcctggagttacagagcagattcggaatgggtggcctcacatcaacttaccctcgcgggtaagcgagacaacttcacaatagatgatttactgagcgtggcaactcacatcaccagcctgcgaccaagtaaggccaagcaaattatcaaagaaacaattaaaacggtttcctgctggcgtgagctggcggaaagtgagggtgttccggcatcacttagagatgaaatttggaaaacccttcgccttcaatggtaa

SEQ ID NO: 164606 - DNA, 315 bp, Enterobacter cloacae
atgccgatgctgcccggaggtaaaggcccggttaatcctgcccgggcctacctgctttccctcaactccgcccatagttggcagaccagggcctcgttccttaggattctcgccgacatgctcggggccgcttccctggagtccaaccgcagtggtagcctgtggcgccattacgtaatggccgtcacggaactcctgcgcgataccggccgtaccactgccaccatctgcggcagcccatggcatttcgcaatctctgtaaaccaggcaagtgcagacgttgttgacaacggaaaagtaacatttgagaggtag

SEQ ID NO: 164607 - DNA, 318 bp, Enterobacter cloacae
atgactaaaaccgatattgacctaatgctacaggaatttcacgagcaactacacattccgcttcttgatgcgactacggaagcctaccgacagggaacccctgagagcctctctgacgctattaaaatgcttcacctgtcagcggtagcactggaagggattataggcattgtggagcgtacagacagcctgaatgaagatcaagacgtactacgcgaagtgtcacaggtggctcagtcccttgtgtcctgtatgcaggatttaaacgggttggcgcaggacatagcggaagaatttggatcatgtaaaagtgaataa

SEQ ID NO: 164608 - DNA, 174 bp, Enterobacter cloacae
atgcgggccttttttatgctttttcaataccctgtcagacctgtttttgtgatctgtttggcaaagccggtgctttttgtttaccctttactgacctgcctgtctccatgggggatggattttgtgttttggtttaacaaaaggaagaataaatggaacaactcgatgttgtag

SEQ ID NO: 164609 - DNA, 1422 bp, Enterobacter cloacae; identical to SEQ ID NO: 138486

SEQ ID NO: 164610 - DNA, 1047 bp, Enterobacter cloacae
atgaacatcagaaatgaccttcacggattaacgatattccgctttgttgctgctttctatgtatttttattccactgtaatctcagatataaggctgatgtctctgactggctgcagtctattatcaacaatggtgctatcgggatgtctttcttctttgttctttctggttttgtcatggcgtgggcatcaagaaatggcattaaggataattactatcgctcccgaattgccagaatattccccgcttatctgatcatgggattaattacagcccctttcctttttgagtacaacacaacgcaaatctcaacatatattttattgtttttaactactgcacagtcatggtttccggatagttttagccaatggaacttcggcggttcctggtccgtttcaaccgaaatgtttttttacttagttttcccactcctgttgccagtgattaaaaaaagaccgattgtcgcattaggcattgcattattgatatcatcaataataataccaacatctatgatactaactaatagcgctgcttttcctcgttattatgtcagccctattcatcgtctgcccgaatttgtcgcaggagtagccattggttgtatcttctctcgcggctttcgcattaccaaacttaacaacactctgtttattctttctatagcttctctatttttcatttccccaaccaacaataatggctggatgcaaaacaactacattacattaccagcaacatgttttattgtttattacctcgcagtcgcggcaattaataaaaacgccctcaccttaccattgatatatttaggaaaaataagttactcattttacctgatgcaattacccataatgatttacataaccaaatatcatgacagccttgcatcattgcctacatggtttatctggacacttttggccttcattaatttagtgatggcttcggcttgctatcatttcgttgaagataataagaccattaaatctttcatcctgaactggcgacgtaagccgaattcatctttagagctaagctaa

SEQ ID NO: 164611 - DNA, 603 bp, Enterobacter cloacae
atggctacagcgacactaaataaaaacggtattgccacaaaagccggtgatatcacggtttataactatgacagttgtacgggagaatatctgtctgagtcagttgaatacctctctgttggggttggtatccctgccgactcatgcacagatgcgcccccagtgaaaaaatgcggttttactgtttgccgtaatgtgggcagtaatctctgggaatatatcgaagaccaccggggggagctagcctatgaaacggcgacaggcaaaccgatagtcatttctgtgccgggagcgtatgacgacagtataacgctcgtagcaccgtcaacaccttatgataactggaacggtagcgagtgggtaacagatgagaagatgcaaaaaaatgctcaggttaaggctgcagagcagaaaaaaaccgcactgctggctgttgctcagagtaccatcagcctgtggcagactgagctacaactcgatctcatcagtgatgaggacaaagttaaactgaaattatggatgcattatattcgcgacttgcaggccataaaaacatctgaggcgcctgatgttctttggcctgaagaacctgagttagcttag

SEQ ID NO: 164612 - DNA, 1143 bp, Enterobacter cloacae
atggacattattgagttaaaatctgagctacaaaaagaagaagatgccaagaaaagagcagcgctgctggcccagttggaagtgttcaaacaggatgcggaagagcaagtccgtacagagcagaaagatgttgattttgagactaaagaattcacggttgagcttttagtaaacaaatatcatagcggtttagaagacgatactaacgagctatttgtacctgactaccaaagggactttgtctggagtgaaaaaagacaatcccgcctgattgagtctttgattttggggttccctatcccttatattttcacagctgatgttctttcagaagaccctgaattagatggaagaattgaaattgtcgatggttctcaacgtgtcagaaccattcacgcgttcatccacaatgagttaacattgcaagatctaaaatccttaagctcccttaatggatttaatttccaagatttaccactctccagacaacgccgttttatgcgtattcctgttcgtgttattgagttaagttcgaaatgcaatgaagaaactcgacgtgaccttttcgaaagaattaactccggtagtgacatactgaaggatatggaggttcgaaaaggttcagaacttggttcaacatctctgtacactcaagtaattaaaccttgctcagcgatcccatcctttaaggatttagcgccattatctgaggcaaaagagaaacgtgatgaacgattagagttcactttacggtttttcgcatatttagaaaactatcaaaactttgatcactccgtacgtgacttccttaatgaatatatgcatgcaaatggcacgatagatactcagaagcaagatgccatgaaagctgagtttgcccaagtgcttgatttcgtcgcccagtacttcccagctggattcagaaaaactgtgaccgcaaaatcaaccccacgagttagatttgaatccttagctgttggtgtagcattagcgttacgtgaagacccttcactagccccacaaaaccttgactggattagttctgataaattcaaagggctaaccacctcagatggtgccaatagccgtgtcaaagttattgagagaattgaatacgttcgtgatagattattagaggcttaa

SEQ ID NO: 164613 - DNA, 681 bp, Enterobacter cloacae
atgaacagtttccgtgaggattttgatattaggtcaggagaaatactggcctatttggacctattaaagttcattgaaaatgctggagcggaactactctcatctgacaactatgataataaatttaccgttactgctgaatcccgtaaaacgttgaaaggtacagtatacatacttttatacaatctaattgaatcaacgatgagagaagcgatatgcttcattcatgagactatctatgacagaaacattcaattcgataatctcaagaaaaatctaaaatctgaaattcttaaaagactcaaaaatgagtctgtaagcattgaaaactttgtcagcggactaacaaaaggcatatcctgtggtatttcttatggcacattcaataagaagaagttattctcaggaaatattgatcgtgaggaaataaaggataaagcactagtttatggattttccacatcatcagattacactcacacaaaacacggtgaaaaactctcgacagtaaaacaacaccgtaatgatcttgcacacggtaatgtatctttctctgaaataggtaagaatgtttcctatcaagatttagaaaatgtttcattagaggtaatcgcctatcttgatgcgattgcgacaaacattgagcattatattaattcagatggatatttagcctcctaa

SEQ ID NO: 164614 - DNA, 1023 bp, Enterobacter cloacae
atgactgttaaggtgatagaccttttttgtggtgctggcggcttgactcatggcttgcaacttgctggccttgatgttgttgctggcattgatcttgagggagagtgtcgattcccatatgaaaagaacaataaatcaaaatttattgagcaagacataaccaaggtcacaaaagaggagcttcttgagctttatggcgatgcttccatcaaagtactggctggctgtgcaccttgccaaccgttctccaaatacactcaaggtaaagacaaagcacaagataaaaaatggcctttgctctatgaatttgaaaggttaattcgcgaggtttcgccagaaattgtaacaatggagaatgttcctgatgttacaaagcataaagtctatgatgacttctatagttcattagtaagtttaggttatcaggtatgggcctctagggttgattgtgttgaatttggtattccgcaaaatcgttcccggcacgtattattggcgtctaagcttggaagtattgagttagtaaaacgtgatgatatcgtttataaaacggttaaagataccattggtacattacctcctttagaatcgggtggagcagatccacatgatgttttacatagagcgagcaaattaagtccaattaataagcaacgtattatgcactctgttcctggcggaacatggaaagactggcctgaagagttagtagccgcatgccatttgaaatcaagtggaaaaggttatgcgagtgtttatggtcgcatgtcttgggacaagccaagccctacaattacaacgctttgttatggttttgggaatggccgatttggacatcctgaacaacaccgagcgatctctctaagagaggccgccttgttacaaacattccctatggattattcttttgttgaagatgaaaaggattttgtaatgaggaatattggtagaatgatagggaacgctgttccagttgaacttggtcgtattattggcttatcaattcaaagtcacttgggttaa

SEQ ID NO: 164615 - DNA, 159 bp, Enterobacter cloacae
atggtttccacgatactggaggtgctattcaactccctgaggataactggtttttcagaatacaagaaataccggagggaatgcggcttgcagttaatgaaaaaggcgaaccaatccttgtggaaattgaatctgatgtctctggcaacgaataaatga

SEQ ID NO: 164616 - DNA, 183 bp, Enterobacter cloacae
gtggagattgattgtgtagggagccgtcatcagacgctaatcgtgctgaattcatttggggattttaagaaatggtctctgcgattttttgatttgggcctgtttgcggagggagaaattaatgctttgttaagcgaaggtaaaccggatttgtattcctgtattccactggtactggattga

SEQ ID NO: 164617 - DNA, 1551 bp, Enterobacter cloacae
atgagtcgaatcaataaacagttaaatgagtcgaacagtaccatttacacatctgtatttgttgaaagtatttcaaaagttaatataccagctggtatttatctcaagtcagcagattatttcgatgataagtatattaattcaacaaatgacagttgggtattcgattattcaggcagtcgatgctatgcccactttcgtcaggataaaatcagcaaccaattaatcaaatatatttgcttccgttatgcatctgccaagtgtccagcccaggttcctggtgtactccatgcctggtctttggcaactgatcattgcataacccaatctgctttctcgtttacggtgttgaaagattaccttgaaactcaggaaattgaacctcgatatttctactacatcattttcggcctaaaaatcctctgtgccgaagcattccccggtttcaccctagacgattacgaagacctcgaatttatccctcgcccgcattcccacgactgggacatctatcaggaaatcgaccatgttctggatccgctcgaaaaaaacatgatcagtaaaggcttgtttgaaatggctacgtcgattcggcatggcaaaaactacagtctggacaccatgagagatgcagcaattctgggactgacttatgtcaccggggcccgcccggcacaactggccaagctggcggcaaaagatttgcgcattgatacccgaaactccgaaaccgggttaatacgctatagcttacttctaccctacgccaaacagcggcgcgtaacgactgaacgtctttttttggcgattccagcggaaattggtgcgttaattaggcactatatcgagcaagcgcaactaaaacctgatggcaagctatttgaatttagtcactctgcaccgttttatgtatccagggcgattaacaaggccattctcagtttcagtccgccagattatcaggctgccgtagcgcgtggcgaagcggctcttccaaccattacgccaaccgacttgcgccacaacgtgggccattcattggctatgcaagggtgcagcgccgaggaaattgcgcatattctggggcatacttcacttactgttgccaagcattacattcttgcgacgcctgcgctggcattgattcgagccaaagcattgggtaccaatccggtatggcaaaacatggtcgctatgatgttgactggagagctggtaccttcaaaagaatggcaaggtcgacgcgtggttggcatggttggtgatcgatttcactacgagattggtggttgtgcaagagccgatgaagaatgccctttctgtgaagtccgttgctgttatggttgtttatattaccgccctttcctcgatggccaccaccaggacgtattagatagcatctctaaagaagtcgatgagctgatagctgtttctgatagcatcggtaatgctcacaatccactgatttctatccacgaaacaacgcagatcgaagtcaagtcagttatagcccgttgtcatttgcatcacgtcagaggttgcgagcaatga

SEQ ID NO: 164618 - DNA, 2364 bp, Enterobacter cloacae
atgataaaaaatatcgagaactttgacacttttattacggaacaaaaagcctggtttgaagataatctcgcagcagattttgctgagtcatgggatagtcgtgtctgggtatgcgggagaaaaggttccggctggttacgtggcaatggtgctagtgtattgcgttttgatgaaattaatcgcctcaaagggatcgacgagcaccatactttatccgagccttatcagctgttcatgaaagccatgctgatactcatctatcaaggccgaaatcgtagcatttcccctgcggttgctgttgcaacgctggttattttgaaacgctggtactgcgccctcttcaagttaaccgggcaaacgcatcccatctatctgactacagatgtcgtacgtagcgcaatggatactctgagtgctgcatcccggccaggtgatcccaacgttgccaactacaaggggcgttgcgttaagattcaaaaattagtaaaccatcacgccttcacattagtgacactgcaatatgtatccgatgatcgttataccaatcagactaatttgacccggaaagcccgggaaacaatcactctaaaacaaaaagataagctggatgatacggccactgatggtgaggatgctctgattacaattagaggattcctcaatatcgtgtcattaatccagcgagtcgaaagcagtactgaaaaaattgctctcaattgccttctgttactgatcgtcactggatttcgttctgttgaagcgttcaatctcaggcaggattcgttggtcaaacggcgaatagataattctggcatcagcaaacgtctgcgggataatggattgccggattattttcttggcatacgctatgttggtgtaaagggagctggcgaacgaactcattgggtcgagcctttagccgtacctctggttgaaaatatattcaagtcggttaagttgctaacaactgactttcgcaaacatctcgcatttttacggtctaaagaattttctgattatttaccaaaggcaatcagtgatattgccggcgaactcgttgaacttgattctattgtagaacacatagcccagtcctcatcagagcttcgggggcgtgcaggattacgagataaagcatcgaaagcgttagaaaaacgtggctgtataccggtaaaagtcattcttagatcaggtaatggaaaagaaaaatattattcaaagtcggaccttagtaattatcttagaaatgaattcggtgataacagtgcaaacaccccctgtactcatgcatgggtagaaaatggcaggagatacgagattaagtatgaagatctattgtttctttttcccaagggatcactgactttaaagagaacgttggaactaaaagccacgccattacccctgaataataatggactaaacaagttccttggtaattatgagggttacacgtccgttttcagcaaatacaggctgcttgaagatgacggccgccctactcagctacgcacacatatccctcgacacaacattaatacttttctcgctattgctgagatttcagaccacttacaagcgatgctgatggggcgtgttgatatcactcaaaatcagcattatcagcacctggctctcaaggaacggcgaaaagcagcttctctaacccctttagttccaaccgtaccggagcagtcagcatctagtgctgttgacgttgattcacctctcgatgcggtaaagcaaagtggtttaatgacgtttaatcgcgtccagagcctggaaacaaatataaaggcaaacctacataccttcgatgaccgtaacgatgttgcaggcttcattgaagcgtcgttaggcgatggactattcgaagacattgccgctgcgtttgaagaaatcagtaaaaacgaagggccatcgcaagcatctgaaatggtgcaaaggcacgctgtactgcatccattgaaattgggttcttgcatgagagacgttaacttgtggggatgcccttatcgaatgaagtgtcaggcattgaagccctgtgagcatttcacgttgaccgggcgtgttgatgaatactccgctgttgtagtcaaaggtagggcattaaacgaggccaaacttgcttttgaacagtataccgcaaccctttctgacaaccagctagtgcaaggcaatattgacgatagtcttgcacagctagatgcactaagtgagcaattacgcagacgctcaaactcgttggaagcaattacctctcaggcacttctgtcaggagaaataaaggtggaaggtgaaattcgtactctggctcaattatttgctatcgagtaccaaaaaatcaaacaaggagaagactga

SEQ ID NO: 164619 - DNA, 1728 bp, Enterobacter cloacae
atggctgttatccgccacatcagcatccaaaactttcgggcagtgcgacaagcagaatggtgccctggcccaagcctcaattgtctgataggcccaggggattcaggaaaatcgaccatcattgacgcgattgacctggtgcttggcgcaagaagatcgtttacgttcagtgatgcagattttcatttgatgaacacagccacgccaatctgcatcagcataacgcttgggcagctcgatgacggattgctgaatctcgaagcttacggacgctattttcgtgggttcaacattgaaacaaaagaaatccatgatgaaccgcaggcgggtgatgagactgtactcacgctgagaatggtcgtcgaagatgatcttgaaccagactggctcttattttctgaacgaacaactgcggaaggcctggagaaaagactgcaatggaagcaccgtgagcaattaagcccgacgcgccttggggctgcatcccaccaccacctggcatggggaaatcgctcagtattaaacaaactttcagatgaggatttcaatgtcagcgcaacgctggccgagctttcccgtcaaacccggcaaagctttgctgcccgggaacttccgcagcttgatgccattctgaccgaagtcagaactatcgcgaattcacttggggtaccggtcggtgaactgaaagcgcttctggatgttaatggcgtttcactctctaacagcgcaatcagtctgcataacaatgataatacgccgctgaggatgcttggcacgggatcgacccgtttactggtaagcgggttacagaaagctgtcgggcgtccagggaccatacttattgatgaagcggaatatgggctggagccctacagaataagccagctgttgcatcaactgggctcccgcgatcctgagcccacttcgcaggtattcatcaccactcattccccatatgttctccgggaactccaagcaacccaactatgtgtgctgcgaaaagtaaatcaaccggccccagagccttcacaccttttcctgacacttagcggagaagatcaggaacaggcaaccttacgggcctgcgctgaagccttctttagcaaagccgtgattgtgggtgaaggtgggactgaggttggttttatcagaggactggatttatacaggcaaagcagaggaagaacgggttttcaggatcaaggtgcctttgctaccgatggcgccggtggggaaaaatatttcaaacgcgccgaggtttttgcacgactggggtatcgtactgcattactaaaagactcagatattatctcgcaagcacacagactaaagacagaacattgccgggccagtggcgtgaccatttttgaatggggtaatggtttttcaacagagggagccctgctagcctggtgccctgttgagactatccgtgacattgttctcctcgctgcggctctgaacagccaacaacaggtggatcagcatattcagaactgctcccagggagcttataactttgaagcatgcactgaggaaccaacgatagaaatgagagagcccgtggcgcgtgcggcaggtgaatatggttggtttaaaacgataggcaaggctgaagacctggcggaaaatattgtgggcccggctatcaatgatttttcacggccgttcaaggcgataatcagagatttgctggggtgggctgcagatgacggtgatcaacaatga

SEQ ID NO: 164620 - DNA, 1416 bp, Enterobacter cloacae
atgagtgtggatgccgttttaaatgccactaaaggcctgattgtagcgcctgccggatgcggcaaaacccacctgattactgacgctctgagtgttgcacaaagtaagccgtatctcgtgctgacgcatacaactgcaggtgtaacggcactcaaaaagcgattgagtcgttttgcaattcctccgcgaaactatattgtgacaacaatcgatggatgggcgctgaagatagcaggctgtttcccgggattgtgcccgcttgacgttggtcctgaaaatccaacccttttctacccttctcttcgccgtgccgtactgaacctgattgttaacggtaatattagcgaaatcatcacagctacttactcgcgtttgctggtcgatgaataccaggactgcaatagtgaacagcatgaactgacttgtgcgctttcacgtttgctaccaacggtcgtctttggtgacccgatgcaatgtatcttcagcttcagcggccctatgcctgactggacccgaaccgttgagacttttttccctactctggcaaccttgcagacgccctggcgctggaacaatgcccaaaccccagatttgggccaatggatccttgagcaaagacatcgtttacttcgccgggagcgcattgacttaaagtcttgtcctgaatatgtccgttttcatcctctttcacgaaatcacaatgacaatatccagcgccagcagcgcgaatattactcgctgctgcgacatttccccaacgactcgattttggttatgggtgattcacgaagagcttcatcccggcatcaatttgcacaacgtattaatggtattgatgttgttgaacccgttgatctgactgatgtgatgagaatggccacttcccttgacgaggctaataccgctaacgtgatgccaaatatattacaggcagcagctgagctgatgacaaatgtgggcgttagcgcaaccctacgcagaattggttctattcaagccggtcgaaacataacgcccccttcttcacttgaaattgcattagtagagcttgcactggcacccacccgacaaaacatgcgaacaacgcttctcttgcttgaagagaagtatgaaactcgcgtattcagggccggagcgctgcaagtgctaaaagatgcaataaatctgtccatcagttcacccgaaaaaagcattcatgaatcagcatctgtcattcgtgaacaacgcagataccagggagaaggacgtgtatcgcatcgctcaataggctcaacacttcttctgaaaggactggaatgcgatcacgcattaatactggatgcaggaaatatgggagcaagtgatttgtatgttgcactctccaggggggctaaatctgttacggtcttctcagtccgtgatgaattcacaccctga

SEQ ID NO: 164621 - DNA, 1152 bp, Enterobacter cloacae
atgaactcaccatcgtcattcgcgtcgcagaaattcgaccgtaaacttgctcgcacggccatcggccgcattaaatcaagtctcaaaaaatttgactctgtagccgatatcaacacatttcggcaaggttaccatgatgcgtaccatgtccaagggcaacagtcgggtgaaacggatttgttgactgccatgctgggcgtcgaaaagctcaatgatataccggcacttgcccttgtcgtcgatgaaggtttgtcctggaaccaggttattgatcgccgtaaggctatggctgaccgcctgtctgcatttatcaatcaccatgcagcgaaagcacatttccgggtgccggataatctttatgttcagtgtgtgaacctaatcgagttagtgcagcccctggcgattgtagaagacaagtatgaatcaaattatcaggagatggttcaggccaaagatgaaggccgcctgattgaggaattccaccatgtgtttgatcatttagttgggtctgagaatcctgagcaaaaacatgtgtaccgagctatcgctttacacttcctggcccaggaagacagccttatgaccaaagttcgttcttcacctgcctgggagttgctcattcttgaggttggcaccattgctacacgctggattaacaccggagagcccattaaaacctggcggggcatcatggcactctcgggaatgtttctgcttggagagatatacgctggccatcagctagcacaatcacttttctataaggctgatatgacccggattgataagcagctggcgttagaggtgattgagatgacctttgaacaatatcgacagcgtcgggcccaggtgccagtatttgcgcatggtgattccgaaaccgatctctatcgcaattacaacacaatcgtggtagaggctattcgtaacagtgatgatccggtggaagtggatcgactaacgcgtaatttggtgaccatacagcttgagggcgctgaaaagcgcatggaaggctttgcagcctgcgcactgtgcatcctgaccccggattttttgccgctgcacggtgttgatcccgaaaacgagcgcctacacgagctacgccataaaatttctgccttcccagatactgaagcgtcagggatgacatga

SEQ ID NO: 164622 - DNA, 780 bp, Enterobacter cloacae
atgaaagagatctgttccgcagattcgtcaacatttaaacatgtgcgttttgttctcacagacatggatgaaacgctcacttacaaggggcgtcttgcggctgaaacctatatggcgttggaacggttgcagaacgcgggagtcaaagtgataccggtcacagccgcgccagccggctggtgcgaccagatggcaaggatgtggccagttgatggtgtcattggtgaaaatgggggggtgtttttcagaaggcgtaatgacggccatggtattgaacgtttcttctggcacggcacagaaaaatatcctgacgtcgctgagcgcctgatgcaaattggagagcagataaaaagggaaattcttgccgctcattttgccgacgatcaacctttcaggatgacgtccattgcctttgctaaaccgccagaagcctatcagtgttcattaatacttaacgcattgacgcaagcaggtgcgacaaccaccgtaaacaatctctggattcttggttggtctggagagtatgacaagttatctatggcccgacgagtgctcagggattattacgatctcgacattgatgccgagcgttctgccgtattgtatagcggcgactcgacgaatgatgcgccgatgttttcattctttgaacatacggtgggagtaagcacggtatcagatttccttgatcaaatcccgaaacctccacagtggatcacccgtggcccgggaggtgctggttttgtggaaattgcagatgcggtaattgccgccagataa

SEQ ID NO: 164623 - DNA, 579 bp, Enterobacter cloacae
atgctgaatgaaattgaaactcttaacagaaaaattttccttgctatgaacgctaagcctggaacgcctgattcagctctggttattgcgaatttttttgcgaatacccttatttatgccataccatttattattatttttttatggtttgccggtaaagaaaaaggaaagatactggcgcttcgctcaacgttaacaatggtcattggtgtcgtgttgagcctgattattggaaccctctggccgcatccaagaccatttatggttccgctgggctatgtctggttttcgcatactgcagattactcattcccgagtgatcatatgaccatttttgtgtgttttgcgcttgcgctgatcagcgcaaaggcagtacgtaccggcctggtggtgttgggcattagtattctggtcgcctggtcacgtatttatcttggcgtacattttcctctcgatatgataggaggtgtcatcacggggatggtgtctaatgctcttttctgccggttatggaaatataaaggtgaatatgtattctctttttttaaaacaatcagcttaaaattattcaaaatttaa

SEQ ID NO: 164624 - DNA, 2337 bp, Enterobacter cloacae
atggagatgccccctgagaataacgtgaagggactttccgaagccgaggtgcgggccaggctggcgcaatatggctacaacgaagtgcgtgaacagcctccgggccagttgcgtgcgatcctcaaacgtctgtggggccccataccctggatgctcgaaattgcgctggtactcgaagtggctctggggaagacgatcgaacccgccatcattgcagggtggctcgctttcagtgcgatccttggcggcattcaggaacggcgggcacagtcagcacttgacctgctgcgtacccggctgaaagtcaatgccagtgtatgtcgtgatggcacctggcgactgataccggcacgggagcttgtccccggtgatagtatcgccttaacagcgggggacctggtccctgccgattgtatgattgatgagggaactgtggatgttgaccaggcggccctgaccggggagtcaaccccggagtcacgcaacgagggggatactctctattcaggatcgacgattgcgcgcggaaaggtgacaggaaccgtcaccgccacaggtacccgaagctactttggacgtacggcagagctggtacgaacggccagctctgccagccatcttgaacagcttctgttcgctgttgtgcgctatcttgtgaccattgatgccatgcttgcggtcattctggccattgttgcactctggcgcggtgaagatttgttgccccttgtccccttcttccttgttctcattattgcgaccgtcccggtgacaatgccagcagcctttacggtcgccaatgccgtggaagcccggcggctggcgaatcagggggtacttgtcaccggcctgtcggcggtacaggaagcggcaaccatggatgtgctctgtatcgacaaaaccggtacactgaccagaaaccagcagtcagttgccggcataacggcgcttccgggagagaatgaggacgagatactggcctgggctgccgcggcctgcgacgaaacgatgcaggggcaacttgagatggcgattctgggtgcgttacgacgccgggggggaatgtcgcccatccgtgagcagttcatcccgttcgatcctgctacgaaatgttccgaagcccgtgtgtgttcagacattgacggatcgtccgttcacgtcattttgggttcaccgatggtcgttgcatcactcgccgaatctcctcctgagttcaccacgatccagcaggccatggcggcgtctggcgccaggatcctggcagtcgcaaccggcaccgacggccatctccgtatccgcgggttgctggcactagccgatgtactacgcgatgatgccgcaaccctcgtcagggatatccgggcactgggtatcaggataatcatggtcaccggtgatacggttgataccgccagagttatcagccgccaggcagggctcggtgaccgcttcggcgatgcagtcagggatctgcagacacctctccactttgatggttttgctaacttctatccggaagaaaaattctggctggtgcagtccctgcaacaaatgggctgtatagtcggcatgacgggtgacggtgtgaatgatgcgccggcactgaaacaagccggagtgggcattgctgtacagacagcgcctgacgtggcaaaagcagctgctcaggtggtgttgacccaccccgggttagacggtgttgccgccgttgtatcagggggccgccgtgtgtttcgccgtatgctgacctggacaataacgaaaatagcccgtaccgttgagctggcggccctgctgaccatcggctatatcgcgacaggattcttcgtcacaccgctggttctgattgccgtgattgtggttctcaatgatgtggtgaccatcacgctggcgacagaccggtcatggatttcttcatcaccggaaagatggaacgttggtaaaattgcccggctgggaggtgtcctggccgcaggctggctgattctggcattcatgatcctgtggttcgtccttacccggttgcagcttcccgtcccgcaaatccaggccctgatgttcgcctatctgatgtatacggcccagatgacgatttatctttcacgaacgccaggccgctgctggtcactccggccaggccggtttgttgtgttggccacggtgggcaatatcatcattgccaccgtactggctgccggtggttttcttatgacgccggtgtcactgacactgctggtcatcatgtttgctctggttttactggccacccttctgctcgatcagatcaaaatatggctcttcgccagaagacctgttgaggactcaccgaaaagctga

SEQ ID NO: 164625 - DNA, 555 bp, Enterobacter cloacae
atgaacttaccaggtcagcagtcgcctgacagcacccttccctcttatgacctctcgcgtagcttaggccttcaagcgggtactgatatcgattttaaaaagctggccgcccaactcgactgcacgcgtaatttttacaatgtcggcatcatttttgatgatggaaaacaacgctggctggtacgcccttcacgccgcattgcagatgtgaatcagagcaccgtcagccatgtggtaatcagtaaaattccggatgctaaggaaatcagtgcagaaaaagctgtggtggcgacgctaacgactccctcacttgctacggaaattacttcaaccggttttgcctgtggcgcgatgcttgttacgcttgtcatggcgtttggtgccggtgcggcagtgccttttaccgctggcgggtccggtgtgattgccgcgattagcctgtccggtacgctggcaactggcgcacaatgcatgattggcgcgggccgtctgctggcaatccataacgatcatggttctgatgttgcctggctcgacagcaggactggtatgtag

SEQ ID NO: 164626 - DNA, 1422 bp, Enterobacter cloacae
atgagcaacaacggcaataaatttacgtatctgaaggtttcgcctcagcttgtccagatcaggaacgtcaatatagaaaaaattaagttgtataattcactctgtcagcataaaggttatacaaaaaagaaaaataacccgtcatacagtgatgtctgtattgattatgtcccgccaaagaacatgtcgacacctgtagatactcttgtcgccaaaactcatctgtatgctattcctggcgcgttagaatgtggatatgcgcaatgtataaactggactgcagaaagtgtattaaatgcgcaaatccgaagaggtattgggcgatatacgattgcgaggttgaaactggccagtgcttgtattggtattagtaatagtcgttcgtttaaagttaagaatttctttcagtgtgtagaaagttcagaaaaatctactatttcctttatcattggcggatttttttgttatcagtctgcaactttctggttaagctccagacatgaaaaaataaaacattttattcatgcaggacttgcggaaaaagcttcactgagctttatgcgaaaaaaggacataaagaccacccctgattacttcatcgagacaactcagggtgagtggcatacttttgaaagcaaaggaggtgaaagctccagcagatggcaaaggatagaagagggcattgcacagctagaaagcgtgactgcggttggctggaaaggtaaacaacccatccctgtcagtaccttcgtctgtacgcatgcgtctatggatacaggaaaagaaatttcggtgaacgttgtggatcctgacccagtgcacccccggtcaattatactaaatcatgctgtatgtgttcttctcactaaaatagcattaatcaatctttttgaaaccctcgtagaggacaatcctgcgggggtatttaaagtcgctggcatggaagaatggatttttatcagcacccatcattttgatggtgttcaactcggtattccggaaaagtactttaacttaaataaaagttcagtgaggagtgttggggagtacttggctctgaaagagataattgacagtgcgctaatggaaaataatgagcttcccgcggttgagaaaattgaaaaggaattatcttatttgttaaagcgttctaactcatcgcgcaagattatttcgtttttaacacctttgctgaagaagaaacttccttatgaagaaaccttacatctcttctctgagtatctcgggttgccgaaaatggctaatgatttttgtcaggaagatgaacggttagaaaaagcattatccgaatcagtaagaaagcatcgatctccatggggcggcctggtgcgtgaagcgccagcacccggtcatgatgacccttgggagaaaaaacaaagaaagaataaaatgaagccctga

SEQ ID NO: 164627 - DNA, 393 bp, Enterobacter cloacae; identical to SEQ ID NO: 115961

SEQ ID NO: 164628 - DNA, 393 bp, Enterobacter cloacae
atgggtgcttcgctgtctgactacggaatcctgatgcacgaggacgagattcgcgctctgggtcgactggctgcttctaagggcttcggtggtgaagacgctatcaaggatatgctggggacggacatcgcctactataacgggtctgaccgtggggcctttgtgctggctaaacggttcactgcgctgagtttcggttgtctgcgtactgatggtgaacatatcaatgtggtcctgtctcgtgatggtaactctcagtctcatgaccttgagattcgcggtaaggttcacgtagtcgcagaaccagcggcgacaatcaagatggggacgggcagtgttaacgctctgctgtttgtcgtacagcgtctcgtctgggaccgtggtaatccgtga

SEQ ID NO: 164629 - DNA, 690 bp, Enterobacter cloacae
gtgtgtgttttttcactttgcttatggtactcaaaacatagacttaactttgactatgatattgaagtagaatatttaaactactcagtttatggctatgctttcgctatagcaattcctctatgtttattcatttatggattgtgtatattcatatatatgtatataggaagagttacagcctaccaatctttctatgcagctatcatagccatacctctttgctatctgcttaaaaactatatacacggccaacatggcattaacttcgttcttaccatggggttaatcctaatattaccttatggctttatgatgttgttaaaaaacatcaataacgccaataacaatatctttattattttcaaagagatgccctttgatataaagaaaatgaaatcattattaagtatgtggtttaaaaaggctctgacaaccacgaataactatatgaaaatcacagatttattatctatagcttcagcattgatatatatcggttcattttcaattggaatcatacctgaacatcagagatcatttcttttacttgatgctttctatagaacagactgcaatgataaaaaagattcatttttatatctccgtaaatcaaagaatgagtgttatagaataacaactaagggacttgaagttaaaaaaatggagtcatttcactcttcacattga

SEQ ID NO: 164630 - DNA, 222 bp, Enterobacter cloacae
atggcaagggtagtagcttcaacaagatcactgattggaaaatcaaattgtccgatgaaaaagaagctgaccagggcaatcaacaaacgtccaaataaaagcgtggcaaatattcctgctatccaaacagcggccagtaacaagaataattttacccttgtagtaatcattatttttcctctgcctgaaggcggcaaactggtgaaggactataaccactag

SEQ ID NO: 164631 - DNA, 810 bp, Enterobacter cloacae
atgaaaataagtgtcttactatctctctatataaaagagtccccagattttctacattcatgtcttgccagtttgtgtaaccaaacttacttccctgatgaaatcgtcattgttttcgatggtccagtcactactgaattgaatgaatgtataatcaaatggtcagaaaaattacccgttaaaatcgtaaaaattgaaaacaacgtgggtttaggtgaagcgttaaatattgggttgaggtcttgcagtaataatattgtttttagaatggatactgatgatatatgtcacaaagaccgtttcatgaaacaagtagaatactttgaggataatcctgatgtaggtttgttgagttcaactgttggtgagttcagggagtctgttgatgatgtttatgcctatcgcaaactgccgttgacgcattcaaaaattttacaattttccaaaaaaagaaatccattcaatcatatggctgtagccttcaaaaaggacttggtattagccgctggtggttaccaacgtgaatatttgtatgaagactatgcgctatgggtcagaatgattcaaaatggtgttattactgctaatttgcctgagacgctagtatatgccagagctggaaatggaatggctgctagacgctctggtctaaaatatgcgaaatcagagttcgctgcacaggtcaatttttatagaacaggttatcttagtttttttgaattgattagaaacctgtcaatcagaatacccttaagacttattcctgtctcatttttatctttgttatattcaactgttcttcgcaagtga

SEQ ID NO: 164632 - DNA, 918 bp, Enterobacter cloacae
gtgaaaaaaaagattcttatattaggaggttcaggatttattggggttaacctcattgaacattttttacaacataattatgacgtgatcatttatggaagaagtatacccttaggttttgaagagaaaattacctttgttgaagctgatttaacgggtattaatgctaagaaagaatatctcaagagtcttgaaattgacacggcattatatctaataaacactttctctgtgaattcaaaagtcagaaattatcagtccttgcttgaagaaaacaaatatctgataaatgaaattttcgacattgttaaacgttttatttttttctcttctggaggaagagtatataagagcagtgaacgcccccatcatgaaaacgaacatcttgaagctgtttgtgactatgggaaaagtaaaatcgatcttgaagcttatgtaaagtcatgtggtgctcaaaagaaaaaacaatttctgataattagaccttcaaatccttatgggccgcatcaaacagtaacaggaaatcaagggttgattgcagtcattactggtcgcataatttctggtcaggttgttgatgtttggggtagtggaaatgaggtaagagattatatatatataaaagatttcgttaatatgttttattcgctattttgcatagaaaacccacggcataatatatacaatataggttcatgtactggcgaatcaactttatcaattttaacagctgtccgtcaacacttaccaaattacaatatacaagttaaatatactcctaacgataatattattaagtctaatattctctgtaacaagcgaatattagatgaaattggtaattacaactacacggatatcaactctggaatagctcagttcctcgagtggttacagacagtatcaagaaataaatga

SEQ ID NO: 164633 - DNA, 1488 bp, Enterobacter cloacae
  misc_feature (28)..(37): n is a, c, g, or t
atgcaatggccgatggtgccatcatcgnnnnnnnnnngttctgacttcactcgtcaaaccaagcgttacaacatggaactggatggtcataagttcgctttgctggacgttcccggtattgaaggcaaagaagggttagtgctgaaagagatcgaggatgcagttcaaacggcacatgccgtgttctatgttaccaaccagccagccccgccgcaaacaggtgatgatcaacgtcagggcacgctagaaaagatcaaaacacatctcaaagatcaaaccgaagtgtggacgattttcaacaagaaaattgtcaatccaatggccattaagaatcagccactacttaaagatgatgaagaaaatagtctgattgaactcgataaaaaaatgcatgaacaattgggtaaaaattatcgtagcgtattttccctcagcgtacttccggcatttgtagcctctacagaccactttgctcccgattcacaatatgctaaacgacgcaaaaaatttcttgatagctttgatgccgacgagcttttggaaatttcgcacatgcgggcttttatcaggatgctcagtgaaaaattacttgggaacagtgccgccagaatcaaagccgccaacttcagccaagccaaagggagggttgatgaaagcaatgccaaagtccggcatattcacgagatcttctccacagtggccgaacaactggaacaggatagtgaaaattcatgtaaacagctgcgtcaaagtttcagtttgttccggcaccgcctggaagccctcagaaccaaattagttgatgaactggtcagctccgtacgtgcttcggtctactcagtgattgaacaagatatcagtagcgatgaatttaaaagtagcctgcacagttgcattacgcagcagcaggaggcattcagcgaaaagttgattaaaggcattcagcaggacgttgaaatcttccagcaagactccaaagatatcctcacaaggtttgaacaatacagtcaggaattgctcaactcctatggcaagcttcgtgctgaaaagttcaatccagcctttgatatcaagataaaaatggataatggggttaatggatggggattgctagctgggctgactgggattgcgcttgcccctttcaccgcaggagcaagcttctgggtgggtggagcggctgtactaacatctttgatttccgtcggcaaagccttggctagattttttagcacttcatacaaacagtcccagcaacgcaaagccacaaatgaaaatcttgcagtgatacgctcactcctgcagacagacattgattctgctctggagggcatcacaccacaaatgcaaaaaacaattgatcagcttgaacaggctttgaaaacaccaggtcagcaggtcgcatctaaagccaagatccttaaacgatccacccaaaaacttgaccttctatctcgccagatcagtaatgtaggtaacttgccatga

SEQ ID NO: 164634 - DNA, 690 bp, Enterobacter cloacae
atgagccagcaacaaccgacactcccttctcagccaccttccggcttggtaattggattattaagacttgtaagttatgcattggtaattattattgagggagtctttttacatctgttgctgacattatttctatattttttatggccgcaagacgatgttgagcatatttcgcgtgcagtgctacacgaacaggcagcgctggagcaggatctacgtaggcatccgttgaaaactcatattctgggtttactacaatataaccaaatagtgttgagacatactgaagaaatagtactcagtctcttcaaacaacgtgaactgacatcttcactgagtcctgtaatccgcagcataacgtacactatgttttattcgatgcaaagtgttatgatgcaggtgctcagattgattataacttttccactatttttattttgtatgacaatgggaatgattgagggattggttctgcgagatctgcgacgatttggtgcgggttatgagtcaacgttgattcttaaccggctaacttccataatgggaaaaacatgtaagtatataattattataactctctcagttccaaatgtttttccctcactaaaaatagattatttatcattcctatctgcaggggttatgatttattatcttcttttgtgtatgaatatccgaggaaggttataa

SEQ ID NO: 164635 - DNA, 936 bp, Enterobacter cloacae
atgataatcagtgccagtagacgaacagatatccctgctttttaccatgactggtttatgaatcgaattaaagaagggtttctgttgatacgaaatccctataactaccatcaagtaaaaaggatatctttgcttcccgaagatatcgatgctatcgttttctggacgagaaaccccggtaagatgctatctgatctggagcttcttaaggagtttaaatattattttcagtataccataacaggttatccgaaaatactggatgctcatggattaaaccctcatcgtgcaatatcaacttttttagcgcttagcaagaaaattggccgtaataaagtaatatggcgctatgatccgataattatttcaagtgcaacgccagtttctgagcataaacggcttttccagaagatagcctctaatctggttggtcatactgaccgtgtagtgattagtttcgcagatttgtatcaaaaaacaaagcgaaacctcaatctaatccctgattttacatatagggatattactcatttccatgaggaactttatgatttatgctctttttttgcagatgtcgctcgggaatacgatatgcaaatatcaacatgtgcggaatcgcttgatcttgaacaggttggaatcgttaagggtaaatgtattgatgataggttgctgaaggagttattcggactacatgtttcaggtataaaagattcagggcagcgagaagcatgtggatgtatcaaaagcattgatatcggacagtataatacttgtttacatggttgtaggtattgttatgcaacatttaatgaaaatatagtgaaagctaatatgaaaaaacataatccaatcagcccatttcttttaggtgatgcttctgatgtggataatgatcttttgaaaaatgtaattattcaacaaaagctattttaa

SEQ ID NO: 164636 - DNA, 798 bp, Enterobacter cloacae
atggatggtttaattaaaaattgtcatgataggattgaaggggacaaacatctcaaatgtgatgcttccttaggtgatgattgtcttcaatgtagcagtaatatgtattttgatggcaatgatgtgaattacgaatgtgataataaaaggtatatctatattgcgcggtatttacctgttcattcttctgagatttctaatgcgctagatcatttggcgatgagtttttatgatgagcttaaggataaagaaaaaatagtattcgcaagttttggtgctggtccaggaatagatacatatgcttttcatcgttggcttgataagcatcgtaatgatttatcctgcaaaaatattactgcatttaggatcgagtgttgcgatgagtggactgagttagctaaagaagttatgttttcaaatagccctcagggttttgagcgaaaatattatagaaatattgtggatgtcacgacggaggatgttaatatttctgaaaggttcgatattgcaacattatcatatattgtttctgaactcgatgagtctggtattaataaattaattgaaaacattaaaaataataaaagtgaatgttcatacattgtaattaatgaccgaaatgaacctctcgtcaaagagaagataattaaaataatgactgcggtagcagatgcaggttatcgtgattatcattatgatagtgaacattgtggtttctcctatcctgatgatatatactcaagtattagtcctaaagtttttcgtaaatctgtatattttgtaggtaaattgaaatga

SEQ ID NO: 164637 - DNA, 309 bp, Enterobacter cloacae
atgcagcatcatatacttctatcactgattcttcttagcttcggagggccagcctacgcctcccctgaatccacccagctcgccctcgcgctgaagcaactcgacggcgtaaaaaactcgctggagcgcgcccggaacagcgccagtgccgactcacagtcgcgctatttcttcgactacttacaggcgcagcaggatctcaccaccgttgaacaaggcatccagcactaccttgccccggcaagagcgcagccgcgcgccgttaaaccactcagcaccagctaccagcgggagaaccccgatgactga

SEQ ID NO: 164638 - DNA, 1269 bp, Enterobacter cloacae
atgactgatctatatactaacagaaattcgcaacaggattttgttaagcatggatttacgcatcatatccaaaacaatatggatgtatttattgcttccgctttctttaccgaatttgatataattgacaatctcctagaaaaaggatgtcacattaggattgttgtaagactaggtttccccacatcgccatttgctttagaaaaattactttcacataaaaatattgaagcaaggtttttcaccaacaattcgttccatcctaaactttatatttttggagacaggacattattagtaggctctgccaatttaactaacgcagcactccttacgaatcaagaaataatggttagcttgaactcagaagatcatagattcgaagaactaacaacacttttttctcattattgggaatctgcacacgtactaaccaaggaagcaataaaagattataaaaatgtttacaacaaacattcaaagctattatctcagataaaaaaattcgacgacgaagttctagataaaataggagatataagctattcaaatatcaatcgagggaaaaaatatatctcgcaaagttctatttttctagagtcttatagaaaatcatatcaaacatctgtatatgcgtttaaatgcatagaagaaatatactcatcttttgcaagaaaagtggcagaggaacagattcctttaagacttgaaattgattcatttttcagttttgtgcgcgattatcatgccactcaagaaacctgggcaacccagccaataggatggactgatttacaacaatcacatctccgcacattaatagatgaatggttatccaccccatgggaccattttgaagaaaggattgtacccataaactatccccttatttacaaagtattcaactcaccacaatcaattgaacaaagcaatatagatgaaatagttgaagcactatgtgtacttcactcttttcatgatcgcttacgattctataaaggtggcttatatacattaatagaagaattttcaacaagcaatgacattgcacaaattaaaaaaacaattatatatttgctatatggaaaaggagatattattaaaaggatgtctgactgcatctataatgaagagtataagcttaatgctttcgggcaatctaatgttcaagagctgattggatggataaataaagaaaacttgcctgttatcaatggtcgaacaactaaggtacttcgctattttggtttcgatatacgccaactttaa

SEQ ID NO: 164639 - DNA, 747 bp, Enterobacter cloacae
gtgcaacagtttaataagaatgccgacgcttacgatgctgttcgtggaaaaattacctacccggaagcgctttatttctctctggccgcacgggtgcccgcccatgacgctgcgctggatattggatgtggcaacggcgtatcaaccgggcggctgaaagcatggttccaccatgtagagggctgcgatcatggtgatgtcctgattgagcgggcgcggctgaattaccccgatctgctgttttcggtatcgccggcggaaagttattttccccggcggcgatttgacctggtgaccagcgcgacctccttttactggatggaccgggtgcgggtgctggcgaacctgcgcgactggctgaaccctggtggggtgttttgcgcctataaatatgactttccggtggtgtatggtccgttgcgggatttcattgagacggagctggtggacagctggctgtatcaccgcgatccgcgactgatccagtatgacaatacgctggagctgatggatgactgtgaccatctggtggattgtcagcgggaggttttcagcaatattcttttcctgacgccgccggagattgcgcaattttttctctccaccagttatgttacacggtacgttaaagctgaaggtggtaaagattatgcagcctggtttatggcggcagtatgtgagcgggagcctgcagagaaggtggcggtaaattttgatattcatgcctttaccgccacgcttcgttga

SEQ ID NO: 164640 - DNA, 942 bp, Enterobacter cloacae
atgagaatgttattgaaatcagtcgggttagtactggcgttgtggtcgttttctttcgttgtacaggcttcctgccagtttgtgaatggtgtgacggcggaaattcccggctatatcagttttggcaacattgcagtccagcgcgatgcccctgtgggtagcgttatcgccacggcgacaacgggagcctataacggcggcaataccattgccggatgtaccgaggcctggacattccgccaggaactgacgaaatggcagacgctcagcgcacaggggaatggcgtttacaatacgaatgtgcccggggtagggatccgcatgacatcgccatcaggaaaggtattgccctatgatctgcccatcaatgccaacacctatgtcaatatcaatggtgatggcattaaagctgaactgattaaaaccggtgatatcacgggtggcacactggacaccggtatgctggcccgggcgtccgtggttaaccagttttatattgctaacgtcaccttaaatggtaataacaccattacttctgaatcctgcacggtgaccacgccgacagtcaatgtgccaatggatgatcatgaaaaaagcgaattcagcggcgtgggctccacaaccgactgggtgaattttgatatcggcctgacctgcgatgtgggagcgcgcattaatgtacgcattgatgccgcagcggatccctccgccagttcgcaaggtgtcatgcagcttgatagcggcggggcgtccggcgtggggatccagcttcattaccggcctgacgatgccactgtgcagtacggtcaggagcggttttactggcagtcggtgtatggtgacgagattgttcagcttaaggcccggtattaccagacggcgcagacgattacccccgggcccgcgaacgccacggcgacgtttacgctgacctataaataa

SEQ ID NO: 164641 - DNA, 687 bp, Enterobacter cloacae
atgacatacgaggaaaacctaaacgacgacgctaaccaatctactgaaaccgatgctgatattaaagcccggaagaaactagacgaggccatactcagtaaattcaggaaccttgaccagaaaacgcttaaccgctgtggcaaggtaattcctgcagatactgagatgtaccgactccagcccggtgagcataatggaagcaacgtttttttcaatcataacggtgcggattaccgttttagtctgactgacggtgtacatggctcgatgtatttggcctacaccccaggaacgtcgttgaaagaagtgtttcagaacaaagtgtccatgaaagaatcggaccttgaagattactatcttggcaaaatagcaatcttaaaggacgttaacattctgcaagtaaacaaattggtcagtcgtacatctataaaaattcatgatgtcacaacagattctcgtaaagtcacacagtttctggctaccatagcgcacaacgcaggattcgacggtatggagtatacgtcgaacgtaaccggtgaatcatgtctggtgctttggcatatcgacccatctggacagggcatggccataacgctagaacagacccgcctcagtgactttgagcatgatggtaaagaggctgccgacatccttacttgggatctaggcatatcggtcgaagaataa

SEQ ID NO: 164642 - DNA, 663 bp, Enterobacter cloacae
atgaatccgactacagaaaagcgacctgtctaccaggacaatatgacttctgctgccagactccagaattttgttcaggaactggctgatgacatcagagcaggtaatactcatgttcgacaggaaagcatggctcaaacagatgcgctctttgctgtcgatgccattttgggatacctggcaagcagagctgagcataacctgacgaaggaaaagaaaaggcaccttcgtcgcgtccatagcaaggccatgtttctttcgcggttagagcgggatggtggggtctattcttcagcaaaagccgctgaagttttaggccgtacaaaaaccacggtgaaaaactggaaagatagtggccaattacttgctgtagaaattgatggtgagttcttttatccggcgttccagtttactgatgatgaacggatctcggatcgaggcgttctgaaaggtctgtcaggcttacttaagcaacttaaaaatttcagtgacaggatgcaatattctttctttgttgaggaacgtaatactgtgctgaagggattatcgccagcaggtcgtacttttaatattatcgagattcttaaagggaatccggatgacgtcttgatggacgagttacatcggcttgcccgcgtttatggtacgcaagatgccgcataa

SEQ ID NO: 164643 - DNA, 555 bp, Enterobacter cloacae
  misc_feature (445)..(454): n is a, c, g, or t
atgcttaggaattacaactttcagccttattattggtgtaaagaatgcctttctaaaataaatggttcctgtattggcaccaatggaggatatggttacagcatcttgaccaatcctgtagctatcagcataaccatagatttcagcgccattgccataaatggggtattggtaatcacttgtcggagtatctcccttgatatgtttttgtggagcctcccctccggtgaatatatcacaaagatttcccaggttgctccactcaacctcaaccccatccagcaatttttccagataactcaactcgctcatttctgcacctcgcagccttcaatttcagccacaatcgcatcaatatctttacgcaactggtcgattttgctgaccgtagttttcagttctgcattcagctcagcaatattgattatttcgcggttatctttcnnnnnnnnnngctgctcactgacaggttatagttattggcagcaactgtttcttgaggtacggttttcgccaaatggtcaacgtctgttttgctggcaaagacctgcataa

SEQ ID NO: 164644 - DNA, 1395 bp, Enterobacter cloacae
atgggctttgagtttcagttattagaacatgcaggaatacaattaattgatggtgacagaggtaaaaactatcctaaacataatgattttatggagaaaggccattgtctttttctatcggctaaaaatgtaacgaaatctggttttcagtttcaagaaactgcatttataaatgcaattaaggattctcaattaaaagcgggaaaactcagacatgatgacattgttcttacaacccgtggtaccgttggtaatgttgcgtattatgatagtacaaatccttataaacatattagaataaattccgggatgattatcatacgagctgatgataaattatggaatccaaagtttttatacctcatattaacatccgtttttttgcaagaacaaatagttaatcttatttctggttcagctgtaccacaactacctgccagagatattaaaaaatttatccttcctattattaataaagacattcagaataaaattgttaatacaatatcagtttttagtgataagattaacataaatattggtatgagccgaacactggaacaaatgtcccaaacccttttcaaatcctggtttgtggatttcgacccggtgattgataatgcgctggatgcgggaaatctcatcccggaagtgctgcaatctcgcgccgaactgcgtcaaaaagtacgcaatagtgcagacttcaaaccacttccggcggatgtttgtgcactatttccggcagagtttaaagaaaccgagcagggttgcgtaccgaaaggttggctgctggagtctgtagcaaaatctataaatataaatcccaccgtaagattatcaaaaaatatagtcgcaaagtatgttgatatgaaatccttacccacacaaggatattcaatatcagatattattgaaaaaccatattcaggtggtgcaaaattccaaaaaaacgataccttattcgctcgaataactccttgtctggaaaatggtaaaacgggatttgtggattttttagatgaaaatgagactgcgtttggttccaccgaatttatagtgatgcgagggactacgaaagtacactatacttatgtggcttgtttagcccgagaaaataattttaggttacacgcaatacaaaatatggtcggttcatctggtcgtcaacgggtgcagaatagctgctttgacagttttttcagtgcaataccgacaccttccgtaatgagtttatttgccggtaaagtcagtagcttttttgataaaatgaattgctgtaatttggaaaataaagccctaactaacctccgcgacaccctgctccccaaactcatctccggcgagctgtccctggaggatctgccagatttagtagatcaaaccgaagccgcataa

SEQ ID NO: 164645 - DNA, 168 bp, Enterobacter cloacae
atgaacagtaaagagcccattctgggcaataatccttttattcagatgagcaggctcaaaaattatagcatcgcggtcagcaggtattttcaatgggtcagagtcaaacattacaggtatgtcgctcagaaattctatttctactggactaacatcatcaatatatag

SEQ ID NO: 164646 - DNA, 1479 bp, Enterobacter cloacae
atgaaagtactgccgacgatacagccaccgaagatacagaaaacgagccaatggatcagtaatggtgtagttaagtttgttgacgggccgaatatggggcttgattgggttccgttttcctttcaacgtgaaccaatggatatagcacaacatagaagtactaaaaagatcattctacagtcatgtagtcagcttttaaaaaccactgttttacaatccatagcatttaacctaatggcaaatgatccatgtaattttgcttttggtagttcttctgaatctgaagtgaagaaattcaaggatggtaaatttctaccagctattgaaactagtgaagtactaagcccattagtaacagacaagaatgataagaacgccgcgaacaacgcgaagcaaacacaaatgataaacggtacttttgtgtactggctaaacctcaatacaccaggaaacctacgcggtattacatgtcgtgtagttctattggatgaggtgagtaatgtttctattacagaagaaggttcaccaataaaactagcagaagcacgtactagtactttcggtgatgatgctctggttgttatttcaagtacaccattatataaagatgatctaattaacagtgaatataacctctctgataaacgccgttggtttgttactcacacttgcggtcatgaatatacttttgaatgggagcaagtagcatttgaattcaaacaacttgagaatggtagagcaataccagacagtacaactacccgtttaatttgtcctcattgtcaggaagagatagacgagcatacacgccaccaaatgatcgataacggtcgatggatagctactagtactgatggtgatccgggtgtagttggctatcagatttcgcgtatgtattccccattgaatactatttcagaaatggttagtaagtttgccgatgctctttataatttcaatcttcaaacattttataataatgaattgggattaccctatgaagatgaatacgcaaaagaactagatatacttcgattggaatcattacgtgaagatgaatttaatatacatagaataccagaatcaacactcggaatttgtataagcgtcgatcaacaattagataggtgcgaggccagtattttaggatttgatgaaaagaacatttatgtacttggtcatgaatttttctatggacatgattgtactaaaatcgaatcacaggcatggaaggatttagatcagttttgccgtcaagatttccgaagtgttgacggtcgcatagtacctacacttgctgtattcgtggatagttcgaacggtaacgctacagatacagttaagaagtttaccgcacgttgggctaagtatcatcctattaagggttctagcagtactacaagtgacctattcaaacagagtacacaagccggatataaactacagatggctttgttgaataaatcgaacttttgctga

SEQ ID NO: 164647 - DNA, 465 bp, Enterobacter cloacae
  misc_feature (92)..(101): n is a, c, g, or t
gtgctctgctttaaaggtttctaccgcttccgggtcactaatatcaatcttctgcagggctttcagcgtggcaaattcatcgtagttttgcnnnnnnnnnngtttgacgaaggcttttttctctttttcactgtcgatactggccgggtcagggaagcgctgctccagctccgaaacaacagccataaaacctcgtttagcctcaccggttgccgcatcggtaaagccctgcatgtactcttcgtagcttttttccagtaccacattcttggtgtttttgtcgccaaaaagtgtgatggcatcaatggtcggacgctccaggtccctgaacgtcacgatattgccgaaggttttggtggcatcatagatacggtttgtgcgggaaaatgcctgcatcaggccgtgataacggaggtttttgtcaacgaaaagagtgttaagcgtcggggcatcaaagccggttaa

SEQ ID NO: 164648 - DNA, 948 bp, Enterobacter cloacae
atgccttcattactattacagtcactgtttccgctcgtctttataatgttacttggatggctaagtggaaagctgggatattcccggcgtgaagatgcaaacgtcatggcaaccgtggtgattcgtttcgcccttcctttccatctttttatcggtgcattgcataccgatcccaataaaattaagaacctgacctttatgaccgttttagttgtcggtttaatggggtcgtatttactgacgctatttatttcgcgctacgtttttcgccacgatatcaaaaccagcgccattcagtctctggtttgcgcctttcccgatatggcctactttggcgcaccggtcctggcggtcttgattgggccggaaggatttatcggcgtgctgattggcaatattattaccagcgttatcatgatccccctgactatcgtcctgattcgtatgggtgataaaaacggtcaagatggcctggaggcgctgcacccgggcgcgatgatcgtgcaaaacctcatcaaggcggcacgcaatcctatcgtctggatcccggtctccggcgtattgctcagtctggccggcgtgcaaatcccttctattctcagcatgcctatcgaaatggttggcaaagtttcaggcggactgtccctgtttgccctcggcctgttgttttacggtgaacgtccaaaactgaacgtgcagacgtttaccaatatcagtatcaaaaaccttattcagccggcaatgatggccgccgcggggatcgcctttggcctgagccataccttactgcagcaggtcgtgattattggcgcaacgccttccgctattgccgcggggatgtttgccttacgcagcgatacctatattgataccgcatcctcttccatattaattggcactgccgtcggggtcgtgaccgaaggcattatgatctattttatttcttaa

SEQ ID NO: 164649 - DNA, 561 bp, Enterobacter cloacae
atgtcccggaaagaagttctgtacaccccctataacggggccgtattgctggaaaatccgctgctaaataaagggctcgcatttattaaagaagagcgtgacaattttaatcttcatgggttattgccgcacaacgttgaaacgattgaggaacaaaccgagcgcgcctgggtgcagttctgtcattttaaaagcgatatttcgcgtcatgtatacctgcgaaatattcaggacaccaatgaaactcttttttataacctcctgcgttcgcacctgaaagagacgttaccgattatctataccccgacggtcggtgaagcctgcgagcatttctctacgatttatcgacgcgcgcgcggcctgtttatttcatggccgaatcgccatcgtattgatgagatgctgcaaagcttttcgcgcaacgacgttcgcgtgattgtggtgacggacggggaacgtattttagggcttggcgatcagggtatcggcggaatgggcatcccaattggcaagctgtcgctgtataccgcctgtggagggatccatccggggctttgttga

SEQ ID NO: 164650 - DNA, 318 bp, Enterobacter cloacae
gtgctgtttatcgacgccagccgtgaattcaaggcaggtaaaaaccagaaccagcttagcgaagaaaacattaagaaaatcgtcaagacctaccgtgatggcgataacgtcgagaaatacgcctatctcgccagcctgaaggagattcaggacaacgactataacctcaatattcctcgttatgttgatacctttgaggaagaggaagagatcgatttgctggacgttcgcgctgagcgggaggaattgaaaacggaactggcgaagctggaaacagagatggcaggttatctgaaggagttgggttatggtgcctaa

SEQ ID NO: 164651 - DNA, 969 bp, Enterobacter cloacae; identical to SEQ ID NO: 128918

SEQ ID NO: 164652 - DNA, 501 bp, Enterobacter cloacae
atgataccttttacaattgatggtaatggtgagccgattaaacatgataaaattaaaatatgtgctaagcagccttcgcaactaaaaaatattctttgtgagtgttacctgcttgcaccgacagggttcatcagaaaagaagtgttggaatatgttggttatgctgatgaatcgtatccaatgatcgaagattatccgctttggcttaaatgttcaagaagtggtattatgttttcttatatggaagagtgtactgtgctttatcgcaagggtgactccctgtctcaacaaggaagcagaataggcaatgttttatatctccagtctttatactgttttcagagagaaaaaatttggccattgttgccttcgagaatgatactaaaaaaatgggatgattttttgctctttaaacaaaaattcctatggataaagttctttggcaataaagtaactgtgccatatcttgttgtgctagcgaaaaaaattctaatgaagtag

SEQ ID NO: 164653 - DNA, 489 bp, Enterobacter cloacae
  misc_feature (437)..(446): n is a, c, g, or t
atgccattggcaattgaacagcttgatatgtcagcttatgatgttgttatttcaagcagtcatgctgtttctaaaggggtgattacaggccctgaccagattcatgtgtcatatgtccattcgcctattcgttatgcttgggatttccagcaccagtatttgcgtgaatctggcctgaacaaaggtcttaaaggctggcttgccaagtatctcctgcataagattcgtatttgggattaccgtactgctgcgggcgttaatcattttattggtaactcgcgatttattgcacgtcgcattaacaaagtttatggcagacaagcagacgtcatctatccgcctgtgaatacggataagtttgaattcagtgaaaaaaaagaggatttctatctggctgcttgtcgcatggtaccttataagcgtgtagatctcattgnnnnnnnnnnctcattgttagtgcgtttgccaaaatgcctgataaaaagttag

SEQ ID NO: 164654 - DNA, 864 bp, Enterobacter cloacae
atgttggtacgaggaacatcatggcgtcaggggcatgttcttaaacatgatgatgccgtttcacttggacttctgagccctgatgaaactaaccataaagttgttgttattacacatgattgtgatttacagagtgattctgaaaagaatgttgaactcatgtttggccccttgaaaaagggggcaagcaagatgaagagagcaaaacacccaagaatccttgatctttgttttgagaaccctgaaagccctaagaaaggggcagttgaacttcgacatgaaaggaaagcaataatttctaaaaaggatttcccttttacggaaaatgatccggcatatactatttcgtcagaagagaaacagggacttaaacagtggttagctgctaagtacggtcgtcccgcgttccctgactccttcgaagagcggttgcgcgcctttgacctggaaaaaaatggcgaagatgttaaattcgtttttgaaaaagcagttgctgacataatttcaacaaactcagagcatttgattggtgtgttttttgatttgggtgaggagagattcatcgatctcgaggaaggtgaaccttacgagcttgccatcaatgtggtgtacgatgcgacagagggcggtccagatgcaagaactgctgcagaaaatacctgtcttgctttgaaagagctattttttaaattctatggtgatccgaaacaggggcattcggaactcatcgaattaactaattgtgtagcagttgctgatactcatttttcactttatgccttgcgaagaatggatcagtggagggtggaatacatcagtcttgaagatgagtcttatggagactttattggcgcaggtgtatga

SEQ ID NO: 164655 - DNA, 672 bp, Enterobacter cloacae
atgtttgcaactcctactggcggtactggacgaatcgagcgttatgcgactcctccgctgagttgtacgcaaaacagttcgaaaatgccgggtatcgtggtcgctgcctcattattgcttgttggtactggtgcctcttatccagttgatgggtataagcattggcgtcattatgtacagccaagggttcagtttgcttttgactcaagtgatgcattgattttttctgcttctgcccctgatgttgatgtaagaagcgttgcccagcatttggctaatatacgagagattctgtccccttcaatgtctgaattggcaaaggatttggggataacacgacaagctctctataagtggctttctggagaaaatcagcctgaagatgacgtcaaaacgcttgttatcacaaatctgagtaacattgctgatgccttttctgaggcagggatcgctgatgcaaaaatgttagtcaaaatgaaagccttcaatggccggtcgttaatggacttggtcaaggaaggagaagattggcataagcctgtccagatactgattgatgaatctaaagcgatgaatgcggctgcagaggccgccaattttgcagcaagtaaggcgaagcctacagatggttggaaatcatctgtttcaattcctggcactgtagaggaataa

SEQ ID NO: 164656 - DNA, 810 bp, Enterobacter cloacae
atgagtgctaacactgaacgcatgtccaatgcgcccgtttattacgcattggtacaggctaagttcacgcctgtggcaaaaatggccatgtacattcctgacatacaggaagcgttgcgagttgagggctaccctttttatgagactcaaagtactacccaactaaagttcgagatcgttaatccgaacgagccgccggttcattcatttgagcccgtcacgcagtggataatctttaacgctgaaagaactgctgggttcgtcataggtaacgactttattacctttcatacaacggactataatacgcacgaaccatttgtttctgcactgatgctgggacttagtaaagttcttgagtttgcaaggccgtccttggtgagccgtattgggctaagatatcttgatgctgtatttcctgaaggtgaagaggttatagaacaatacctcgtaaatgaattgcatggggttaaccttggattaactcctattcaatccttacaggaggccgtatatcaaacttccgtgggaccaatgattcaaaatggcttcatggtttcgcgtatttacaaaacgaacactcaacttggttttcctccggacatggtgcctaatggtttggttgcactaccaaggtttagagatacggaacagcgtcgtcatgcggtcattgatactgatcactatgtagaaggtaatatgccatttgacttgcaaatggttgaagaacagatactttccttgcatagtaaagttaaagaagcgtttaaaggtatggtttcagattttgcttgggcaaaatggaaatga

SEQ ID NO: 164657 - DNA, 1041 bp, Enterobacter cloacae
atggaaataatgagttttgaggaagtaattacttatttacataagaaatctcggccatactctctacttatggggaatggtttcagtatggcctatgataacgaaatattctcatataacgccctttataattttttaacgtcgagagatgaccaattaatcaataaactttttgatgtgataaaaactaaaaattttgaattggtaatgcagcaattagatacaacattggccttgttaaaggcttttggctcggatgataagttgcagagtgatattattttagcaagcaaaaagttgaaagacggtttgctaagttcgatacatcaacttcatcctgagcatgtatataaaatcccagagaaaaagataattgcttgtgctgaattcttaaatttatttattaaaagcggcgggcatgttttttctacgaattatgacatgttattatattggacccttatgcgaaagcatgttgaaaatgctatcgatggctttggtcgagagatagaaaatcttgatgaagtgctccgtggagaaacggctgaatattcggatcttgtgtgggggccaaatatagataaccaaaatattcattatttacatggtgctttacatatttttgactcaggggttgatattgaaaaggaacaatatgatcaaagtaattttttattagaaaagattaaaaaaagactcgatagaggaagttatccaatatttgtaacagctggaaacggagatgaaaaacttagccacattaggcataatagatatctatctcattgttttgataaattatcatcagtcgatggctctttgattacttttggttttaattttggtgagtatgatgagcatatcattgaagcgatcaacaaagcgacgcatgctcaaaataaaacccctccaaaactatggagtgtttatattggggtttattctgataatgatgcggaacatattcgttcaatacaatcaaaattccacgcaaaagtaaaaatttttgatgcaaaaacagttaatgtttggggtgtttaa

SEQ ID NO: 164658 - DNA, 1023 bp, Enterobacter cloacae
atgaccattactactgtcggtatcgatcttgctaaaaatgtgttcgctgttcattgcgttgaccagaatggcaaaaccgttctggttaaatccagagtaacccgcgcagctcttcccgggctgattgctggtttgccgccctgtgttatcgggatggaggcgtgctccggggctcattactgggcaagactgtttcggcagtatggtcatgagccgcgtctgatggccgctaaatttgtatcgccttaccgcatggctggtaaatcagggaaaaatgatgcagctgatgctcaggctatctgcgaggcggttcgtcgcccacatatgcggtttgtgccggttaaggatgagagccagcaggcaatgcagtgtctgcatcgtacccgacagggttttatcgaagagaaaacagcaacatataatcgtctccgggggttgatatctgaattcggcgttatcgccccacaaagtacagatgccctgcgccacatagtttttgagcagaagaattctttaccacttcaggttcagcaatgtgttgatgatttgctggagcacgttgctcgcattgaagataacatcgctgaatatgaccgaattttgtcccgcatggccaaaacagatcatcgcagtcagcggctgatggaattgaagggcgttggccccacaacggcctgtgcgctggtcgccagtatcggtaatgcacatgattttaagaatgggcgccagctggcagcctggctgggactgacaccatcgcagtacagcagcggcggaaagtcgaagcttggcaggataacgaaagctggcgattcgtatctgagaacacttctggttcagggtgcccgctcggtactgatcggggcggagaaaaggactgatttattcagtcgttgggtctgctcactggtcgaacgcagaggatactggcgcgctgttgttgccatcgctgccaaaaatgcaagactgtgctgggcatcattgcattacggtgatgatttcaggttgtactcagccagctaa

SEQ ID NO: 164659 - DNA, 492 bp, Enterobacter cloacae
atgagactgacatctaaagggcgttatgccgtgaccgcgatgctggacgttgcgctcaactccgaagcgggcccggttccgttggctgatatttctgaacgacaagggatctccctctcttacctggaacagctgttctccagactgcgtaaaaatggactggtgtccagcgttcgtggcccgggcggcggttatctgctgggtaaagacgcaggcagtattgcggttggcgaagtgattagcgcggttgacgaatccgttgacgcgacccgttgccagggtaaaggcggctgtcagggcggcgataaatgcctgacccacgcgctgtggcgcgatctgagcgaccgtctgaccggcttcctgaacaacatcaccctgggtgaactggttaataaccaggaagttctggacgtgtcgggtcgtcagcatagtcaggattcacagcgcagcacccgttcgcaggacgccatcgacgttaaactgcgcgcgtaa

SEQ ID NO: 164660 - DNA, 741 bp, Enterobacter cloacae
atgaaagagcgcggaatgatttttaacggcgagatggtgcgggccatcctcgacggcaggaagacgcagacgcggagaatcatgaaaattcagccgtctgatggtttccacccaaccaataacggttacgatctggatttaaaagcccactggtacacacctggcgtggtcgataaaaacggttacctacagcctgcaaagaaagatgtatttggcgttgccgatgagaatgaaggctacacctgcccgttcggtgccgtcggcgatagcatctgggttcgcgaaacgtggggtgtagtgagccatgaactggatgaagatggtcgcattcagccatggagtcctgaccgtcccgccacagccattcacgaaatgccgtttggtaatggttactactctggtcacgctatctacgcagcagatggggattttacctggggtgatgacgatggctatgaagatggccgttcgtgctggaaaccatctatccacatgcctcgcgcagcctgtcgcattctgctggaggttaccggcgttcgtgttgagcgacttagagatctgagtgaggacgatgcaaagtctgaaggcatcacgcctacttcaggcggagttcttcccggctgggaatatcgcattaacttccgtgacctttggatgagcatctacggttctgacaactgggaagctaacccatgggtatgggttatcgaatttaagcgcattgaaggcggtgcagcatga

SEQ ID NO: 164661 - DNA, 300 bp, Enterobacter cloacae
atgtggggtgcggttacctttggtgatgcactgctggcggcgcaccgcgatgcgggcgcgctctacttcaccgacagcagcatccagacactggagctagaggcgggccgcgatgcgataatgaccgcgtcgctcgcgctcgatggcccggctttcgatctccattgcttccggcgttactgccaccactctttcaacacggcgctgcgagacgtagtcttcgtgatagcgctcaagtttcgtctttttcattttatccagacctctcaactgattaccgccgccagccacatcaggtag

SEQ ID NO: 164662 - DNA, 810 bp, Enterobacter cloacae
atgtcacacctgacgatctgcgaggattcacgcagtgccacttcttcgccggaattggcgtctggtcccattccctgcgcctcgccggatggcctgacgataaaccagtctggaccggctcctgcccgtgtcagcctttcagcgcagcaggcaaaggagatgggtttgctgacgagcggcacctttggccccacttcttccacctcatcagcgagcgcagacctcagcatgtctttggtgaacaggttgcaagcggtaacgcaaacgcatggttcgaccttgtacaagctgacctggaaggaatgggatacgccttcgggattgtgccgtttacgtcagcgggcatcggtgctccgcacatcagagagcgagcttattgggtggcaaactccggtggcgaacgactcaaccggatcgactcattgctacagcggcaggaatcaggacgggtcaccaaaagtgtgcttgaagcttccagggaccgtaatgctggcagcgtggccaacaccaacggagagcgatcacaaagggagcgggaaaacagtaatcaggagcgatgggaaggatcggacgttcgacagactggattacgctgcggaacagggtttagtagcacccttgaggttaacggtttttggcgagatgcggactggctcttatgtcgagatggcaaatggcgtccagttgaacccggcacattcccgctggttgatggggctgccgcgcgcctgggacgagtcgagcccggggtggcaagagtggcaagcagcaaccgcgtcggccgactcaaaggctacggcaacgccataa

SEQ ID NO: 164663 - DNA, 702 bp, Enterobacter cloacae
atgaatttatttgaacgtttgctgcatcgccgtctttgcaatgagcagcctgctgatggtggcgctgcgccggcaccgtctgagccatccgcacctgctgctgatgctcctgcacctgctgctgacccggcaaacccagaaggcgaacagccccaggctggcaagcctcaggacgacaaacccgctgatggtgaaaagccagcagacaagcctgctgaagaaaaagagcagaagcaggaaggcgcgccggagaaatacgagttcaagcttgctgaaggccaagagcttgataccgcagcgctggagcaattcgagcctatcgcgcgtgagctgaacctgactaatgagcaggctcagaagatggtcgacctgtacggcacgaagatcatgccaatggtgcagaagcagcaggcggaagcctggcagaagcagaccgaaggctgggcagagaccgtgaaggcagacaaggagatcggcggtgacaaactgaccgcaaacctcagcgctgcgcagcgtgcactggaacaattcggcgatccagaactgaaagaatacctggactcaaccggtctgggtaatcacccggcgcttgttaaagcgtttatcaaagtcggcaaggcaatgtcagaagacaaggttgtcaccggcggtcatgaaagcggcggcagtgaccttatctccgccttctatcccaaaaagtga

SEQ ID NO: 164664 - DNA, 2283 bp, Enterobacter cloacae
atgacggtatcaaccgtagttgaccataacgattacaccgggaacggcgttacgacatccttcccgtataccttccgcatattcaagaaaacagaccttgctgtctcagttgtcgacctgagcgaaaacatcacagtgctggtgctggatactgactatacggttacgaacgcaggaggatacagcggcggtaatgtggtgctcaccactccgttggcgaatggatggaagatttccattgccagagaactggagccgacgcaggaaactgacctgcgcaaccagggcaagttcttcgctgaggtgcatgaagctgcctttgacaagctgacgatgctcatacagcaggcgtacagtgtgttccgcctggcgctgcgtaaaccctcaagcatcgccaactggtatgacgcgctgaacaactatattcgcaatcttcgcgatccgcgtgaccctcaggatgcagcaacgaaaaactatgttgatactacgagttcagctggcgatacagcactcaaccagaagattgacgctaactttgcaaggacattacgtgttccagaaaccagcgttaaccagctggacaccgtagcaaatcgtgcaaacaagatattggcatgggataattcaggccaacctatcagtgttcccgctccatcaggtagcgcagcagacgtatttattgaactggccaaaccaactggtgcgagtaaaatcggatatcagcatccatatccgtctgacgttcttgtaacccttaaaaacctgcttgatgatcgcatatcggtcactcagtttggcgtggtgcctgatggaacagatgtgacagctaaactctgtgcggctcttgatgcggctaacggtgattattcaaaactaacagagtacgggaaagggagaaaatcactttatattcctccaggtgattatgtcgtggatatgacgaagttaactggcattcatgcttctgctggtcgctttgtgatccgctgcaacattgattgtgtaggccgcatccctaacggggattttctaattcttcatagtaaatcgataaacgtaaccggtatttcatgtaaatcgttatacattagagggctacagttttctattatctcgaacattgatacgaccggagatataagatttttttcatcagaagcatacactctgcctgggttggttgtatggggtggcgggagttattggaatcattttgtacgcataaaaacaggtactacggcaggtggtggcagattcataattgacatttcagatggttcaataaaccaaaatacattcgagcaaatgtgcggtggtggactcataataacaggttcaggtacaagtcctgctggaactccatatgaaggtaatgcaaataccttcataggactggatacgtcaggcagtggtgactacatgctttataacaatagcgttcctaaccaacataacgttgtaataggtttatatggtgaagtgacaggaaacggcaagattgttggtccatggacaatactaggtgctcgagcgcaattcggcggttggtcctcaaccatgagcccaatgaataccgtattagggacagatcctacagcaggttcgcagggaggagaaacgttcagtgtgtccggttctaatctttgcccttctggagactggtcagttattgaaggagtttacggagctccaattgatttttcccttctaactataccgaacgaaagaaaggttggttctgaccctaatgaaccatctggctgcggtagatggtttggagtcactaacgcatctcaacgttgcagaataaccctaaatttaactaaaacacagtcaggtttcattcgtggagctttctactttaagggtgatacaccgctagagatagctattgaagctcaagatggtactaattccatctatatgccagtgagtatgttctacgatatgcgtattggaggatggaagctatacaaagtttcagcgcccaccaacgacaaaagtaaagcatacagattaaggattacagttgaatccggaatgagcgcttatgttggaggcgcgtattttagtcagtataacggaacttttcttccagtattctgcggatgggagaaagtaaaaatgagatctagcggaaagcctactgtgacagagaacacaggttctttcccaatcggcttggtgtcctacagaacatctccagcaacatatccttccgaccctactgtccaatgggtgtggaatggaagtacatgggggattgtgaatatttctgcctaa

SEQ ID NO: 164665 - DNA, 585 bp, Enterobacter cloacae
atgggaaataacagaataaacaaacgctttataaaaatgcgtgcttggtttttaacaatccttacacctgcgttcgcgtcaacttctattgcggcattgtttgtgtggtcgcatcttgcgcgtattggacaaacaggacttttttttgacagcatctctttttcatcattgttcagttatctgatggtctttgcctgtgtcagcatgctccttttttgcattgtattatttatgccctcgctactgacgggactctttatttccaactatcagggggaaagtagtttccggaatgagctgacagaaaacaatatcaaaatcgttcttctgacctcgctattgtcaacactgatattttttggctattttttcctcatgcacaacgctggaaaagaagttgcacagaatgtgtcacttcagttaagtactatttggctttgcagctttatactttccctgtggttcaatggctctattacttatagacagataagcacagagggtaagtggaagaagatcaaaaaggttctttctatgcattttttacaaccaatgctcttctcccttactagactggccccctga

SEQ ID NO: 164666 - DNA, 615 bp, Enterobacter cloacae
atggggaagcataatgtattcatcagctatcatcatgcaaatgatcagctgtacaaaaatcgcttagaagaaatgaataaagagcatgatatattcataaatcgctcagtctcacttggcgatattgacgaagatgaagaggctcaaaaaataagagaaataattagggatgattaccttagagatacttcggttctaatattacttgttggattggaaacaaaaaacagaaaacatattgattgggaggtattctccagtatgagagatagcccaaaaaacaaaaaatcaggcatattagttgtcaatttaccgagcacaggaacgacctatatcaggtctactcatggggaaagtgaaaaagagcaaatacacccaggaatctcttcatggacaaacattgataaaagatcaacatttgaagaaagatttccatatatgccagcaaggataattgataattttatgaaaaaggattcttacatttcagtcgttaattgggatcagatatgctggaatcctgaaaatttggaaaaactcatagagttaacatataatgacagagataaatgctcgtatgatatgacccgaaccatgaggatgcgtaacggttag

SEQ ID NO: 164667 - DNA, 1194 bp, Enterobacter cloacae
atgtctgacccaagtctagccaagccttttctggttatttatattgtctggcacccaatgttttccggtggagctgcattagcagaaacacttcgtagtcattttcgtcgtgaactttacaagaatattgcgggtggaaccggtttgagtgttatttttcggtttgaagtattgcctgaaacagggaagccactggcaattaacttttctgaatcagaaacgacggcggttatcgtacttgccgaatcaaatatggcaaaggaccacgattggaacatttggcttcatgaactctcggcggagacagtaaacgctggattgggcactcacatttttcctgtggcgattgaacatgaaggattatcaactggccttgaggaacaggccgtacgttgggatctttggcttcaagaagatagcaacgatgtagcatcgatgcagcttcgattaatcagcaccctaacttatgaattttgtcggatgttgcgccactatcttgaacatctaaagcaaccagacaaatctgatgatgaactgcttcaataccttcgaaaagtccagatattccttagccattctaaacatgattcggatggtgagcggattgcatacttaatacgagatcaattgcacaaggggaatgggcttagctcattttttgatgtccatgacatcccagtcgggcttcgttttaatgaagtactgcttaagcaagttgcgcaaagtgctgtcgtcgctattcacactgacacttattcttcacgtgagtggtgtcggagagaaattattgaagctaagcgttacagcgtaccattagttgtcgcaaactgtatcaatgagcttgatgagagggggtttccctatatggggaatgtaccaatcgttcggatggaccctcaacaaacaaatcgtattagtataattattgcgcgtttgttggatgaggttttgaaggattttctatggcgttgccgtgttcaattggttgattgcaatgaatctaatattcggttcgttccacgaacgcctgaattaatttcgcttgcaggcctatcgttttcagggaatgggcaaccgttgattatttatcctgatccacctttaagtgctgaagaggaacgcttatttgaagaaattaaaccagaaattaaatttcgcagttttactgagtggatggcaggagggattgcataa

SEQ ID NO: 164668 - DNA, 813 bp, Enterobacter cloacae
atggcttatcgggaagcactgagtcagcaagtaattgcaatttcaatatctgatagcccggatatgccgctactggggctgagtgagcaacacttatctgatgccatgacagaaatatcaaggcatcttttggcgcttggatccagaattgtgtatggaggagatctacgcataaatggttttacctcattattgtttgaactggtatcccgacaccgtagggatgcggatgaaggagatgaacgtccgagtgtattgaattatcttgcatggccagttcatatgcaaaaagatgaagctgaattaatcgcccttagtaatcatcttagtggaatggcggaactagttttgtttgaccgcgatggttcacaattgcaactgcaagaacgaatacagcgagcagtggtaactccactagaagatgactggagaatagggctgactgctatgcgtaatgctatgttacgtgatacgcatgccagaatagttctagggggacgcattgaaggttacaaaggaacaatgccgggtattgccgaggaagcgttgatgtcaattaaagcgaagcagccgctttttattatgggtggttttggtggatgtgctagagatgttgctgaatcgctcaacattgcctccccgattagttctgctgaaaaacattggccaggccgtgaaatgtttaatggctttacttttgacgatctcaataatggtttgtcacaagaagaaaatattatactagctcagacaccccatgtagatcagggcataacaatgatcttgaggggacttttccgtaaatacagttga

SEQ ID NO: 164669 - DNA, 396 bp, Enterobacter cloacae
atgccagaaacagatgaaaaagtgatgatgtctctcagggaacgctaccgactggaactcattgaggctgtgctggccagtgaattaagtctgacggaagcggctgcgtcaatggagataacgccacgtcactgccgccgtctgattgcgcaatacctacaggcaggacctgtcgggttagtcagccagcggcgcggaaaacccagtaatcaccggcttcaggtagagcttaaagcccgcgttattcattttctgaaaactgagtgccagagcgtggggccgacacaggcacaaagaatgctgataacgtctgagagtatcaacctgtcagtcgaaacggtaaggcaattgatgcttgcagagaaattatggcaacaaacatcgaaaacctcataa

SEQ ID NO: 164670 - DNA, 636 bp, Enterobacter cloacae
atgatatttaacggcgagatggtgcgcgccattctcgacggccggaagacgcagacgcggcggataatcaaggtacagccaaagccatgcaatcacactaattggcctgattattcccctgaatcccagtggaaaagctatccaaatggatggtgttgtgcagtatgcgccaatggcacgacgattgatcatcgacaccatgcaaaagggatagcctgcccgttcggtgccgtaggcgatcgcatctgggtgcgggaaacgttctgcgctattcctgatcctgacgaaccggctggttgttcagcactcctgtatgcggctgacggcaacggcccatatggaaagtggactccttctatccatatgccgcgctgggccagccgactcacgctggaaattaccggggtgcgggttgagcgcttagccaggataagcgatgacgacgcgggaaaagaaggctatccggccaatccggaaccctacgggggcggcatggacaaatggctgtggttccgccagttgtgggacagcatctatccggagcaaagcttcaagcacaacccttgggtctgggtaatcgaatttaatgtggtgcccaatgttccagctaattcaacggggtcagatttacgctga

SEQ ID NO: 164671 - DNA, 225 bp, Enterobacter cloacae
atggaagagctaattacaagcatcaaaaacattcagaaagaagctgaaaacgcattctcatactgcgcgatgccatttgatcgtcgcatggacgctatcaacgaatggaaccgtcttttatgtcctgacaacgtgaagatgcttattgaagcacttgaggaaaaagataaggaaatagagtgtctacaggaggctaactaccttcttcaggaacaaatcgaataa

SEQ ID NO: 164672 - DNA, 816 bp, Enterobacter cloacae
atggataccatcgtagtcactgcaccaagcccttcaactaatttaccatcctacggcaatggcgaattttctccttctgcaccaaatgttcctggtgcgggtccacttttagtgcaagtagtatatagctttttccaaagtcccaatctatgccttcaagcactaactcaacttgaggattatattaaaaaacatggagctaaagatccgctgactttgcaggttatatctactaatgttggatacatgtgcaatgccgataggaacttgattcttcaccctggcgcgagtgtttatgatgcttatcacatgagtaaacctgcgcctaataaatatgactatcgctcaatgaatatcaaagaaatgagcggccaggcacccacccctttggtagcatttggtcactatctttgggggaatggggctgaacgaagtgtgaaactgtctaatctcggactcaaaatttcgccaaaagaaattccagcaattgctaatattattaattctagtgttgttggtacgttcccaatctctgctaatttcacgcgtaataccgctactgatagcgcgattacgggggcttatctggggaatatcacattggcgactcaaggcacgttaactgtcgcagcaaacggctcatggtcatacaacggcgtagtgcgggcctataacgataaatacgactttaatccaagtacacacagaggagctatcgcagaagcgcttacacgtttggcagccttgtaccctggaaaaacttatagcattgctatccctggacaaatcaatatacagggcagtggtaaacgataa

SEQ ID NO: 164673 - DNA, 147 bp, Enterobacter cloacae
atgtaccatttgaagcatcagggcccgatgcttcaaaaggttattttggtatgtatcattgcaaagatgcagttgtcgaatacgccagtaaatgaggccggtaaaccggcctggtcatttatcgtttaccactgccctgtatattga

SEQ ID NO: 164674 - DNA, 141 bp, Enterobacter cloacae
atgcagttgttcgtctcgttcgctcagcagcaggactttggttccgggcgctacgttgtaccggcctataggttccggatcatgtgcgatgtcgcgatcggattcgtcggccaggaatgccagataatcttcacgggttag

SEQ ID NO: 164675 - DNA, 147 bp, Enterobacter cloacae
atgtttgttgaacttgtttatgacaaacgtaacatcaatgggttgatgggagtcagagagattattctgtctgagttgacgaagcgggtgcaccagattttccctcacgcagaagaaacagttaagccaatgcaggcgaacgcatga

SEQ ID NO: 164676 - DNA, 219 bp, Enterobacter cloacae
atgggggaactgggtgtggcagaagctgagcaaaccgctgacggcgagctgactatccgcctgtttaagcgaaaatacatgctgggtgatgacggggagatcgtcaaaacgaaaggggaaccgatggacgtgccgctgaacagctggatcgatgttcgcctggttatgcctgatgattctgcctttaagcagcggttgaatcaggggcttcaaccatag

SEQ ID NO: 164677 - DNA, 525 bp, Enterobacter cloacae
atggcggttagagggcgagccggaaccacatggtctgcctggatgcagacttacagcaccggcaataccataaaagccagcgacggaacgcttaaagcagcctctccagtagttaagctgtttgcagatggttcgtttgaaacgaatgaagaatcagaaggttgcactgtaactcggataaaaaccggagagtatctgatcgagggctgcatgggtctgaactctgatgcggcctggggagggattgatggcggattcgatatccctaaagatcgcaatgggcaggccctaatctggctggactatgaggttagtgccgacgggtcagtactggtaaaaacatttcaccgggaatacccgacagcgccggcatttgcgaggaactcactggaaggttacgcggatggagacccgtccgacatcccgatcgatcagtacgtcagcgttcgtatagagatgcccgaaaacagcatctggaatcagcgcacggctatggttgaagcccctgattcaaccgctgcttaa

SEQ ID NO: 164678 - DNA, 456 bp, Enterobacter cloacae
atgcggctccgcttaagtgaacagcattgggctcgccaggcgggctttacattgctcgaattaatggtggtcattgttattctcggcgtactggcgagtatggtggtgccaaatttaatgggcaataaggaaaaagccgatacgcaaaaagcaaccagcgatattgtcgcgctcgaaggctcgctggatatgtacaagctggataaccaccgctacccgaccacagagcagggtttgcaggcgctggtgaccaaacctgaaatcgcgccaatcccgaacggctaccgcacggacggctatatccgtcgcctgccgcaggacccctggggcaacgattatcttctggtgagcccgggtgaacacggcgcggtggacgtcttctcaaccggtccggacggcgaagccaataccgccgatgacattacaaactggtctctggataagaaagagaaataa

SEQ ID NO: 164679 - DNA, 879 bp, Enterobacter cloacae
atggctgaaacaaaaacgtcaatgaaagaaattttaatgctttcaccgtatttattcgaataccagccaaataaacaagaggttaagaattacgtcaaagaattgataagtaaggggctggaagccagtgaagtcttgcatcaagtacaactttggatggctaataataggaagccaataactcccacaactgctaaaaaagttgagtatgctggtcaattcagcgtccgaactaacgcagctggcacgatttcaatgaaggacacattgaaacttcccccttaccggcgaggagagaaaaaagatcggttggcaccactaccacaaaagcgtcaattacatcaaaatgttttagccacttctgaaatacgcgaatggctggcgtctttagatgaacacgaaaagaaaggtttcaccaactggtgcgctcgacaaggaaaaatagttagtaagggtctttgggaagaatttaaagctaaccatcatagttctcggcagttatcccatatgaccgaatcatcaccaacattcgagcagcgttcatatgttgaagatggttattcgctaacgaaaacccgaaaagcccaaggtaggttcagaaaggacgtaatagccaattggaagggatgttgcgcaattactggctctcgctttgcgattgatgcgtgtcacattttaagccacgcggcaggaggagcgccaagtgttgaaaacggtattgcgcttgcttcagacctacatcgtttattagactcaggccatttaaggatagaagataatcgagcggtattttccgatgaggctcgtaaagatccacgctacgaacatttccacaatcaagaattaagacaaccattgtcacctgtaaaattcgactaa

SEQ ID NO: 164680 - DNA, 804 bp, Enterobacter cloacae
gtgattacgtcaaacataaacacaaaaaataaccttacttatatacaagcgctaagagctattgcagctatgcttgtcgtgctttgccatgcaagggattttttgaagggcacagaatatgaatcgctggctcagcgcttattttggccaggggcattcggagttgatttatttttcatcattagcggttttatcataatttatacttcgcatagctaccaaagcaatgatttgataaagtttattaaaaaacgattcttaagagtttggcctctttattttatcatgactattgcatatatagtcattgttaaaaatgttgatttatctttaatgcatgggttttcatataaccaatcatctagctcatttgaattaacaaacataatcaaaggtttgcttttcattccactaaacactgagtcacctatatactttgggcctccatcattgttcgttggatggactctcaattatgaaatatatttttattttatttgcgcaattgggatagcgttggggaagtttaggtatacattttatatattatggtttttcattacactgttggctttgccatctattgcgggtgtattcgacaggccaaaaattgaaggtttaggatatataaatttaaccatgcaaagcctgatttgggagtttgtctttggtgcgattattgccatcctatacaaaagtggcaacttttcaattagagacaaaaggatagcgataccattaatttcgattggaatcataatccctgtatgggcttacataacacagtttgatgctgggcactga

SEQ ID NO: 164681 - DNA, 453 bp, Enterobacter cloacae; identical to SEQ ID NO: 159407

SEQ ID NO: 164682 - DNA, 549 bp, Enterobacter cloacae
atgcgactttttggttacgcacgggtatcaaccagtcagcagtctctcgatattcaggtcaaggcgctcaaagacgcgggggtgaaattcaaccgcatctttaccgacaaggcatccggcagctctgccgacagggaggggctggatctgctccgtatgaaggtggaggaaggtgatgtcattctggtcaagaaacttgaccgtcttggccgcgacactgccgatatgatccaactgattaaaacatttgacgcccagggcgtggctgtccggttcattgatgacgggattagtactgatggggagatggggaagatgatcgtcaccattctttcagcagtagctcaagcagagcgtactcgcatccttgaacgaacaaatgaaggaaggttagaggccaagtctaaagggattaaatttggccgcaaaccaacagtggataaagctaaagttcactgtcttcgtgaacaaggtcttggcgcaaccagcatatccagacagttaaagattgcacgttccacagtctacaaaattctcgctactacgtag

SEQ ID NO: 164683 - DNA, 348 bp, Enterobacter cloacae
gtggcgatccagacattcacttggcgaacccagatacaggcaggaatggagggggagttcagctactcaactcgttctgcatcctttggtgacggctatgagcagatcgttggggatggaattaatcctgaaaaacagtcctggccaataacccttacggggaaaaaaactgagttgctcgatgcactaaggttttgccgcgaacacattacaaaatcctttatctggacatcccctgttggcgaaaccggtttataccggattgaagctgattccattaaagcccagccgctctccagcaaggtcataaccatttctgcaacattcaaacaggcttactcaccatga

SEQ ID NO: 164684 - DNA, 483 bp, Enterobacter cloacae
atgactatttacagtggaattcaacaaaaacttaccgaatatagagcgcaacaaggtatctactgggctgaccttcagcagagaataaacagctttggtactgatttggtttcatatcttggagtcgaaggatttggcttgtgcgatagccgcgataacaaatattcagtcgtcacagtaggcatgatggatggggacaatgtaaagaaagccccccctttccttatggaaaagattgaaggccaagtgaactctttgcacttctatttgcaggttaatttatcggaatttggcagcgaaattttagattgtgcaatgacttttgaatgttatttccgtaaagagcatggtgattattttatcaacattgccggtaaagatattgaatgcagaagtgttaacgacaaatgtgatttcacaagtgtatttgaatatgttgttaaaaagcttgaagaatttgtcgataagtcaaggtacgagtaa

SEQ ID NO: 164685 - DNA, 1926 bp, Enterobacter cloacae
atggctacgcaaccaacacaaaattctgtcccgagcgaatcaccgcgcgacctgaagtttaacgccgggaaaattgacgagttcgttacctccatgggatggacttataccgatcgtttcggaaaccagcactatacgattgagggcctgcgctggttggcacagcaggcaatatcagcctttggctatataactctggatagctttgaggatgggaatacgctcaccctccctaaccaggttcttcgccttgaagcgacaggcgaatactaccgctgggatggacctctccctaaggacgtaccagagaattcaacgcctgaaacatccggcggtattggcgcaggtaaatggctgagtgttggtgatacggcattaaggacgcaaatctcagatcctgagggtgctacgaaatatcctcagctgcaaatcgcgcgctggcgtgatgatttagacgttcgcggatggggagtgttccctgatggaactgacgttactgcaaaactgtgtgcagctttagattatgctaacggggattattccaaacttattcagtatggccagtacagaaaagaattacacatcccgccaggcgattatgtcgttgacatgacgaaactaacaggcattcatgcgtctgctggtcgctttgtgatccgctgtaacgttgattgtgtaggccgaatccctaacggtgatttccttgtggcgcatgttaaatcaatcaagattagcggtctttctggtaaaaccattacttatcgaggcatccaattctgtaaattttcaaatatagacatgagcggaaaccagactgtgatggcttctgataaattcacacttccaggactcgttagttggggtgggggaacctattggaatgattttgagaggattcgagccggtacctctgctggtagcggtaaattgatcctcgatgtttcagatggggcggtaaatcaaaacaccttcactcagtgtgcaggtggcggcatccttcttactaataacggcaacacaaacctaatagactgccatcaaaatatcttcactgcgcttgacactgcggggtcatcaacctttgcccttgaaaactccacagtatcaaatcaatcaaatatagttatcgggctctattcagaagttgtgggaactgggaggatatttgggaactggcagataatgggatatcggattcagtttggtaacgctgcttccacccttagccatatgaaccacatgatattttcagagtataacagcaatcagcagggaggggactttctatcagcctccataaataacttatgcccaagcggtgactggagtgtcatcactaatggtggttaccctattgactatgcttcacttggggatgcagctctgcttggtaatgacgccaatgagccttctggttgtggacgttattatggtttttctgctgcaacacagcagtcgagtttgactattgctttgacgaaaacaacaacgggttatctccgaggagcattttattttaggggagatgatccggtgcaaatttcgattgaggccactgatggaaccaatgcatacttcatggatcccacgaaatactttgttgtgagcaacaactggagattatataaagttgctgcccctacaacagataagagtaaaaactatcgtctaagaattgtcattggtgtaggaaaagccggtttgcttggtgcgagcacatttaccccgtacaatgcatcacatctccctgttttttgtggttgggacaaagcaaaaggtaagagcacggcattgccaacttacagcggtgctccagtaggatttatcttttatagaagctctgcagtaaacccaccaactgacccaacttatgcatgggttcataaggggtcagggcagtattctgtattaaacgtagcttcgtaa

SEQ ID NO: 164686 - DNA, 552 bp, Enterobacter cloacae
atggccgagatgatattgagcgatctctgtagaagtaaatatggactagaagttatttctctacgttactttaatcctgtcggagcacattcctcaggtttgattggagaagaccccaatgcaataccaaataatcttgtcccttatcttacaaatgtggcaattggaaagttagatgcgttgcatatattcggtactgattatcccacacatgatggaacaggaattcgagattttatccatgttatggatttagctgaaggtcatctcgcggccgttaatacgcttcctaaaatggatacttacactgcttacaacttaggtactggaaaagggtattctgttcttgagctggtagaaacattcgaaagggtaactaataaacgagttaaaaaaatatttgcccctagaagaaagggtgatgttgcagagtgttggtctgattcacgcttggctttgaaagaattaggttggtctgctaagtattctttagaagatatgctcgaagattcctggcgttggcaggttaataatcctaatggttataaataa

SEQ ID NO: 164687 - DNA, 747 bp, Enterobacter cloacae
atgaaagagttagtatccattataatgcctagctataactcctctaagactatcatatcaagcattcaatctgtcttagctcaaaaatatgagaactgggagttgcttattactgatgactgttcatcagatgatactttagaaataattttaagtttttctaaaaaagatgaaagaataaaggtgttctcttttgataataattgtggcgctggggcggctagaaacaattctattgaaaaatcaaatgggcgttatattgcatttttagacagtgatgatatgtggcatgaagataaattaatgaagcaagttgattttatgttaactggccattatggtttgacttatactgcatatagcaaaattaatgtagacggacaagttaaaaagaaaattaaaccgccagcacaagttgattataatgagctattaaaatcaaatgtaattggctgtcttacagctatgtatgatgtgaaaatgttggggaaggtttatatgccattgatccgaaaaagacaggatatggcgctttggctaaatatactcaaaaaaattgattttgcttattgcttgaatgaaaatttagctttttatcgagagggtcactcaagtctttcgtctaacaaagtcaaagttcttaaatcccaatggtcattttaccgtgatcatttaaaattgagttttcccttggctctatattatttttttaactatatccatagagctttaattaaacatgcgtga

SEQ ID NO: 164688 - DNA, 1395 bp, Enterobacter cloacae
atgaacaataaaaaatggcttatcccggcaggaataatttcattggcatggttgccagttatttttgcaagcagatactacatggatgaccttggccgtagcgtcagggggtattacgattggtcaccaaatggaaggccttttgctgaggcaatattcagagctataactttaaataatggcatgtttgatatatcaccattgtatcaagtcatgtcattcttcattatgggtctatgctgtctattattgatcaaatctcttagattagagctttccacaaacaatctaataatttcatcattattatttttaatgccgttttatcttgagaacatatcgtacagatacgattctttgacaatggcattgtcttgtttaatggcgctgtgctcatatcatctcgcaagaaataaaactggatatttatggatgatacttagcttgacgctcggcgtcctttacctaagcacataccaaacattcatatctgtatttgtaattgtgtcattgctatctgttattaaaagcgataatttatgggaaggaatcaagcaagagattaagccaggagtatcttttactttatcgtatgtcatatactcaaaatttgtcgcacctctatacattacagggcaatacaatattacccatagtcaaatttcattcgacataaatctcttcagccaaaatctaaaggcggcctttgagtatataaagtcaattactggcaactatgagttgttggtgtttgcggcaaacactgtatttattgttgttttgttgttaattaatgcaggacgcaaaaataaagttaaatctgtttttgattttgcaattgtagctattgctgtatttgtgccggtattaatatacctacctctaaatcacccagtatttttcccaagggtcttcgttggatttggttgtgtcgtagcgaccgccgcattagttttaggtgctgaaaagtatgctttctcgcggtatttggttttaataaacctgattatggctttggttttatctttagcatacaacagagcatcagactccatgaatcagaatgaccaatcattagtatctgcaatccaacaaaagacttctcaaaatgacaccattggtgtgtttggaagtcaaaccagagatgcgataacgaaaaggttggcagagtctttccctataattaatgtcatgacaccattatatttaagtgagggtaattggtggggcaaacttttgcttaacaagcatggtatgaataatcatttcttaactaagaagtctgatctcgataatataaagcatattgcttgctctgtttcgcaagggaatgttggtgtttttaaaaaagacaattatctttacgtaatgcttgatggtgttaaatgtaattaa

SEQ ID NO: 164689 - DNA, 189 bp, Enterobacter cloacae
atgcggacgtatattgagcaggtattaatgctcccctggaacagttcttcaaaagcaattacaccattctggctgtccagaaacagcaccccaaaacaattctcgatcggcactggcaaagtgcagacgcaggaaggaacggaccatatccggactggtgaggtaatcagtgcctgggagtttggctga

SEQ ID NO: 164690 - DNA, 1806 bp, Enterobacter cloacae
atggatcatagtgtacacaacaagcttatctcttttatttggaacattgccgacgattgcttacgcgatgtgtacgttcgaggtaagtaccgcgatgtgattttacctatggtggttttgcgacgtttggatactttattagaaccaaccaaggaagctgtgttggcggaagttaagttccaaaaagaagaaatgcaggcaactgagctggatgatgaacccttaaaggcagcaagtggttatgtgttttataacacgtcaaagtggacactgaagtcgctgttcaacactgcaacaaacaaccagcaaatactcctagcaaactttgaagagtacttacttggctttagcgacaacgttaaagaaatcattgaatgctttaaccttaagtcacaaattcgccacatggcttcgaagcaagttctgttagatgtggttgaaaaatttgtctctccttatatcaatttaacgccagaagttgttgaagatcccgatggcaacaagatgccagccctctccaacttgggtatgggctatgtgttcgaagagctaatccgcaagtttaatgaagaaaacaatgaagaagccggtgaacactttacgcccagggaagtgatcgagctgatgacgcacttggtttttgacccagtcaaggaccaacttccactcaccatgactgtttacgacccggcctgtggtagtggcggtatgttgactgagtctcagaatttcattgaagagaagtatcctaatgacagccgggatatctatctgtacggcaaagaaattaacgacgaaacctacgcaatctgtaaatcagacatgatgattaaaggtaataaccctgaaaacatcaaagtaggctctacactatctacagacgagtttgcatccttgcggtttgactttatgttgtccaacccgccttacggaaaaagttgggcatcggagcaaaagtacatcaaagacggaagtgatgttattgaccctcgctttaaagtgagcctgaaagactattggggtagttttgaagtagtcgatgccacaccgcgctcaagtgatggccagttactgttcttaatggaaatggtcaacaagatgaaagatccccgcgtcagcccgcttggtagccggatcgcatctgttcacaatggctcatccttgtttacaggggatgcgggcggtggtgagagtaatattcgccggttcattatcgaaaacgatttgctggacgccatcgttcaattaccgaataacctgttctataacacaggaattactacctacatttgggttctcaataataataaacctgcctcacgtaagggcaaggtacaactgattgatgcgagcttattctgtcgtaaactgcgtaaaaacttaggcaataaaaactgcgaatttgcacctgagcatattgcagagatcaccgatacatacctttcctgcatagattttgaaagacagttagatacaaacaacgaccctattggtattgctagcaaggtatttagcaatgatgactttggttactataaagtcaccattgaacgtccagaccgacgtaaagcacgctttactcaggatgctattgcaccattgcgttttgatagacagcttggcgacgtcatgacgcacttgtacgccgaatatggtgatgatatctataaaaacacaggtttcggcagtgatcagaaaaagagtttcctgaaatccattgagaaagaaatcttagcctggtgtgaagagaacgaaatcagcttaaatgcaaaagccaggaccaaactacttgatgtcaagcactga

SEQ ID NO: 164691 - DNA, 2049 bp, Enterobacter cloacae
atgacaccaatttttcgcccgcagtgcccggactttttgttgcccttctacgacctcattgggaccgagttccctactgattcgctagattcaaaacgatcagtattcagaccagtagagcgccatttcaagagactccggaacattcttgtcgatacatttgaagctcgctgctgctactgcgaaatctatgcagaccaatcttcttctggcgtcatcgaaaggtttagacctagaggctcccccccagcaaacgaaacgaaaagacctcaaggctcctcgtactggcatcttcagtttgattggagaaatctctattgggcctgcgctacttgcaatcgctataaagccgaccggtttcctcttttcggtgaaccagcgccccctggattacggtacgatcagatcctcgaacatgaggagcccatccttcttgatccttgccatgacaaccctgatgaacatctacgcttcttggagaatggatttgtcgaagggctaactacccgtggcatggaaacaatccaacttctggatcttaatcggcgacagctaattatttctcgagaagagcaagtaaaacttttcgcaatcgctagctcacgagaaagagcagacaaatccacaggacatacagctcattgtgccgtttggcgacaaatgctccatcatggagttgctgttcggggagaaaccattcaccctgctatgccagtgaagattgaacagaaaattgatactgaagcaggcacgggcttcgaagcttatcgctcaaaatctcagtacatcagccgcattaagataaagaacttcggcccgatccatattctcgatcttgacttgagcctatccgagtcacctcaggcaccatgctttgcgctcttaggggagaacggcgtaggaaagagcaccgttttacgcgctctggcgctggcgttatcagggaaagcatattctaaaagattggggttaagcagcgccaagcttctctctgatggtgcttcggatggagaggttagagtgtccatcgtcggcggcgaagatgacatcatcatgaagcttcgacgcaaccgtgctatcgagttcaacaccgatacttcaaggtctttagtcttggcttacggcgcaacaaggttactgccaaaaggaaggcacaaagccaaagcaggtgaagctcatgcgaaaattgataatttgtttgaccccttcctgcctctgagcaaccccgctgagtggctttccacgttagaggaagggcgcttagcagaagtaaataatgtgctcgctagtctgatgcctcaagaccatcaagttacggttattctgactcctgaaactggtgcagtctctttgcaagtaggtaacgtgccaggtcgcaaatttgaccatctcagtgatggttatcagtcaatgcttggcatggcggtagacatcatgaaggtactttatcgctctggatcaacgatggagtccgccgaaggcgtagtgatcattgacgaactgggcaatcacttccatccggcatggcgacttcagtgcctatctgccctgcgcgcagcctttccgcgcgcgcaatttatttatagcacccatgacccactatgcttaagagggctacgcgcaggtgaagtgactgtattgaagcgagacaggcttgggcatatttatgctctagaggatcttccctctgtatctaggctcagagtcgaacaacttttatcttccgaacattttggcttacggagtacagccgatcctcagatggaagaggatattcatgagtacgaagtgctgctcggatcgccagaccgtacaaaagatgaagatgcaagacttgcagaattggtgcaacgtttgaccgatgaccgttatctgggcgcaactcgccgtgaacgtcttgcactacagcttctggatacttcaggcttggaagatgtgccggtacagccaagcatcagcgcacgcgaactatccgaaaaaactgtatctcggttgcgttttatcatgaatcaagtatcaccgcgtactgatactcaaggaaatcagtaa

SEQ ID NO: 164692 - DNA, 822 bp, Enterobacter cloacae
atgattaaagttgaacgccctataaatagtacgcctattggactggtcgccgaaggccgggcagaacgtcgggcaaatcgtcttgccatccttgcaggtcaaaagccaaactttacagcttattcaactcaagcggtcagagctcagctagctgcaatttttggccggaaatgcgtattctgtgaatcacttttggctggaacccagtctggtgatatagagcactaccgccccaaaggaagggtggtcatagacgctgcgccaccactcagaaccaaaatcagaaaagacggttattactggctagcagccagttggtccaatcttttaattgcatgcgctgactgtaaccgccccagaacacagcctgacttcgatggctcatcccgcgttatcggaaagtcgaattattttccgctagctgatgaagccacgcgagcatccggccctcgtgggttaaggaacgaatacccattattgctcaacccctgtattgatgacccagatgaacacttggttttcctcgacgatggcagggttgaaccggcactgataaatgggcaggaaagcagaaaaggaaaagcgagtatccaatatcttggcctggcgagagctgagctgttgcagatgcgcgctcgccatcggcgaaccgtgattgctgcgattcgacatactattgcggccctggaggagggacgtgatccaggaacagatcttgatgacctgctgacgttactttcctccaaagaagcatacgtagcctatacccgtacgttagttcgaactcatatgagtgcttacattgaagccttgggtctataa

SEQ ID NO: 164693 - DNA, 621 bp, Enterobacter cloacae
atgactaatagtaaatttggggaaatcaatacgggttatatgaatcgtattacggatatcatcaacttcgcgacaaaagcccatgccaggacatccgttttcatcttcgttctcagactacctgaacatcgtgatacgggagatagtatagcctgctcccctgatatgagtcctggattgatggagcgagtaattgcggcgctgagagcccgtatcgcagtccatcagaaacgacgtaaaagggaaggccatcaggtgtgtccaacggacctgcgacatgtctgggtgcgtgaggtgggaaccagcggcaaatctcattaccacatggcgatattcgtcaacaaagatacatttaatggattagggtattattctaaagaagaccataatctggggagttacatctgcgaggcttggcttagtgcgctggggctgctcgaattccctgagtacaggacgctggttgctttcaacaatgcgccgcactatctggagcgccttagggtggatcgctatggtcaacagatactgaacctcaggagccatctggaatactttgccaaagaatacaccaaggtatacacaaaagaagaacgctcatttgggggaagtatcagataa

SEQ ID NO: 164694 - DNA, 210 bp, Enterobacter cloacae
gtgaatacatcacctgctctgctgaacgaccagcttgtcgatatggcattcattaccacctataccgaaatgacagacaaatggttctacaaactcatcagtgaaggactcttccctaagccaatcaaactgggccgcagctcacgctggctaaagagcgaagtggaagcctgggtacagcagcgcatagcatactcccggggtagctga

SEQ ID NO: 164695 - DNA, 834 bp, Enterobacter cloacae
atggcgtataaatacaaagcaacgatgtactattctgatgaggagaccgaggcgtttcttcgtgacaaagcggtgaagtcgaatggaaaaaaaagtgcgtctcattatctttactctctggtcacaaaagagagagagaatctgatggctaataatgacatcaaaggtaaacccgttccggttcagctttttcccgaatatgttaattcaaaagaattcagtgtgaatggttcggttgagtttttcgggctgtctgatgtatatcaccctaataaaggagaaaattctctgatacggaaaaatcataaaactttgatggaaacaattgacgataaaatcattgaacacgttgctaatcattttagcaatcatggtcacgaagttaacgataagtcgtttcggattgtgcttaagacatatgtggtgtgttattactgtaatgtcagtattgtcccaggattgtacaccggaacgtttacagcaacgtgcaggttgattactgtcagcagaaatgaatgggacaaatgtggcgggatgctggatttcgaaaacttacgctatataaaatacgaggctatcgctaaaccagaaccaagaatacccagaggtctgtgtaaggtagctgaatcatcccggacagatacaaccggggcattttttataccggtattaactttaccaaaaaaattccctgagaagacgttacctgaatctgtgattatgaaaggggttgatatttcttttagtaaagaacgtctgaagtttaaagccatgaatgaaagccagaagaagaggcatctgatgaaacctcaacaccaggtaattgagttgtaa

SEQ ID NO: 164696 - DNA, 882 bp, Enterobacter cloacae
atgaacaatgaatcctctaaaataatgccactacagcagctcctttcgcggttgcctgctgatgcgacagaaaagatataccgtcgacttagcagtatcataagttatgaaccctgtatcggactgatgggaaaaagtggcgcagggaaatccagcctctgcaataccctgttcagtccacctcccgccagggttgatgccatcagcggctgcacccgcaccgttcagcgctatcgggtcactcacggcacacatacgctggccctggtagattttccgggtattggcgaaactccggagctggacagtctttaccgtcgcctgtatcaggcatggtccggcagactggacctgattgtctgggtactcaaagccgatgagcgggcctggaacgaggatatacgctgttaccgcgagttactcagcagcggagcagtaccggcacgctttcagtttgtcctcagccaggcagaaaaaatagagccctgccgggaatgggatgggctgaatcaccggccctcgcagcagcagcaacaaaacctgcaggccaaaacccgactggctgaaacccttttcgccaccgcccacccggtcattgccgtctctgctgcagagcactacaacctgcatcactgggtggaggccctgatactggcgttaccggtacacagcggcagcgctttttcccgacatcttcaccccgaacttcggaccgacacggtcagggagacagcgcgtgagggatttgtccgcgtgaccggggagatatttgatgaagcggtgaacgctctgaggacttccgggatgctggttcgctatctccaccagctccgccagcagttcctgtcggtcattcgtaccatctggcacctcctgttctga

SEQ ID NO: 164697 - DNA, 552 bp, Enterobacter cloacae
atgaaatcttatccgttgcttcgtgcagacctgttcgcctggtgcctagcggttgttctcccgctcctctggattgtcctgttcctaaattttccgcaggctatcgcacttgtcatttatacagtcattgccctggtctgggtgttactggaccgaataaacctgatgaagcagggaatcactccaccctcatggctgtggtttcctctgaattttgtttatcttcgccagcgcgaccagatgcacggcaaaccgtggcggcttctgcaggtctggttgctttgtacagtgctgtcattcgtggcgataaatcagtttaagaaaacctcgggtacggaaaatctggcgcagagtgcctgtgccgtggtgacaaaaattctgcataaagaggggagtgatgagcgctgtatccgtgtgacggatatgcatgaagaggtcagcggtcgtttctggcgggcgcaggcattgctgaataccggtgtaaaggagcccgtgaccattgaggtcaggggccgggatatttatgtcgttttacccgaaacgggagagtga

SEQ ID NO: 164698 - DNA, 627 bp, Enterobacter cloacae
atgaaaacggtaaacgttatcgcccggctgctgattgtcgtcgcggtgttatggattcaggtgagccgcgctgctgcctatgacattaaacccgttatcgtcacaggcgagatggcaggaaatgtgctggtcacgcatgaccgcatcatggatggcgtggatgaatttatcattagcgccacaaaaggtaaggaaacgcagaagtttattcttacctgcaacggcccggaaaagcgcctgaacattctctactggctgaaagatatcaccggcggcaaagcatcaggcgcaacgggtatgaccatccagtattacccggagagggaacataagatgaaggctcatgcggaacagccactgacactgttcgacagccagctctctccggatcttacacgcgcagcgtcacgtatgctggattataaaaagggaagctttgttttccatttatatgaaaatgacggcatatccgatcacggtccactggcatggagctggcaatatccggctccgaaactggccccggcgctcgctggcgcactggtatccgccagagccaataactgcagcctggcgcagggtgaaacccgtattgcctccctcgcgcgtctggccgaccatcagtaa

SEQ ID NO: 164699 - DNA, 255 bp, Enterobacter cloacae
atgccactgctgcctgataacacccgccaggctcccccatatccgaccgccctggagaacactcccggctgccgctccatctccgatgacaacctctgcgcctggtgctcacaccatctttatcgtcccggtgaacgcagcctgcgcagcttaagcatcccggagaggcactggccgtcacgctgtgatgaggatggctatgcgcagtcctgcccgtcactccggcttaaccagcttccccaacccgataaataa

SEQ ID NO: 164700 - DNA, 363 bp, Enterobacter cloacae
ttgtcgaataaaataccgtcagaaaaccacgatatcgctgaacccttctgggggcttaaacgtagtatcacgccctgttttggcgctcgcctggtgcaggagggcaaccggctgcactatctcgctgaccgtgccagtatcactgggcagtttagcgacgcggattttcgccatctcgaccaggcatttccggtactgctcaaacaactggagttaatgcttttttccggtgagctcagtccccgccatcagcattgtgtcacgttatacgcaaaagggctgacctgcgaggcggacagcctcggctcgcatggatacgtgtacgtggcgatttacccgacaccatctgaagcaaccgcgtaa

SEQ ID NO: 164701 - DNA, 321 bp, Enterobacter cloacae
atgcaaacccaaccactatcctccactcaggaggctttgccacgtccgatgtctgttaaaatctggcagcaacttcttatatatctgctggaacagcattacgacctttcgcttaacgacacacagtttggtgatggcaatgtgattcagcagcatattgacgccggtatatcactggcggacgccctcaattttctcgttgaaaaatttgaactggtgcgaattgatcgtcccggtttctccattcatcatcagtccccttttatcgtggtgattgatattctccgagccaggcgagcaacggggttaataaatacttga

SEQ ID NO: 164702 - DNA, 2061 bp, Enterobacter cloacae
atggttcaggattcctctgcattagcccctttctttcaatctcatattgcaaaaaataatcaatacagccccgactggggcaaacactatcgtcagcttgtagaacagatacaagccgaaaaacccaacttttctacggatacaattcgacagatttggtacgagcgcagcaatggcatctccagcctccgacagggtggtatgtcccagtttgaattcgaaacggcgcaaaaacagctgctcgctctcactcgcttgatggcagaagagtgtacgcaggagaattacgaccgggtgattaagcgccttattaaacttaaagcggacggaatattgaacaaggtgtactgggctctatgccatcgcgcctttgccactctctatccgtctaaaattacgaacgtcgtgaatatcagcaatttttttagcagttacaactattgcaataaccattttcaacttggcctttcagaggatcaggagtggttcgctcgcaatcttgatctcaagaaagcattgcaccgcgcactaggtgatgatgtcgatcctatcgagctgaatatgtcgctctggcatctctatacgcaggttattcagaagaacgatattggattaattggtaacgagactaacttgccggaagacgatcaagacgaggaagttaccaccccgcaactgccaaaaaatactatcctctatggtccgccaggtactggtaaaacttaccgcacaatcgatctggccgtacgtgcttgtgaaccggcagcctactcgcttcaagaaggcaaagaggagcacgaaaaacgccgtgagctgaaaaagatttatgaccggcttattgctgaaaagcgggtgcgctttatcaccttccatcagagttttggctatgaagagttcatcgaagggctaagagcagagactaccgaagacggcaatgtgcgctacgaaatcaaagcgggcatttttaagcaaatttgtgaagatgctgcttttggtcacgctggtgttcagcagaagcttgacgaggcacttgcccgccttcaagaacgtttatctgaaactggaagcattacccttgaaacactgcagggcaaagccttccaactggcttacaaaagccagaccaccttcggtattttcccttcgcaatcgaaaaaagaagatttagggcagggctacaatgcttaccttaagaatatcagtttggtctaccaaaaccctcaggcaaaggtacacaatccgtcatatgtacgtagcatccttaattacttgattaaacaggaaggtttgccttccaatccacaggaatcagtatctgaaaaacgacaaaattacgttctgattattgacgagattaaccgtggcaatatctccaaaatctttggtgaactgatcactctgattgaaacctcaaaacgattcggagaaccggaggcgcttagcgtcatgctgccttactcttctacctcattcagcgtcccgaacaatctttatttaatcggcacaatgaacaccgctgaccgttcgctcaccgcactggataccgccttgcgtcgccgatttgagtttgaagcgatgctgccggatatcacggttctgaaagatacggtcgttaaaggtattgatctgccacgactgttacagacacttaatgatcgtattcaggtgctgtacgacagagaacatactctgggccatgcttttttcattccggttgtacaggctaaagaggacgaagagctggccttcgaaaggctgaagcggattatgcgaaataaagtgttgcctctgctggaagagtacttctacaacgactggcaaaaaatccgcatggtgctgggcgacaatcagaaaagtgaaaacccgcacctacagttcgtatgtgaggtgaaagaccagaaacagtttgcggatctttttggcaatagcggaactgaagatctgcatgagatcggtgctagtttccatttggcctctgagagcgatgatgtctgggataatccgctcgcctggcaacaaatttatgcgccaaaaaatagtaaacctgggagcagggaatga

SEQ ID NO: 164703 - DNA, 1317 bp, Enterobacter cloacae
atgacattttgtcaaagctttaccatcttcgagtacggacttctgattgatgagaaagatggtggccgcataaataatgcggtcgttttgccctccaggctctttgagtggcttgaggaacggtgtctgaaagatgacgcggataacactcatcgtctgctaaccctgcgcagtcgggggagtgtaaaaactctgcaagtaaaaaattatgctggtgtcatttctcttccgggaaatgcgtttattgaagtgttgccaaaaacgggtcggcgtgatgagaacattgatattgcacgtcagcagcttttaatgatgctacgaacgttaaaatcttttcgccatattgccacttcagcatccagagttcgaacctcgaagatgccgctgatggatgtatttattcagcagtttatcgatagcgtacagcagattgtacgccagggtctaaagcgtgactatattcgtcagcaggacaatttaccctggatgaaaggaaagttacgggtctccgcacagttaagcaaaaactgtgtgcgtcgggatcgctttcaagttgagtttgacgattacagcgctgagcgtccagaaaaccggatactgagaacagctatcgataaaattcgccgtcagatcagcaatccgcagctactactacaagttaactctttacaggttcactttgatgatattgcgcctgttggtgattttcgcatcgccttcgaccaagtgtgtatcgaccggcatatgcgtcattatgaacttgccttggcgtgggcgcggctgattttgatggggcagtctcctcactgcatgcagggtgatgccaacgcaatttcactgcttttcccaatggaagctgtgtttgaatcttttgtgactgcatggatacgtcatcgttataacgataactggcatgtgaaggcacaggtggattcgcacaccttggttcgtctcaatggcaaaggagtatttaagcttaggcccgatatctatctacaacctcgtggggagtatggggagcaggcgatgatttgtgatgttaaatggaagatggtggagggcgaaaaggcgacactcgaacagtcgcaggctgacctttaccagatgttggcctacggtatgaactatcaggagggtataggggatatgctgctgatttatccttcacatgagggttttagtcagccgttaactcatccctatgaattcagccatcaaaaggaaaactcactgcgtttatgggttgtgccatttttcattggtgatagtctgcaaagttctggtctgcgtttccctgatgggaaaaacttgatataa

SEQ ID NO: 164704 - DNA, 765 bp, Enterobacter cloacae
atgcacgtcacccagcatccagcccagcagcgtggtcacaatgatagagaccagcaccgcagcatggatgttgcgcgatgccaggatcgcgatgataaagaagcccagcacgcccagcagcacgctgtgagaggtcagattaccaatgctcaccagcgtttccgggttcgccacgataacgccagcgtttttcagccccatcatgccgatgaacagaccgataccgctggtgatgcccacgcgcaggctcacgggaatgttcgcaatcatccagtagcgcacgcggaagatggtcagcagcagcaggccgaccgcgccccagaaaatagcgcccatcccaacctgccacggcaggcccatcgcctgaaccaccacgaacgcaaagaacgcattcagacccattgccggggccagcgccacgggcagattagcgaaaacgcccatcaggatgctgccaagggccgcgatcagacaggtggttacaaagacggcgctggtgtccatgccagctacgcccagaatttgcgggttaacgaaaacgatatagaccatcgtcaggaaggtagtaaaaccggcgatcacttcggtgcgtgccgttgtgccgtgctcgcgcagtttgaacacgcgctcaagcagcccctgaccagatgtctgggtagtgtgttgttgactcatcatcaatttccgaacaaggagggaaaattcgtcgctatcctataccaaaatgcgacaatagtggcggttacgggatacttttttcattga

SEQ ID NO: 164705 - DNA, 249 bp, Enterobacter cloacae
atgaaagagccagcaacggaagagatgctatccacatacagcgcctgcttcatgcgcgggaatttgcctttttcatctgccagacccgctttgtcggtcacgccaatcagcgtaccggaggagtcaaacaggttgaccagcatgaaggagaaaatcaccccggccagtcccaggttcagcgagcccgccagatcaacgtggccaatcacggtagagacgctcggtggcgcagagacgataccgttgtaa

SEQ ID NO: 164706 - DNA, 861 bp, Enterobacter cloacae
atgttatggagcagcaacgatgttacgcagcagggcagtcgccctaaaacaaagttagacatcatgagtgaaaaagtgcccgccgagatttcggtgcaactatcacaagcactcaacgtcatcgggcgccacttggagtcgacgttgctggccgtgcatttgtacggctccgcactggatggcggattgaaaccgtacagtgatattgatttgctggtgactgtagctgcaccgctcaatgatgccgtgcggcaagccctgctcgtcgatctcttggaggtttcagcttcccctggccaaaacaaggcactccgcgccttggaagtgaccatcgtcgtgcacagtgacatcgtaccttggcgttatccggccaggcgggaactgcagttcggagagtggcagcgcaaagacatccttgcgggcatcttcgagcccgccacaaccgattctgacttggcgattctgctaacaaaggcaaagcaacatagcgtcgtcttggcaggttcagcagcgaaggatctcttcagctcagtcccagaaagcgatctattcaaggcactggccgatactctgaagctatggaactcgccgccagattgggcgggcgatgagcggaatgtagtgcttactttgtctcgtatctggtacaccgcagcaaccggcaagatcgcgccaaaggatgttgctgccacttgggcaatggcacgcttgccagctcaacatcagcccatcctgttgaatgccaagcgggcttatcttgggcaagaagaagattatttgcccgctcgtgcggatcaggtggcggcgctcattaaattcgtgaagtatgaagcagttaaactgcttggtgccagccaatga

SEQ ID NO: 164707 - DNA, 738 bp, Enterobacter cloacae
atggggcgttattccctcgatcgtgaaggtttagtttatgcccattcagctaacgatggttttgaacagctagttgccgaaggagctttctcaacctttcctgccgacgaggatggcattatcccgttaactgaccaagaatggtttaaagatgatgcaaccaaccggttccgtgagtttgttcaggtggtttgtggtgaggaatacttacaagaaaatctcgattttgtcgccgaatcactatgcctaaacgccattaaaccgaaaaaatctgaatcagcgctggagacgatccgccgttacttatcgactcagttctataaagatcatctgaagacttacaaaaaacgacctatttattggctgtttagctcaggcaaacagaaggcttttgagtgcctggtttacctacaccgttacaacgagggcacgctttctcgtatgcgtactgagtatgtcaccccgttactaggcaaatacgatgcgtatgcagagcagcttgagaagcagattgaaacggcagactcgaccagtgaagcgaaccgcttcaagaaagagttggatgctttaatcaagaaacaggttgagctacgagagtttgatgacaagctaaaacactacgcagatatgcgtatttcactggatctggatgatggtgtgaaagtgaattacggcaagtttggtgatctgttggctgatgttaaggccattaccggttcggccccggaggttaactaa

SEQ ID NO: 164708 - DNA, 2658 bp, Enterobacter cloacae
atgcagattagcgaactggcacaaggtgtcgctgccaagctcgaacaaagccgtattgtgttttggtacgacccagagcaaagctttactgaagagcttgagcatttagctaattctttatcgcttgcaaaagaatcaagtgataaagcggcagatataactgctagggtactgccaaatgatttgaccatcctcaatatgggctatgagtctgtattggcagtgaaaaaacgcattgaagtagatgagcgtgaagctaaattccttatctattttccaagcgctgagccagagcctgaccgcgattggttgctagacgtgcgtttgtatagcgagcagttttttgctgatcacagctcaatgctgcttaatgagctgggtatcccgaaaatggcgctacgcacgcacattcgtaagcgccagagcttttttgccaataaacagcgcatagccggtttaaaaaagtgggtgactgagaacgaagacgaactgtcgttagacaggaagatgatggcagtggttgtaaaagctgattctgcgtctttgtcggacattctgcttgggttactacgcgaatatgcggcttatatcgaagatgaaagccttggccaacctttatggagccagctattaaagtttgatcttgagacctcactctgggcatatctgagtgagggttttggctatacagtcgaagagccaaccttctcagacttcgtgttgaaattgttctgtactgaattctggagccaaattgaaggcgttgaacgcgattggttgcttaacaatgttctaaaaagcgcttcaggccgggcaacagccttggcgtttatggtgagctggcgcgacagccgctccttcgccgcctactacgaaagcatctctaaggtacttagccaacagctggaaatttcgactcgtgctggccagtaccatccggttgagcttatcgaatgcgaaacgttcgaagctgtggagcaggccataatccgtggtttagttcgtgatttgctcgatagcagtaaagcgctagaccgggttcagtttgatacggtcttatcaagacgtcttgctagccactggacattgtcacgcaaagaatacttcgcaatttatgaagctatccgcaacgctgaagagttaatgcacttgcgaaatcgctatgtggacgggttccactttgataacgcgaaagcaatgtacgacgcctataccacagacatttatcgttttgaccaggcttaccgtttgttcaatgaacatgtgcactctgtattgagtaaaggtgcagacatactgcgtcagctcgacgacgaagtcgaaagcatttataccaactggtacttatatgagcttggccttgcctgggatcgtcacttggccaatgagaaattacttgaaaagtggcagatttctggcgtaccgcaccagtatgacttctatgaaaaagaagttcgcacacgactgagtctgaaacagacaaaacgagtgtttgtgatcatctctgatgccctgcgttttgaaattgcgaatgagcttggcgctatcattaacaacgagaagcgatttaaggctgaggtgtttacgcagttgggcgttttgccgagttatacccaacttgggatggcggcattattgcctcataaggcgctcagttaccagccagagcaaggcacggctgtttatgtggatggtatttcttcacagggtctagacaaccgcaacgccatcctacaaaaagtaggtggtatggcagtgagttctaaggaactgatgagctggagtaaccaggaggggcgtgacaaggttcgagacgtagaagtagtttatatctatcacgataccattgatgcgattggtgataaggctgcaactgaagagaaaacgtttgaagcctgtcgtagtgccattgaagagctaaaagatctcgttgggcgggtcatcaaccgtctaaacggcagccgagttgtgatcaccgctgaccatggcttcctcttccaacaaaaagcacttgtagcggctgacaaaacctcgttgaaaaccaaacctgctggcgcgatagaagccaagaaacgttatatcgttggtaataacttgccttcagatgaagcctgttggaaaggctcaataaacgatacggctcatggctctagtgataccgagttcctgcttccaaaagcggctcaacgcttccactttgttggtggtgccaagtttgtgcatggcggagcgatgctacaggaagtatgcgtcccggtactgcatgcgcgagagctgcaaaaagaacaagcagcaaaacatgagaaacaaccggtaggtgttgttgcagccactcagcccatcaaattagtaaacaatatcgacaaggtcagatttattcagacagaccctgtaggcgagcgttttgtcgcacggttgttggatgtctatatcgtcgatgcacaaggtaatgaagtatccagtcgtgaaacgattaactttgatagcgtgagtaaagttatggatgagcgtactcgcgaagctaggttaaagcttattggctctcagttcgacaggaacgctcaatacacattagttcttgagaatgcggaaatgagaacccgttatagccaatacgcggtaaccattgatttggcattccaagatgattttttctaa

SEQ ID NO: 164709 - DNA, 405 bp, Enterobacter cloacae
gtgattaaaaaagtcgttaagctaagtggcgaaaaactagatgaactgcttacccgctatgaatgcgaagcggacgacttacctgattttggctacttcccaagtggaaaaaaaggtgaatacattatttatgagagtaacagtgaacttcgtgactctgaatctgttccattgaaacaaagtatttaccaatacttcctagatgaagtaaaaccgcatgtggatgaagcctggattaatttggattccgttaaaattggctatgaaattagctttaacagatatttctatcatcacaagccactgcgaagcccagaagacgtagcaacagatataataaatctagaggaaaagtctgaggggttaattgccaagattttgggtctaaaagtggcagaagagtaa

SEQ ID NO: 164710 - DNA, 681 bp, Enterobacter cloacae
atggttaatttcgctttaatgccaaaatatgaagaatatgttaactcgggttatgaatgggttggtgaaatcccccgaagttgggaacttaccaaattaggttcctgtctatccccggtgtcaataaaaaattgccctgatcttccactgctgtcaataacgcgtgaattaggtgttattgaaagggatattgaagatcaagattctaatcacaacttcattccagacgacctaagcggctataaaaagctagaaaaaggacagtttggtatgaataaaatgaaagcttggcaaggctcatatggtgtctcaaagtatacaggcatagtgagtccagcttactttgtttttaactttaccaaagccatcaatccggagtttttcaattgggcaattagaagtaagttgtatgtttcatttttcggtagtgcttcagatggagtacgcattgggcagtgggatctctcaaaggacagaatgaaagcgattcctttcattctgccccccgaagaggaacaaatccaaattgcaaattttctcgtccaaaagacagagcaaatcgacgaagcgattgcccttaaagagcaacaaatcgaaaaaattaaagaatataaaacaactctgatcaatagcgttgtgacaggcaaaataaagattacgccagagatggtggagcgatag

SEQ ID NO: 164711 - DNA, 183 bp, Enterobacter cloacae
atgtttacggtgaattatcaaaccagtccaattaaagccatgaagcccagcgagcatggctttcggggctttaacgcacacaaacgctttaagaaatgtacagcacgccgacctgaaacactaagcaaagaactgcagatggtactaggagaagttggttatggtggtgcccgcgaaaattag

SEQ ID NO: 164712 - DNA, 2874 bp, Enterobacter cloacae
atgcaatatgcaattgatgagcattttttctggcaatttctagaaaagacacaggaagctgaactgactaaattacaaaaaaataatccagcagattggcagcgcaaattattggaaagatttgatcggctcatcaaaaagcacggtattttacacttacttaagaaaggattgaatgtagatgatgcccattttattttgctttatccggcaccactggcgagcagtagcgagaaggtaaagcagaactttgctggaaacgtttttagttgtactaggcaggtgcgttactcgatagcgaatcctttacaagaaatagacatggtgttgttcatcaacggtataccattgatcaccttggagttaaaaaacccctggacgggacaaacggctcgctaccatgggcaaaagcaatatcgtgacgatcgtgatgctactcagccattactgacctttagtcgttgtctggtgcatatggcagtggatacggatgaggtctacatgaccacgaagttggtgggaagcaatacatttttcttgccgttcaataaaggacacaaccttggccagggtaatcctcctaacccagctgggcataaaacggcatatctatggcaagagatattcaccaaagaaagcctagccaacatcattcagcattttgtccgtctggatggcacaagtaaagagtcattaccgaagcgaaccttgtttttccctcgataccaccaactagatgttgtcagaaaattggtcgatcatgctgctactcatggcgttggtcagacatatttaattcaacattcagctggttctggtaagtctaattcaattacttgggctgcctaccagcttattgagacctatccttctaccgaagccgtggcaggtggtaaaagtctggagcagcctttattcgactctgtgattgtcgtgactgacagacgactgttggataaacaattacgggataatattaaagagttctcagaagtaaagaatatcattgccccagcacacaagtcatctgagcttaagcaagcacttgaaaacggcaagaaaatcattattacgacgattcaaaaattcccgtttatcattgatggtattgccgacctgagtgataagcgtttcgccgtgatcatcgatgaggcacacagctctcagtctggttcagcgcatgacaatatgaaccgagcaatgggtaaagctgaagttgaagaggctgaggatgctcaggataaaattcttcaagcaatgaagtcgcgtaaaatgcgaggtaatgcatcgtatctggcgtttacggcaacaccgaaaaacagcacgctagaaaagtttggagagcgtcaggaagatggtgcatttaaacccttccatctttactcgatgaaacaagcgatagaagaaggttttattctggacgtacttgccaattatacgacttacaagagctattatgagattgagaaatcgatagctgacaacccagagttcgatactaaaaaagcccagaaaaaacttagagcctatgttgagcgcagtcagcagactattgatacgaaggcagagatcatgttggagcattttgtgcctcacgtggtaaatgcgaaaaagctcaaaggcaaaggaaagggaatggtagtaactcaaaatattgagactgccattcgttactacaaagccatcaaacgtatacttgaagagcaaagcaacccttttaaaattctgattgcattctcgggtacgaaagaagttgatggaattgagtacactgaagccgatatcaatggctttgctgaaactgatactaaagatatgttcgacactgatgaatatcgacttttggttgtcgccaacaaataccttaccggctttgaccagccaaagctttgtgctatgtatgtggataaaaagctagcgagcgtcttgtgtgtgcaagcattgtcgcgactcaatcgtagtgcacccaagttgggaaagaaaacagaagatttgtttgtactggatttcttcaattctgttgaagacattcagttagcatttgatccgttttatacagccacatctttgtcgcaagccactgatatcaacgtgctgcatgagttaaaagatgagatggatgatgtgggggtttatgagtggcatgaagttgaagagtttgtaattcgttactttaaaaatgaggatgcccagactcttagcccgataatcgatgttgcagcagctcgttttgactatgagttagaactcgaacctgaagctaaagttgatttcaaaattaaagccaaacaattcgtgaaaatctatgggcaaatggcctctatcatgccttatgagatggtgacttgggagaaactgttctggttcttgaaattcctcatacctaagctgaaagttgaagaccctgatgcagatgccattgatgagcttttagattctgttgatttgagttcctatgggctgcagcgtgtgaagctcaatcacacaatcaagttgagcgatgaggaagcggagcttgatccacaaaacccaaacccacgtggagcacatagcagtgaaaaggaaaaagatccattagacgaaataatccgcaccttcaatgagaggtggttccaggggtggagtgctacgcctgaagagcagaaggtgaagtttataaacattgctgagagcattcgtaatcaccctgattttgagactaagtatagaaataatcctgatccacataacagaaacttggcttttgaaaagatgctcaaagagattatgttgcaacgacgtaaggatgagctggagctttataagctgtttgcaggagactcagcattcaaagcatcctggacacaaagcatgcaacgaatgatcggtgagtaa

SEQ ID NO: 164713 - DNA, 249 bp, Enterobacter cloacae
gtgcccgataaagagcgcaaaacggcattcgatccgctgctgaagctgcatgcggctatcaaagcgcagtgcatggcgcacgggctgctggtctatccgatgggcggaaccattgatggccagcggggcgatcatattctgattgcgccgccgtttattgtcagccggtcagaactcgatttcgtggtggatacactgcacaaggtcatcagcgaagagacgcataaactgatgagacgtcagccatga

SEQ ID NO: 164714 - DNA, 552 bp, Enterobacter cloacae
atgaaccgtttacctgcactgtcagaacagcagtggagcgatgaacaacgccagcttgcggaggagattatcaacgggccgcgcggcgcgctgctgccgccgtttgaaccgttgttgcgcagcccggaactgatggcccatgcgcagcgaatgggggagtatctgcgctaccgtagcgcgctggggcagcggttgtcggaactggccatcctgctgaccgcgcgtcactggtcgcagccggttgaatgggccattcatgcgccaatagccagggaaaaagggatcccggcgcaggcggtgcaggcaatcaatgaacggcgtcaaccagaggcgctggcggctgatgaatgggtggtttaccatttttgccagcagctgcatcagcataaaaaagtcagcgatgatacctggcagcaggcaatcgatctctggggggaaaagggcgttgtcgatctgattggcgtcaacggttattacagctttctttcaatgatcatgaacggcgcgcagacgccagtacccgacaccagggattttattcttcccgcataa

SEQ ID NO: 164715 - DNA, 492 bp, Enterobacter cloacae
atgaacccattcaaaggccggcattttcagcgtgacatcattctgtgggccgtacgctggtactgcaaatacggcatcagttaccgtgagctgcaggagatgctggctgaacgcggagtgaatgtcgatcactccacgatttaccgctgggttcagcgttatgcgcctgaaatggaaaaacggctgcgctggtactggcgtaacccttccgatctttgcccgtggcacatggatgaaacctacgtgaaggtcaatggccgctgggcgtatctgtaccgggccgtcgacagccggggccgcactgtcgatttttatctctcctcccgtcgtaacagcaaagctgcataccggtttctgggtaaaatcctcaacaacgtgaagaagtggcagatcccgcgattcatcaacacggataaagcgcccgcctatggtcgcgcgctggcactgttgcaaatagtcggtggtgataaacttatcatccccttttgctga

SEQ ID NO: 164716 - DNA, 195 bp, Enterobacter cloacae; identical to SEQ ID NO: 36234

SEQ ID NO: 164717 - DNA, 561 bp, Enterobacter cloacae
ttgcacggtcagcgcatcggttacgtccgcgtcagcagcttcgaccagaacccagaacggcagctcgaacagatccaggtggataaagtgttcaccgacaaggcgtcgggcaaggacacacggcggcccgaactggaacggctgctcgccttcgtgcgcgaaggcgacacggtcgtggtgcacagcatggatcgtctggcgcgcaacctcgacgacctgcgccgcctggtgcagggcctcacccagcgcggcgtacgcatcgagttccttaaggagcatttgaccttcaccggcgaggactcgccgatggcgaacctgatgctgtcggtaatgggcgcgttcgccgagttcgaacgcgccttgatccgcgagcggcagcgcgagggcatcgcgctcgccaagcagcgcggggcctaccgtggcaggaagaaatccctgtcgtctgagcgtattgccgaactgcgccaacgtgtcgaggctggcgagcaaaagaccaagctggctcgtgaattcggaatcagtcgcgaaaccctgtatcaatacttgagaacggatcagtaa

SEQ ID NO: 164718 - DNA, 1167 bp, Enterobacter cloacae
atgaatgcagaactgaaagatttttcgaagaaaaactttccaaatagcaagtctgatctgtttgccatttttatggagcgagcatttaaattgctgtcgcaatatggatttaatgctcaaataaatatgcaatcttggatgtttttgtcgagttatgagcagctaagaagcaatttattggaagaccatacatttataactatggcgcacttaggcgctcgtgcctttagtcagattagtggtgaggtagttcaaacaaccgcttgggttattcaaaaagagcacattaagcaatatcaacctagtttttataggctagtcgaaggtaatgagcaagaaaaacaagatgctttgcttaacagagaaaatgaattttccgctacagttcaggaagactttgaaaagattgcaggaaatccgattgcttattgggttagcaaagaattgagatatacatttggtaaattcaatagtttttcacatttttcagacactcgtattggactaattacaggtgataacaatcgttatattcgacagtggcacgaaattacgcatgccaaattaggtctaaattttactagagactcatctaagaactccggctgtaaatggtttcctcagtcaaaaggaggggaatttcggaaatggtacgggaataatgacactgtcgttgattggtctaatgatgggtttgagcttcagacaagaatgcatgattctggcacaagaacactggcacataatttcaatttagataaaatttttgatcctgcaattacatggacaaagatatctggtggatctttttcagcccgttatcagcctatggggttcttatttaatgatgcttctgcaaacgctttccctaaaaatgaagatgactgttgggttctgcttgcatttttagcatctaagctacctgttgaaatgcttaaagcagtaaatcctactttaaacttcctaccaggtaatatttctatacttccaatttcaaatgaaataatgaccagtgaaggtatcaaaaatagaactaaaaagcttgtcgaaatggccaaggtagattgggactctcaagaaacctcgtgggacttttgtaaattgaattggggcattatttctgatacgccgagtttgttacgtgaatcggctttgttgaataaataa

SEQ ID NO: 164719 - DNA, 306 bp, Enterobacter cloacae
atgaatggtgcccagtttcagcgaaccggcggttcgcatcatctcatcccactgatcctcggctttcgacagatcggcacaaccacgtgccagttcgtccagtgcaccgtaatttgccgatttatccacccgccagaataccgcttcaccggcatcggcaagccggggggaaaactggtatcccagcagccagaagaggccaaaaataatgtcgctggtaccggctgtgtccgtcatgatctcaaccggattcagccctgtctgctgctccagaaggccttccagcacaaaaatggaatctcgtaa

SEQ ID NO: 164720 - DNA, 519 bp, Enterobacter cloacae
atgaaatggatgaacgcggttgtttgtgcggcactgctggccgtggccggtccggcattcagcgagggcgcgccagcggaatccccgcgggattatgcctatggcctgtcccttgatacctctgcctcttcgccgtggtatcgggtcatgctgccgctggcggtttatcagcagagcacatcgcccgatctgcgcgacgtgcgcttgtttaatcagtcgggcgagccggtaccgttcagcctggttaccacgacgcgtccgcagccggcaccgaccaccacggcgctgcgcctctttgcgcttaacgcctcgccgggcggagaagaggacagcggcgataaaattatgctacgggccagaaacggcgtggaaattgtgctggaagggcaacacgcggcggctgccggacagcactatctgctgaccctgccggaaaacgcgacggaggttccgctctctcagctccagcttttctgggacacgccgcagggctcgtggcaggggacggcatcggtctaa

SEQ ID NO: 164721 - DNA, 456 bp, Enterobacter cloacae
gtggcagctctatcgacagaggttaaagccttcatcgttcagtctctcgcatgctacgaaacaccagcaaaggtgatcgagcttgtaaaagagaatttcaaggtgaccgtcacccgccagcaggtgtcagcatatgacccggccaacgcgatggcgaagagcctgagtcagaaatgggtcgacttgttcaacgcgactcgcgcccggttccagaccgaattaagcgacatcccgatcgccaataaggcgtaccggcttcgcgtcctggatcgcatgatgaccaatgccgagaagatgcgaaacatggcattggctgcttctctgatggagcaggccgccaaagaggttggcgacgcttacagcaacaaacagaaggtcgagcacaccagcccggacggaaccatgactccgaagccgaccatcatccagctactccccgttgagccgaaagcatga

SEQ ID NO: 164722 - DNA, 177 bp, Enterobacter cloacae
atgattcttgaattgactggtcatgacggacaaagtgtttttatcaacagccagcatattgttcattttaagcaattaaatagctttacagagttgatgttgacagggggtaaacttgtcggtgtaagtgaaagtgctaatcagattatggcagccatcaacaacaacctaaattaa

SEQ ID NO: 164723 - DNA, 486 bp, Enterobacter cloacae
atgatcaccgagaaagataacgttttttattgtgactgcggattttcctttgagagagggcgcagcgggaatcatcaatgcggtgacggtcttcgcgtgaaacttaaattattccgaaccgcattcatggaatacagcgataagacagattgggtgcagaccgataaacgttttgacgttattaagccctggggtaagcaccgcgccgacgtgctgagggaatttattgaacatttggaatcaaagctggtagcagcagaaagtggattccccccgctcaccgttgagcgattaatacgcgagaaaggcgctcttgaaaagcgcgtagccgaactggaggcgcgggaagtgaggctgccgcagcgctttgaagttgaaatgtgtccaacgccatccccggatggggattggtattcacgcgaggatgtgttggcggcgttagcaactgctggtgtccgcgcttgcgaggagggggaacatggctga

SEQ ID NO: 164724 - DNA, 423 bp, Enterobacter cloacae
ttgcggccacacggtgttctcatttttaaatggaacgaaacgcagataccagttagccaggttctggcgctcacggatgtgaagccaatcatcggccagcgaaccgggaaaaatgacaaaacccactggatatccttcgtcaaagacggcgggtcgcagaataactttgacccgcaattgcagtacgccacaaaacgaattatcgagctggaaagcctgctgctggcggaggtgcctgaaaccgtatggcctgccgaggtcggtatggtatacagccagattgaaaatgccgggaacctcccggcgcaccaccagcgccgcctgcagcatcacatcaatcggatgtggctggaacgaatgccggtaccgtcaattgtcgctgctgcccgttcgctggccgccgccatggaggaatacgcgtga

SEQ ID NO: 164725 - DNA, 2085 bp, Enterobacter cloacae; identical to SEQ ID NO: 105639

SEQ ID NO: 164726 - DNA, 288 bp, Enterobacter cloacae
atgaaaaaccagaacgacttggtcccggtttcggtttcgcaatttggcgatacccatgaccatgaggcccgcgcagaggtaaagcgtcagaagaatatcagcgccaatctcgccaagcagcgtgatgccatgctgcaagccattcagcaaaccaaggattcactgcgcaaagctggggcttcacttccagcgcccgaggttgcagggactgtcgagggatcgcttatcaccgggctcagtattgctcttgcggttctggaagctaacaccgacgaatttttcaaatga

SEQ ID NO: 164727 - DNA, 489 bp, Enterobacter cloacae
atgagcaacatcgacaaacgcgcattacgtgaagagttatcgaacccggagatcggtagcaatgcccacctgcgaaagttagcgctggcgctgctggatgagctggaatccaaagacaacagaatcaatcgactcgaagccattgttgctgttgcagaacagcgcaacgccctgatgcgtgagtggaagcgcgctctgaaagtaccttgcgacctcgttgatgaccaggtgccagtagtaattcatggcatggttattcgccttgagaggctcaaagagaccgaagcgaagctggaagccgcagagaagcggattgctgatctggaggcgcgggaggtgaggctgccagaattatgcgtgggggttgttcaaggtggacatgcggtaatggtgccatatgcagcaggacactggtttaacaagacggcaattttggagatgcttaccgacgctggcattaacatcgccgcagccggtaaaggagagtga

SEQ ID NO: 164728 - DNA, 327 bp, Enterobacter cloacae; identical to SEQ ID NO: 119509

SEQ ID NO: 164729 - DNA, 237 bp, Enterobacter cloacae
atgtcagaaaaaaaactggctgttaaatggactgacagggaaattatggatgtttacataaaagcttttaaatccacattagagttgtttgacgagcttgtttcatgtgatctgttaactaaacgaaacgcttttggcaagttagaaataaatccaatattcgaaaatcattttgaatggatcatgtctgaagcttttgaactgatggcaactatttgccaaatgaatctcaaataa

SEQ ID NO: 164730 - DNA, 195 bp, Enterobacter cloacae
atgaaaatcggtgaacgggtgcgcaattcagtgcgcggccgtgaggcgatggcggggtgtcggggcgcagccctgaacggggtatttgtgatgccgccgcgtgcgcggtattacaaatgcacatcctgtccgggagcggacaccgggaaacagcaaaaaaaaccgggcgacacgcccggaactcaatcaagttag

SEQ ID NO: 164731 - DNA, 3597 bp, Enterobacter cloacae
atgtcttcaggcggcggcaaagcatcaacccccaaactcctcgacgataacctcaagtcaaagcaattttaccgggtactggatctcatcagcgaagggcctatctatgggcccgttgatcaggaacacctgtcatcattcaagctcaataagactcccgtaactgatgcgacaggcagtgtcagcgtaaatggtgtcagcgtcgcctggcgccccggatctgaaacgcaatcccccattaatggcttctctgctattgaagcgaccaccatcgtaaacaccgaagtaacctatgatactccgctggttcgcactataaccgatcaggacgttacccgggtgcggtttaacgttggtgtgaccggactggtcgagcaggacaccaaaggcaatcagaaaaacacgtccgtcactctggtgttggagagcagaactggcgcttcaggctgggttattgaaaagaccgtgaccatcaccgggaagatatcaggcgaatatcttgaggcccatctgattgatgctccggatatcaagccgtttgatattcgcgttcgccgcattacgcccgacagcagcagtgatttgctgtccaacggcactgtctggaatagctacagtgaaatcaccgatgacaacctaagctatccatattcagccatcgcaggcgccgttattgaccgcgaccagtacactgacactccaagccgcacctaccatcttcgcggactgattgtgtctgtaccagacaactatgatccgatagcacgcacctactccggtttatggctgggtggatttaagcaggcatggactaacaacccggcatggttgttcagagagctggcgaagaatacccgcttcggactggctaaacgtgccggatacatcgatgtggatgacggcgcgctgtatattctgtctcagtattgcgatcagcttgttgatgatgggtacggtggcaaagagccacgcatgacgcttaacgcttacatcacagagcaggccagcgcgcgtgacattctggacaagattgcaggcatgttccgtggcatagcgctgtgggacgggatgcgtctcaccgtcatgctggacgcgcctcaggacgcgatcgccaccatcactaacgctaacgtagttgacggggaattcaagcgcagctcggtgaagcgctctgagaaatacaatgcagtggtggtgtcatggaccgatccggataacgggtgggagcaggtcaaagaatacgtatccgatgatgacatgattgcgcgcggcaattacaacgagactacccttgaggctttcgggtgtacctcgcgcgggcaggcatggcgagcaggtaagtggctacttgaaacagcaaagcgtgagagcagccgattaactttccagatgccccgtgacgccatccatttcactcctggcgacatagttgaaatcatggacaacaactatgccggcgcacgcctcggcggcagaataatgtcgcattcaggcaataaaattaccgttgatgctgttgactcctcgcttatcggcggtggggataccatgtctatcatgggtagcaatggtaagttcgtgaagtacgttattgacggtgttgcaaacaacgtcgtgaccctgaagacgactccatcatgggtgcgggatggaacggtttttgccatttctaccagcagcgtctcgactcgtttattccgtatcctcagcgttgcggagaccgaaaataattccgtatacagcattacggcctcccagcacgatccaaataagcaggccattgttgatgagggggctgtttttgacattcccagcgatacccttaatggctaccgtgtgccaaacattgaaaatctgcgcatcattaacacaaattctgagaccattcaggtcacagcaacctgggaaacagctacaaccactaaaaagctgatgtttgaactgtacgtttacagtgctgatgggaaattagttgcgcagtatgagaccgatcagttccgatatgagttttatgggctggctgccggtagctacacgctgggtgttcgtggccgcaatgaaaacgggatgaaaggtgttgaaacgcagatcaacatgattatcggtgcgccacctgcaccatccagcattatctggacacctggcctgttttctgctgacctggttcccgttatgcgcattacagcaacgacagacacctcgtttgaattctggtactccggacaaaatcaggtcgtcaatccggcagacattgaagaccagactcagttccttgggcgctctaaccagtggacccttcacggcctacaagcagataaaacgtattacgtttatgtccgaactaggaatgctttcggggtatctgaattcgttgaggtgtcaggccaggcgtcatctgatatccctggaatgatagatctcattgatgagcagatacgcgagtcagacgcgtttaaaaatgttcaggagggtgttgatactaaccttgaaggtattctacaaaacgcattagcgaataatggtacagtagaacgtcaattccagcaattgggtgaagtaaatgctgagatattaacagttagaacaacaattgccacggtagacagtgctcttgctcagcttactactagtgtcaattctcagtttgatggagttaattctcaaattcttgaacaacaaacagctattagtgataacaagaaagctatcgcttcgctcaatacgtatgttcaggctcagtttggagacgtgacagcagcgattaaccagaagctagacgctgaggtgacaaacaacggtacagggaaagtatcatatactctgaacctttgtgttattcgcaatggtgtgaagtataataccggctttgggatgtcgcttgagcctgtaggtagttcttacagatccacggctgtatttgccgctaaccagttcggaatttactcgggaagcgatccaggaaactatcaattggctttcgttgtatataacggacaagtatttatgaacgatgcctttattcgcgatgctacaattaccaatgcgaagattggcaattacatacagtcgtcaacctgggacggaaccggaaacgttggctggcacattaataaatcaggatatgctgttttcaatgacgttacagtacgagggatggtttatgcctcaggtgggaaatttaccggaactatagaggcaacgtcatttgttggtgatgtcgccaacgttggtgtcggttcggatgctttactaagcggaactgctaatttagttaaaacgattacttatactgactcaggagcaagtagtctcagtaagaatgctattgtcgaggcaaccttttattcatcagcgaatgctaatacccgtatggatgtcattattgatattaatgggacatccaaaaccttttcaaatctgccagtgcaatccggcgcgtatgctaataatttttacacattgagatttggggtgaagggaataaatgcaagcacggtaacggcaacattaactatcgtcaatgctaactcagtaagcaaagtcatttactccccaagtttaacaataacaagaggtacggggtcgtttgttggctag

SEQ ID NO: 164732 - DNA, 243 bp, Enterobacter cloacae
atggctcgttttatcgcagttattcacggctggcatgttcacagtaaaggtttcaccgttcaccagctgacatcgcctgaccgggactcagcagagaaagacgcggcttatctatgtagccagcgccaaaagccattttgtgagtgtgattatgtggtggttgaagtcgccgatagcgaaacactgctcgaatcacgaaggctcacccttcgcgaacgactgacggggaggactaacccatga

SEQ ID NO: 164733 - DNA, 1020 bp, Enterobacter cloacae
atgaagaaatatgcgatttggaataacaagggcggcaccggtaagaccagcttgtcctttcaggccatttgcagatatgcagaaaccaatccgctcgagcgggttttagtaattgatgtttgccctcaagcaaacctttcagagctatttttgggagggctgattggtaatgggagcattaatctccttaccagacacgatttagcaagccgttgcactttaggcggttatttccagatgcgcttaccgacaccatatcagaagcctaatttcgactctcatgactacttaactcatccaaagtcatttaatgaccatataccgagtaacatttccttaatctgtggtgatccactgcttgagcttcaggcaaatgctatcaatacactggcaaaccaacaaatacccggaactaatgcttgggtaagtataattgattggataaatgatttaatagatggtatcagggacgaatatgatgttttgtttgtcgattgcaatccaagtttctcaatttacacccaaattgctctcgctgcgattgacaagcttattttgcccgttatggctgacgattcatctcggcgggctatacagaacgcattttctttgatctacggcttaaaactcccttccgacatctatgcctcatatgcctttgccaacaaacttaatgcagttgatagaccgctgccaaaggtgcatatgatcgcaaaaaacaggctaactcagtatatgggcccagcctctgcttatgcggccgttttgaattcaatcgacaatgacattcaacagttgttagtcagtcaccctcacatatttgattttaatgatgttgacgatgggatcgttaatatcaaagattttcaaacaacaggtgttgtggcatttgctaagggttgtccgttctccattctaccaactggaagtgtaagggttatgaaccgaagagttaaagttaatggtccatacaagcagtcatgcctagaggcgattgataaaatggtcgctaagctctga

SEQ ID NO: 164734 - DNA, 129 bp, Enterobacter cloacae
atgacagacctgaaagatataatcgcaaagcttttagaagacgcccgtcaccttaatgaaatcgctccgaatgctggcaccgcagcgcgtatcaaagaagccgaagaggctcttaaggctgcatcatga

SEQ ID NO: 164735 - DNA, 513 bp, Enterobacter cloacae
atgaacagcgtggtacgcaacatgatctactacagcctcggggcgtggtatggcgcagagctgatggcgtggatgaaaagcgtcaacctgcgccgcatctggctggcaaccggggctttcgccgccgtctccgtggtgctgtggtttgctaacgttccgctgctgctctcattgctgtcgattgtgctgatcatgaagctgttctacagccttgagcagcgctatgccgttcacccgaacaatctgctgaacgtgattggctcaaataccattgcgatttataccacccaccgcatcctgattgaggcctttagcctgttcctgattggcgaaatgaatgccgcctcgtggccggtctgggcagagctcaccctggtgctggtctacccgtttgccagcctgtttatctgtacccttgccgggctcggggtgcgtaagatctccaccgcgctgtttggggacgttttcttctctcctccgtctacgctgaccctgtcaccttcaacgcgttaa

SEQ ID NO: 164736 - DNA, 423 bp, Enterobacter cloacae
atgactgataaacgcatcgccagcgcaatcgacctggcattacagcaacacgatacgcctgttggcccactgttcgtagcagtacgccacggacgtataaaaaaatgcttcacgcgagatacggcgatccgctatctggcgttctttatgacttcagaagcattttatcgctccggcttcgagcagcggcacccggatgtgcaggcagtccacccactcaatccagagctgaattgttggcagcgtggcggcgtaaccaccgggtatttcatggcacaccagcgttgtgttcgccgtctgcgtcgcatcttggcgcgcaagcgagaaatggagaaatggtgtgagaaatgggacgcgatgcatgaccgattcgttaaagaggttgatgcactgcaggccatcaagccgaaaggagttcagtga

SEQ ID NO: 164737 - DNA, 1104 bp, Enterobacter cloacae
atggttgacttcttaaatctcaaaaaaataaataatcgtcaaaagaatgaactacttagtgctatcgagaaagtaattgattccggctggtacattatgggtgaggaacttaaggctttcgaggaagagttttcagaatattgtcaaactaactatgcacttggtgttgcgaatggtctggatgctctcactttagttcttagagcatggaaagagatggggaaattaaaaagtggcgatgaggttattgttcaaggtaacacttatattgcctctgtattggctattacagaaaatgatctcattcctgttttagttgagccagatgaacatactttcaatttaagcgcaaaagatattcgcgcagcaatttcagataaaacaagggccattttgcctgtgcatctctatggccaaatctctccaatgaaagaaattatggagattgctcgcgaaaacaatctactcgtgcttgaggactgtgctcaggctcacggcgctcaaattgatgggaaacgagctgggagctggggagatgctgctggtttcagtttttatccgggcaaaaatcttggagctctgggggatgcaggcgctatcacaacaaatgactcagaattatataatgttttaaaagcattaaggaattatggttctgagcagaaatatttgaatatataccaaggtgttaatagtcgtcttgatgaaatacaagctgctatcttacgtgtaaaattgaaaacgttggataatgatgtaaaaattcgacagggaattgcgcaacgttacctttcagaaataaaaaacccattggttgagttaccgtatattgaaaatatggaaaaccacgtatggcatttatttgttctgaaaactaatcagcgagaagaattacaacgctggcttaataaacataatattcaatcactcatccattatccgataccacctcataaacaaaatgcttataatgacatgaaggaactttccttaccgttaacagaaagtttacatgctaaagtgttatctattcccatggacccgacgatgtcagatgaagacattaatagcgtaattaatgccttaaatggttttgtcggatga

SEQ ID NO: 164738 - DNA, 408 bp, Enterobacter cloacae
atgaaaatagattttattcctcttcaggttcacggcgatgaaagaggcgcattagtatctctggaaagagaaaataatatcccctttgatataaggagagtgtattatatttttgatacaaaggaaggtgtaactcggggttttcatgcgcatcggaagctaaagcaagttgcaattgcagtcaagggaagttgtcgttttatacttgatgatggcaccgagcgtgtcagtattgtattagataatccgacgcagggccttcttatcgactcatttatttggcgagaaatgaccgattttacggaagattgtgttctgatggtaatcgcagatatggaatatgaagaatcagactacatcagagattattctgcatttaaaaatttagcacaacaacagcaggaatga

SEQ ID NO: 164739 - DNA, 2976 bp, Enterobacter cloacae
gtggtcaccgtcaggctgccgtcggcaagcgttgccgtactgctgtcggccacaaaggtggtgtccacagtctggctgttgccgttgacggtggccgtcactttgctcacgccggatttggtgttggtgagcgtcgtcgttgccacaccgctggcatccgtggtggcggaagcggtggtgatggtagccccgttggtggcggtaaaggtcaccgtcgcgtctttcaccaggttaccgttggcgtccgtcacgatagctttcaccgcgtcggtggccgtaccgttggctttcgcgttgtcagtggtcaccgtcaggctgccgtcggcaagcgttgccgtactgctgtcggccacaaaggtggtgtccacggtctggctggcaccgttcacggttgccgtcactttgctcacaccggatttggtgttggtcagcgtggtggtggcaataccgtccgcatcggtggtagctgaggcggtggtaatggtggccccgttggtggcggtaaaggtcactaccgcgtctttcaccgggttgccgttagcatcggtgacaatcgctttcaccgcatcagtagccgtgccgtccgctttcgcgttatcggtggtcaccgtcaggttaccggaactgatggtcgccgtactgctgtccgccacaaaagtggtgtccacagactggctgttgccgttcactttcgcggtcaccgcagaaacaccggctttggtgttcttcagcgtggtggtggcgataccgtcggcgtcggtggtcgcagactccgtggtaatcactgcgccgttggtggccgtgaaggtcactaccgcgtctttcaccgggttgccgttagcatcggtgacaatcgctttcaccgcatcagtagccgtgccgtccgctttcgcgttatcggtggtcaccgtcaggttaccggcgctgatggttgccgtgccgccgtcggccacaaaggtggtatcgacagtctggctgttgccgttcaccgtggcggtcactttcgccgtgccggccgtggtgttgctgagcgtggtggtggcgataccgtcaacgtccgtggtggcggaggcggtaatcaccgtggcgccgttggtggcggtaaaggtcaccgtcacgtctttcaccaggttacctttcgcgtcagtgacaatcgctttcaccgcgttggtgtcggacccgtccgctttcgcgccgtcggtggtcaccgtcaggttaccggaactgatggttgccgtgctgctgtccgccaggaaggtggtgtccaccgtctggctggcaccgttgacggtagccgtcactttggcaataccggatttgctgttggtcagcgtggtggtggcgataccgtccgtatccgtggtcgcggacgcggtggttaccgtcgcgccgttggtggcggtaaaggtcactgccacaccggaaaccaggttaccgttggcatccgtcacaatcgctttcaccgcgtcggtgtccgagccgtccgctttcgcgttgtcggtggtcaccgtcaggttaccgtcgctgatggtcgccgtgctgctgtcggccacaaaggtggtgtctacagactggctgttgccgttgatgctggcggtgactttcgccacaccggatttggtgttcgtcagggtggtggtggcgataccgtccgcatccgtggtggcggacgcggtggtcaccgtcgcaccgttggtggcggtaaaggtcactgccacgccggaaaccaggttgccgttaacatcggtgacaatcgctttcaccgcgttggtggccgtgccgttggctttcgcgttatcagtggtcaccgtcaggttaccgtcactgatggttgccgtgccgctgtccgccacaaaggtggtgtccacggtctggctggcaccgttgacgctggccgtcactttcgccacaccggctttggtgttgctcagcgtggtggtggcgataccgttaacgtccgtggtggcagaggccgtggtgatagtagccccgttagtggcggtaaaggtcaccgtcgcgtctttcaccaggttgcctttcgcgtcggtgacaatcgctttcaccgcgttggtggccgagccgtccgctttcgcgttatcggtggtcaccgtcaggttaccggaactgatacccgccgtgctgctgtcggccaggaaggtggtgtctaccgactggctgttgtcgttgaccgtggcggtcacgctggtaatcccggatttgctgttggtcagcgtcgtcgttgccacaccgtcagcgtccgtggtggcggaggcggtaatcaccgttgcgccgttggaggcagagaagctcacgctctgtccggcgagaacgttgccgttcgcatccgtgacaatcgctttcaccgcgttggtggcgctgccgtccgcttttgcgttgtcggtggtcaccgtcaggttaccggcagaaatcgtcgccgtgctgtcgtccgcgacaaaatgcgcgtccagcgactggctgctgccgcccgtggcattgctgacgctggcggttaccgcagagattccggctttcgtgctggtcagcgtggtagtggcgaccccgctctggtcggtggtggccttcgcgctggcaacgttcgcctcgttggtggcgctgaagctgaccaccacgccggcaagcggcaggccgttcgcgtcttttacggtcgccttcaccgcgttggtggcgctgccgttggctttcgcgttatccgtggtgaggacaaaatcgcccgcaccaatggtggcgctgctgtcatcctgggcgaagtgggtgtcgaccgatttgtcggtaccgttcaccgcggctttcaccggaaccacgcccgacatggtgctggtcaggtcggtgcctgcgataccgttttcatccgtgaccgcagacgccgtcaccatagtggccccgctgacggtgctggagaagctcaccgtggtgcccgaaacggtgttgccgtttttgtccgtgactttcgcctga

SEQ ID NO: 164740 - DNA, 894 bp, Enterobacter cloacae
gtggtacacattgctgccggtggtctgatacggcgggaaggtgatctccagcgtctgcttgttgacggcgacggcactgcccttcgccgcaaggatttcgctgtagtcccattcaatatgatcgacaccgtatttggccttgacggtggcgctgatgttacctttgtcactggctttgccttcgagaagcgccggcagggtcaggtggatcagatcctgttttttatactcaaggacgatttcgttgttacgatcgaccagatcaagacggctgcctgccagcgtgcggcgtgcggccaccagcgaatcgtcgatctgctggttccacggcagaccgagctcgtagttaaattcgagattaaagctggtgtcattctgcccgctctgcccctggcggtggtcaacacccaccgtcaccagcggcaccggcgtatagttcagacccagggtgaccgctttcggatcgctggaacggtcgtccttgctgaacagggcgacctcatcaccgcgatactgctcgtacaccagtttgccgccgagctgcggataagccggcagccagccttcggcgcggatgtcgaaaccgtcagccgggcgttcatcgtaatcggcgaagtcgcgggactggtgccagtccgtcaggccggtgtagctgttggcgccgagtttcaggtaatcggtccaggcttccagacccacgcccaggcggcggttattacccgtcacgtcgtcatcatagaagctgttgatgccgtacatccagttgccgtggaaggtacggaaaccgaggccggcattgagggtgttacgggaatccttgttccggtaaccaagctgcgtgaacagcaggttatcctgctgatcatagagcggcagcaggacgtcgagcgatga

SEQ ID NO: 164741 - DNA, 600 bp, Enterobacter cloacae
atggctaaagcaatattgaacaaaagcgggattgccacaaaggccggtgatattaccgtttataactatgacggcgtaacgcatgaatatcttacgtcatcagtcgagtttctggccttgggggttggtgttccagccaattcatgcactgacgcgccgggcgaaaccaaaggcggttttgcgctctgtcggactgcggatctaactgcctgggaatacgtcgcagatcaccgtggtgaaacggtatggaatacagaaaccggtgaaccggtgagtattactttaccgggtgattatccacaagggacaacaacgctggaacccgacacaccatacgataaatgggatggcgaaaaatgggtaacagatgatgctgtaaaaaaatcggctgatgttaaagcggcagatttgcagaaaaccacactaattcagagggccggtgaaaatattagtccactgcaggatgctgttgatctgggtatggcaaccgacgaagaaaagagccgctatgatgcctggcgaaaataccgcgtattgctgacgcgcgtggatacatcgctggcacctgatattagctggcctgaacctcccgaagattaa

SEQ ID NO: 164742 - DNA, 204 bp, Enterobacter cloacae
atgaaatatgtctacacgatcatggatagccgcgcgcagttcgatatagacagcgccgccattctggaatgctgcggcgataaacaaccctcctggcgcaatctgcgtagagactggggtgaccagggcgcagttctggtccgcttccgtctggttaacaacgatatggctaccggccctgaggttgtcggcgtcatcaactga

SEQ ID NO: 164743 - DNA, 1512 bp, Enterobacter cloacae
atgacatcaattatcgtaggtgggataaacaataatagctttaatattgccaaattttattgcgccagagcaaacaggattataccagcgctttccgttttatgtatcacccttcttatttttggttggtttaatctgactccatctgattacaaaatgctagcaaaacacgccgccagcagcataggtttcatatctaatattatttatatgggtgaaacagggtactttgatgcatcttcacatgaaaaatggttactgcatacttggtccctttctgttgaatggcaattttacatattttacccattattgataattcttctaaaaaaattcatctcccttgagtctataaaaaaaactatgatcttggcattcatagttagtttatcaatagcaatacattcatccctaaatcattccactattggttactactttctccctatgagagcatgggaaatgattttaggtggtatagcatatctgtatccactaaaagctactgataagaaaaaaacattaatatgttatacaggaatgattgccgtcattctatcatgctttgttttttctggggcgacagtttggcctggatattatactttacttccagtcggcggagcttatttaatcatcctagccaacattgataaaaacccgataactaaaaatgtagtttctcagtatttagggaaatggtcgtactcaatatatttatggcactggcctatagttgtttacctctatgtaaaccagctttctcaatattatatttatggaatagctatttctatacttcttggttgtattagctacttgctcgtcgagcggttaagttttgcgtcagttactaaactaacaaaattttacagggtaaaatctatttatattggcgctatagcatttattccagcattcgtagttttgaattcaaatggggcagattacagttttagatatggtgcatcttcagaaacaatggcgtttcttaatgaatatgaaacaaagcactattacttatcagatgcttattggttaaaatgcaatacatatggtgttctcactaaagataaaaaaatggacgttgcacctgagtgtatcactaagaatggtgacggtggggtatttttatggggggattctcacgccgaagcctggtctctcggtgttaggacactactaaatggcaggttcccgttttatcaaaaaacctctgctggatgctacccttcgttgaaagcatcaacagtacaaactggggacttcaaactcgcatgtgacaactctaataaagttgcactggaaagcatagctaaaataaaaccaaccgtagtaatcattgctcaacatgatcaccacgaacttactgattggaaagaaattgtttcaacacttaaaaattatggtgttaaaaatgtgatcataatgggtccattacctcaatgggatccttctctgccaaaaataatcatcaaatcaaaacactggaaaaaaatcaagattatataa

SEQ ID NO: 164744 - DNA, 975 bp, Enterobacter cloacae
atgaacagacgacaatttcttacattctctttaggtgttgccaccttagcggcatcgagaggggctttgtctgggaacagacctaatggaaacatatccctctggggtcactccttcttcggcaataaccagtctttttcttcaaaactcatatctgaaacggggtgtaaggttttcaactttggcctttccgggtcgacatctgaaagcatagctctaaggaatggcgcgtaccaaataagttacgcctctgaaaatggcattctgtctccaggcgagaaaaacaagctaactcccaatgtccctggcccgcttaggctgtggggaaacgctgcggctgattggattcatcttccttgcgcactcgctggcaaaggcggagttcttgactgggacgggaaggaggttaccttcaccccagatagtaaaggtgcatttgcttataaaaaccggccggcaccgttgaacgtgtatcctatgaccacagtttctacggataacgtacctgaaagattcagctacccagatcaccccaaatctatctatattttatggctcgggcgaaataactcgactcagccagatgagatcatgcgcgatgcaaaggccattgtgtctcgaatggaaaagggaaatgaccggttcgtcatccttccagagtttcctgcatcatacgaaccaaagggcactaaaggtgctgatgaaatcgcgcttatcaacaagctgtataagaaaacctacccagaaaattattgcgaaattgatggtgttgacctgcttcaaaacttcatgaaccatcacaacccacaaagccagcaagatatcacggatatcaaaaacggcgtaaccccatcatcgctcagacaagacgagctgcatccatctatcactaaaaatgatggagcattatatgcaggtacagaggttaatgctgtatttgttgcgaaatacctcaaacgtaaaggatggatttag

SEQ ID NO: 164745 - DNA, 252 bp, Enterobacter cloacae
atggactattcagaagtgttcttacgccagcatgatgagatgtgccaggtcgtgggcagtattgtgttttcacttgttgaggccggacacgattccaccagtgaaaatattgttgctgtgctgcgaaatggtattgccgaaagcgggaaatgggagccgaaccaggtcctttatcttggggtccgcttggaaaacggaaaatatcccacgctaagattgttttttgtacaaattgatgtcaacagcgcgtaa

SEQ ID NO: 164746 - DNA, 1857 bp, Enterobacter cloacae
atgagaaagtcacttttcaccctgctgatgtcgtttccgctcctggccggtgctgctaatccggcctttgatgcgggggcaagttttggcaaaggcagtgcatccagcgggacagacaccctgaaaaatcccggtacggtcaccagtgccattccgggctataccgcgaacccgccggagaaagggtattacggtggcgtgagtggcggggacggcgggctggccaacaaaggtcaggcggcccttcagggcaatgatgccgcgcagtcggttatctcgtccggtacgacaaacccggcgcccgccattgacccgaaggctccttttatcaccatcggcaagaatgcggagggcacggctgacgggatcatggatggcagcagccagcagtgtacacagacgaccgtgtcaaaatcgacgtttgataactattcctgtagcgccgatgtggctgtatcaaagacctgtacccgcgacacacaaattaccggccattatgagaatcaggtgtccacgaaaactgtggtcatctcgccggcgacgctggtctttacgaaaatcgatgacaacacgcttggatttgcgctgccgctggatgaaccggggggcaccatgctggaaggttcaatcaccacatcgcaaaaaagcagcgccggaaacccgttttttagctcgaaactgacgttctacggcacgtcgaagacgctgaaaaatgtgaataacacatttgatgtggatgtggcccagcaggttgtcccggctgacgggatgctgcgcgggacactgacaaatgatgtttctgactatatagaccagatgatgatgtcggtcatgtcgtcaaaataccccaacaatgatggcctcgccaaaatcacggcgacaatcaccatcgtgacaacggtgaaagtctgggtcccgtcgacgacgaccccgtcagtctgtccggacagcccgggtggaaagaaaaccggctcggtctgcactatcaaaggcggtgaccggcaggtggttgttgatggtgtcacgcagacggttcacagcgactgctggcagtacaccgatacgtacctggtcagcgagaacacgaccggcacctgtgcctcactgaccagcaacgctgcctgtaccaaagcgagtgaaacctgctctgagtacattgacggcacctgttctcataaagactacatctatcagtgccagacggtgcattcgtccacgggcctggtctgcggtggccagtatatctgtaagtcaggggactgcgacgacaccaacggggcgggggataacgggtttgacactgccgtggccaaactcgctggcctggcctctgctgctgaagacgtcagggaccagaactccaccattaacgtcagagcctttaccggtaaggcgatgagctgtcgtaaagctttcgcgggattctctaactgttgtaaggactctggctggggacaggacaccggattatcggcctgtaacgatgatgagatggccatcggcaaggcgaaagccaagaagattaccgtcagtgtgggtgaccgctgcgatcgtcaggttgccggcgtatgtctccagaccagccatgtttactgcgtctttgacggcaaactcgcccgcatcattcaggagcaggggcgtcgtgaccagctgggcgtgaagtttggcagcggcagcagtcctgactgccgggggatcacggtgccggaactgcagagcatcgacttcgacaaaatcaacttcgcggacttctacgaagatttgatgaacaaccagaaagtgcctgacaccagtacgcaggtgaaacaaatcaaggatcgtatcgccgcccaggtgaaccagcaggggggtaagtaa

SEQ ID NO: 164747 - DNA, 486 bp, Enterobacter cloacae
atgaaagaaggaatgcctgacccgggcgcagggctgcctgtcttaccgcaggcgcagcaggacctgatgaaccgcctccagggcaatatcgcggcgcagtccaccacgatgggtgacaaagacacgttcccggcaatctattttgtgagcctcggtataccacgtgaaggccttctgcccatgctgaaagatgcgcgccgatacaacattccgcccacgttacgcggtctggtcaataacgatatgcgccagacggcggcgctcatgtttgagctgaacaaggaagacaaggatgccggcgtgcaaatcgatccaaccctgttcagtcagtaccacatcaccacagtgccagccctggtggtgacctgcccgggccggtatgactttatcaggggcagtctgcccctgaaggaggcgctggaaaaagtggcggaaagcggtgactgtgccgcaacggcccgccagttactggaggctgcacgatga

SEQ ID NO: 164748 - DNA, 324 bp, Enterobacter cloacae
atgacacatcctgaatatatcgggccggtgacggttacccgtgaccgcaacggcttctggacgcacccccgctactttacgtcagccagtgatgaggccacccggactgaatttggtgactggatgcaccgtcacaacctgacctgtgccacccgctggatggaaaacgatgccccgcctcaggtgattgcagcctgggaaaagggcgcggcggatatcagtgcctggcaaccctcagcgcctgcgggcgatggctggtttatcggctccattcatgacacggaagacggcccggtctgtatctggttgcgggaggtgaaatga

SEQ ID NO: 164749 - DNA, 216 bp, Enterobacter cloacae
atgaaaaaagaccctgatgctgaaaagggccggaatgttacagccgttcgtcatgatgaaaaatcggcattacggctcaatgccattcttgcagagaatcccctttattatccctcgctcgtcttgcgggctggcctgctagcccttgaggacatgagcaaagaacaacggctaatgatcgtcatgaaagccgcgactaagcccgaaacacactga

SEQ ID NO: 164750 - DNA, 1035 bp, Enterobacter cloacae
atggcgctaatcagctgtttaacccgtccggacgggctgcagggtgtgttttcctgcctgagtatagggcaggggctcagtggctttctggtgttgattattttactggtcggctggctggtgatccaatacctggcagaggcgagacgtgtacggcggacccgggaagccagaccaggaatacccgtcccgccggcacaatttggtaatgcccgtcatgcatctgctgtgcatgactttgctaaccagaactattaccaggtgatgctcgccgagatggaaaaagcactgttttcggcaggttacgaactgacgcaggatgcatcacgctgcacacggctggcaaatgcagacagacgcgatatcagccgaaaagtgaccagcgttcgccaccgttatatgaccccccttctatcagaacaggcgatgaatgacagtattgatgacgctatgagaaatggctccgctgtggaatggctgaacatgcttatctggggcagtgagcgggaaggatggtatatcacccgcagtcaggatgaaaactccaccaggctgaccgactggcaaaaacagatgtggcccgtcaggcaggtgagcatcatcgtgacgtctgatacgttggtcatcacccgtgatctggttcgcggtctgaacgaggctgtgaaaaggatgagtcacacgccgtttcctgaaaacgacaatatgcctgaactcagcgatgtaccggtaacaagcccgggccttcaggtgacactggagcgtcagttgtgcactacgcctccggggttcttttctgaggttgctggccggaacgtaccggaggcgctgacgaggatgattgctgtaccacaggacgaagaaaagcgggttgtggcggtcttcgcgcagataacgtctccgcgctcaacagagatgttaaccctgtatctgaatgctgctgctgaacgcatttccgccggggaggctcatggcgcggactacgatgatgacaacggttatgcctttatcgtcacgcgtacccttaaacctcactga

SEQ ID NO: 164751 - DNA, 279 bp, Enterobacter cloacae
atgtcactgaaacacaatgccgcggtgcagtctgtacctcagcacatgacagaccacaatacggatactaaaggcaatgacaacgccgtgaatcaactctgtcagctgtaccctgaaatcgaatcgtggcaacccgagctgatcgccggtgcctggcatcactggtgtgcgcagaacagtctggtgtcggcggtaccagaacaacgtgatgaggcgtttcccctgtatctcgtcagtcttatccgtaacagaatggaggagatgaacgtatggcgctaa

SEQ ID NO: 164752 - DNA, 393 bp, Enterobacter cloacae
atgacagcaactacgttaggtgacctgtttcccactctccgtaacgcggtatccgcaccatgccatccccaaaaaaaggaccgaaaaacgccagcgaccgtgacccgcagcggaaccgctgaacggctcaaggcgctgtaccccgaaattgacggctggcatccggtactggtgactaaagcatggcttcactggtgcggacagaaccagctggatactcaggagccggaaacacgcgatgaaagattccctgacttcatcattcatcttctgatggagaacatgcgggcagaagacggtgcgaaacgtaaaaagggccagacgatgtcgctttctgagcgtctcgacaggttgttcgcaggcgaagggcaggagaacgcggaatgtcactga

SEQ ID NO: 164753 - DNA, 636 bp, Enterobacter cloacae
gtgaaaaaacgacttcagctgacggctctgatactgctgacgctctctgctgccagtggtgccaaagatctcgggacctggggcaacgtgttcgaacctgccgaacaggacatgctgacctttatccagaaccgcctgaagggaatggagcagagcggtgaacttgaccggttacgggaggaggcaaccgcgcgggtaaaagaacacgcggttcgcccgaccccggttgaaggactcagtaaggccgtgacctaccgcagcttcgtctgggacccgactttcaccgtaaaagagaccattaccgatatgcagggcaacgtgattgcccgtaagggtgacacggtcaacccgctggataaggtgcctttcagccaggtgctctatttcatcgacggtgatgacagggagcaggtgaactggatccggcagcaaatcgccgggcaaacagactttaaggtgatcctggtgaaaggcaacatcagggacagcagcaatgccctgaatgagcgtatctactttgaccagtctggcgtactgacccgtaagtttggttttgaacacatcccggcacggatttcgcgtgatggccgtgtgatgaaggtggaagaaattccggtatcaggagcaaaaaaatga

SEQ ID NO: 164754 - DNA, 414 bp, Enterobacter cloacae
atgagtgaacaaaacgaaaagccgtatgacggcgatgccgtccgggacggtgtgacgatggccagcaaaacatcccgctggcttaaaggggggctgctgggactggcgggactgctggccatgaccggcgtggcgtatgtgacggcgaaggccgtcaccccggaagttgtggtgtttgacatgaaagggacggttgacctcttcatgcagcagtcatcgcagttacagcttgatgagggcagggcgaaagccctgacggcccgcttcaacgcggcactgacgaccagtctgggcgaatggcaggcttcacataatgccatcatcctggtgaaaccggcagtgatgagccctcagcgtgatatcaccgatgaaatccgcgccgacattgcccggcgcacccaggggggcatgtga

SEQ ID NO: 164755 - DNA, 177 bp, Enterobacter cloacae
atgacggatttccgcaatgacaccaccgcccgggaagatgagggcgtggtcattgagcgtctacagggtgactggcacgttaacaggggtaatgagcaacacattattcgccagtcggaagatgagcggctgcgccgcctggagttgatccgggccgcagcggagggccgaaaatga

SEQ ID NO: 164756 - DNA, 462 bp, Enterobacter cloacae
atgaagaagccagacatggaaaaccgcattgttttactgagaggtattaagcaggactggaaagcctggtctgaaggaaagaggctggggtgtatcagcaagaagctcgccgggatactactggctgtggtggccgctatcttcgttaccatagtgctgaactatgagcttttgccttatagcctgtactcccttccacctttgagtgtgtttgccatttttctggtttccgaactgagtacgccaggcggctgggacgaggttatcgacaggaggcttcagtcatatgaaccgcgtgacagtgaagcctggaaagcactaagggccgctgttctggaaaaagggaagctggaacatgacgatgtcaggttatggcttgaagctgagtttaaagccaatgctgacctgctggacgtggctgaaacggctatgagatatggatttgtccggcgcgatgtataa

SEQ ID NO: 164757 - DNA, 246 bp, Enterobacter cloacae
atgaaatcacggaaaacactgcagtgggcaacaacccggtggaggccaggacttatattcgccggttcgtggtccattttgttctccacgcttttctccggttttatatgggtacagcttatcggcatgttcctttttctggcaggccttcttttcctggccgagtcaatacctggcggcatggtgtggcgtgagctgcactcgccaacccaggacacaacacctgaagaaaaggagagaaaatga

SEQ ID NO: 164758 - DNA, 582 bp, Enterobacter cloacae
atgaaactgaaaatcaaaggggaacgcgataaacaactcagctatgcgtttattggccttacaggattaaccctgattctgggagtgggtaacgttttaaccggttcgctggcatggcattttgccaccacccagaaaaccattaccaccccaatgacgtataaccgtccgttcgcttctgatgcagtcagcgcagacgcaaccggcatgacacagttcgccacttcctttatttactggcgactgaatatcaccccggaaaacatcgacaataaccagaaaatgattcttgggtacgtcccctctgctgagcgggatgtgctcaagaaagccctggatattgaagctgaacgcatcaagaaaggagggattaccacccagttcgacacgaaagaaatccgggtcaccaatgatggctccgtggaattcagcggcactttgaaatcctccaccaccaacggcgcaatcaccaccttcctgaagcccgaagaaaaaatctaccgactgaaactgagttatgtgaatggcgtgattaacctccacagcttcgaggaactccagccggtaaccaccaccaactaa

SEQ ID NO: 164759 - DNA, 135 bp, Enterobacter cloacae
atgaagctacagcttttcagcaccgggaaagaacacccgccacaggcccatccattgtttgccgatctggccagctgcggttttcccagccctgccgctgactatgtcgagtccgtgcgacgtgaagtcgcctga

SEQ ID NO: 164760 - DNA, 1020 bp, Enterobacter cloacae
atggggtgtagattgtctgttaacagatttgatgccattgatggcactcgtgggatattggcgggtatggtcatgctcagccatatgtttggcagctttatgggttggccgcaagtcagaccatttagcggtgcctatctgtgtgtggtatattttttcatcatgagtggctttgttctaacctatgcccacgcatcaggaaactttttcaaatacgttcttacacgatttgcccgattatggccgcttcattttctgtcgacgatgctgatggtagccatttattactataatgcgcaccatggcggctacgtttccagcccggatgttttttctattagcgtgatattaaaaaatatattatttcttcatggtctttattggcatgacttcaagttagtcaatgaaccatcgtggagtatcagtattgaattctgggtatcgcttttaattcctctgatctttacgcgattaggaaatatgactcgcgctgttgttgcaggattgttttttattttcctgtggcataaacatccatcagggatacccccatcaatgctgacagcaatgctgtcaatgctgattggttcattgtttttttctttatcacagacagagtattttaagtgtctgatgaaagaaaaatttatggcattttttattaccgctgcggctgtcgtatcgatcgttggcgtatatgctatgaaccatagccgactggattactttttatttattgcatttatcccgatgctatttatcgatcatcttccggataatcaactaataaagagagttttcactttaaatttattattatttctcggttatattagtttccctttatatttattgcatgagctggttatcgtatccggattcatttttgacgctgagaatgcctgggtatcgatatcattagcggcatttgcctcaatattcattgcctatatttatgcccgatttatcgattatcctctctatcgggcattaaagcgtcagattgccaaaataagttaa

SEQ ID NO: 164761 - DNA, 630 bp, Enterobacter cloacae
ttgtttgtgcttttcgtcaacaaagccgatcttgctaccggtattgtcactatcaacatcactaagctggctgaagaactcagtccacggaatgaagatggccagatcatccctgaaactgccgtgacggtatccagggtgtcgcgtctgatagacgaattggcgaggtttggcatagtccttgcgcctgaaactgagtgggattatgtgaacgggtgccgttttcctaagcatataatcattacagaagaaggctggcgtcttaccggtgtggatatggacaagctacgagccgagcaagaagaacgcctacgcgctattgaggacggcattctacaacccggtgaggctatgacagtaaaagaagcccgtaagcgctggtatgaacgttgccgccatcagacgatactcagccgccgtacacgcgctattgagggcaaacaacggcgtaagctggccgaattaccgttcgatgagcgaaagcgtcaggtggccgagcgtattttccgtgatatgaagggtgatatacaccatctaacccctcagcagtttgaaaaaatggtctggactcagctttaccagcttgaactggtaaatatggagcagccaggcacagccccgcctcactaa

SEQ ID NO: 164762 - DNA, 264 bp, Enterobacter cloacae
atggatgaacagtggggctacgtcggcgctaaatcacgcaagcgctggttgttttacgcgtatgacaggatacggaggacggttgtggcgcacgtattcggtgaacgcacgctggccacgctggagcgtcttccgggcctgctgtcggcctttgaggtcgtggtatggatgacggatgactggccgctttatgaatcacgcctgaagggagaactacatgacaaagtcattggacattatctgaacataaaacactaccagtaa

SEQ ID NO: 164763 - DNA, 615 bp, Enterobacter cloacae
atgggaatccgcccaccttaccgggcgccggtgccgtgtgggaatccgcccaccttgccgtgcgccgctgccgcgtgggaatcggcccaccttgccgcgcgccggtgctgtgtgggaatcagcccaccttaccgggcgccggtgctgtgtgggaatcagcccaccttgccgggcgccgctgccgcgtgggaatcggcccaccttgccgcgcgccgctgcagcgtgggaatcggcccaccttgccgcgcgccggtgccgtgtgggaatcagcccaccttaccgggcgccgctgcagcgtgggaatcggcccaccttgccgcgcgccggtgccgtgtgggaatcagcccaccttaccgggcgccggtgccgtgtgggaatcagcccaccttgccgggcgccggtgccgtgtgggaatcagcccaccttaccgggcgccggtgccgtgtgggaatcagcccaccttaccgggcgccggtgctgtgtggaaatccgcccatcttcatgacaaaaatttgtcaaatgacaggctcatgtgtgctgatttatgtcagacgggattttgcttatcaattattgagaacagaaattttcctgaatcatcaatactatacttag

SEQ ID NO: 164764 - DNA, 243 bp, Enterobacter cloacae
atgtttattgtggcactattcacaatagcaaagacttggaaccaacccaaatgtccattaatgatagactggattaagaataattggcacatatacaccatggaatactatgcagccataaaaaaggatgagttcatgtcctttgtagggacatggatgaagctggaaaccatcattctcagcaaactaacacaagaacagaaaaccaaacaccgcatgttctcactcataagtgggagttga

SEQ ID NO: 164765 - DNA, 171 bp, Enterobacter cloacae
atggttgtcccttatgagcgacatgcagcccatgcaacggagccagcgttatcccgaattccatcaatgtttgaatggtatcaccactcgacgtccaagcagccagttctgctcactatgagtctgtcatgtaaaccaaaacgtgacatcatagcaaccatggtgggttag

SEQ ID NO: 164766 - DNA, 126 bp, Enterobacter cloacae
atgaaacgtaatctgaatgacctcctttatttcattaccgtcgcccgcggagggagtataccccgtgcggaggcaaaccagggggcgcaaccggctctcagccaggcaatatcggtgtgggaataa

SEQ ID NO: 164767 - DNA, 294 bp, Enterobacter cloacae
atgctggagattgccgccagacgggcgaaatgtatcgatcagtcacaacagccgctggtaagacaattgagtttgatggactggtatattgcttatgaacttcaggtgaagctgcgtgccgggcaatcactggcggaggcccgcaatgaactgcacagcaatattcaggatgtctttaacgagtttaatgtacaaatcatgtcgccaaactttgtgatgcaaccagaaggcacggtcgtcgtgacggaagataactggtatgcagcgccggcagagaataaacagcgtgagtga

SEQ ID NO: 164768 - DNA, 756 bp, Enterobacter cloacae
atgaaagtatcgtttcagattaagctgtttatttcgctggtcgcctttttctcagtactttttgcgttactgggcggatattattacgtcgatgtcggcaagcagctttatcaggaaatgagtgcacgtgccaaaatacaggcggaagagatcgcacttattccctcattacgtgatgaggttgaacaaaaagatatcaaagccatccatgattttatgcagaaaattgccgctcacagtgatgccagctttattgtgattggagataataaaggtctgcatctttttcattcggtctttgccgacagagtgggcaagacgcttatcggtggagacaatgaggaggtcctgcagggaaaaagcaccaccaccatccgcaaaggggggttgggtatttcgctgcgcagcaaagcgcccatcttcaacgatgcggggcaagtggtggggattgtctcggtgggttatctcaccagctaccttgataccattaccgtcagcaaagtggtcaatattctgctggccgccgtgctgctgttgattgcgctctttatcttctcctggttctttacccgcagtatcaagaagcagatcttctccctggagccacgagaaatcggcctgctggtgcgccagcaaaaggcgatgatggagtctatctatgaaggggtgatcgccattgatgatgagctgcgcattgaggtgatcaaccaggcggcgcgcaagctgcttggcctgagccagccagccagcccgtga

SEQ ID NO: 164769 - DNA, 1326 bp, Enterobacter cloacae
atggagtctagggtaaatgattataattctctgaatgaagaaataaattatctgaaaaggcttaaagaggatattgaaaaagacaaagaatcagctgagaaagcacttaaacttaaaaaagcaactttgaactctccacagcttctggaaaaaactgtagagatacaaacaatacaaaacctcaaaactctcttgaatggtggcagggcaagagaaagcacgccgaaaatatataaaacaaagataaatccatcaactatcgaactgaataaagaaaacagaaaagaatacattaattacttagttgattcatttagcaacgataatggaaggaatttttcatttgatgaaatggcgaatttaattatatgcttgaatcaatcattcatgacaattttatcaggccctccgggaacaggaaaaacctccacggctattagattagctcaaaatatgggcttgactaatggtgagaatacatacaatactagtaactttattaatattccagtcggaagagcttgggtatcaagccgagacatcttaggattttataattccttaaaagacgtttaccagccagcccgtacaggtctttatgagtttttgaagagtgatcataatccagattatttgaaaataattctacttgatgaggccaacctgtctagcgtcgaacactattggtcagactttctaggtatgtgtgatcccgaaggaagaaatagaaaaattgattctggcattccatctgaagacgaaagatatattaccgtggctgatggtgtgcgttttatagcaactattaacaatgatgcgtcaactgaacgtttatcgccaaggttaatcgaccgggtacccgtaataggtttaaatcacaacgcagaatttaaatcgaacgttataagatctttagcatttgaaggcgctgtgaaaaacgaatggttggaaagttgttttgatgtgagcttatatgagtcttcttttacgacggaagaggagaacttacttgatgaaataatagaaatattaaaagctcctcttaccagaactacttctgttagagtcagtcaaagaaaatataatgcaatgaagaggtattgctatattgctaatgaaatcgaagggttacaagttcagcctctagattttgcaataaatcagcacgttttgccattgattgaggggtacggtgcaggtttcaaagaaagattgcacaatcttgagcaaaagcttgtggagtttgatcttcatatttctaaagcaacacttagaaatataataaataatggtgatatttatagcgaatcttactcttatttttag

SEQ ID NO: 164770 - DNA, 1185 bp, Enterobacter cloacae
atgaacaggttattggttataaaggaagaaaatcatacagttaaccctgatatggggcttgtgattcctgttgcttatcttgatgaaaatggaaattatgaaaaaattgatcctagcgattttcctaatggaggaatatttatttccaaaggatttttgaatataagccagcagtttggatatgatgaattatttattcttaatgaatattacgaaagcaatgatgatgactggaaaattaatacaagacatcaaaagcattttggacttggaagtaaagtagaaaggctcgataaaagctactttattccaattataaaatctgctctccccgatataaaaacaggtttccttggtcatgatattgacgcccctagcgctcaattctttattgagaatgagggctatgtatatggaccgtttaaagcctccaaacaagataacaattggcaattatctcctttatctacaccgtcacccttacagcttaaacaagaccatatagcaaggtttgatttaaaggaaattatagctaatgatttttcttatgagttaattattaaaggtgaagttagaaaatatattaaaaatttgaaagacctctccagtttattgtttgagcaaaaagattacatttcagatacaaggcttgtttcttacttcaccaaaaatggatttggaaatggattttcgaaaaataaatctcctttaggaaaaagtgaagcgcaaaagttgtcgcaagggattgatgagtatgttaagaagaataaagtattagagaatagcgagcgtcttaaaagacttaaggagctacttggagaatttttagattcaagtccattcggccaagagattgttcaagagtttttagcagaaagtagggatggcaggctttatttagatgattatttcagcaaaaataaagacctgctggttaagcaaaagtctaaagaactagaggaagttactcgagtacagaagagtaaattaaataaagagataagtgatttagaaaggctaataacaaataaaaaagcagaattagattctgaattaaaaaatgttgaatatgaaaaggtcagggctagagaagaacttgagagaataaaaaaacagtctgctgaagatgctcatgaccttctccttcaaaaacagcaggctttgacggaaaaaatgctgagttag

SEQ ID NO: 164771 - DNA, 243 bp, Enterobacter cloacae
atgaaatatttatggtcagttaaaaataatgcattttttccagtagtgttgaaaaacaactacattgatgcgggatgggacttatctgacgccacccccattaatgatcaaattgccgatgaatttatgagtaatcctccagccggaaagattcgtggtgccagcagtgatgggatgccgatttggttggatgtagatccggaaccgacaccccctgaaattaccctgttaccggaggagtag

SEQ ID NO: 164772 - DNA, 417 bp, Enterobacter cloacae
atgaaaatttattattccccctatgaggttggcttctttacctctgaaattgaagaagtatgtaagcgttcagggacgtggccggagaatctgacagaaattactgcggagcaacatgccgaatattcaggagcgccgccagccgggaaacggctgggaacagttgatggtgcacctggatgggttgactgtgctccactttcagaggaagagactacggctataaatgaaatgaagcgcactgatttacgcaatgcggcagatgctgaaatagcatggcggcaggatgctgttgatgcgggaatagccacggatgaagagactaccgcgcttgctgagtggaaaaaataccgggtcttgctgatgcgtgttgatacagcaaaacccgtatggcctactcctccggtaacagggtaa

SEQ ID NO: 164773 - DNA, 351 bp, Enterobacter cloacae
atggctattgaagacgctgcggcgactgttccattaagtcatggcgagcgacttgcgggacttaaccatataaacgacctaagagagaaagtattcggtctgaatatagagccagaattggagcgatttttaaaggatatgcgagatccaagggatgtaaataataaacagaatgtcagggttttggcggcaatgttatttgcagcaaatattccggctaggcgtcacaacataaccgtcagtgaaatgacggaagaggaaaagaaaaatttgaaagaaataataaacgcctttcgtgccgctgtaggtttgtttcctaaatggcctgcaattcctaaaaaacctgcctaa

SEQ ID NO: 164774 - DNA, 324 bp, Enterobacter cloacae
atgggtatcttttccatcgccagccagcacattcgcttcgccgttaagctggcgtgtgccattgtgctggcgctgtttgtcggcttccactttcagctggaaaccccccgctgggccgtactgacggcggcgattgtcgcggcagggcctgcctttgctgcgggcggggaaccttactccggggcgatccgctaccgtgggatgctgcgcatcatcgggacatttattggctgtttcgccgcactgaccatcatcatattgatgatccgcacgccgctgctgatgctgatggtgtgctgtatctgggcgggcttctgcacctag

SEQ ID NO: 164775 - DNA, 1260 bp, Enterobacter cloacae
atgaaagtaacatttccactacagattcaaacagcaaagaattacagcggtaaagtcacatccattaaaaagaaattaaatacttttactgatgactcttttttcaaaaatatgtatatgcactttcaaactattcgacaaccaaagacaggaattgtatctaatttcccttggtgttgctttcttgctttgaaatggaagctatctgagccaattcgtcataaatgcattgaaatggaaatgaaggattttattgatattgtcaataggatttataatttgcaaagtgaagttgaaggactttatgacaataataaaattttactcagcataagacgaatgatcgtaaatcagaaattgtatcaagttcccatgaaattggagcttaacacacttgcacggcaatactactggtatgctaattatggtggcggttattttcagcgcaacttcgaaaagttgtatggtctaactcttgaagaatattataaaataagcgcttactttgcattattatcttgtgtagaagataataaggaatctgtatatatcgcttcaaatgtctatataatacacctaataccttattttagcccagagacacttaaaaattatctaaatcttgtttcagtgaaatggtctgagcttagagcattcatggttcagttcagagatgaacagcaaaaagacatagaatattttcttgatactccaatgctgtccaaacccttcatacaaattgacgaaggtttggtagtgttgagcaaacatattttaagagcatcactctctggcctagttccttcattacttaagaaagatttggggtcggcttacaaggataagttcggaaaggctatggagaattacatagaaaccctcctaactgaagtctttccaaaagttaaaacagaaaggcaaattaaagagttatatcgaaaacatcaagtttctgaaaaaactaaggtcgtcgatttcatcctcgaagaagatgaagggaatgtttatatagactcaaaggcaattgagcccgataaaacggttaaatattcaaacactgctgttgtaattaaacagcgattaggtaatagttttatcaaaggagttttgcagggattggattgcgctcgaaccataaataaaatcaatggtaataaaaaatccaaaagagattctttaatcataatcactcatatggatcattatatatctacaggcaaaacgattgaggatatgcttgataattcatttttaagatga

SEQ ID NO: 164776 - DNA, 393 bp, Enterobacter cloacae
atgaaggttaccggcaaacaggagcggctgctacgccgcgcactcaacgagtggcaacaggaaggcacattaaccgctgacgaccatcagcggctggccggtacgcttcaacgcgtgaccatggactggcagcggctgagccgctatgccttctggacggcactcgcctgcgtcattatcgccatcggcagcctgttttcggacagcgaaatgatggcgcgcattatcgaattcttcgctttttcctcccttgcccgcatcgggctgccggcactgatggccgtgctgttttatctgtggggcttcagccgccagcggcgggagacgcagtggcattacagtaccgaagcgattttgttcctcggagtcttgtttaccgccatcgcgctctga

SEQ ID NO: 164777 - DNA, 450 bp, Enterobacter cloacae
atgagcaacatcgacaaacaggcgctgcgtggtttaagcgttgaatcccctttctatctggccgaatgctgcaactgtggtgaaatcatgccaagcagtaagttgcgcgaatcgcgaaattatccagatgatgacggagagtgccactgcccacattgcaatgcagatgattgcgacattgctgattctggtgctgttggctctgaaggggtcacagcttggaactatcagcagaaacgtatcgaggcgctgctggatgagctggaagcagcagagaagcggattgctgagctatcacaccacctgcaatgcgcgcacgcctttatcgaacatacagaggcgtttggctacgaagcctcaaacgggattctgtgctgtggtgatgcgcagtggaatattgatgcgtctaagtcggctctggccgcagccgataaaggagaggcatcatga

SEQ ID NO: 164778 - DNA, 303 bp, Enterobacter cloacae
gtgagcagaaaaatttacatcgctggcccaatgacaggatacaaggatttcaaccgtcctgcgtttaaggcgttcgcgctgaagttaagtcttgatgggaatgttgttctcaaccctgccgttttacctgatggcctggagcaacgcgaatacatggatatctgctgcgcaatgatccgctgcgctgatgcggttttcatgctgcgtggctgggaaaaatctgctggcgctgttgctgaacatgcgctggcaaagaaaattggtcttgagattatcaccgaatgccaggagtccgcccaatga

SEQ ID NO: 164779 - DNA, 249 bp, Enterobacter cloacae
atgaagaagctatcaaccgagcaggagaacgcggttcgtgacgttgcccgccaatgcaacgccgcgctcaagaaatccatcgccgagaagcgtgctgcaggctggaatacagtagtaacgccaatcctgaaggagtaccacgagaaggtgaaaccgatgggcgtgagccttgtgatgttcaatagcatcatcgggcgtcttaacgggcgctttggtcgctacaaaggccgaattggggaggagtcatga

SEQ ID NO: 164780 - DNA, 1296 bp, Enterobacter cloacae
atgtccgcaggaacactgactctgacaaataattcagccgcggtaaccggcagcggtaccgcctttaccaccgagctggccgtcggcgattttattgttgtgacggttggtggcatcccttatacgctcgccatcaaaacggtgaacagcaatacctccctgacgctggtcagtaactataccggaccaacgcagggcggcgctgcatggtatgccgtgccgcgcgttgcgatgaaccttgttactgctgcgctggtggcacaaagcgcagaagccctgcgcggcctgaactatgacaaacagaactggcagcgcattttcagcggaacgggtaatgtcacggtaactcttccagacggcagcagcttcaccggtcccgcctggagtggaataaccagttcgctcgccggaaagctggataaatcacagaatctgaatgatgttgcagacaaagcagcctctcgcacaaacctcggtttgggaagtagcgctacgcgcgatgcatacagctcttctgggaaaatgatatctgaaggggattttgggttaggaggtaagggcgttgttagaacctggactgatacgcaagttgttgggtatctgaggtctgccgcaagcgtaactgaattctggcgtaataatgcagatactggtcacacctgggctggtggcccctgcctttacacccagtcattcgatagctttttcaacatttgtgttgggcagagaggacaaggaatcaaaatatcctccggaaccactgatggtgcgagtctacaggtctatacgccttacactgataaaaacactaccaaatcctctgatggcacgctaaaagccgcttccccggtagcccgcatcgttaaatcacagacggataaccagcgaatggatctggacgaagagggctttatctggtgcggctgcggtacggcgaatgcagaagctgaaggaatcagcatttctcgtcttgatgtaggtgtttatacgcttaccggttcagcaggcctggcttcttctggctggcaactcttaccacctatggatcctggtggtatgggggagctaggtgtcgttgaggcagagcaagccgaaagcggcggcctgacgattcgactgtttaagcgcaaatacattctgaatgatgatggtgagatcgttaaaacaaaaggtctaccgatggacgtaccagacaacagctggatagacgtgcgccttgatatgccagatgacagcatttggaacatgcatgctaagtcttcccatgaagatcaaaacattatccagaataaataa

SEQ ID NO: 164781 - DNA, 1572 bp, Enterobacter cloacae
atgcgtcaagtaattacataccttcgtttcagcagtaagccacaagaacgtggtgactcaatacgccgccagaaaggtctatttgagagatggctgaaagataaccctgatgcaaaagttgtcgatgaattctcagatgaaggtgcatcggcatatcacggtcaccatctgaaaggcgattttggacgaatgcttcaaaacatacaggatggtaggtacctgtcagggcaaactgtcttacttgtcgaatcagaaacccgtcttaaccgacagaaagcacgtaataccgaaaaccttgtagacctcattacgggtaaaggtgttgatgtgatttgtctcgaatcaggcaaaatctacaccagcaccaatattgatgaccttgatacatctattcagttgaagatagccgcacacatcgcacatcagcaatcaaaagagaaatcaatcaaggtaagtgctgcatgggagcatagagcacagcttgcattagaaggcaaacagcaactgactaaaaatgtcccaggctggatagaccctgatactcgtaaacttaacgagcactcatcaaccgttgtgacaattttcgatttgctcctttctggtgaatctcttcacaacattgctcgttaccttcaggcaaacaacattaagtcattctctcgacgtgaaaaagcgaatggctttagtgttcactctgtccgtactatcttacgctctgagtcaaccgttggaacactggcagcatccaagcgtaatgaccgccccgctatccccaactactatgaaccagcgattgatgttgccacctttaataaggctcaggagattctgtcaaaaaatcgtgttggcagagcgccagccagtgacaatccaattactatcaacctatttaagggaatcattcgctgtcaatgcggtgcctcagtacatcccacaggcgtcaaggcaacctatcaaggtgtttaccgttgtaacaatgtccctgatggacgttgcaatgttcctaccattaaacgtaaaccctttgataaatggatgcttgataacatcattggcttccttgagaggtctgatggtaacaacaccgataaacgaaaagctgagattgagtatcaaatctcgttagtcaccagcaagctaaaaaaggcaaccaccctgcttctcgaactggatgatgttacagagcttaaagaacaggtcaaagaactgaacattcaacgcagtaacttgcaaagtgaattagacgaactcaatcagcgtgaaacattgagtgataagccgttgcatcacctgtcggagattgacttgacgaccaaagcaggaagagtagaagcacaactcatactgtcaaaattcgtacaatccatcgagctgcaacgtgaaatgataataatcacgcttcgaaacggtactgtaattggaaaatcaagagacttatctcctgtgttatcacgggatttaatgaagcaagttgtatcatccccgtcacctacagacatcgacatgttcagcgtcattacatctgatgaagagttcaggaagtcaggtaagcaggttacaaaacgttcttag

SEQ ID NO: 164782 - DNA, 498 bp, Enterobacter cloacae
atggcaagttacgttgattcaaacttatccaaaggtgaagaggttatcgtgagggcacatgtctcatggttatcattccttatcactattattgtttcgctgttctttcttttcattgcttttggtggattcatggcatcggcagcagcgaaagaaggggaagctcatccaaatagcgtaggctgggtctttctgtttctggggctgtttatgctgcttaatgttgttgttaaggttgcaacaacggaactcgcgctgaccaacaaacgtatcattgcaaaattcggttttattcgtcgctcaaccatcgagttgcgccttgaaaaggttgaaagtatcagtatcaatcaagggcttttagggcgcttgctgggttacggtacggttgttgtaaaaggaactggcggtacaggtacgccgattccatcaattaagaaacctcttgatttccgcagaattgttaacaatttcttagaagaaaaagaaacctcggcttaa

SEQ ID NO: 164783 - DNA, 363 bp, Enterobacter cloacae
atgaacaaagttaaagctgttgttttcggagttatgatgtccgctgctataactgctaatgctgcaaacgaaactaccactgtaacaggtgaagtcggtaaagatgtcaaactatcccttgagtccaatccgactacgggttacggctggatgattaaagaccttcctgacggattgattttcgtttctggaggatatgagcagtcaaaagactgtccgaaaggtgccgtagggtgcggtggtgaagaagtgcttcacttcattggtgaaaagaaaggggaaagcacactaaaactcatttacggtcagtcatttaacaaatcaagctggcaggaaaaagaagttaaagttgtgattaagtaa

SEQ ID NO: 164784 - DNA, 1152 bp, Enterobacter cloacae
atgcagttgaattttatattgaataagtttggggtttctatgactataaattctgcaaattctgcaaattctgcaaattctgcaaattctgcaaattctgcaaattccgtgcgcgatttgtgtgatgaatttaattttggcagctcacctcgctatatttttgggcggacaccttacgctgcggatatcatcaaaaaatgtaaaccacatgctgttgtagatgatttcacgaacgaaagtcatttcaacggcatcccagtcattaagcttaatgagattgatgttaatggtattgtagtatcagccattgtagatggaaggccggtgaccgcaactcgcaccttaaaaaataaaggtattcgataccttgattattttagcttcaagaagtacgcaccttacaaattaaaggaacctccccatgtatcgtcttctgctttctcggctgattactatataaataaaaaaaaatatgacgcaatctatcaactacttgccgatgaaacctcaaaagaaaccttctccagattggttaaatttcgcctgactgaagatttgactccaatggagtattttactttccgtcctgcggatatttactttgaatcctttgtaaatttcagggttgaagggacggtttttgttgatgtcggctgcttcgatggaagtaatgtcattgattttattaggctttgccctgattatcgtagcgtacatcttttcgagcctgaaccaaaacaaatggaacaaatcaagaagagtttaggcgattttcgcaatattacatatcatcaatatggtgcgtcaaatcgagcaggggcattaagatttacctcttcaggaatttggtcgcatatggatgatgctggcgaaacggaagttaaaatcaacaccattgatgctctagttaacgaaaaaatcaccttcatgaaaatggatattgaagggcacgagtgttccgcattagaaggtgcacgacagcatataataaatgaccatccgtcactggccatatgcgcctaccatctcgtagatgatttctggaagatacctgaactcgtgttatcgtttcgccccgattaccacgtttatatgcgtcattatacggaaggcgtactggaaaccgtcttctattttgtgcccgtccattaa

SEQ ID NO: 164785 - DNA, 1278 bp, Enterobacter cloacae
atgatgaagttaaatatacttgtttttccatgcggttcagaaaatgcaggtgaaatcgctcattcattacgctattcattacatgtcaatcgattgattggcgcgtcaagcgtagaagatcatggacgattccattttcaagattatattagtgatgttccgttcattcattcacccgattatgaagattattttgtcgatctgatagctacatataatattgatgttgtatttgcaacacacgattctgtagttgaaaaacttgctaagcttgcgcacaagcatggcttccatttggtaaatggtgacctaagaacaacgcatatagccagatataaaagtctaacttaccgtttatttgccaacatgccgtgggtaccagaaatatgggggatagatgagcaacccactcgctggccagtagtggtaaaacctgattgtggtcagggcggaaatggtgtagcaatagctgaaaatccttcgcagttggcaaaacatgttgaggatatagaattaccggttgtcgtggaatatcttcccggaaaagagttaactgtagactgctttactgatcgtaacgggaagatagtgtgggtcagtccgcgaactcgcgaacgtgtgcgggctggaattgccatgcgctcttgtcttcttccacccaatgaggagataactaatatcgcagagcatattaaccgtaaccttacacttcgtggcccttggtttttccagttaaaagaagatattgcgcagaaatggaaattacttgagatctcatgtcgtatagcgggaacgatggtagcacagcgtgcgcatggtattaatttaccactcatgacacttcatgattttatgggcagagatgttgttccactgccggaacctcacgtcaagctcatcgacaggtcaatcaaaacacgtgcccataccgaattatattggcaacgggtttatgttgatatggacgatacattaattatcaatggcttagcgaatccctctctacttgcattcatctatcagtgccgtatgaaaggaaatactatccatcttataacgcggcatgacgccgatcctgttaaaaccttagataatgcagcaatttctccatacttatttgatgagattattcatgtaaagtctagcgaaaaaaaatcgcagtatattactgggccagctgtctttatcgataattactttccggaacgagtagatgttgcgcagtataaggatgtcctcgtgatggatgttgatgcagttgaattttatattgaataa

SEQ ID NO: 164786 - DNA, 858 bp, Enterobacter cloacae
atgtggcttccacatctgatctgtcacagcgtgatagatgccgttcgtctggcaaatgtggaaatcgtgtggtatcaccttgatgataaattttttgctatactcccacccgagcttaatgaaaaagaatatattttttatgttgattatctagggcaaggagcattgcaaaaaaatgagcttttacgacgctatccgaagggacaaattatttttgacaattcacaggctttttatgcaccaccattgcctgttttagcgacgctgtactcaccacgtaaattttttggtttaccggatggcggcttgctaataacttcattacctttaccgccgccagaattgcacgatagcgcatcacttaaccgcgtttcacatctgttgctgcaacacaactttgatattcgtgaaggatatagtgcttttcagcaggcggagttaactttggaaaatactccagtcagcggtatgtcacggttgagtgaaaggttactattgtccattgattattttagtatcaagcaaaagcgtgagcgtaacttcaaattactacatgaaagacttaagggtattaactcattcccgctaaatttagattctccgcaaggaccgctttgctatccactatacttcccagctcgaagtttgcattcagttttaataaaaaatggtgtgtttgttccaacttactggaaggaagtactacaacatgtgccagccgagtctgtagaagctaaatttgtaaaatatatggttgctatcccttgtgatcaacgttacagccagggagacatagagcggctaagcaaagtaataatgaaagtcgtcactgatgacagtattgagataaataaatga

SEQ ID NO: 164787 - DNA, 693 bp, Enterobacter cloacae
atgagtattgctattatgcagccgtatttatttccatggattggttatttccaattggtgtggcagtctgatgtctttgtactctatgatgatgctagatatatcaagcaaggttatataaaccgtaatagtattttatcctgtggaaaggctcaacgttttacgctacccgtcccaggtgcatcaataaacaaaaacattagtgaattggcctttagtaagcaggtcgataaaatactcaaatcagtaaagcaaaattaccagaaggcccctcattttgaagaggtgttcgccctaattgagggggttctgacctgctctgaacgtgatattacaacctgctgtagcaaagctatttcagacatctttttttatctcggtgaggaaaaaaaactgatgcgttcctcatcgcttaattataagcgcagtgaaaatgcagaaaataaagtcataagtatatgtcagacactgggggctacaaagtatgttaacagtataggtgggcgtcagctttatgatgctcaaaattttgccagagcaggcattgagttaaaatttctacagactcagtcgcattactaccatcagggtcaggatggttttataccaaatctctccattatcgacgttcttatgcactgtgagcctataatggtaaagaaattgctcactaaatttgagcatgtgggctga

SEQ ID NO: 164788 - DNA, 1140 bp, Enterobacter cloacae
atgggaaaggtatacgtaacaagtccgttgatgcccccactagaagagtttataccttatcttgaaaagatttgggagaacaaaacattaacgaatggtggcgtttttcatcagcaattagagaaagaactagctgattttctcggcgtaaagcatgtatgtctttttgccaatggcacgttggctttgctaacggccttacaggcattgagaataacaggtgaagtcattactacgccatattcgtttgttgcaacgtcccatgcacttttgtggaatggattgacaccggtatttgcggacattaacccccaaacatacaatataaatccagagcgtgtagaagaattaattacgcctaatacaaccgcgattcttcctgttcactgctatggtattccctgcgatgtcgataagattcaagaaatcgctgatatttatgggttgaaggtcatttatgatgcagctcatgctttcggtgtaaataaaggcgggacaagcatattgaattatggcgacctttctgtgctaagtttccatgcaactaaagtgtttaatacatttgaaggtggcgccatcatttgccacaatgaacgtacaaaacagcgcatagattatcttaaaaacttcggttttgctggcgagaccaccgtggtggctgcgggtataaatggcaagatgaatgaagtgcaagctgcttttggtctcttacaattgcagaatattgaaggtgcgctgaaaaaacgtcgcgagatagatgcgagataccggagtattcttaagaatattcccggcatatctttacttgaaatagcagagaatgttgaatggaattatgcttattttcccattaaaatagaggaggattatcccatcagtcgtgatgagctatattccattttgaaggaaaatgacattatgacacgtcgttatttctatccacttataagcaactttccaatgtatcgtggattgcctagtgcatctaaaactctgttgccgctggcaaataaggtcgcagatgaaattctttgcttgcctatttttcctcaattagaatatgatgagcaggataaaattgtggcaatcattagatcgccagaagttgcgtgcaatgatcttctggataaagtttcctga

SEQ ID NO: 164789 - DNA, 252 bp, Enterobacter cloacae
gtgtctcgtaaatacatgcaaactagtaccgaaattattaccgtattctgttcgtctactaacgctaatcttttggctaaaaccgttattacttacgaagatggattagtggctgaagggttacacccttttcaactgccattatcctgtgatgaaaaggtgtatgtaaatgaagttaatgaagctgtaaaattagccattatttctgcaaaaaaatatgcaaatgaactgagaaagttctccaacatgtaa

SEQ ID NO: 164790 - DNA, 615 bp, Enterobacter cloacae
atgagcattattaccaaagaatggctacggagtcagatttctgcaatcaagacggttggtatcactgatagcaatacgctgcaggcgttcgaaatcgcgctggcatcgctcgaagcggagcctgtagctcgcgtgatctctgaacctgataaaaacctttcaggtgaatatgcaataactactattgggaggatagagaaaatgccatacggcacaaagctctacaccgccccgccagcaccggtatctgtgccaacgttcgatgaatggctggaaattcgcggtaataagccgcttggatgggtcaaagatgccatgcgtgaatcgtatgacgcctgccgcgccgccatgctccagggggccgaacctgtaacgaaggcttacaagttgccagatgatttcgacttcgatcgctttaacgatgtgacttggcttgatgccgtagcaagcaatccgcacatgcattcactgacgacatccaccatcgctatggtggctctggagctcaataagcgacttgaggctggcaacactccggtgattccagatggttgggttgcttgcagtgaacggatcctgaactgccaaaatactggccagatatggcagtcataa

SEQ ID NO: 164791 - DNA, 162 bp, Enterobacter cloacae
atgcggatggctcagcaccatcagcagctgcattataccgcattcctccatgcgccgtttgccctcaagagcggaaaagggctgacccatatcagtctgggctggtatcatagtgcgccattcacgctgaccgaggatctgttttgtttgcaggaagcctga

SEQ ID NO: 164792 - DNA, 1563 bp, Enterobacter cloacae
gtggactccatattttctattggcatccagtcattatgggacgaattgagccacatgccagtcggaggagtctggtggattaatacggatcgtaatgaagatgctatcagtctggtaaacaagacaattgccgctcagggcaaggattcccgcgtggccgtcgtgagcatgggcgaagagccaaagaaaattatcacccttgaaaacgatcgcggtccgcagacggtgcgattattttccatgcctgcggaggccgatagtctatactttttgtcccgcgacattcagtgctctattgatccggatcactatctggtgattctgaaatgctcaaataacgccctgcaaaatatccctgctgaaaaactactgccctggctggaaaaaatcaataaatgggcaaaatttcaaaattgcacgctattgatagtcaatcctggcagtaataacgacaaactgttttcccttttaatgggcgaatatcgctccctgtttggtctggcgagtcttcggaaccaggcagacagctatctctacgatattgcgttctggtgtaatgaaaaaggcgtaagcgccagacaacagctcacccttaaacatattgagggcgaatggcacctggcgcagcaggaagaaaccgtggtgcaaccgcgcagcgatgaaaaacgaatcctgagccatattgccgttttagagggggcgcctgcgctctcggaaaattggtcgttgtttgattctaacgaagcgctttttaatgaagctcgcacaacccaggcggcaaccattgttttttcgctcatgcaaaataaccagattgaaacgctggcgcgacagatccataccttacgtcgccagcgcggaagcgccttaaaaatagtggtgcgcgaaaataacaccagccttcgcgccacggatgagcgcctgcttctgggctgcggtgccaatatggtcattccgtggaatgcgccgttatcacgctgcctgacgcttctcgaaagcgttcagggtcagcagttcaaccgtcacgtaccggaagatatctccaccctgctctccatgacgcagccgatgaagctgcgcggataccagaaatgggataccttctgcgacgccgtcggcaacatgatgagcaacacgctgcttcctgcagacgggaaaggggtgatggttgccctgcgcccggtaccgggtatccgcgttgaacaggcgctcacgttatgccgtccgaaccgcacaggagacatcatgaccatcggcgacaaccgcctggtgctgttcttgtccttctgccggataaacgatcttgataccgcccttaaccatatcttccccctgccaaccggggatattttctcgaaccgtatgatctggttcgaagataattctatcagtgcagagctggtgcagatgcgcgccctcgagcctgaacaatgggcgaaaccgctcaccgtgaagagcgatgccaaaccgattctcaacgcccgacatgacggacacgtctggcggcgaataccggaaccccttcgcctgttaactgagaatggggagaacgcaccatcatga

SEQ ID NO: 164793 - DNA, 1191 bp, Enterobacter cloacae
atgctttcaccagaagctaatctcacttgggtgactcaggctatgagccaatcaatctattttttactagtatccataacatctgttttactaattttgtgcatttacagatcatccatttttaggtttcttgatgagaaggacgtcatcaggcgcgcttctggacttgacggcctaagatattttttggctatctttgttgtcttacatcacgttgattgttttcacagttttttcatcaacggtaagtgggggccaagccaatactatttatgggccatgggtaaatatggggttgcattattctttatgaccacggcgttcctgttctggggaaaggttagatctaaagacaacatcgactgggcgtctttatatagaggaagatttttacgaatagtacctatggcaattttcgcctctttgttggcagtgatttctataactatgtattcaaaaaacatggaaggattctacttcaactttagaaacgtaatcccttggtttgatgcatcgttatttgatttcaagcccgccttcacaaactttaaaacaccgcaagtagctatggcaggggttacgtggtcattgaaatgggagtggatgttttattttttattacctcttttatttgtttttagaaagagaggctttgaatttgcaatagttttatcggcaatatctttttatatataccctttgatttctttaaaggatgcatacatttggtcatatttcgcttttggaatcctttctaaagaaatgtcagaaaggctggttatatccaaaaagatttctaacataatgtttattgcttcattattactgttgctttttgttgagccggggctgttctctgtaacaggaactccactgcttgcattgatgtttttgtcagtagtaagtggcgctgatttatttgggttattgacttcaacatcagccaggaggctgggcacaataagctatagcatatacattatgcaaggtgtaattttgtttcctttatttgcagcgatgcatcattataatatgatgagttttacatttgccagtgcaatcattagcgtttcatttataacattcctttgcgtaacatgctctgcaacatatgtctttattgaaaggaggtttatgcatggaatttcatttggaacattaagaaatcaaaatcaaaaagcgccacaatag

SEQ ID NO: 164794 - DNA, 324 bp, Enterobacter cloacae
atggaactggtaaacctcaaaaccggcactgatacctatcaggatgaaagcggggaaaccaaaacccgtgacgattatccatggggcctgtgcatcaacctcgataatgaaacgcttaagaagctcggagcttcacctcagccagtaggaactgaagtgatgataaccgctaaagcaaccatcaaaagcatgtctacccgcgatgatgggaatggtgcacggcatgacgccagtttgcagatcactgacatggccttgtctcctgcctcaggtgagccgcagaagactaccgcacaaaccctctacggcggggaggatgattaa

SEQ ID NO: 164795 - DNA, 357 bp, Enterobacter cloacae
atggctatcgagcaggaaattcaggccaaaggcttaaccgcgccgcgcgttacgccgcagcatattgaaagcgtgattattagcgagcacttcttcacggcggcatcaggcgttgtaggtgaggctgcgcttttaaaagctggccttgattactcagaagttccagatccattaaagcttttaaccttctgcgtcatggtgctgcgcaacggcttcaccgtcaccggagaaagcgcctgcgccagcccggaaaacttcgacgcggagatcggccgcaagattgcccgtgaaaacgcggtgaacaaaatctggatgctggaaggctacctgctgaagcagaaactaagcgagcaatga

SEQ ID NO: 164796 - DNA, 321 bp, Enterobacter cloacae
atggactattcaaagttaagcgaccgggatattgatcgtcttgttctgaatgttgtttatggcgttcatgcaaacgataaagatatccaaggcgtatgggcgcgtggtgggtttaaatacacgaccaacgccgctgattcatggccgattatccaggaaaatagaatatctgtttatcctcaagctgattacgaaggttctgaatggctatcatcgtgcattgattcgcagcttgaggtggaagtttctgacgaaaatccactccgcgccgccatgattgtcttcctcatgatgcaggatgtgaaaaatggcaaaaactag

SEQ ID NO: 164797 - DNA, 369 bp, Enterobacter cloacae; identical to SEQ ID NO: 141172

SEQ ID NO: 164798 - DNA, 2592 bp, Enterobacter cloacae
atgacacctatcgagagtatcgctgaatggtctcaaagaaaaccagtttggtggagacacgctttaagattatcgttgactcatggggcattagatcaagaatgcttgagtgttattttaaagatagcaaaaatcgaacatggtcttcttgaaagagatgaagtctacgagagagctataaagcctttggaatttacggggtttacttctgagcaaaatgaagtttcacttaaaactttatgtaatgttaaaggagtcggcttgctggctgacaatcaaactataaattttccagagcaaggattgtttgttgtttatggtgataatggagccggcaagtcaagctattcaagtatattaaaaaacacatgtttaaccagaggagactgccctcaaatattaggaaacattttttcaaaggaacaaattctaccgcaggcagagatttgtgtaacagtcaacggattagatgagatttttttatggaataataatagttccagcattgaagctctgaagtcaataagggtatttgatggttcttcagctaatcattatatcaataaggaagatgcgcttgggtttaaaccagtaggtttaaacttattggccgagttagttagggcagtgaatagtgtcagagcctacattgaagaagatacaatggggaataatggttttatcaaattggatgatttaaaatcatctagcgctgcagcaatttttttaagtggtctttctgctgatacacttgaagatgaaataagcatacattgtatcacgcctgaagaattagaaatgatagaacctttaaaaaaggaaatctaccattttaaatcgcaaaccccacatacattaagaaagaatttacagcaaaggaaagcaacgctagaccctcttgtactattttgcgataaacttataaagttactagatgataatgctattgaatcacttgaaaagttaaaattaggtaaagaaaagactgcgagtgtatgtgaggagttacgtaaagccacccttcataacttaccttttgataatattgcgggtgtaagttggcaaaaaatatggcaggcaacacagcatttcattcagcatgatgaaaaaaaacattttccgatggttacaggggaattttgccctatatgttttcaggaaataaatgatgagagcgaaagcaaaatggaggggttgtacaaatatttaaatgatcaatcagaacaagaggcgaaattggctaagggcgaatatgatgatgctttaaaaaatattttagttctttcttttgatattactccctatagcgcagcgatttctcttttaaataatgagtttcaagggttgggtgacgaagtcattagtatgatttcaaaactcgaaggaagaagagatatcttagtgggaaggttggttttgcctcatcttccattaatgaaaagtagcattacaaaaataaaaaatataattgaaggtattaatgcaaagctattggctattgagtcggatgaagaattgaataatttcattcaggctaaggaagttgagctaactagcctggaagataagaaatatatatttgattgtcgcgaaattattgtggtgaatttgagacgtcataaagatgttaaaaaatataattccattctgtctcaatgtggtactaccacaatctctacactctcatcgagtatctatagagcaggtgtcgttgagccgctcgtatctgcattcaatgatgaactgcagagtttcggatttgatcgttttagagtcaaggttgaatctcgcaatcgctctggtgttcaacaatttaaattgtctttggcagatgagaataataacgtcattggcgcactttcagttgctagcgagggggaacaacgatgtattgctattgccagtttcttagctgaaatgaaagctgactctagaaaatcagcggtgatatttgacgatccagttaattcactaagtcatgaatggagtagtcgggtggctaagcgattagtattagaatcgcaaaaacgtcaggtcgtgatattaacgcacaatatagttttctacaagttattgttagaggtggctgaagggacaaaaactgatcactcgactatagcacttgagcgttcgcgtaaattcgccgggatagttaaaacctcagctccttgggaagctatgactactcgggcaagatatagctttttaaaagtgaaattacaagatataaaacggcttgagaaaaaggatgaaacaacaacaaccgaacttcgtgatgcttgctgtcagttttatagctatttacgtgaggcgtgggaaagattggttgaggagaaattacttaataaggtcgttactcgttttgaacgtggtgtctctacgcaacgactagcaagattaattgatatttctcagtctgatatagatagggttgattatgctatgtccaaatgcagtacttactttagagggcatgacagtgctgctgccattggagatccttaccctagtgtagaagaggttgaagttgatcttaattctttctttgaattcctaaatgaacttgaagaaaaacctagaaagagaaattag

SEQ ID NO: 164799 - DNA, 195 bp, Enterobacter cloacae
atgaaccgatacatgaaagccagtggccatgaaaacagtgctgcggttgaatttaccggtaaagtgcagcgtattgcgcgcattcatcagtatgggcttaaagaccagccatactgccatatggatgctgtgcaatacccattgcgtcagttgttaggcattggacgccaggacaggctaatagttaaaagttaa

SEQ ID NO: 164800 - DNA, 510 bp, Enterobacter cloacae
atgctgtacgtcagaaacaggtttcaggcggacgagcgggcgctgcgcgagtgcaagaggctcatcttctcccgtatgactatggctattacagcaatggcagatggagagtgggttaatattggcgacatggttcaggtgccggatacatatgacaccaaccagcaggccggctatatcgtttcacgggtcggcaatgacttcgagacgagtgagcgtatcaacttctccgggactatgtttgtacaggtcacggattcaacgggcgctaccacagccagatacccggcatcttcccgcactgacaccgcgtttggatttactgctgccattccagacattgacctgaatctgttcgacggtgtagacgtccagtctccttcccggtacgtcattgccacgtcacaggagctcgatgcagggcagtggactatcacagccaagcagccagacggcaagggaagtaccgcattaaccctctctgagtatagcgatctgatttaccaataa

SEQ ID NO: 164801 - DNA, 477 bp, Enterobacter cloacae
atgattgagttaaatgaagtaaaagaagctgtctcaagtataacggatgtttcgaagctaaaagatactgattatggtatcactttctattatagagaggcatttacagatttaaggttgtacgcaaaagaatcaatgatttctgcaaggatagaagttacaaattcttttaaatctccgcatgagtttaataatgattttgatgctgagggtgtagctaaagttgttaatttaacaaccgaaacaccatgtaaaactatttttattgaatcaaagaattctattggtgcattcataatcagaaatatttcctctgataagttagacgtttttgcagagggtaaaatcaaagaggattcgaggagcaggaatttaaagcttacgataatgaaaatgatgcttgaaaattttgcatgctataaagaactgagggttgtagttgataaatataagtctggagcgaaaagtgaaagctaa

SEQ ID NO: 164802 - DNA, 543 bp, Enterobacter cloacae
atgcccgaatggatttcagtttggattgccaagatctttggcagtgagccagtggttaaggttatgtatgtgcttattggttgggcgcttcttattctattgatacccccaagctttgcagcagcgatttatgaaaaatctaatattcctttttctggtcaactttgcctattcgctttagcatttatcattgttgacggactacaccgagtcataaagtggtttgaatctcgcaggtgctctgctgtgaataatttaaagctaactcaggaagcagatgagaaagcaagattaatatcaagagtcatagaacaattagacgaaggagaaaaagaaagattattcaaatactttgaattaaaagaaaatacactttggtttttccccagcgatgtttatgtaacaagcctttctcaaaagggagtgattatatgcgctcataatcatcgccgaactgatggcaggttacagatgacttatagaattaatgatatgtacattgaagcggctagagagtgctttcgaaaatctaacgcactgtaa

SEQ ID NO: 164803 - DNA, 219 bp, Enterobacter cloacae
gtgaaagaaatcatcgttgacaattttgccggtggaggcggggcaagtacgggtattgaattggcgattggccgcagcgtggacattgcgattaaccacgacctgaatgccgttgctatgcacactactaatcacccggacactctgcactactgcgaaagtgtgtttgatgttgacccggcaacagcgaccgcaggtaaaccggttggcctagcctag

SEQ ID NO: 164804 - DNA, 1692 bp, Enterobacter cloacae
ttggcatggatcgtcattcgttgggctctgtccgttcgtccgcgggtgatgatgctggagaacgtggaggagttcaaaacctggggaccgctgctagtcgaggaaatgcgccctgacccggctcgcgctggcgaaacattcgaagctttctgcggaatgctctcctgtggcatcccggcatatcatcctgcgctggccgagtgctgcgagttcttggacattctgccggatagccagcaagctcagcagttgattaatggactgggctacaacgtcgattaccgtgagatgcgtgcgtgtgactacggcgcgccgaccattcgtaagcgattcttcatggtcatgcgctgcgatggcgtgccagttaggtggccggcggctacgcacggagacccgaagtctccagcggtacaggcgggaagcctggcgccgtggcgcacagctgcggagtgtatcgactggtcaattagcgccccgtcaatctttggtcggaagaaacagttagctgagaacaccctaaagcgcatcgccagaggcatccaacgcttcgttctggataatccgacgccgttcatcgtgaagtgcaaccacaccaccacgaagggcaaatatgactgtttccgtgggcaatcgctggaggaaccgctgcagaccattaccaaaacccatggatatgcgatagccgtgccgcacttgaccaagttccgcaccggtgccaccgggcagccagtaactgaacccgtaccaacggtcactgctggcacatctcggcgcccgggcgggaatgggcatgctctcggcgtagttgaggccgcgctgaccccgttcctggctggcaacggcggcagtgagtaccaggcgaagccgcgcccgctggataaacccgctcatacaatcctcaagcagtcccgcgcgtgtgttgtcgcgccggtcatcgcccgccagtttggtgccagcgtcggccacagggcagacgagccgagcgcaacgattactgctgggggcggcggaaaatcgcagctggtgacgccgacgctgatccagatgggatatggcgaacgcccagggcaagcaccgcgggttctgcaactggaaaaaccgctggggacgattactgccggcggcggaaagttcgcaatggtcgcggcgaatatggtgaaacacttcggcgggaattacaccggagctggcgttgctctggacgagcccattcacaccgtgaccaccaccgatcaccacgctcttgtcacctccagcattatcaaaatgcgcggtaccaataccggccagcctactgacactccactgcaaaccgtgaccgctggcggtcagcattttggtgaagttaaaaccacgctggcaaatgagggatacgacgagcaccgcgcgcagcttacggctgatttcctacgggaatattgtggggaggactgcaccgggcttgttactgtcgatggcatcacttaccgcatcgtagatatcggcatgcgcatgcttcagccccatgagttgtatcgggcgcagggtttccctgagtggtacatcatcgatagggactaccgcggcgtgaagtatgcgaaggataagcaggtggcccgctgcggtaatgcggttccgccgccgttcgctgaagctctggtaagggcaaatttgccagaaatgtgcgtaacaagaggttcggaggcagcatga

SEQ ID NO: 164805 - DNA, 255 bp, Enterobacter cloacae
atgagttttgtaagtatgcagataaagaaagtgtggttctcacctgcgagagggaggcactttcttaccagacgtgcagcaatcagagcagaagcacatgcaaaaattgtgaagagatacccatatgagcggccagactacgataatggtttcctcacttttcccggttactcaatccagcacgacgagccagagcgttatgcaataatgctccgacgtctaatgaggattattgataaaaacactgagaaataa

SEQ ID NO: 164806 - DNA, 822 bp, Enterobacter cloacae
atgaagccaggaatttacttcgacatcagcaacgaggattaccacgccggcgaaggcgtgagtaagtcgcaactggatatggtggcgttgagcccggccctgttgcagtggcagaaatcggcgcctgtcgacaccgaaaagctgaaggcgctggacatgggaaccgccctgcactgccttcttctggagccggaagagttcgacaagcgtttcatcgtggcgccgcagttcaaccgcagaacgaataagggaaaggcagacgaagaagcttttctgaaggacgttgaaggcctgggaatgaccgtgatggatgcagaggaaggaagaaaactcctgctgatgcgtgacagtgccatggctcacccagcgtcaaggtggttgctggaggcggaaggccataacgaggcatcgatttactggaatgacaaagaaacaagtgagctttgcaggatccgccctgaccggtttctaaaaaatcattcagtgattgttgatgtgaaaaagacagcagacatatcgcgattcggaactcacgtcgaagagtttcggtaccacgtgcaagacgttatgtacagcgatggcttccatcaacagtttggtgagcgtcctctgtttgtgttcatcgtcgttagcgaaacgatcgactgcggccgttatccggtaagagtttttgagcttgaagaggccgacaaagacgatggcttcaaactttatcgcagagatttggttacgtaccacgaagcgcgcattagcggtgactggggcggaatcgaaaaaataacacgcccagcatgggcaaaacgaaaggatatgtacgtatga

SEQ ID NO: 164807 - DNA, 231 bp, Enterobacter cloacae
atgagcgagaacgaaaaattcgacttcaaaaaagactggcttgacctcacacctgatgagcgcaaagcctttgctaaagaggccggaacgaccagccactacatccagacgcatctgacaggacgccggaaaatgcccggtaagagattgatgaatgggctttttaaggcatgcaaacaacgcggatgggtaaaaagtaaacttcaaatggtcaacttcttctacgaataa

SEQ ID NO: 164808 - DNA, 414 bp, Enterobacter cloacae
atgaaaatatatcgtccactgtggaacgagggggctttactgtcccctcaacagttccagcagcaggctgaatgggagtcttttcgcggtgccggtgcatctgcgctagcatccccattcccctggggggtagaaaagattgagtttaatgacagccttcttccgtctggtctgatccagattacgcagctacgcctctggctggacgatggatcgctgattgatgctcaaaggagcgatctgcctccacgtccacgggagttagatgccagccagctggcaggtctcgattccgtaaccgttgtcatcgcactgcctcacatgcagccgggtaaagccggacttcgacctcgaaggaacagagcagggctttgggtatctgtggctgcgtatggcgaagccgactgtcggtga

SEQ ID NO: 164809 - DNA, 174 bp, Enterobacter cloacae
atgaatatttctactcatgctctacaagcggatattccgcgccagcgctggttaagaatcattccgcctattcttatcgcctgtattatttcatatatggaccgcgtgaatatcgcatttgcgatgccaggcggtatggatgaagagttagggaaggtgcgaacaagttcctga

SEQ ID NO: 164810 - DNA, 954 bp, Enterobacter cloacae
atgatcttgatacttactgacagtaacgatgttcatgcagacatagtttcgatgaaactcggtgataactacttccgtttgaatttagatatagaagcccttaaagataccaaaattagctttgatggctctgaatggactatctcccaaaacggaaaaacgatcaaaaattcatccgtaaaatgtgtttggccaaggcgggtgtctgttcaagtcaattctgaacaacagcaagatcaaagtaacggtttcagattatggcgatctgaatggaataaaagcctttttggcctatataatgcattatctgaaagttgctggtttaatcatgtaagagatgcaactctcgctgataacaagtattttcaacataaaatagctaatgaagttgggctaaataatccagcatttataacttcaaactccaaagaagacctcaaaaatttcttaactacttatcctgattcggttgttaaattcatgtcgcaagatatgtatgtctctgaatcaggtgagatattaggtctatatgtaaacaaaatcactttagaacagttagaaagtttctctaacgattcagaaaacccaattactcttcaaaaatatgttaataaaaaattcgaagttagatacacagtaattgaagatgaacattttgcttgtgctatagactctcagcattcaaacaaggcaaaagtagactggcgtagatacgatatacctaatacaccgcactggaaaattgacgcacccacttcggtgaaggaaaaaataatttctttaatgtctaagttaaaccttcgatatggggctttagatttcatcgttgatgaaaataatgactggtggttcttagaggtgaattctgctggtcaatggttgtggatcgaagatttatccggcatggatatttccgggtccattgcaaattggttaacttcaaatagcaggtga

SEQ ID NO: 164811 - DNA, 264 bp, Enterobacter cloacae
atgtttatacagcccactttggacgatttccgggcagtcttcaaagtcctgacgcaggtcttctttagacatatccaggagttcaactttcacgttctggcgaaaatcggttttgtcgacaagagatttcacaccgcgccacagactttctaccgcctgaaagtcttcatgatgcataacagcatcaagctgacggctgatctggtaatccagttccgcgatatggtggtcaatcaggtttttgtcgagtttctcaacttttga

SEQ ID NO: 164812 - DNA, 492 bp, Enterobacter cloacae
atgagcagtcttttaacgctggcgaaggacttagagcagcaatcgaaagcgcagaagcagagtaccggcgagatgctgaaagccgcattcagcgagcacgagcagtctgtcagagcggaactgagcgcaagcgcgaggagaatcagcgacgccatcctcgcacacgagcagagtatgagcgaggcgatggagaaaaaccggcggagcgtactgcggactgccgggcggacatggctcaccatcctgatggtgtcagcgctgctgatcggcacgagcgggagcatactgtggtggcaggggcagcagataaccgacaattacacgcatcttcgtcagcaggaagataccctggcgaaaatgaccgcccggacgtggggagtgcgctatcaggagagcagcgacggccggaggtttcttatcctgccgccggggatgcaaaccgaagccatcccttacgacgggacgacatggatccgcctgaaacaggagtag

SEQ ID NO: 164813 - DNA, 696 bp, Enterobacter cloacae
ttgacatgccggggaagcccttatagtacaataattttcgatatccaaactgaccccatcttcggggcatgggacgttgagcgcgaccaggagcgcgctgtcatcctgcgggaatcgtgggagtacaacgccagactcaggaagaatcccggctacacccaggcagttgagcatatcggctatatcctcgggggatacgacctctacaccttcaatatggtgcaggccaccagtccggatgcgccggacgtcgcggtcattcaggattttgagcgccggctggaaaaaccttttctgagaaaagagggcaccgtctggtacgccgacttcacggccagtccgtaccctgaggaactggccgtggccggcagctacagtgaaggtgcaacgaaaaccatcaccgttaatgcatacgaacgcgaccccacagcccggcgggcctgtattgagtatcatggtgccatctgtcagtgctgcggattcgattttgagaaaacctggggcgagcacggcagaggatttattcacgttcatcatatccggccgctgagaacactcggggctgcctatcagattgacccggttaacgagctggtcccgttgtgcccgaactgccacgccatgattcatcggggcaatgaggcaaaaccgttatccgttgaagaacttcgcgccatgatgagacccgccggctga

SEQ ID NO: 164814 - DNA, 1467 bp, Enterobacter cloacae
gtgcagttcggactccagctcctgcacggccaccggccgggccgtggccgacagcttcacgcgcgcggccgcctggtcgagcaggtcgatcgccttgtccggcaggaagcgcgccgtgatgtagcggtcggacaactcggccgccgcgatgatcgcgtcctcggagatgctgaccttgtggtgcgcctcgaaggtgtcgcgcaggccgcgcagaatcatgatggcctgggccaccgtcggctcgggcaccgtcaccggctggaagcgccgctccagtgcggcatccttctcgatgtatttctggtactcgttcagcgtcgtggcgccgatcaggttgagttcaccgcgcgccatcatcggtttgaacacgttggccacgtccagcccgccttcgccaccgccctggccggcaccgacgatggtgtgcacctcgtcgatgaacaaaatcagctcgccctggtgctcggtcacctccttcagcaccttctgcacgcgctcctcgaactcgccgcgatatttggcgccggccaccatggcgttgatgttgagttccaccaggcgcttgtcgcgcaaggtctcgggcacttcacccgccaccatgcgctgcgccagcccttcgacgatggcggtcttgcccacacccggctcgccgatcagcaccgggttgttcttcttgcgccgggccagcacctcgatggtggtttcgatctcctgcgcgcggccgatcaccgggtcgagcttgccgtcgcgcgccatcttggtcaggtcgcgcgagtacttgtcgagttctggcgtgttggtcggcgtctcagcgcggccatcctcggcgcccttgccgaccaccttgctgacctgttggcgcagcgcctgcggcgtcaggccgtagcggcgcagcaggttggcggccagcccttcgccttcctcagccagaccgatcaggaaatgctctggaccgacataagaatggccgagttcattggaggccacgaaggcgcggctgagcgcatccttcacgcgcggcgacacgccgatctcgccctcgaagggcttgtccccgcgcttggcctcagactcgatctgccgcttgaggtcatcgaccttgatcttgaactgacccaggatggtcttgaccacgtcgctgtcggccagcgccagcagcagatgttcggtatccacctcggagcggccaaattcggcagcgtgtttggcggcctcctgcagcaaggcttccgactgttcgctgatgcggctggccaacccactgccgcgacggcgcggcgcacccgaacctgcggtggcgggctcgccaaacgaggcatcgaccacgtcatcggtatcggcggcaactggcgtcgcgtcgtcgccgatgcggaagaagtcactgccgaggaagtcctcgaacaggccgctgcgcgagccgaacaaggcttccagcggcgaaacggtgcgcttttgctggcgcactaa

SEQ ID NO: 164815 - DNA, 2094 bp, Enterobacter cloacae
ttgactgagaaacgccgcgcagacggggtttccgctgaccataaatcgttaataaatacattatcagcaatacgtcttgcagaaattaaatctctttggacagacgatttgagtttattgccatctgacccggatgaggcattttggtgggaagtatggctaccagtgaggggtaatagaaatgccgttgttactgattttcatcgaataagccatgcgactggatgccaggtcagcgaacacaaagtcgattttcctgagcgaaccataacctggatgtatggttctcagagccaattttctcaagctaggttggttttaaactgtgtagcagaattgcggcgtgcaaaagatacagctgagtttttcgaaggactaccagcattggaacaacagctttgggtggatgatgcactgcgacgtctccaggttccttcacccgaagacaatgtaccttatatctgtttgttggattcaggcattaatcgcgggcacgctatgcttgcacctgttttgcaccagcaggacatgcatacagtcaatgacgcgtggggagtcaatgacaccgcaaaccatggtacggggttggctggagttgcaatctatggcgatatgattgacgctttgtcttctactgatgcaatagaagtaggacaccgactcgagtcagttaagcttactccaaattatggggccaacgttggtgacgcaaaacagcatgcatatctgttcagctcagccgttacacgtcctgaaattctcaatggtcagcgcaaacgtatttttagttcagcagtaacagcaactgcttatcgtgactttggtcgcccttcagcttggtcatcaatggtcgattcactggcagtagatgcgctagcagaaaccccttttccccggttgtttgttctttccgctgggaacatagttgatcgcgaccattggggaaactatcccgccagtctttcagttaatcaaatccatgatccgggccagtcatggaacgcattaactgtaggtgcatttactgacaaggttgagttaaatgagcctgaatttattccggttgctgatcaaggagcattaagtcctttcaccactacctcaatgggatgggaacctgtctggccgtttaagccagatgtagtttttgagggggggaatgcagctgctaacacagaatttgtcgataactttgcgagtttagaattactaacaacaagtgcttcatcccaccgccaattttggacaactaatgcaactagtgcagcttctgcgctgtgtgccagaatggctgcaaggttaatggcacaatatcctgagtatcgcccagaaacgatccgtgctctgatcacacactctgcgcaatggacacctgctatgttgcgtatgtatcctgctcgcaataaaagtggcttcgcacagcttatacgccattgcggctggggctcaccagatgttgaacgtgcgctctggagtgtgaaaaatagtctgacactggtagctgaagacagcttgtacccctatcgtaagactcgcgacggtattaaaactcgtgacttgaatttacatgcgctaccttggccactggaacagctccaggagttacaggatacgcaggtagagctcagggttacattgtcttatttcatcgaacctaacccttcagcacgggggagttcatcaagatatcattacccatcccaccgtctacgctttgcgatgaaaagacaaacagaatctttagacgaatttaaaactcgcatcaatgcagcagctgagtctgaagagagtgagcatgggactaccggtaacgatgataactggtcattaggtgctactcaacgacataaagggtcgttgcatcaggatatatggcggggggcagcagcagagcttgctagttgtggttatttggctgtttatcctgcacaaggttggtggagaaccagaggcgctttgcaacgatttgattctgaagctaaatacagtctggttgtatcgattcatgcacccgaagcagacgtagacctttatgccgcagtggaaaccttggtcgaaaatatggttgaaaatcctgttgaaataatgggttag

SEQ ID NO: 164816 - DNA, 1140 bp, Enterobacter cloacae
  misc_feature (19)..(64): n is a, c, g, or t
atgactatcttcagcttgnnnnnnnnnnnnnnnnnnnnnnnnnnnnnnnnnnnnnnnnnnnnnnatatgaaagcattattactatcttcagcttgctgcatccataccagaaaatggtgtaatggtctcgctgaaaaaggtatagacgttcacttggtatcacagcaagaaccaatggacggctacaaccagaatgtggtctttcacaaattaccatattcagggttaaaggggtatatattcaacagatgggcacttattaaaactataaaaaatatcaatccagatgttatcaacgtgcattatgcctctggttatggaacattagcagctatttcaggcttgaagaattttattctttcagtgtggggctctgatgtctatgatttcccttttaaatcaaaattgcattataaattagttaattataatctcaatagagctaacgtaatttgttcgactagtgaagttatggggcgttttgttaaagataactttaatattagcccaaatatatcgatagaaattacaccttttggagttgatgtatcaaagtttaggaaaaatgagcaaatatccaaaactgatactcttacaattggaacagttaagactttaagacctaaatatggcattgataatctaattcgagcctttagtattctggtccataaagggcataacaatattgaattaaaaattgcaggtaaaggctatcttcttgagaatttgcaagctttaacgacagagcttggagttgctgataatgttcagttcttgggatgggttgaaaataacgaagtaccagccttgttaaatacttttgatatttatgtggcgccaagtacgttagatagcgaaagttttggggtggcaatcgttgaagcatcagcatgtaatttacctgtaatcgtgaccaacgtcggtgggttaccagaagtggtaatcaatgaggtaacaggaatcgttgttgagcctgataatgttgaattgttatgtgcagcaattgaaaaattactcatcaaccctgctttacgtcacgaaatgggagaagctgggcgtgaaaatgtattaacaaaatatgaatgggacttttgtgttcgtaaaatggtagatatttattccaaagtagctctctaa

SEQ ID NO: 164817 - DNA, 837 bp, Enterobacter cloacae
atgacagtagacgccccaatcaaacatcctgcaattcgttatcatggcggtaaatttcgcttggcgccgtggataattgagcaaatgccagagcatatttgttacgtcgagcctttcggcggcgcggctggtgtactgcttcaaaaaccacgtagttacgcagaggtctataacgatcttgatggagaggtggttaacttgtttcgcgtgctgcgcgacccagagcaaaatcagcgcctgcaggatgcttgtgtgctaaccccatactcccgcgatgaattctgttccgcacgtgattcatctcctgatccactagaacgcgctcgtcgcatggttgtccgcgcatgcatgggatttggttctgctgccggtattggcggtcagtcaggctttcgcagcgacagtaaacgcaaatacgctactgcggcacatctttgggaacgctatcctgccaaccttgctgctgtgtgtcagcgcctgcagggagtcatcatcgaaaacaaagatgcgcttgcagttatgcgctcccatgatgccgaaaccacgctgcattacattgacccaccttacgttccagaaactcgcgtccagggaaaccgttattacaaccacgagatgactgttgaaggtcacgagcagttgctcgctgtggccagaacaatgaatggcatggtgatgattagtggctacgactgcgaagtttataacgacatgctgaccggatgggtgaaaacagaaaaaacctcacgcataagcgcaggtcgaggaacgaaggttcgcactgaatgcctctggataaacccagccgctaaacaaaaacgggagcgcgccgcatga

SEQ ID NO: 164818 - DNA, 579 bp, Enterobacter cloacae
atgatttttaacggcgagatggtgcgcgccatcatcgacagccggaagacgcagacgcggcgaccagctaatgcatcaactgccaacctgctagatcttcagacgcagtatacgcacaagaaatacaacatttcctgcccgttcggtgccgccggtgaccatatctgggtgcgtgagacttgggcacgctacaacatcgaccaggatagccacgatatggcttaccgagctacaccacctgctgactggcctgaagaaggaagatggcgtccatcaattcacatgccgcgctgggccagccgcctaacactggagattaccggcgtgcgcgtggagcgcttgaactctatcagccaggaagatgcgcaggctgaaggcatggaacttacaggatggcggccgacatattctgacccagatagctgcggagaagtctggactccatatgacaactttgcgcagctgtgggaatcaatctacggagaggatagttggaaggccaacccatgggtctgggtaatcgaatttaaggtggtgcccaatgttccagctaattcaacggggtcagatttacgctga

SEQ ID NO: 164819 - DNA, 297 bp, Enterobacter cloacae
gtgggtcaggccactcttggcatcgacaccaatgtgggccttcatgccaaagtgccactgattgcctttcttggtctgatgcatctccggatcgcgttgctgctctttgttcttggtagagctgggtgcctcaatgatggtggcatccaccaaagtgccttgggtcatcatgacgcctgcttcggccagccagcgattgatggtcttgaacaattgacgggccagttgatgctgctcgagcaggtggcggaaattcatgatggtggtgcgatccggcagggcgctatccagggataa

SEQ ID NO: 164820 - DNA, 870 bp, Enterobacter cloacae
atgtcacacctgacgacctgcgaggattcacgcagtgccacttcttcgccggaattggcgtctggtctcattccctgcgtctcgccgaatggcctgacgataagccagtctggaccggctcctgcccgtgccagcctttcagcgcggcaggcaaaggagatgggtttgctgacgagcggcacctatggccccacttcttccacctcatcagcgagcgcagacctcagcatgtctttggcgaacaggttgcagcaggtaacgcaaatgtgtggttcgaccttgttcaatcagacctggaaggaatgggatacgccttcgggcttgtgccgtttacgtcagcgagcatcggcgcgccgcacatcagagaacgagcttattgggtggcaaactccggtggcgaacgactcaaccggttcgactcattgctacagcgggaagaatccagacggctcgcagaaggtatgcctgaaacttccaggctcggtattgctgaccgggtggccaacgccaaccaccgaatcagcgatgagggagaaacgatatgctcagggcgggatgccgttctccatggcagcagcgttaaccggttgggtaacaccaacgtcccgcgactggaaggactcgtcagggatgacagcgctgcgggatgggaaggacaggctggaccagctaccgaggcaggcgtacacatgcggccccttgaggttaacggtttttggcgagatgcggactggctcttttgtcgagatggcaaatggcgtccagttgaacccggcacattcccgctggttgatgggctgccgcgcgcctgggacgagtcgagcccggggtggcaagagtggcaagcagcaaccgcacaggccgacttaa

SEQ ID NO: 164821 - DNA, 570 bp, Enterobacter cloacae
atggacatcgatttcaagaagttggctccctggaactggttcaagaacgagcagcaagagcagcagaccgtctcttccctgccggtgcagcgcaatgacctgccagcggcgagcgggccagtcagcccgatcctgcaactgcatcgggaaatcgaccggctgttcgatgacgcattccggggcttcggttttccggcgttgaacatgccgcagtggccatccgattggtcgggcatgctgaagccggccctggacatccaggaaaccgacaagcagtacaagattgccctggaagtgcccggtgtcgaggagaaggacatccagatcactctcgacaacgacgtgctgatggtgcgtggcgagaagcgccaggaacaggagaagaaggaaggtggcttccaccgtgtggagcgctcctacggcagctttcagcgtgccttgaacctgcctgacgacgccaaccaggattcgatcaaagcatcgttcaagaacggggtgctcacggtcacgatcgacaagcgcgaggtcagcgcgccgaagcagggacgctcgatcccgatcaacggctga

SEQ ID NO: 164822 - DNA, 570 bp, Enterobacter cloacae
atggacatcgatttcaagaagttggctccctggaactggttcaagaacgagcagcaagagcagcagaccgtctcttccctgccggtgcagcgcaatgacctgccagcggcgagcgggccagtcagcccgatcctgcaactgcatcgggaaatcgaccggctgttcgatgacgcattccggggcttcggttttccggcgttgaacatgccgcagtggccatccgattggtctggcatgctgaagccggccctggacatccaggaaaccgacaagcagtacaagattaccctggaagtgcccggtgtcgaggagaaggacatccagataactctcgacaacgacgtgctgatggtgcgtggcgagaagcgccaggaacaggagaagaaggaaggtggcttccaccgtgtggagcgctcctacggcagctttcagcgtgccttgaacctgcctgacgacgccaaccaggattcgatcaaggcatcgttcaagaacggggtgctcacggtcacgatcgacaagcgcgaggtcagcgcgccgaagcagggacgctcgatcccgatcaacggctga

SEQ ID NO: 164823 - DNA, 2064 bp, Enterobacter cloacae
atggctacgcaacctactcagaattctgttccgagcgaatcaccacgcgatctgaagtttaacgcggggaaaattgatgagttcgttacctcgctggttaacacttatgttgaccgattcgggaatgagcattacaccatcgaaggcctgcgttggcttgcacagcaggcgattgcccagtatggatggatcctcattgacgactccttccagaacggcgctgatatcaccctgccgaaccaggctctgcgtgatgaggctaccggggaatattatcgatgggatggtgctctccctaagcacgtagatgcagggtccacaccaacatcaacgggaggcgtgggggttggtgcctggattggtattggtgattcttcactgagggggatgctggcatccaaagatggttactctttgattggggagcttcagtctgtagccgaatttaatggcatgactggggttactggtaaaaaagttcgtctaaaaggctggtatgcaggaaccgccattggtgggggagagttctatttcgataacagcattgccaagtcaaaccatgatgggggcgtttatataagccctaccgttccgtatacgactgcggagaatttcataaagggtacagatgaggcagatccaacagggaatggctgttgggtccgcgttgtatctatgccatggatacattcagattggtatggattgaatagcaccgttgacgctggcgttgttatgaatgctgtatcaaaacgggccgcgcttatgcgtctggaagtacaaacaaaaaaaggaacctacacgcttaaaactcaatggaatcacacctggattccaaacggatctgggcgctatccgatccctaatatttatggtgatggtggcgagttcacaacatttatatgtgattacgcatcgttcggagacagcacatatggtgcaatattcaccggtagcaaacatattgggcaggaaaacttcaaattctacggaatcggcttccagaccaatgcgcctaatgatgttgccggccaactttaccgtggagcatgcgtcaagtttactgatatatggggacttgatattgatgatctgcgttccgcacgcgctcagtacggcgtaactgtcgataactgtatctatttccatttcactaactggcgcttcaatggttgtcacgttgggaccaggttccgccatactgctgatatcgttggtggtgggcttggtactggcctgaacgctggcgttatggaaaactgtcgctgggctgactgtgcaagccaatgcatcgtagcttcggaatcccacgcggtgaaggttttagcgtgcagttttgaaggaaacggcaatcgcactgattttaatggcgcgcttattgttggtgatgcgtgcgtgcgattaactcaggttggccctgccggtggtgtaggttgggtatttgatacctgttatttcgaaagcaaccgaattcgggatatcattttcaactacacaaacaacaataacgttttatgttcagtgcttaactgcatattcaataaaacggctggctatcctccaactgcaccgcgcattaccgtggcaaacagcaggggcgcaggaactaccagcgcgaaaatgacgctgattacgcgcaataacgttgtctatgatgctggcggtggtactgcctatactgacattgaatttgccggattctcgcttgcaaatgacggatgggatcatgccgtacttggtgattacgggaacgtatggactgtatcacctgctgtttccgatagcgtattgcataagaaagcagagaatgaaattgccagtgttggtgttacagcagccggcgcacttagcaacacgcgcggtgctaaaacctgcactaaaacagcaactggcgtttatgacatccgctttgccacttcccttgttggcgctcaagtaagtatatcgccaaaactggcaggttttgctacgtggacagttaccagcaaccaattgattgtttccatagtgaatgcctcaggcgcggctcaggacacggcctttgatatgttagttactaactaa

SEQ ID NO: 164824 - DNA, 987 bp, Enterobacter cloacae
atgattgcatttaccactgtagttgtcacttatgctgatcgaggtcacttgctcgccaaagtggtttctgcggcagttgatgctggttctgatcatgtgattatcattgataacggtagtgctgaagctagcaaaaagatcatcaatgagcttccatcactttatctttccacgcagttcacaattcatacaaatgaaagaaatgaaggttcagcaatagcttttagcaccggaatggatatagcatcaagcgataagaataaaaacgaaatggtgcttttccttgatgatgacaattaccctgaagatggctctgttcagaaggcattgcaatacgcagaagctagtggcgattctaaaatggtactcttcttgatgcgtgaggaccgaccacactatagggaatacgtacgcagcagggatatgcaggttcttctcggcaaagaaaattcattcatggccttcacactcaaagattacctgaataagttcaagcaaaagatttttggcaaagggaaaagccaagagttggtttattacccgttcccgctcatgcctgttccttgtggaccttatggtggcatgcttacaaagaaatcaatcctcatggacggcgtaaggccaatgaaggagatggtactttattttgatgatacaaagtatacatatgatctggataaatcaggcgtaagcttatacataatccctgagtgtattataagagacatcgatgattcatggtcagccaagaagacatcaaaattatcatcacctctctttgaggctgatgaatttaaagttagccacacgatacgtaacagggtttaccttgaaaggcagattatcgtaaccaacaaattttcttacgctctgaacattgcttcatttatgtccattacactcgtaaaggcaataacatctgggaatttggggcgttatttcaagttaatagggtatatcagagaagggttcaatttcgggaaataa

SEQ ID NO: 164825 - DNA, 1236 bp, Enterobacter cloacae
atggctgatgcaaaaaaacttttaaagaacattgcttcccttgggttgatgcaagttgttaactacgttcttcccattctaataatgccttttctcgtggtgaagattgggatttctaacgttggcctacttgcgacatttacagctattgcggcttacatgcagatagtcattgattatggattcaacctttctgcaaccagagacattgctaaggatggttatacaaatgagcgagcttcagtcgtaactagctctgttttaacaataaagctatttttttcattgcttttcattattctttcattgcttgcgcttgagctaattcctgaatggagggtttatacacttcctttcatgattactgttgggatagcagtttttcaatctatgttccctgtctggcactttcaggcagcagagaaaatgcacttcataactgcttgcaatagcattccaaaattagtttcggcgggaatggtattcatatttgtagcaactccaaatgatgcatggaaagtgcaggcatgctttatggctggcgctgtagtgtcatttatagtttccatgattgttctttatgtgaaattcgatttcaaaattgacgtgtctgttagtcagtgtcgacgtcagttgcaggatggattctcaatatttgttgctcgtgccgcttctgggttatataaaaactttaacgttctgatactcggtttatttgcaggaaccgctgctgtgggagcgtactcaattgcagagagaattcttcgtagtgctcagatggttcagaacgttgtaggagacactctttatccatcattcgctagaggatttactggggacaagggattttttagaaggtcggctgagcgttacagatggcatattatatctttctatgccgtagcttccgtttcaatatttttgctttctggattaattggagagttgataggtagaacgtcagcagaagaggtaagtagttgcttgaggataatgtctgcggctttctttttcggtggcctgaattacgtatgcgctatcctaggccttacatcatgcggttatgctaggcagttttcattatgcgtgctggctactggtgttttcaacgtcatttgtgcaacaacgctatcttatttttattcatactacggcgcgtcggtatcgcttgctctcagcgagttgttcctgctttgcttcgtggtgttttactcgaaaaggacgggaattttatga

SEQ ID NO: 164826 - DNA, 297 bp, Enterobacter cloacae; identical to SEQ ID NO: 102752

SEQ ID NO: 164827 - DNA, 1080 bp, Enterobacter cloacae
atggataatattgacgatatcataaaggacgctattcaaaaggccaccacggagcggggcaatatttcgatactgattgctggccgttctggggtagggaagagcacattaatcaacgcggtattccagcagaaaatggccgaaacgggccagggtaaaccagtgactcaaaatacgcgtgagattacgaaagagggtgtaccactcactatttttgatacccgtggtctggaaatgtctcagttcaaggagactcatgctgatcttgaaaaactgataacagaacgctcgtctgacagagattcaaatcgccatattcatgtcgcatggctttgcatacaagaagacgggcgtagggtcgagcaggcagagattgatttacacactatgctggctcgccatatgccggtgatttgtgtggtcaccaaggcgagaagtgacaatggtttcaaaaacgaagttcagcgcttgcttcctgaatccaaaaatgtaattcgagtccgtgcgattcaggaagagatggatgatggttacgtcctaaaaccaatgggattagaaagcctgatagaactgacatcagaggttatccctgagggaaagcgtagagcgttggctgcagcgcaaagggccaatattaactataggaagacacagtcgcataaaattgtagcggcttccgcgacggccgcagccgcagcgggcgcgagtccgatccctttttctgacgctgtcatccttgcacctattcaggttggtatgattgctggtattacatccgtatttggccttgagctatcaaagggaacccttaccacgctggtggcatcggcgatcggcgtcgggggcgcgacgtttttaggccgtaccgttgttgttaatattctgaagtttttcccgggagtcggaacggttgctggtggggcaatatcagcagccactgccagcgcaatcaccgttggtctgggggaggcttacatcaccgtgctggctgaaatttttactcaagatcctgatgcagagccaactgcaacggaaattggcgaaaagcttaaagaaaaaatgataaagatgggctcatga

SEQ ID NO: 164828 - DNA, 3978 bp, Enterobacter cloacae
atgaaaaagacggtggctcaaccccagttgcccaattccgttcaacctgaaaaaaatgatgaacaaaacagtaaaaagtcagcggtcggaggaagcgcggcagaaaggggattagattaccaggctcgtgttgcagctattgctatgacgtctctccttctggaacagaaagtcagctggattgaggatgttttcaatggcgtaccggttttgattgatgctgagacaggggggcccggtgatgatatttcattaaaaacgaacacgggaaaatcggtagaggtccaggtcaagcgaggcctgaaacgtggcagtgatttatgggatgcactttgcgcgctggcaaaaggcattaacgacaagagcattgcttgtggaattttggttgtttgccccaacagcagtgcgaccatccgctcgaatctggctgataatatcgctcgtattgggaccgggagaattgatggcctccacgaaataggtgatgatttcatcaagaacgctggccttgaattcccggagttatcccgggtgtgtcgttcccttcgaattgtcacggtagatgctgtagacggaaatgatagtgctgaggtcaatgccattagcctgctggggcgtttattccatgaaccacgtcgagcgtggttttttctggttgaacgcgcgcgaaaactcatcagaataagaggtcgcgcaacaataacctcgttgcttcatgacttcagaaatgttggtatcgacatcaaaatggataccacagaaagtggtattcaactaagagcagctgtttgtgattggcttgagaaaagttattctcagtttacaatcccggggcaggaaaaaccggtttcactacagaaatgttggatcccactcaaagcctcagtcattaaagatctagagcagtttcctgatgacttatccaaagcgcttaacagctatcaccaatatgcagcaaagcgcaggagtgacatcaacaagtttgatgctcatacccttggcagatatgttaccaggggcattatcattggtgggccagggattggaaaatcattattgcttcgccgcatagcattaacatttgcagctgaaggccatttggtattgctggcacgactgcctcaggttgtctcgcttatcaatcataaaggcatccgttttgaagaggcccttatcgatgtagcgcttagcagctctggattgaaatacaaatcacctgacctgcaggatgccgtcattttatgtgatggcctcgatgaatgtggggtcagccaaaacctcgttactgatgccattcacaaatttgcagttgcccatcctgacgcgagggtattactcaccagtcggcctgtaggctaccgaccaggtcagctgggaaactggaaacattatgagcttcttcctctggaggagtttcaggctgacgacgcactaatacaagtgatggaagccttacctttcgaaagcccggaggttcgaaggcacaccttcgatgtcgcaaaagagcaactgaaatccttgcatctcaagggggtcgcatcgagaagtccattgattttaaccatgctcgcatccttatcttccagaggtattgagccagaaagctctcgaatttctctttatcgacagttattcagattgctggaaacggcatacccctctgtacgttctgaagtgactggaccaagtgaaccagagcgaaagtggttcatctctttgttaggctggatactgtttgagcacggtactgaacccttcgaagaaacattccgacactgtgtatctgaatggcaaaaagaaatgccaggcagcaatcttgcttgcagtaataaggttcaggcatgttttgatttctgggaaagcgtaggcgtcatcgagcgtatacacacgtttgatcaagaagcagtaaccttcattcataaaacctttgcagagtatagcgccgctgtcttcatcgcacagcaaccgcaaaacctaaaacgaaacttgctcattaacgtgattcaaagagatgacagtagcgaactgctttcttttgcaagccaccttgggctgatagaagaaattctggatgcatggcgcgaattaatgctccagggaaaaacgacatcaacgaaagagctggtaaaggttctggacttgattattgaagcaggaaggcctgttacggatgactcattatgcatctttgccgactgctgctggaatgccttatcgtcatcctcaagcatgtattcggcaggagacgccctttgccaggtgtcaacgtatagctgggatgttgtaagggaaaaggtgagagcgaaccttcattctcatgatggctggctttggctggtttcctgggcatgtattctctctggtagcccctcagaggttagctaccatgatgcaataattgcattgaatagtattaaatcaaagtggccaaagcagctaagggaaaaacattctctgtttgatttcataggcgggaggaaagtgcaggattgtatcattcttggcgctgcaaaaattatcctccaaaaccccgaggaggttggacttagtacacttgacgccatcgtagataaaggacgaggggtgtccgccagctgttttgttgggctaatggaatgctatgcaaaagcaggtattgagttacaggatgaagtcactcgctatccgggaagagagaaagatttttatagcgtttacgctgaaattgatgtgaattgcatcggtctcctctctgtgctggctggaaacgataaccatcaggttttggatgagattttacctgaacacatgcttgagctcggcgcgtttttgaatataagtggctttcatcagctcagcctgaaagacctgctacatcttgaaacaacgaataaagatattgatcgaagcaagtttttgtaccagatagctaaagcttcaggccttgaaccagataaactaaggcagcaggctgccagtttaaaaaggcagtgcgagggaaaaacgcttgtactggtttcagactttggcaggcttcctgctgtcgatgcagacatgtctccagaaagggtcgatattgatccagacgattttgatgatttaatttcaacaattctgcacgccagtcagttctacagtgttttagccgccactgtcctttatcagcacaaaacacatccaaaagtcatagacggaattaaacgcatccttatgcaaggagagggaacagctttgtttataggtacccggtttattacggatatgccggaccaggattggcagcaattacttctgcaacgactggaaacctctatgcctgagcagggtgcttcacacttgtttgaggcccttaccgaacctttcaattcacgacatgaaagtgttgcaaagctggggttacggagtgaaatgctggatgtagcacttccggcggcctcatttgcagcaaggcttccccagtcagatgaattatctcaggatattcgtctcatatatgaagactggaagctgcgggagaaaccctatccagagaatggtggcgttatcccggacagtcctcgtgatgccttgtctggtattttggtccaggataagagcgacgctaatctggcacttattcttgagatggtgcaggaaaaacgaacgaaaattcgtgggaatggtgagaaggcactcaagaatatgctcgatggatctgccgaattacagagaaacatttccaaatgggtcagggatggcgtttgcaaacccacgctgttacgacagattattactgaagttaccttgcacccagaagctgttatgacgcttatacctttcctcaaagatgagtcatccagtattcgatatgctgctacagcacttcttaacacgcggttcatgacactcgagcaaatcgaattgcttgcccgcgatctttcaaatgacactgaaattgagattagagaaatcgcatctgcaacactctcttcacttatgcccggaaagggggggatgtaa

SEQ ID NO: 164829 - DNA, 3498 bp, Enterobacter cloacae
ttggctgaaagaggaggtccggcaactcaggctggcatcagatatcaagatcaagtcgcagcattgtacctcggcagaatgctcgatccgcgtgaacgtccgcgcagggatcaaccagtagaagtcagaattgaggcaccacaatcagtcgatgattttgttgttcgctttgctgatggggcccgtaggttctatcaggtcaaacttacactcgaggctaaaggttcggcatggcaaggactgtggccttcattccttcgtcagctgaatacggattttaaactggaagatcgccttgagttggtgctgggcgagccatcggcgcttgcctctcagttgatagaaatcacgaggcgtcacgaaagctcagatattattgaatggcaaaaacgcctgacagctgagcaactcaaattagtgtcatcaattcagcggctgctcaacgacgatattcagaatgtatggcagataattaatcatctggacatcagtgtctttccatctgaaatgttggtacgggactatgtaccccattggatgccttcaacatcagttgctgtttctgcgttattcagtgttctaaccgagatggctctggaaggcgcggctaaacgtttgagctttgatggtactgcgctttacgatcgtcttcgtgcagaagcgggaattattattcacgatcctcaacattggggaagtgcgcaataccgtgatgcgatcatcactctttcaactatttctgtgcctggaactgatttcgttcagtcaacggacgctgaatatctctggccaaaatgcaaccgctatgaccgggagcgccgtcctgattttgatgatgatattccgggatggcggaatttcaacattgatactccgattgatttaagcaacttcccaaacgctgagctgaatgcagtggtggtcattgcaggccctggttttgggaaaacgacacttgttaatgcaattgctcgcaagacagctcttgaaggccttctgcctgcgattattcctgtaacaaagctatctgaatctgatttgactatcccggcatatttaaatgaacgtcataatcgcgattttgatgtgaaaattgactggcgtgcttccgctgattccggaagcttcatacttttgcttgatggacttgatgaagtatccagtgaccaaagaactatcatacttgagagacttaaggtttttcgcgccacttatccaggtttgcgttggttggtgacggtcagggatgccgcagccattgttccaccagaagatgcgactgtggtagaactttcaccgcttcaagatgaagatgttcgtttgtatgtcgacttctaccgacccggggagcctcttgtcgcacaaacactcctggacaaaatggatgttcatccagaactggctcgccttgtacgtattccgatatttcttgctctgatgcttgttatgcgtcaggaaaacgagagtctgagaagaagtgatttacttgatatctacctcgagacactgtttcggcctgcggcatttaaatctactgtgaatgatagtgttgacgcgcttttgcttcggcaaattgctgagtgtgctgcgttcgaggcgttagagaaagatacggttggtattaacatcagacagttagcgcggtgtataaaaagctttggtgtctctttaaacacagatgatgtttatgaagccatgattcgtcgcggtatattgcgcaaagtaaacttagcaggatttgcgtttcctttcccaattgtccaggagtacctggcctcgactgagctgcttgagaaacacagcgagcaaattcccactcggttaggaatgatcgcaaagcggccatgggcccaggctatacaattcgcactcgaacgccactcaaatcctggcgctataattgaccaaattcttgagcgtgaggacgatgttttccacactggcctgaggctactcggacgttgtcttgcgaatgggatgtccgtttcaccgatgcagcgaaatatcatgggcgagagatttgcaagcctttggggaacaggaccatttcattcggaaaagatgattagcagtattattgttgatgcattttcccaacccttgcatccagctgttcgtcagaggttaggtgaacggtatctactccattgtggcgcagatgcgattgttgcgcggcttcgcgataatgatatttctttaaatgttattgatacccttcttgcaggcgatacagagtttttgttgaatctcggcgatttacaacttgaagtgaacagactcggtaatgcggtattaaatcgctatatttctcacgtcaggcaacacgctgaaagaacaaaagacagggagactatcagcatactgattgggcacatgaagccgggctgtgtggatgccgatattgccatcaagatttcaaatgacacatccctgccaccagatatccgattggcgacctggaatctagcacaacagaaactaacccccgagattcagacgctcgttgtgcaggcgatggccgttgacgagttctcttcaaacgcctcggctgtcacagttttatcgtcctcgtatgttgatatcaacaccattatccggcttattcagtcgccccaggtaccgcaaataaaagccatagatattatgagtggcttattaaatgactggcaaagggagggggcgacttcaaaattcgaagagttagtaactttagatggactcgataaagacatacggctcattgcttgtctttttgcagtaaatgccggattcctcgatgcctttgatgtgttgctcgatcagcttcctgttatgaacagcgacatggtaatgagaacaattgacttgttgggccataaacctgaacgcgcaattgttgaacaagccgtatctgctttagcagggcgcaagtggaattcgaaagagcgcgtatcaattgtctgttctcttgcaactggcctgagatatcgcaagaaaatgtgcggccttaatgcaggtattctggagtctattccactgcatcctgggcgaacctctccctacagcttgatagaagagtggatcgctcaggatgattatgagccttatgactccttgcggcttctgctcagagctgtggaactgggtgttcccaatacgatcagtaaactacaggacgccttttatctggcgatagggcacagcattgaaaaagatgaagataacgactctttagctggtcgcgctcttgaagcacttcatgccaatggcaaagcaccttctgtcgacaaacttgaagagttagccctttcaacaacatacaactttgcatccagcattgttgaggtaattgccaaaggtgggaaagtgtctgacgtcgaaattttgttgcgcctgtacgaaagcgcctcatcgacaatactcagaacacttatattgtctgttcttgagccactcactggacgtctggggttacgcattactcaatcagggaaaaagctcatcgcgacggcaatttaa

SEQ ID NO: 164830 - DNA, 243 bp, Enterobacter cloacae; identical to SEQ ID NO: 102759

SEQ ID NO: 164831 - DNA, 225 bp, Enterobacter cloacae
gtgtggcgggaacgctctcgtcatacctggcaactggatatctcgtggctcgggacgcaggagattaaacgccagaatgagacagctgcagagagtgacaacatccctgctgaggatcagctttcgctggagcttgaggttccgcctgtcgcgactgagagcactggagtgcccgccgtcggggagcaagaaagcaattctaacgatgtgcggcaaattccgtag

SEQ ID NO: 164832 - DNA, 252 bp, Enterobacter cloacae; identical to SEQ ID NO: 102761

SEQ ID NO: 164833 - DNA, 1311 bp, Enterobacter cloacae; identical to SEQ ID NO: 102762

SEQ ID NO: 164834 - DNA, 894 bp, Enterobacter cloacae; identical to SEQ ID NO: 102763

SEQ ID NO: 164835 - DNA, 753 bp, Enterobacter cloacae; identical to SEQ ID NO: 102764

SEQ ID NO: 164836 - DNA, 972 bp, Enterobacter cloacae
atgattcacactctgtctgactcacccttctatagcaaacgacgcatcagcagtatgacagcgctatcaaaagcgctgaacatctctcctatcgaactactttatctagctaatcgtgcggacaatatgtaccgactcgccagcactatcactaagcctgacggaagcacgcgccagacttgggatgcatatgcacctctaaaaaaagtacaacgcaatatcaggcgcaatattcttgattacgttgtttatccagcatatttgacaggtagtctaaaaggttgtgattataaaactaatgcaactttacacgctggttctacgattgttattaatgaagatatcacgcgttttttcccgtcaacttcagacacaatagtgcataacatatggcaacatttctttggcttcgataatgaagtagctgaatgtttgaccaagctgacgacccgacaaggggagctacctcagggggccatcactagttcatttctggctaacctggcgttttggaaagatgaaccggcactgcaagccagttttcgggcaagaggaataatttattcccgctacgttgatgatatcgccgtctcgtcagtaaactttcttgataaaccggctaaaacgaatgtgatagcctcgatttatggcatgctttccaggcacggttaccagcctaaacgagctaaacacgaaatcagaacatctgggcaacggatggaagttaccaagctttcggtgaattcaaaacctggtctctcttccgccaagcaaagtcagatacgatcggcagttcatcatttggagcaagccattcttaggggcgaaattatcgagttcgataagggcccttatgcacaaacattgggactagttcatttattggccagattccatcctggcaaagcaaaaaaacttaaacagcgcttgcttgctcttaagagtgcggtgcgcatgaatatgtatacatag

SEQ ID NO: 164837 - DNA, 291 bp, Enterobacter cloacae
atgaatatcggacaggctatcaagttatgccgaaccagaaggggaatatcacagacggatttagctcggaaggctgaatgttctgtttcttatctttccatgctcgaaaacaataagcgagatccgacgctttcaacccttaacagcattgcctctgctctcaacattcctgtcagcattattttctttattgcagcagaggccggtgatcttaacggtattgataagggactccagggagagcttgcgcgtactgcgttggagctgcttaatgattcacactctgtctga

SEQ ID NO: 164838 - DNA, 240 bp, Enterobacter cloacae
atgaatcacgatactttaaagaacaccatcgcaacgcttgaaaagctgcgcgatgctcactgcagccaactcgatgctggcgctctggcagagctggaagatgtattgcgtcagttacgcagacatcgtgacagtccggtaagaggcgggttccggtttgacgatatcgtcttccgggcactgcgtattattgacgttgtggttcgtctgatcacaaacattgatgattggatgaaataa

SEQ ID NO: 164839 - DNA, 2340 bp, Enterobacter cloacae
atgagtaagctgttgttccgtctggcggcatggcgtgctcgccgtcgcgcgaagcctaatgctgatatggtaaggaacgagcatccggacggagggattggggctgaagcgccgattcggacagcatccgaagatcgccttagaaggtccggattcgcggctcgtatagccgacgtgctttcggagcttaatttgcgcgaaggccgagtgttcgctattcgtgggggatggggcttcgggaaatcatcactgaaaaaccttatcaccgaacggctcgatgccaagagcagtggagcggactggctcgactttaacccatggcaatggggagacggcgatgcaatctcccgcgcgctatttggccagatagcagatcgattgggaggcgagcattcgaaggctgcgctcgatcgtgccgaagcactgcgacgctacggagcgatccttaccggggtcagtaagcctcttaaagaggctgggagttcaggtcttctaatctcgacggtgctaacaaatgcttcggttatagctatcgcgtcggctattggatatgaccttccgacagttgcaaaggttgcggctgttcttgcctttctctcggtcggagtacctcttctcggacgcgtactatcgtatctcgggcgtgaccatagcggcgagtctctcgacaaggtacgcaaagcgcttgagactcgtcttcgcgaacttgaccggccgctggttgtcttcgtcgacgacattgaccggctcgagcctgatcagatcaggattcttcttcggcaggtaaaggcgaatgctaatctaccgaatattgtttttgtgctcctgttccagcccagtatcgtagagcgagcgctagatccggttgcagacaacgacggtcgagccttccttgaaaagatcgtgcaggctaactttgatttaccagccgtaccgacatctttcgtgcatcgtatgttcgaggaagaactctctgaaatagcgggcccatacgcgactgaggccaacgggttctctcagagacgctggggtaacgcttgtattggctgcatccagcccctccttcgcaacatgcgtgatgcacgtcgtctcatctcttccattgctgttcacatgccactgcatgtggtcggcgacgtgttcgaggtgaacatagtagacttcctgcttctggaaacactcagggtcttcgaacctgacctccacgatgcattgttccgtgagagaggattggttctccaggaaggacgcttctcccgtgatggccgacgaaaggtggaccaagcagcggctaaggagctgcttgagaccgtctcagaggagcgccgcaatatcatttgtgatgcgcttaaagacttatttcctcccctcgaatgggcgtatggggggacaaactatgcagacggcttccatcgccggtggttgacggagaaacgagtatgcacttcgcgctacttcccacgttactttgaactgcagacgtcggttggagaaatatctgagcgccgtttcgttgattttctcaatgcaacagcgacagaggacgagctctttgctgaaatcgcagccatcgaagctgacgggctgttgaattcgctcgttgcgaggctcgatgaatccgtcgaccgattaccaaccgagaatgctactgttctgctcccagaaatgttcagaattgctgaaaaactcgcaggcacgaacagcggctctttcgactcgttatatgtagcagcatggcgagcgacaagttggtacttgaagcgaattcctgaggatgttcgaggcggtttagctcttgaagcactccgtaaaactgaagcgctatccgttacctcaatcctgatccatctcagcgatccttccgatcgtaatgagggtgagagtggagccttcgagccagcgttagatctcatcacggttgtggcaatgaaagctgaatggttgcggttgataaggatccgcgcagcagacggcgatacgctgattgctgaaccggatctcatatcactgctctatcgctggaaaaactatacagattcaatggacgaacctcgagagtgggtgaggaaagccattcaaaccaaccaaggcttcgcaaccatggtcacacgcctgatgagccgaggtacgagccatacttacggtgatcgcgtctccacgcagcacaacagtttcaataaagagacaattgacgactttattggcattgatgtggcgaaagctaagtgtgatgcgattaatcctgcccagttccctgagcacgaagaggccctgcgaacgctgcttagatatctcgaaaagtggctcggattgagagaaaaagacatgtccgatttctag

SEQ ID NO: 164840 - DNA, 408 bp, Enterobacter cloacae
atgaaaactgttcttatcgcgttcgccacccttgctgtactggccgcgatgcccgctcaggcggctgatgaggacgctataaaagtcaatatcaagaaaagtggctacgaatgccatgactgcgtttatgtcaccgtgaccgccagaacagacaacattcagatagacaaaattgatgttaaccgggggcgttgcccgcaactgaaacagggaaagacaacgtataacgggaagaccaccccggaaggatggtggcccaataaaggtacgtttaccccccgcaaaatgcagtttgccgagagtctgacctggcgtttcggaaatccactctggcagtccggtatctcgtgtaatttcctggaggcccggatattcaccgaccagggcaccttcaccgtcagtgactaa

SEQ ID NO: 164841 - DNA, 228 bp, Enterobacter cloacae
atgaaaccttttattatcagtatctattgtgtgctggctcttatcacggccatttatcaggctgtatgggggactcaggcatggcgtggcctggcttatgccatcggacaggggctggtatggcccgcagtctggttcccttcactcggcagcattatcggcgggctcatctggataatcattatcgtgttcctgctcatcctcggtttgtttatgcgtaaatcgtga

SEQ ID NO: 164842 - DNA, 246 bp, Enterobacter cloacae
atgatgaaacacaaagggctttttcttgcctccctcctgctgttaaccgcgtgtgatgagcccaggggaaaacgtgcctttatgcgcgaatgcacctctcagggtgataccgccctgtgtgactgtgcctgggagaaactcgttcagcgttacggtcaggactgggtgaataccccccaaatttttacctcgcctgattttattgcttacaccggtcaggctgctgctgaatgcatggcggaatga

SEQ ID NO: 164843 - DNA, 837 bp, Enterobacter cloacae
atgattaacagacaaaaaatcatccgcgtcaccggactggtgatagcgtccctgtacctgatgtttacccaaccggctgccgccgctccggctgacaatcttccccgtctgacaaccgacagcgaagggcatatggtctgccacctttgcgggccggagaaaaaggacagttattttctggcggattacccccagggatataaagtaaagaccgccagctacagcaaaatccaggatacgagccgctatgccattctgatgtctgacagtgccccgggagcggctgcgaatcagacgcctgattttttctacattaataaactcgcgacaacgcctgccatcagcagcattcagttcgataatgaccgctcaaacctgagcagcgccagaagtgtatcggtaacagagaaaaatggcttcacgctgctcagcgttatctggaagaacggagatcgtaatatcttctcgctggataatgaagcaccggcttatacagcccagattctgcgttcacaggacgacagtctcttttgccgtaactgcggcggtaaagggaaagatacgctgattaacggtgctgacgaggctggattatatactcagcttattgattcgccgttcctcgccctgctgaagcaggacggcggtattgcctgccctgccggtaactggtatgtcgtcagcaaaacccgtgaaccccctgaaatccgggaaatcaccggagtgggatgcgatgaaattgcagacctgaaaccctccgtaaaagctggcgtcacaacgctgaatatccgctatatcaatggtaaggcgaaaaacctcactctcgaaaatcactga

SEQ ID NO: 164844 - DNA, 234 bp, Enterobacter cloacae; identical to SEQ ID NO: 102738

SEQ ID NO: 164845 - DNA, 255 bp, Enterobacter cloacae
atgcggtatgttcctgcggacgcccgccaggccggaatatatccggtatctctggcgaaccagccaggctgccgcgccatctctgatgacgacctgtgcgcgtggtgcacccatctgctctaccgccccggcgaactcagcctctgccggttaagcctcaccgacgaccgctggccctcacactgtgatgaagacggctatgcgcaatcctgcccgtcactcaggttaaaccggtctccccaacttaatgaatga

SEQ ID NO: 164846 - DNA, 396 bp, Enterobacter cloacae
atgacccgcaacactctgccactcttcaccccggaagaaagcgttccgcttgcagcgcaacatcagattaacgccacgctcgtacctgatgagcaacgtatgggcttctgcgcagactacaacggcggtatctggaatttttatactctcagcaacggcggggcgtttatggccccggaagcggagaacagtgagtcgtggtcgctgttcaacactatgaacggcaacggcggtgaactcagtgccgaagctgccggaatagccgtctgtctgatggcatacagccaccacgcctgccgtaccgaatgcgacgccatgacggagcactactaccgcctgcgcgactatgcgttgaaccacgcggaatgtggtgccatcatgcacatcatcgactga

SEQ ID NO: 164847 - DNA, 480 bp, Enterobacter cloacae
atggaacaacagttaccgctgtttgcacgtgaattagcccctgctgaccagcaaaccatcagggaagccttaaccctgctggcgtgccagctacgcgaacctggcgtggcatttacctccagtagctcagtacgtgactggttgcgtctgcagctcgcgtcactggagcgcgaagagtttaccgcactcttcctcgataaccagcatcgcctgatagcccacgaaacgctctttaccggcaccatcaaccatacgcaggtccatccccgcgaagtggtgaagaccggtctgaaatacaactgctccgctgtcattgtcgcccattgccacccgtcagggcttgccgaacccagcaaggccgatcgtcagatcaccacgcgtattcagcaggcgctggacctggtggatatccgtctgctggatcacctggtggtcggcggcatggaaatagtttcgttttctgagagaggctggatttaa

SEQ ID NO: 164848 - DNA, 360 bp, Enterobacter cloacae; identical to SEQ ID NO: 102736

SEQ ID NO: 164849 - DNA, 921 bp, Enterobacter cloacae
atggctgcatttatatcaccagaagttagtcatgattttcaaaactattacaacggttattataattctgctgtaatatttcccgaacccttgtcacgtataattttcaatggcgccaaggaattaggtttaggtatatcggttagtttttttgtttttgctgttattagtatctccctaaaaattaaagcgttggtaaggttgcaattacctgtttctctttttttattggtgtattttagtaagctatttttattgcttgacctgacgcaggtaagagccgggatagctgtagcattttgtctcttggcatttgaatcttacattaaaaacaaaaaaacaagcacaatactttatatctttttggcttttttattccatttaagctcaataatgtttttagtgatatttgcttttaacagaaacaagccaaggatctctttttggctggcatccatgcttctaggtttttgtatttcatttatcaatattaaaccttatttgtttactttgatgatttttatgcatgcccctgcaaattatttatcatatttaagtgatgattctgagtttgttgttaacccattcaatgcattagctttgatgaatgcagctttattcttggcattttgtatttataattcagcgttaaaaactccggtgattaaccttgcatttaaactttatggcgtatcagtaatctcgttttatgtttttatcgatttccctgtgttaagtttcagaattagtgagttctttttagtttatcaaatagtacttttatcatgtttctatttttacattaatgcttctcagcgatggatttactcaactattatttttatatatgcatgtgctcaactctatctgacttataataaggctgcgataatagaatcttattcttcttttttaatttaa

SEQ ID NO: 164850 - DNA, 600 bp, Enterobacter cloacae
atgttaatactggatcatttcctgaataaattattaagatcatttgtttccattagattaaaatcttacaaaaaccttaaggtcggcaaaggcgtattaatcaacaaaatgcccttagtaaatatacataaagaagccaaagttattatcggagaaagatgcacaatcaactctcaaaataatggttatcatgttggtatgtttatgccaactaaacttatggcagaccgagcaggcgcactaatcaaaatcgggagtcaaactcgtatacatggttcatgtttacatgcatataagtcgattataataggcgaaagatgtctcatagcggctaactgtcaaataatagattgtaatggccatttactatcctttcaaaatattaaaaatagaattaacacttcagatgacggtgagggtataacaattggtgatgatgtttggattggaactggagtaattattttgccaggagtttcaataggcactgggtcagtgattgcggcaggtagtgttgtgactaaaaatattcctcctatggtaatagctggcggtaatccagctaaagtaataaaagttattaacgagggtgataattag

SEQ ID NO: 164851 - DNA, 771 bp, Enterobacter cloacae
atgctaaagccaaagaaaatatactcagttatggcagataaaattgctgtccgtgaatatgttaaagaaaggatcggtgagaaatatctcataccaatgttgtggacatctgaaaatttaacacgtgtagattgggattcattgccaaattcatttgttctgaaagcgaatcatgcgagcgggactaaccttattgtacattcaaaaaatacgcacaatttcgatagtgttcaacaattgaccaatagctggttaagtactgattttagtaagatcaattttgaaaagcattataaacatatcaaacctatgttgctcgcagaacaattattaaagtccgaggatggacgtatacctttcgattataaagttcattgcttcaattctgttaatgacacaaagttttttatacaagttgactatgatcggtttgaaagtgagggaactgcacattcgcgtgatttttttgatcaggaatggaattttgtaccttttacccttgattataaaaactctacttgtcccgcgtccagaccaaataatttagataaattactttctctatccaagaaattaagtgagggtttagcatatgccagaattgactggtacatcataaatgatgaacctttatttggtgaaataactttaacacatggttgcgctggcgaaaaatttactcctgaaaaatataataaaatgtggggtgaactatgggatgatatatatgaaaagcatcacagtaaaaagctacatagcaaaaagggctaa

SEQ ID NO: 164852 - DNA, 1218 bp, Enterobacter cloacae
atgaagcggttctacaacatggagtttcttaaaaattttataggattatcttcgataaatgttctgggtatgttaatacccattattacaatgcctttcctttccagagttctaggtgctgatggatatggtatcgtactgcttttttcctcattatctatctttatgcttgtgatcatagattacagcactaatattacgggggttagggatgccgctggaaatataaatgatatcgctgagttaagtagaatatattcgaagtatcagcgattgcggttaatattaacattactctacattccgctggctttattatattgccatatttacttccacaatatgagtttgatgttttgtttggaagtgatatttgtttcagctcttggttattatctgacttccccctggtttcatcaaggaacatcgactctatcattcttttcttttagtactgtttctgtgagaatcatacaggttctgcttattttttccttagttaaagattctaacgatctggaaaccgtaatcagattgaatgcatatgcttttttaattaccggtgttacattatatatttttcgtaagcaaagaatggggattataagagtgaaggagagaaccccgttaatcaatgacttcaaagaaggctttgacgcgtttttaggcgaattttcaccgaatctttatagtaatattcctcccctgattattggagctatcgttagtccggtaatatttgcatgttactcaatagctttgagaataattaatatttctggaagttttcaatctattgctgctaaatctctttatccacttgtggtaaagggaacctcgactatgagagtattactcttaattaatttgattctctcagcaattccttttttggcgataatgttctttggaaatgaaattattcatttgttattgggtagtggttatgaattagctcatacataccttattatttgcgcccctgctttaattctgtactccatcatttgctctttttcttatggtttctttttgccaaagcgattggactcgtattttaaaaagacttcgttattttcttcgataataccagcaattattgggtaccctttaatgcatcagtatcaggtgtatggcgcacttataatgttactcatcgctagaggactttttgttattatgtttgtgtattattatttaaaagtaaaaaataactaa

SEQ ID NO: 164853 - DNA, 783 bp, Enterobacter cloacae
atggatggaaaaaacaggcatggcctttctcgttacattccagaagatgttaaacgtgaggtaaggcagcgttgcggattcggctgtgttatttgcggctttggattttatgactacgagcattttaagcctgactttgcggatgcagaagttcatgacccgaatggtatgacgcttctttgttcgcaatgtaatcagaaaagagcgcgcggaaggctttcggcccatacagttgaaatggctgatcgtaacccgaagtgcaggcaggaagggtttgcgagtgagatgtttgattttcataatgcgcccataacaatcaaattcgcgggggttagtttccataattgccaacacttgatcgttgttaatgaacagccaatcttatctgtaaaaccctctgaacatcccgatgggccaatgctcctgtctggcatattttgtaattctatcggccaggaaacccttcttatccatgagaacgagtggcaggccaaaacagacaattgggatgtggagtgtgttggacctagaatcaagattcgcagcgcgcctggggagcttgtccttgttatgaggatggaggtgccaagcggactggtaattgagcgacttgatatgttgtatgaaggtgtcaggatcaaaggcaatgatgacttattaaaagtgtctataaatggcgggatatggcaagagtggtatacctgctcaatgactaattgctttacaggaatatcgattataagtcgctctagcgctgcgaacgatcctgtttactatacttga

SEQ ID NO: 164854 - DNA, 525 bp, Enterobacter cloacae
atgttgtactgtgatttaattgagatctttggtccggacccgttgaataataaagatgaaggaatttccattcttcgcgagaagtatgggattgaagcgccagaacaagtttttgcgcaaatttattgcgggttatctaacgattctagatttcaggccttgtatgggcatctaaatcttaaatcacttaaatgggatttggtcagattgaaaactgctgagttcactgcgtttggtacaaatgctacctatcctgaacacatgcttgagatttcggaagattataatacctgcggcaaccagttttgtattgatgcaagagaagaggttgtacaacattggcttaaattcggcacatgggacgaaccaccgatgtttattgagcgttctctcctttcgtctgatgagagaggcttgcacctcatggaagggcatacaagattaggtactttgcttggtgctattaagtacggatttgtgaagttagctgacacccatgaaatctatatagcctccatgaaatag

SEQ ID NO: 164855 - DNA, 303 bp, Enterobacter cloacae
atggcgtttaaattagccattgctgattataagtacatggtcatgcaaatgccgcatcaactagatacagaggagttgaggaaaaatcattctaacgagagaaaaaaactaaatgacctgctctcagcgtgtcaccatgcgtggcttgtcactgaagatctcttgctttcaaatgatgaggttatgtacaacctgcgacagattctgaatactcacggatattaccttcaaggaacccggaaatctgaagagttaatgatttattgcgatgccattcttacacaaaaatttattttctcttga

SEQ ID NO: 164856 - DNA, 438 bp, Enterobacter cloacae
gtgagtgataagcccctgttgctcgtattcctgaataagcgcgagttttcgggcgttttcattcgccagttgctgaaccggatcaatgccacctacagcatcttgctgtggtgtcaccgcctgctgcgcgcggatttttgccaggtttgcctggtgtgcagcctcgagtctctcagatgtcttattgaactgctcttggcttattttcttagcagccagagcggtattcagatcctgaacatcttgcttatagcttgcgttttcgcgcgcttctggcaggagtttctcggctgcggcttgtgctttgagtgcgttggccgtatcccattttgccgccgcgtactgccccgccagctcgagctgttcttttgtggctccttttccgagagactgctgcgcattaaggatcgcctgctcgcgactaagcttatttgttga

SEQ ID NO: 164857 - DNA, 444 bp, Enterobacter cloacae
atgaagattaaaatcattgatttaatatatattatatcattgcttgcatgtattgccttccccttttggttatataaacatcacaatgcctatgatattagatatgtaaaatcagattttactaatgatattagatactctattgattcgtgtagttttgataagaataatgtcgcagttaaaggttgggcattcctaaaaaatgggcaaatctcaaagatcacaagattatatgttgatacaggaaaagatatattaccattatacaaagtcaccaccaaaacaccagatgtgatgaaactgtttggagaaggtaaacgttataatatgtcagggttttatggggcaaaaagcattaactataaagatgcctcattaactctaataatttcaatagaagatacggatggctatattcatgagacaaaatacacttgtcaataa

SEQ ID NO: 164858 - DNA, 1197 bp, Enterobacter cloacae
atgagacaaaatacacttgtcaataacgctacaaatattgttgtttatgtggctattgctattgttctctacaagctaggatcttctcttggcttaagaacttatatggatgacgatgtatactttgtgaatgctctcgccaagatgtcgctgggagagtttttaaatatgagatatatgacatggagtggaaggattattattgaggcaataatggtaaaaaccattaacatacattacacatggagggtaatgataccttgctgtctcttgttgctttgccactcagtatataaattatcttcaggaaaagatggtttttcaccgaaatgtgttctgttgattatgctgctattcttttgcatgccaacaaaaacatatacagagggagctctatgggtaactgggttttataactacctgctgcctgtatcattcggcttgtattctatatcagtactgaatgcataccagcaagcgagcggcatgcagaagtcattatccattctagctctcccaattgcgtgctcaaatgaacaaatgggtgtgacaatgattgccttcattgtttattcatttatgatcactagatcaattgatatatacagaattactttttcagtattatctctggcttcgtttgcattgttaatgctagctccagggaataaactaagatttataggtgaatcaagaaggattcctgagtttgctgacttcagcatgcttgacaaaatcggtatggggttggatagatttagttcattggtaaacagtcagaatttactaatgatgtttacatctattatgctggttattttatactacaaattatataaaggtagatttcagatttttggtgttgctgcttcttgtttcgtcatcatattcaacatagctaaagaagtgcatattataccaagtcagttcatgtctcctggtgattgggtaaatatatcattttattttagatacatgttatcattgttattctatgtgacatttatatacctttctttgttgatttttaacgaacaaaataagcatgcgattatatttatggttgtttttgctcccgctacggtattaatgatagggttttctcctacagtgtatgcatcagcagatcgcgtcctctttatgtttgaagcaatgttacttactataagcttctctaccataagaaaattaatataa

SEQ ID NO: 164859 - DNA, 1908 bp, Enterobacter cloacae
atggctaccactccgacaaataatccagtgccaagtgaggcacccgctgatcttaagttcaatgccggtaaaattgatgaattcgtaacatctccagggcatcaatacattgacaggaaaggtgtagcgcatcgtacaattgctggaatcaattacgatgcaaatcaggcaattctgaattatggctacatcacgaaggactcttttgagctgggcaataccctcaattctgctaacgaagttctgcgctggcaaagcaatggctggtactaccgatgggatggagcattccccaaagtagttcccgccggctctacacctgatagtgctggcggaattgggaaaggtaaatggttgggggttggtaatgatgcaactctgcgtgaagaattaaccgatacgaatggcggagactcagtcgtatcaagtcagtatggtgggaatattcaggacagctatgtaagccgtcagagggctgtagctgatggtgtgcatcttttcctagtttatgggcaatccaacgctaaagggcaggctgcaaattctgctggtgcgccaacatatgtctctccacttgctcgttattataatggttcaacgcttgcccctatgacggcatatatgattacctccaatgacagcgctagtactggaggcgcatggcttgcttttgccaataaatatattggcctgagcgggaaagagtgcgtatttacaaacagcggtaaagacagtcagtctatagcgcagttgcaaaaaggggactcaagcaataactacgctaacatgcttaccttctgcaatgcggccaaacaaaaaattatggcagagggtaagaccatttctgaaataactgtattgtttgttcagggagaaagggatgaggctctggcaacaactaaagcagcgtataaagcagctttaactcagttgtggacagacttgaaagctgatacaggtgcgactcgtctttttaacttcacagttgggacatataacgactcaacaatgcagataaatagctgggctattcaggatgctcagagagagtttagcgctgaaaataacgatgtttatactgcttctgagcttcttccacgcctaaaaacgcaagggatgggtgttgacacagtgcatttgaatcaaaggggatataatatccttggagaggatggcgcaagaactgtggacgatatcattaatggaaacaaggctaatgatggcttgccattactggatcgacaaggcaccctgaacatgtcttatcagcaagattggatgttgcatggggcatggatcacgaaagcaaatggcgcatggaatttcagagccgatcagtcaagggcagtatcactgatatctgcaattcaggataacgctacagattatttgctcgttaaaattccaactgaccttagctaccttctttcggctgatggtactaacttctacgccagcggctatccagaacttaaaattcgattcgataaatcgatgtatatggatcgtgatgagggcggttatacattagctaaaatgtatttcattgcagatgttcaggttcaggttaacctttcgaccaaggcatttaacacgacaggaagaaccaatctggacttatccagtgtgatgaccggtgttttcggaaccggagtgtttactctaacccatccgtcgtgttcatcaattccaatttgccagtccatgacggcaggagcaagtttcttgtctgtcaggcagtcatctaaccagactggaaccatagtggactgtgtggacgtaaactctgcgcccaaaaatatctactttatgatggatatgaaggggatggttatccctccacgggcgcttccaaacggcattgaagtgttcttcagtgtgattggtgcaaagaagactggtctttga

SEQ ID NO: 164860 - DNA, 210 bp, Enterobacter cloacae
atgatcaaccactacggcaccaccccgctcattcgccagtgcgtcacgcccggcatgatggcaatgcatgaaggtcgcacctatcgagtctcagcggtcattcaggagcgcaaatgggtgtacctgcacaccgatgcagaaatcatccgcctcagtgactgcgtgattgacgttcttttggacggtcacggcaacccaatcgttcactga

SEQ ID NO: 164861 - DNA, 213 bp, Enterobacter cloacae
atgaacaccacttccagaatggcaacactcatcaccatgtttgtcatcccggcagcaatggcggacgaaaacccccactgcgttgcagtgacagatggatataacgtcactaccgttcaatgtgacaacggcacagtaacggtcaccagtggagggaataaaacagcggttatatgcaactcaagccttaattgccgggagataaaactatga

SEQ ID NO: 164862 - DNA, 147 bp, Enterobacter cloacae
atgaagcgtaatgcagcaattgcactgctgataataactgctggagcaaccggtgcttctgtttactacgatgccggcgcactcagtgtggtagccaccctgatgaccataggcgcacttgctaatgtcatcaacgacttcctgtaa

SEQ ID NO: 164863 - DNA, 876 bp, Enterobacter cloacae
gtggaaaataaagatcagcgcctagaaatccgtattccccagcaacaactcgccgaagttgatgccatcattgattccattgatccccgtttcaagccgagccgctccgatgtggtccgttcctttattgcccagggcatcgaccgccactatggccggggcggacaggtgcaggacaccctcccgctgggccagcgcatcaccctttttttccagatctgccagcaacagcagatgcagtatgccctggaaagtaagcgccctcccgtgctgggacagcgccgcggccataacagtaatattacgccggaagttctggtccgacaggtctatctccagcgcatgttctggttctttgaactgaaccgcagcagtcttgcggcgattgacggggtgcttacctgtgatgaggtgctttccctgatggagccggagccgggacgggaagtctgcgcggaagtgaacggggtggcgcaactcctggcaatgttcagccagattgaagcggtacttcagcgggcagaagaacagggcagttatacggacgtgcaggaaaaactgaccctgatcagacactatatgtctcgctgccatattccccggcgttttgacggttacccggagacctggggccgccacaaccagattgccgcgctcatgcagtgggttgatgagggtaaagccgggagtgccgggtgccgcgggtatggcagtcgtatcttcacccgtcacagtgaggatgcggacgcgggccgccagtacgcactgatgctgcaggtctatcaggacatcacgggtgatggcggaaatcttgatctcgaacgcctgattgatatggtccaggatcgccggcttgatttttccacaccggcctga

SEQ ID NO: 164864 - DNA, 195 bp, Enterobacter cloacae
atgaagcaacaatatcaggtagtacaggcgcgctggctggccagcctggctccgtcgcagcgcagcgggagtcaggcggaaaggtttgcagatgaatgctggcagaccggcctgcgtctggcaccggaccaggcaacgcattaccagacggtgatggcgctgatccggtggtcattcaccgcctgccgcatttaa

SEQ ID NO: 164865 - DNA, 399 bp, Enterobacter cloacae
atgtcgttaaaaatgagaatggtatatgcagttattgtgtcggttctgctacctgcggtgcatgcaacccctgttgtactggcaacgccaacctctgagaaatacagccaaatttttaaattttgtgaagacacttataaaaaacagttagatgcgggaattataaacgctcttgccgctaatattcaggccggttgttttcttgccgttgaagccagcttaaaaggcgatgcctccgaataccgttcagccgtcaaacgacttaatgctaaagaaactgtcaccgccatcgatatggccagcgacccggaagcaatgatttccatgcagtatgatcatagttacgtgggttcttttgattatgctcaggaagttcttcgccgcagtggtggccagtaa

SEQ ID NO: 164866 - DNA, 129 bp, Enterobacter cloacae
atgccgggggaagagttgtttacagcggtggctgataagccggaagggggcctgtcatcactgaaaggcccgcaagtgcgggccaggaacgactttagcgctgcttccagaattccagtaggatcataa

SEQ ID NO: 164867 - DNA, 417 bp, Enterobacter cloacae
gtgaacaaaacctatatgctggacacctgtatctgctcgttcatcatgcgtgagcagccggaagctgtactgaagcgcctggagcaggcggtgctgcgtaaccaccgcatcgtggtctcggccattacctacgccgaaatgcgcttcggcgccaccggcccgaaggcctcgccgcgtcacattgagctggttgacgcgttctgcgcccgtctcgatgccatccagccctgggaccgcgccgcggtggacgcgaccacagagatcatggtggcgctgcgcctcgccggaacgccgatcggcccgaatgacacggccatcgccggacatgcgatagcggtgggggccattctggtgacaaacaatacccgggaatttgagcgggtgccgggcctggtgctggaagactgggttaactga

SEQ ID NO: 164868 - DNA, 231 bp, Enterobacter cloacae
atgagaaccgtatccatttttaaaaacggcaacaaccgcgccatccgccttccccgcgatctggattttgagggggtgagcgagctggagatcgtccgggaaggggacagcatcatcctgcgtcccgtccggccgacctggggctcgttcgcgcagctggaaaaagcagacgcggactttatggcggagcgcgaggacgttgtcaccgacgaaggacgggttgacctgtga

SEQ ID NO: 164869 - DNA, 612 bp, Enterobacter cloacae
gtgtctatccttcatccaactttggaaaacatactccgtttaaaggttgcacccactcccggtgagcttcacttgttaaatcaccttacggagaacttggatgatagctacgaaattttctttaatccatttattgatggggatcgcccagactttatcattcttaaaaaaaacacggcaatttttattgttgaagtgaaggactataacctagttaattatagtgtggatgcttttaataaatggcaagttagttctgaaaaaggggtgtcgaagatttcatcacctcaatcgcaagctttcaggtataagtcaaatttatataatctacacttaccagtattaggtctgtcttatctaaaaaatcgcaatttttttaacattgtccagccgtttgtttacttacacaaaggaaataaagccaatatagattcgttatattcccacgcccagagtgaattgatggcgcaatctaggtatattgatgcacaatacaggaataaagaaatttctatagagcaatacaatcaacaggcagataaaatctcgcggctaaaaagaaagtcaagtagagataagtccatggcttacggcgctgatcgaataaaataa

SEQ ID NO: 164870 - DNA, 411 bp, Enterobacter cloacae
atgaagaagacctatatgctcgacaccgggatctgcgcgcatatcctgcgcgaacagccggcggctctgcttaagcgcctggagcaggcggtgctggccggcgatcggattgtggtcccggccattacctgggccgaaatttctctggccgcccgggagtcagggcctgccgctcagctgctggcggatgcctttgccgcccgcctcgatgccatcctgccctgggaccgcgccgcagtggacgccacgacggacgttagggtggcgctgcgcctcgccgggacatcgatcggcccgaacgacacggcgatcgccgggcatgccattgccgccggcgccgttctggtgacggggaaggggggagagtttgagcgggtgccgggcctggtgctggaagactgggttaaatag

SEQ ID NO: 164871 - DNA, 534 bp, Enterobacter cloacae
atgaaaagagaaaaatccgttataacgttcctaatgtcagctttcgcattttgtttggttattataattggaagttatattcttaactttaggagcagtccaatatctaataatccctctgactggggagttttaggtgattatttcggaggtattctcaacccattaatatctttgatcacgctgtttttcttgataaaaacatatttatctcagaaagaagaacttattcaaagtgaaattgctgctgatgagcagcgtcaaatttcacaaaaaaccgcctatatacagttattaagcacgaaaatctcagcatcttatgaaattgtcgcgttgtatagaggagaaatggagggcgtgaccaatgccatgaatgccccaggaaatggcaggtcttatacctcaatggagggtcaacgctattttcatgacgaggaacaacgagagtacaggctattaatggccagaaaaataaaagcagaattaggaaaaatagatgattatctaaaagaaatagaatctcttcccaattga

SEQ ID NO: 164872 - DNA, 216 bp, Enterobacter cloacae
atgacagagctggaaaagcagttgctgaccgcattagagcagctacatcaggactactcgcaaaggctggacgaatgggagagcgccttcgcggaatggcagaagatgtctgggcttatgcaacgggagaacgcggtgctgaacgagcgcgtgtcggacttgagcacgcaggtgctgagtttaagcgagcagctgcgccgcttgtccgggaactga

SEQ ID NO: 164873 - DNA, 354 bp, Enterobacter cloacae
atggtatcgatagcggatcatccgccagaaacccgcagcacaccacgcaagacgcttcggcgcccggcaaaaattctcgcaaacgaaacaacgctgatgaccggcattacaaccgacatttcgatcgatgggttgagcttgatagcccgagatccgcttcctgctggtcaggtatatgttgtcgcgttcgaaattccgattggcaatgccttaaaaaaactcaatattggggggaaagtcacctactgcgttttgaaaggcatggagggctaccgcatcggaatgaaatttatgctggtgcctccggagacaatggaaattgtccgtagattcttcgcggaagagtccggctag

SEQ ID NO: 164874 - DNA, 882 bp, Enterobacter cloacae
atggattcggataatatggcgaccgccggcgcacctccacgaactttagtcagcgccttggatcagagcgaacaggtcaagcacaaggttgaggaatgcgcagaaaagcttttcgctgtgaataccattctggaagatggaatggccagacatttgccactcgaacgaatggaaggtgcattgagtcaaaaccaagaaattgaagacgaagtgggggagtgcgtcgaggacttgtcgtcggtaaaacttgccttgacgaaggaaattgccgatcgggaatatctggaaagtgaactaaaaaatagcaaaatagaagaaaaagaatcacgctatcacgctttacatgatgcgcttacgggcttgccgaaccgcgcattatttgatgaccggttgaccaatgctttggcacatgcgcaacgccacgagcgaggtatcgcattattgtttattgatctcgatggctttaaaaatatcaatgatagttatgggcacgcgaccggcgataaatttttgtgcactgtagcggagcgcctgagaacatctacccgggctgcagatacggtttgccggtacggaggcgatgaatttttgtgtttgctgctggatgtggctgacgaaaatcatgtcgccaaaattgtcgagaaaatcgtaatgaatatatccgcgccttgttatcatggaggggtgcggttcaatgtgaagccaagcattggaatcgccatgtttccgacggacggcaagacagcggaagtctggataaaaaatgccgacgcggcgatgtatgtagcgaagcaaaataacaaaatgaacccgaatgcggcgggttactggttcttcagcaaagtcgaaaaaatagagataccctcgttttcggtgcgataa

SEQ ID NO: 164875 - DNA, 969 bp, Enterobacter cloacae
atgcataataagcacgcaacaattgatattgttttagcaacctataatggtggtatctatatagaagaacaactcaattcaattattaatatggttggctttaatgatttagttaagaatgttattgtttgcgacgatagttcaactgacggaaccctgcaaattgttaaaaaaatcattcctaaaaataagttgataatacttgaaaatacccaaagaaagccatttggtcctgccaagaactttgaaagagggataaaccatacaactgccaattatgttatgctttcagatcaagatgacttttgggaaaaagataaattattagcctattatgaagaagcacaaaaactaaatgatcaaaagccgttcattatttttagcgatcttgaggttgttgactctgatttaaatactatcgatccttcatttctacattttcagtcgattgataacaaatggtacgaaaagatcaataatctattaattcaaaacatggcgccgggctgcaccatgatgtttaacaaagagttaattaaagcaagtatgccttttcctagagactgtttaatgcacgattggtggttaatgcttgtgtgtaacttatacggtcagataaagtttatccaagataagacctttatcaaatataggcagcatagtagcaatcaagttggcgcaaaaaaaaatagtattgttaacaatattttgaatctatccaagtcaattaatacgtcatctgttaatttacataaaacaattaaacagatgatggattttaaagaacgataccacaacgatataccatccgaaactaaaagttatatcgaagctttaaatttatttttagatgctaaatcatcgccaatccagcgagttatagaagcaaaaaaagttaaaatgcagaaaagttcattcataaaaacagtgggcacttatttgataatttttaaaggattaaataaataa

SEQ ID NO: 164876 - DNA, 717 bp, Enterobacter cloacae
atgagcactatgaccaaagaacgcgcagcacaaattgcagcaggcggcggatttaactttgatgagattgcggtgttggcgcgtatcgctctggcctcgctcgaagcggagcctgtggcgtatatccgctcagctcataatccagatggattttgttttgctgatggaattcatccgacccatcgccatcaaagactccctttgtcgacattgcaagatggatgctattggagggtaacaccgctattcaccgccccgccagttccggtagaagataccgacatccagcgcaaagccgcaattcacgacgctctctgcgaaaagtacaacgtcgagtcacttgctgatttcgtggaatggcaaaggaatcacattgctgaacttgaagcagcaccaccggctccggtaggcgagggagagactgcagtaatgccggattatcccggttacgtgatgacgcagcgtgaatgctttgaggctggcaagaaggcggggatggctgaacttgtaacgacggctaacaagttgcctgatggttgggtggcttgcagtgagcggatgccggaagggatgaaggatgtacatatatcaaatggtcatgacgtaggtcagggttggtgggatggagatacctggcaaactcaacacgattactattctgtacctggagatgtcacccactggatgccactgccagcagcaccgcagcaggattaa

SEQ ID NO: 164877 - DNA, 210 bp, Enterobacter cloacae
atgactactatcgtaatagcctatgatgtgcaggacgacaagatcaaagagatagagcggttgctgaatgacgttgctatccgtgacgtaaattggaacggcgtgcagctcgaaattgaacgcggagaatttacctgcattccagatgatgaaagcgctgatgctgtaaaattgctcaataagatacaggcaataatctctgattactga

SEQ ID NO: 164878 - DNA, 189 bp, Enterobacter cloacae
atgagtcctttaatcgttaccactatggttgtttacgccttctgtgctgggctggttgcagcaagagtctggcgccgggtaaacaacctgaatttcatgctcaaagagaagctggtcattactgccatatgggcgtgctgttgcttagtgtcgtggccgttccttggggtgatggaggagcggaaatga

SEQ ID NO: 164879 - DNA, 1323 bp, Enterobacter cloacae
atgaaaattgacgattcggcaagaacattcagtctggtcactcttggacgtgatctgggtaagatgaaaaagggcgatcgggtatgggtggtatccgacgatgacaaccttgcgccagttactccggcagcatcaggcagtgcgcctgtctttaatgatgtgcatgttccggccacgccagtgcctgtcagtgccggagacagtctcgggcatatgggcttttgtcagctaccggaagaaaatggtaagcactcacgttaccaggtacatattgagtgcctgagtatggatgatatggagaaattcattaccaatcccggtaatgtggggaacgattcaccggtttacctggcctggcagaaagatgcagctttatctgacaagggggataccggaatgacagcaagtaatcgtaaaacaaagatatcgggaattctgtcacttgcaagagtccctggtgttgatgctgccgggaatgctctgtctagtaacaaggatgcggcctggtttcagatacgccctgaaggcggctggctggctgccggtagtgtgcagaaactgtcacagtatgcgttaggtgaactgggttttgtcacattgaataaggcaccggaaagctttgacctgcttgacggcataaaacagccgaataatgtggtgaagggaatacttgaacaattgtataaagtggcccaggaagaaatccggcctgcccatgcgctgaataaatataattacgagcgcctgctgaaacagatagacagtaaccaggatgggcactactcagagcaggagtatcttcaggcggtgcataatgcgtcctaccgggaacgtctgtaccgtattatcgcgaagcacggaagtgaatggtattacggcaaggatgactcgctgtggaaaacctacctggatacacttaccaaggatgcgccagcctggaaaacgtatttggaaaccttcattgataagatgacatggatgaaaacggtgactgagaagggagtgtcactggggccggaattgcggcatatgcatccggtggtgtttttggaagcgatgaagggaaagtcaaaactaattaatgttgatgcttttattgctctttatgaaaaagaacatgttacttttgcttcaggtacgccagttttatctcaaggttcaaaggataatttgaaaaaatactggagagcattaatgatttttatccaaaacatttggagtataaaccaaatttatatggtatttcgtatatgcttgccactactaggcatgagacatatcacttcccgactggtgagttttttagtgaacaaccagaggtag

SEQ ID NO: 164880 - DNA, 249 bp, Enterobacter cloacae
atgaaaatcgcaattatcggcagcggcatcgccgggttaacctgtgcctggcggctcgccggacatcatcaggtcacgctgtttgaggcgcaggccacgccgggcggccatactgcaacggtggatgtcgacacgccgcagggcagctttgccatcgataccggttttatcgtctacaacgaccgcacctatccgcgcttcatgggttgctcagcgaactgggcatctgcgggcaaaaaacgcagatga

SEQ ID NO: 164881 - DNA, 198 bp, Enterobacter cloacae; identical to SEQ ID NO: 116769

SEQ ID NO: 164882 - DNA, 357 bp, Enterobacter cloacae
atgaacaatcactcagaatccggtaccgagccggagaatcccgcctgccagcagtggggactacagagtacgatcactccctgttttggcgctcgtctggtgcaggaaggcaaccgcctgcattttcttgctgaccgggccgggtttaatggtgctttcagcggcaaggatgcgttgcgcctggaccaagcttttcccctgatactcaaacaacttgaactaatgctgaccagcggtaagctcaatccccagtatcagcactgcgtcacgctatatcacaatgggctcacttgcgaagccgacacacttggtagttgcggctacgtatacatcgccgtttacccaacccaacgctaa

SEQ ID NO: 164883 - DNA, 516 bp, Enterobacter cloacae
atggaacgtgtcaaaagtactacttgtaatttgctgttaaacacagtgattttatttgcggtcacgtcagaagcgtctgccgccacatcggacaagttgcgtcaggcgcataatcagcgctgtgccaaaccggtgttttacgcgcagaccacaaatcaaaaaaaggaggtggagatttgtattgtcactccgtcggtttcatattcgttcggcaaggtgggggcaaaaagcaaagagatggatatcaccgtcccggcgcaggcaaccaattacgcataccagagcaatcatgtcatcaatattcaggattttacggtcagaaatggggatacaacctatcaggtttcagcgggttcgaatgattcaggggagccttttgcatcgctttatgtatataaaggcactccggagactggaaagctgctggccgaaatcaaactcgacccgaatacggtagccaacaatatcagccattctttggcgaatgatggggtcgctcaggcagacggcctgtga

SEQ ID NO: 164884 - DNA, 552 bp, Enterobacter cloacae
atgaaatcctatccgtttcttcgtgcggacttatttgcctggtgcctggcggttgtccttccgctcctctggattgtcctggccctgaattttccacagactctcgcgcttgtcatttatatggtcgtagccctgatatgggtgttgctggaccggacaaacctgatgaggcagagcatgacaccaccttcatggttgtggtttcctctgaattttgtctaccttcgccagcgcgaccagatgcagggcaaaccgtggcggcttctgcaggtctggttgctttgtacagtgctgtcattcgtggcgatatccctgcttaaccggcagtcaggcacagaaaatctggcgcagagtgcctgcactttggtaacgaaaatcctgcatgaggaggggggtgacgaacgctgtatccgtgtgatggatatgcaggaagaagtgcgtggccgtttctggcaggcacaggcgttgctgaacaccggcgctaaggagtcggttaccattgagcgcaggggccgggatatttatgtcgtattacccgaagcgggggagtaa

SEQ ID NO: 164885 - DNA, 882 bp, Enterobacter cloacae
atgaagaagccatccccgacagacactccattcaggcaaatcctctcccggctgcctgctgaagcagcaaataagatacaccgccaactccacagcatcattaattatgaaccccgcatcggtctgatgggcaaaaccggctcaggaaaatccagtctgtgcaatacgctttttgctccgccaccagctattgttgatgccgtaaaaggatgcacccgccgggtgcaacgctggcatgtcagccataataatcgcacgcttcacatcatcgattttcctggtattgccgaaaatccggagcttgatgtcctttaccagagaatttaccggaactggtcgtcaaatctggatgtgattgtgtgggttcttaaagctgatgagcgtgcctggaatgatgacatccgctgctatcgctcgctgatagaagccggtattgctccgtcgcgctttgtttttgttctcagtcaggctgacaaaatcgagccctgccgggaatgggataatgaacagcatcagccatctgatcggcaggttattcatattcatgctaaagctgaacttgtcagaacacaattcaccgccgtgcatccggttatcgccgtatcggcaacagaaaattttaaccttgagcgatgggttgaggtcctgatcgacgcgctaccgataaagagtgctagtgcttttatcagtcaccttgatcctgaactcagaagtcagcgtgtacacaagaccgctcgggaaggttttatccgggcctcgggcgacatttttgatgatgcagtgtcagttatacaaacctccggaaaactgataaggcaattacatcatcttcgtcagcgatttttgtcagtcattcgtgccatctggcatctcctgttctga

SEQ ID NO: 164886 - DNA, 870 bp, Enterobacter cloacae
atgaccagtaaaaacagaatcaccgttaatttcaaaaaggagtccttccggcttcttgaaagccttgccagagagcatggtccaagcctggccgggctgactcagagtattgtcactgctgcagtaaggaataacgtggcggataagctgtatctggagaagctacgctccagtgccgcactgatgaaatatagtgataaagaaaatgaggacaccggcaaaatactactgcagaccagtaaacgtgatgaatacggtaatgagaacatcgtgctcagagcctgcccggttaagcttggtgattatattccgcagccagtatttttagcggagagagacgctgcggtgattttaaaagagagggtgagggaatgtcttaaagaacatatcaaaaattgtatccctgcggttgtggggcaactggggggaactccggacatgctccatcttttcgtcaaaagagcaaatgttcgttgcgacaaaacgcaaaaagacttttggagtattcgcatcaccccggaacttcatgttatacctgttttcaataatgatcttcatagaagcaggcttgatttcctgaatattagatatcgtaatttcagggatgtggcagttaagggttgggataaccaaaaatatgaaaaaatgctgcttattgataccgcgtcccgctctcgttccggtggttactttatcggtgtttcatggtctgatattgattatttaagctatggctatgaggattttctacctaaagaaatctctttttcacgtggtaaaaaagaattactttgtcaaatacatatccataaccgggatgtgaatgtgaaagttttcaacgaaagcggtgacagaattctctgtcggtaa

SEQ ID NO: 164887 - DNA, 705 bp, Enterobacter cloacae
atgaccgaactattaaccgagaatcccttcccgttaaatccagcaactcacaactaccactatatttatcgatttggcagcactatccgcaatgcattaatcatccatccccgcttactggctattcggatcgacctgcgctttcctgatgactacgaggtggaggggaataaagctatgaagtcgtttatggcggcagtcacttccagacttgaagcaagatactggcagaaaaagagaacaaatcccggaaaacatgtccactactctgaactgaattatatctgggtgagggagcataaccggtgcggaagtaaagtacattatcacgtggtgctgatgtttaatggcgatgctttcaactcaccgggtatctactggaacaagggcaacctgacagacctaatcatcaatgcctggctcagtgcgctcagaataaaaggcgaccaatatcgtgggctggtctatttcccgaagcattcatgttatcgcctcaatcgaaaaaatctgggcagtacacctgaatttaacaaactgatgcagcgggtcgagtacatggcgaaacaccggagcaaactgtacggcaagattcgctccatgggatgctctgtgtatgacgaaacagaactgaagaacaaaaagaaaagaagcctgtgtggcaagcaggcttcttccttgaaaacttcgctgccccagttgcagtga

SEQ ID NO: 164888 - DNA, 207 bp, Enterobacter cloacae
atgaccaccgtacctgccctgcttaatgaccagcttgttgatatggcattcatcacaacctacaccggtatgaccgacaaatggttctacaagctcattagcgaagggaagtttccaaagccgattaagctgggacgaagctcccgttggaaagaaagtgaagtgaaggaatggttactagagcgtattgaacaatcgcgtgactga

SEQ ID NO: 164889 - DNA, 873 bp, Enterobacter cloacae
gtgaattattcattattaaacaataacctgaaaatgccgatggcaggttttggtgtttttcaggtaacagataaagaagagtgtaaacagtcagtattgactgctattcgtactggctaccgccttatcgataccgcagcagtttacggtaatgaagatgccgttggtgacgccgtacgcgaggccattgcagaagggttatgcagccgcgaagagctatttattacctcaaaactatgggtacaggacatggccagttacgatatggccaaagcagggattgaggcgtcgttagaaaaatcagggctggaatattttgacctttatttactgcatcaggccatgcgtgattacttcagcgcgtggcgagcgctggaagatgcctatgataccggtaagcttaaggcgattggggtgtccaatttctatgctcatgtattagcaaatttctgcgaaaccgtcagaatcaggccaatggtgaatcaggttgaattgcatccttactttgcgcagcctgctgcacttgaaaccatgaagtattacaacgttcagccggaagcatgggcccccttaggcggcggaaggcataagccctatgaaaatgaaatgctgcagcgaattgctgatactcacaaaaaaacagttgctcaggttgtcctgcgctggaatgtgcagcgtggtgtcactgttatccctaaatccacccgccaggaacgtattgaagagaactttgccatctgggatttcgcattgactgagagtgaaatggaacaaattaacacgctcgatttaggctacgttggtgatgccgtgaagcactttaaccctgaatttgtgcgtggctgtcttggtgtgaaaattcacgatcgctaa

SEQ ID NO: 164890 - DNA, 1053 bp, Enterobacter cloacae
gtgcagacgttagaagcggacgatagcgcgagagaaaaacgcaggaaaaataccggtaaaattacactcgctgaagtggcaaaactggtcggcgttagcacgatgaccgtgtcacgtgcgttacgcatgcctgaaaaagtgaatcctgaactgcgcacacgcatcgaagcagcggtaagtgagctgggctatgtgccaaatctgcaggcccgcagccttgcctctgctgactcgagcctggtgatgggcgtggttccctctttttcctctccgggctttcttgccgtctccgaaacactgcagatcgtgctcgcgacccagggctacagcatgatgtttatcgagtccggccagggtggacagagtgaagaaaaagcttttgcgcagatgctcgcttataacccagctgctattgtccaattcaatattgataacatcagcagttgttcgcaaatgataagtaacaccggcgtgccggtggttgagattggtgccatcaaccgagatgcaagctgggtcagcattggtgttgactacgctgccgccatcaaaaaattggtcacattgcttgtacaggcgggatataaaaatatcggcctgctttgcactgcttccaataacattatgtttcgccaggtgctgagcggttggaacagtgccatgatctccattaaccactcaccacatcgcgttgtgacctctcatcttccggcaggcattacaaccggtttaaatctactgaacgatattcgtatcacctggcctgagctggatgcgctgatttgcacatccgatgaaatcgcctgcggttgcattatggcctgccatggtgcggggcaaaaagtgcccgactctctggcactggcaagcctgagtggggggactcttgccgccgtttgctcaccggctctgactgccgtcgaattcccctggagtgaaacgggaaccctcgcaggacaaacattgcttgatctactggcgggtaattcgacggataaatccattgaattaccttcaacgttacaagttcgcgccagcaccagaaagcagtag

SEQ ID NO: 164891 - DNA, 441 bp, Enterobacter cloacae
atgattacgacctggttaccaacggaaaatatccagattgtggattcagtcagcgactggaaacaggctattacgttatcggcccaacccttattggcgaaaaaggcgattactgaagattatattcaggccatttttaacagccaccacgagcttggcccttattatgttttagcgccaggactggcgatgcctcatgctcgcccggagcaaggggcaattaaaaatggcttatcgtttttacatattaagcaaggcgtttcttttgacgcggaagaaaatgaccctatttacgtcgtgattatgctgtgtgcactttcgggagatgagcacatcaatatgattacagccctggcggacatttttagcgatgatgaacgactctcatcactgctgaaagcatcatcaatggaaacaattcaagccgttatcaacggatag

SEQ ID NO: 164892 - DNA, 267 bp, Enterobacter cloacae
atgaaaaaggttctgattgtttgtggtaacggtttaggtagtagctttatcgttgaaatgaatgtgaaaaaaattattaaagagctgaataaagaagcagaggtttcccataccgatctgacttcagcaaaaagcgaaactgccgatattattcttagcgccagggatatagctgaacatctatccagccattctgcacgggtatttggtttatcgaatctgctggataacaataagattaaagaaatcctttctgaaaatctctga

SEQ ID NO: 164893 - DNA, 1263 bp, Enterobacter cloacae
atgctgcagtttattattcatgatgtgttgggtacaccagcaatactggtcggtttgttttccctaattggcttattattgcagaaaaaagcagtttccgacgttatttcaggaaccctcaaaaccattatggggttcgtgatattaacatccggggcggcgattatcgccacgacgttaacgacgtttagccagctgtttgagcactcattccatattcagggcgttgtacccaatactgacgccatggcggcgctggcgcagaaaaactacggtaccgcgacggcaatgatcatggtactggggatgttgtttaacattgtccttgcccgtattacgccactgaaatatatcttcctgacaggccaccatactctgtatatgtcggcgatgctggctgtcatcctctctgtcggcggtctgtcgccattctgggtagtactggtgggggcggtaatcctcggcatcatgatggtggtctccccggccattctgcagcccttcacgcgcaaaataacaggtactgatgacctggcactgggccactttggatcaacaggttatctactgtcagcgctggtggggaaagcggtcggtaaaggcagcccgtcgattgaagagctgaaggtgccgaaatcgctgaatttcctgcgtgactcttcggtcgccatctctctgacgatgatgatcctgtttgtgattctggtgctggtagcaggaaaagagtttgtcgagaccaacatcagcggtggtcagaactttatcatcttcgccattatccagtcgctcaccttcgcagcaggcgtgtggatcatccttgcgggcgtgcgcatgattattgccgaaattgttccagcctttaaaggcatcgccgacaagctggtgaaagacgctaaaccggcgctcgactgccccaccgtctttcccttcgcccctaacgccgtgatcgtcggcttcttatcgagctttgccgctggtctggtgagcatgttcctgtgtccactctttggcttaagcgtcattgttcccggcctggtaccgcacttcttctgcggtgcgacggcgggcgtttacggcaacatctgcggcggccgtcgcggtgcggtgataggtgccttcgcacagggtttgttgatctcatttttgcctgcaattttgctgccgctgatgggcgaccttggctttgcatccaccacctttggcgatgcagacttcggcgttgttggcatcatccttgggcatgtcgtgtcactgtttaactaa

SEQ ID NO: 164894 - DNA, 678 bp, Enterobacter cloacae
atggcagctaaattttcgccctcgttaatgtgtatggatttaacgcagttcagagagcagattacggcgatgaacggtcgggcagatttttatcacgtcgacattatggacggcagctatgtgaagaatataacgctgtcaccgttctttattgaaaacctgaagaaaatcaccgatgtccctattgatgtgcatctgatggtaaatcatccggaagacattattccgatgtgcattgacgcaggggccgatattatcagcttccatccggagacggcgaataacaaaatcttccgtttgctgaaccagattaaagatgcgggtcgccgctgcggcgtggtgttgaatccggcaacgccagcggatgccattaaagagtacgcgcacctactggataaagtgacggttatgtctgttgacccaggctacgcggggcagaagtttattccagaatcacttaacaaaatcaagcaactgattgccatgcgcgaagcaaatggttaccactacctgaccgaaattgacggctcctgcaacgagaaaacctttaatgtcatttcccagtcgggtgttgacgtttttatcgtgggaacctcgggcctgttctccctggcggataatgtcagcgatgcatgggataaaatggtcgatatctaccagcgcgaagtcgctgcctaa

SEQ ID NO: 164895 - DNA, 1992 bp, Enterobacter cloacae
atgacgactcgtcgcaccctagcgaatgctttgcgcatgctttctattgatggtgtacaaaaatccaattccggtcacccgggtgccccgatgggtatggctgacattgccgaagtcctgtggcgtgatttcatgaaccacaacccgcagaacccttcctgggctgaccgtgaccgcttcgtgctgtctaacggccacggctccatgctgatctatagcctgctgcacctcactggctacgatctgccgatgtctgaactgcaaaacttccgtcagctgcattccaaaactccgggccacccggaagtgggttacaccgctggtgtggaaaccactaccggtccgctgggtcagggtattgcgaacgcggtcggtatggctatcgctgaaaaaacactggctgcacagtttaaccgtccgggccatgacatcgttgaccacttcacctacgcgttcatgggcgacggctgcatgatggaaggtatctctcacgaggtatgctctctggccggtacgctcgcgcttggcaaactggtggcgttctacgatgacaacggtatctctatcgatggtcacgttgaaggctggttcactgacgatacggctaaacgtttcgaagcgtacggctggcacgtggtacgtggtgttgatggtcacgacgcagacgccatcaaacgcgcagtcgaagaagcgcgtgccgtgaccgacaaaccgtccctgctgatgtgcaaaaccatcatcggtttcggttctccgaacaaagcgggtacccacgactcccacggtgcgccgctgggcgacgctgaaatcgcgctgacccgcgaaaaactgggctggaaatatccgccgttcgaaatcccgtctgaaatctatgcacagtgggatgcgaaagaagcaggccaggcgaaagaatctgcctggaatgagaagttcgctgcttacgcaaatgccttcccacaggaagctgctgaattcacccgccgtatgaaaggtaaaatgccgtctgacttcgatgcgaaagcgaacgaattcatcgctaaactgcaggcgaatccggcgaaaatcgccagccgtaaagcgtctcagaatgctattgaagcattcggcccttggcttccagaattcctgggcggctccgctgacctggcgccgtctaacctgaccctgtggtctggctctaagccaatcaacgaagatactgccggtaactacatccattacggtgtacgtgaattcggtatgaccgcgattgccaacggtatctctctgcacggcggtttcctgccgtacacctccaccttcctgatgttcgtggaatatgcacgtaacgccgtgcgtatggctgcgctgatgaaacagcgtcaggtgatggtctacacccatgactccatcggtctgggcgaagatggcccaactcaccagccggtagagcaggtggcttccctgcgcgtgaccccgaacatgagcacatggcgcccatgtgaccaggttgaatccgcggtagcgtggaagtacggcgttgagcgtcaggacggtccaaccgcgctgatcctctcccgtcagaacctggcgcagcaggagcgtactccagagcagctggcgaacatcgcacgcggtggttacgtgctgaaagattgcgcgggccagcctgagctgatcttcatcgccaccggttcagaagttgaactggctgtagcagcatgggaaaaactgactgccgaaggcgtgaaggcgcgtgtggtttccatgccgtctaccgatgcgttcgacaagcaggatgcggcttaccgtgaatccgtactgcctaaagcggtttccgctcgcgtggcagtggaagcgggtattgctgactactggttcaaatacgtgggtctgaacggcgctatcgtcggtatgaccaccttcggtgaatctgctcctgcagaactgctgttcgaagagttcggcttcaccgttgagaacgttgttgcgaaagcaaaaagcattttataa

SEQ ID NO: 164896 - DNA, 465 bp, Enterobacter cloacae
atggacatttcgagtgtacttaatgtaaaaaacatcaaattgaacatgatggctagaagtaaagaagaagcaattgaagaattagctgacttattagtacgtgatggggctgtcattaataaagatgtttttctgaaagatgtctggcaacgcgaagaacagggctctactggattcgaaaatcatattgcgatcccgcatggtaaatcctcaggagtaacccgaacggcattggcgattggacgaatccaacatcaaatcccttgggaaacgatggatggtagtgatgttcgctgtattattttgtttgctgtatgcctggtggatcaaaatgccacccacatccggttattatcacaggtttcaggttcacttgccgatgaagagatagtggacaaattactgaaagaagattcccctcagaaaattattgatcttttgaacgctgaaggtgccagcgcttaa

SEQ ID NO: 164897 - DNA, 312 bp, Enterobacter cloacae
atgaatattgttggaattacagcttgcactgtaggcattgcacacacctatatcgcgcaaaagaaaattgaaatagcagcaaaaaaagccgggcacaatgtcaaaattgaaacacaaggcactataggtatcgagaatgccttaaccgctgaagaaatagcacaagccgacatcatcctgttagccgccgatgttaaagtttccggtgaagaaaggttcgctggaaagaaagttgtcaaagtaccaacggaaatggcggttaaatcaccaaataagcttatcgaaaaactcgctgaattagtaaattcataa

SEQ ID NO: 164898 - DNA, 1107 bp, Enterobacter cloacae
atgaatataaaagaaatatggaaagcagcaaaccctaaaggccatctgctgactgccatctcattcttgattccgattgtctgtggtgctgggtttattattgccatcggtatgggttttggggggacggttcaggacactttagtaccgggtcaatttgatctgtggcaggccttcgctaccatgggggctaaggcgctcggactattacccgtcgttatcgccatcggaatttccggttcgatcgcgggtaagcccggtattgccccaggttttgttgtaggtctggcagctaattctattggtgcgggttttatcggtggcatgatcggcggttacatttccggatatattgcacttgctatcattaaaaaagttaaggttcctgactgggcccggggcttaatgcctacattgattgtgccattttttgcatccattctcagtgccctgatcatggtctatatcatcggtacgcctattggtatttttactgatgctctcacatcgttcctgagaagtatgggaacgtcatctaatttactattaggtgccgttattggggcgttgtgtatcgttgactttggcgggccgatcaataaaacctgcttcgcattcgttttaacccttcaggcacagggcataaatgagccaattactgcccttcagctcgttaacacggcaacacctatcggttttgggcttgcattttttatcgccaaacttcttcgcaaaaatatctataatcatgaagaaatcgaaatgttaaagtcggccgttcctatgggggtagtaaatatcgttgaaggatctatacccatagtgatgaatgatatcgttcgcggtattgccgcagcggcaatcggcggtgcttgtggtggagcaatcaccatggtatatggcgctgatgcaactgtaccttttggtggggtattgatgctcccaacaatgtcaaaccccatggcaggtattatggcgttgatagttaatatattggtcacagcaaccatttatgctgtcatcaaaaaagatgttcctcgtgatgttgttataaacaatgatcaagaagaggaagatatcaatttcgatgacattaagattagttaa

SEQ ID NO: 164899 - DNA, 492 bp, Enterobacter cloacae
atgactattattatgattcttctcgccatcatcggtggcgctatgctgagtatccaggcggctatcaacggccagctgggcagcaagattggcgtattcaaaagcgcgttcctgacattttcgattggcgcgctggtgacggggctgctgatcttcttctttgaacccaaacacgccgtgaccctgatggacgtgcctaaatggcagctgatgggcgcaatgtttggcgtgccgtatatcgtcattatggtactcgccgtccagcgcattggcgcagcagttgcgacggtcgccgtcatttttggccaactgaccatgagtatgctgatcgataacttcggctggctgggcaatgcgtcgattccgttctcgatgagccgactcggtgccatcgtctgcctgggtattgcactgttcttcatttactccagcagcaaaccaaaagccgcaccggcgaaaaaaactctgcaacaggcagccgctcacaaataa

SEQ ID NO: 164900 - DNA, 435 bp, Enterobacter cloacae
atgcaactgatactgattttaatcgtaattgccggaggtatgggactgtccgtagaggcaggattactcgggccattgggtggcgaggtcggtgacctctgggccaccttcagcgtatttggcgtgggcgcggctctgaccttcctgctgatgctgtttttcagcccgcgtaacagcccgtcgttctttgcacagccttcctggcaactgcttggcggcgtacttgggccgatttacgtcatcatcctgaccgtggcaacgccagcaatcggtatcgccatgaccatgatcggcatcctggcaggccaggtctccaagagcctgattattgaccacttcggcctgcttggcacgcctcacaggaaaattgacagtaaacgcatcatcgcgctcattttcatcattgcagcgctggttatggttgcacaggggtaa

SEQ ID NO: 164901 - DNA, 951 bp, Enterobacter cloacae
atgaatgatcccggaaacatcagtattcgcgccctgctgatttttatagacgtttatgaaacgcagaatttttcggttgtggcacggcgagaagggatatcggcctctcaggtatcgcgcatcatccatcagatggaggatgcactcgggcagcagctcttttaccgcaatacccgggcgatcatcccaacggaaagctgtcatctttttatccgccatgcgcgggccatgacgggcagcctggaggaggcgcggcgggagctcaacgagagaacgcttgagccttccggaatggtccgcataaacgcccccgtattctttggacagcgacatgtggcgtcagcgttacccggcctgacggagcgatatccgaagctcagcattgaactcacgctgaccgatgactacatcgatccgcaccgggatccggctgacgtcatttttcggattggcgcgctgacggactcttcatttcatgcgcgcgtgtttggccagcagttctatcatcttgccgcgtcaccggattacatccgccgatatggcatgcctgagtcacctgaagcgttcgctcatcataaatgcctggtttatcgcggctcatcggggccaaaccgctggctgctgcgcaggcccggagaggaatgggtgcattatcccgtttcgcccctgatgtcatctaataatgctgaaacactgctgattgccgcgctcggagggatggggattgtgctgtttcctgactggctgatcggagagcggctgaaaagcggcgaacttatcgacctgcagccacagttggaaaagtccataaaaacggagccgcagcacattgcggcgatctacccgaatgcccgccatcctccgctgaacgttcgggcgattattgattactatcttgacgccttcggctccccgctttactggcagtctaaagtagatttaccgcgttga

SEQ ID NO: 164902 - DNA, 924 bp, Enterobacter cloacae
atgtttttaccggacagacttaagggcatcagcgtgtttgtagtggtcgctgattcaggcagctttattgctgctgctgaaaaactgaacctgacgggctctgccgtcagtaagagcgtggcgagactagagagccggctgggaaaaaagctctttaaccggacaacccgctcgctctccctgactgaagccgggtatcgctattactgcacttgcacgggcatcctgtctgagctggaggaaacagaactttcactcactcttgaagaacgtgagccttacggtaaggtcaggatcgatctgcccgcttcatacgggcgtatgcacgtgttgccggtgataatggcctttacccggcaatacccgctgcttcagccgcatattacgttcacggatcgcttcatcgatccggtgcaggaaaacatcgacatcgtagttaggattggcggaccggacgtatggcactctgcgctgggccatcgctatattggcgcacagcggctggtcttctgcgcctcgccggcgtatctgttacggcgtggagtccctaagtctgtgcgggatctggataagcacgactgtattggctatgcgctcggtgccgggatgatctctccctggtattttactggcagcgaaccgggggaaatggagcgcagagttattcccgcaagaatagcgctgggtgacggtgagagcgagcttcaggcggctctcggggattacggcattgcccagttgccgctgtggctcgtgcagcaacacctcgaaaacggcacgcttaaacaagtgataccagaactgtctatcgacgggatgccgatgaatatcgtctggctgaaaagtcgtgagtctctccccaagatccgcgctctgctcagtgaactcactgataaactaaccccaacgggcgtgatccgctaa

SEQ ID NO: 164903 - DNA, 1128 bp, Enterobacter cloacae
atgtcagacattttcagcagttttaaagtaggcgacaccttattgtcgaaccgtatcgttatggcaccgatgacgcgctcacgcgctccagaggacatcgcgaccgaacagaccgcgctttattacagccagcgtgcaacggctggtcttatcgtatcagaaggtacgccaatcactcgcgaagggcagggctatctgtttaaccccggtatctacacccctgagcagattgccggctggaagctcaccacggactccgttcacagtgttggcggtaaaatttatgcgcaactgtggcacgttggtcgcgtatcgcatacgtcaattcaattggataatcagccccccgtcagctcgacaacgaaacccgcatccggtgcaaaggcattcggttacacggacaacggtgagccgggattcgtagatacttcagttccccgggcgctgtctacagaagacgtggtacgcgtgattaatgatttcgctcaggcggcagaaaatgccattaatgcaggatttgatggggtagaaattcatggagccaatggctatctggtagagcagttcctgaatccggcggttaacgatcgtactgaccaatacggggcggacacgctggaaaatcgtcttcgcttcgtactggaagtgacagatgccatcatcgcgcgcattggtgctggccgcacagggatccgtatttcaccttacggccagctgtttgacatgccgctgtatccgcaagcagaggaaacctacaaggcgctttgtgcagcactgggtgagcgtaacattgcctatgttcatgtgatggaccagacaaactttttctttagtgcagacgattcccaggctgcggatgaagccattcgtaaattgctgaaaaactgccgcgagggtctgaagtccacggcactgattctggcaggcgaccttaccctgggacgggcgcaggaatatatcagttccggattaatcgatctggccggatttggtcagccctttatctctaaccctgatcttgttgcccgcctaaaaaacggctggccgctggctgaaccggaccgtgatacctactacggcggcggtgcgaaaggttatatcgattaccctccgtttattaaagcctga

SEQ ID NO: 164904 - DNA, 537 bp, Enterobacter cloacae
atgcaggaagcacaaaagcacaagcacattgctcaaaaccgaattagtcttggtgttgatggtagtgatggttcgtatgtagatattgagtttcttctgtctggtgatgatgcccgaagacttatcatcagattacttttcataccgccgtctgatgatcctgcagctgcagagacaatgtatgaaatggtgggtgatgatatcgcaagtaaactatcggttcaggttgttagcttctatgaccgaaaagttgagagtagtccatcacccgatggtaacccgtttggcaaagcagaaggtcagtttgatcttttgctagatgaactaaactatctttacaggacgatagttgagattattttccgtgtcgctgacaccgagttagtcgagctaatcttttttggtgctgacaatgagcgcctacagagtgtctacgatagatacataaggcgctattcgaagaagatggggttcgactacataaccaaaggagcatactatgcgattagaacgcaacactacccaagagaagggtaa

SEQ ID NO: 164905 - DNA, 147 bp, Enterobacter cloacae
atgcgattagaacgcaacactacccaagagaagggtaagatcgattacgctgtggtacacgcacgtaaggtcgagatgttaaagcgttttctgactgctaaaactgaagcagagaaaactggcacttatgtcgtaaaaccactctga

SEQ ID NO: 164906 - DNA, 237 bp, Enterobacter cloacae
gtggaacagaaagaagaattaccaaataagggctacgcggtcatcagatgccacgatggggttatcgttgcaagactgcactcatttcctgagagtgaacgagcgctaatgtacagacgtggtgatgaagtatccttcatgccgttacaggatgatgagatggttggaacaacgacactctttacacagatgcttgagcgtgctggttataaaatcaagttgtttgatagaaaataa

SEQ ID NO: 164907 - DNA, 222 bp, Enterobacter cloacae
gtggacggcatcagcgagcactataaacaggatatcctggtgatcttcagcgacgcgctcgctaaactgcacaaaaccctggtttttgaaggggttgaaagcgaaacgcaatatcagttcatcgcgcagagataccccgatgccctcgtacaaggctggtacttttcaaagtcgctaacccggcacgacctcgccaggctgctggcagactcagcgcgatga

SEQ ID NO: 164908 - DNA, 330 bp, Enterobacter cloacae
atggatgttaaagaggaaggtcgggttgaaggagacataaaacctgttgcaggtgccctacgtgaaagacgtttggggttattgtttttatgtacctttcttggagtcctggcttcggtggtagtggcttgcttatgggaaaatgcacatgatgatccctatgctctgctggcagtagcggtgggtggcatttgttgggttttgcccggcggtacgttaattagttttgcggtagtggcgatagctgaacggttgaatgtcgtgcattccggattgatcggcttggcgatgggctttatcgtgtatttgctaacctttggcagcttgtga

SEQ ID NO: 164909 - DNA, 4959 bp, Enterobacter cloacae
atgaaaatacacattgcagcgacccaagggttacaccaaaacgagcatgatgccattgttgccatagagaaggctctacccgcgcactgggttggatatgcgggtatcttgctggtcgacaaaaatcgcaaaagcctggaatttgatgtattgatcttcgccgaagatcgtatcctgatggtagaactgaaaaatttccacggtcaggttcgtatggaagacgagcaatggatccagaccacgccaagtgggcgtaaaatcaaacacggatctcccatcgacctcaagcgcgagcatgcagtacgaatcaaatccatgtttaaggaagaacttcgcgaactttggggggatactttctacgaaattcaggcattagtggttctcactggcgatgtcgaaatcacacagcaatctcctaaagataaaggctttgtactgacgctcgatgagttcctgaccatcacgaatctggatacctattttgacaaaatgcccgaaaccagggctgagaaatattttcgccgtaatcctgaaaagcgcccttgcgctcccggacaaattgagatttttgaaaaatggaagcgtggggggaattacgtacagatccgccagaggcttgaagcaggctatgtgctcagtgagaagaccccacggctagaagggcccaacggcttttataatgagttcgatggcgaacatgagcgcgattcggacgataaaagccagatacggatgtgggactttaccaaaatggcccatgtcggcacagacatgtctgtacgcgtcttctatggattacgtgaggaccgaactcagcggcatatacgtcgaactgatagccaactgggcaaagactatctactggagcccaagcacaaccttcaggaagatacccttaccatcgacatggcagaagtctaccaaattcctcggttggctgagcgtttggacgagtacctagtatcctcgccattgtcgattgaaaaacgtacattattgttacgagcattgctaacgcccttggccggtatgcatgctatgggggtataccaccgtgatttaagtgctaagcgcttatggtgggaccgggaacgtaatgcaatcattgtcagcggcctgacgagtgccaaatttccggatttgggacacaaaagcataagcgacatgcgtcaggacctggatacgactggtatcgtgctaccagaggatgcctttggtgagaccgaggtcctgagccaagccgtggatgtgttccaactaggagtgctgtgctaccacattgcttatggagagcaactggcattgccttgtgatgagcctccacaatggaagaagccctcaaatgatcccttcggcggtaaactggatgtttttatccaacaatgcctgaaggccaatgcatcagaacgtcacgcagatgcgggtgcgatgctggagacgcttacacgcactcttaattttcaaaacctcgatacgaacgaagataaggtccgtgtactcaattctttagccgcgttcagctctggggttatgccaataacgaaatacccacaggcagaagctccaaatatggatcccctgcgtcaacgcatgactttccgttctactacggttgatgggcagccctgtattgttcgtatctatttgaatgctcggcctaacaaggataatcacggtcagtctcagcggctgctgcacttccttgaacgctgtgctgttgtctccaaaaatattttgtcactcccgccattgattgagttcggctgcggcatgatgggaacccatatcgtccagtcctatgtccctggagaaagcctggagcagtggtttgcgctacccaaccgtagctatgaagagcgttaccaattggctgatgcgctgatacgtgcagtccataacctacacgatctggatttgagccatggcgatctgaagcctgagaacttgctggtacagatggaaggaggcaagctaggtattctgctcctagatatgtttgacttagatatggacggccttgcgccgagaaattctgagtacgccccaacaaccgacgtcagtgcaacagcgcgtgatcgctatgccgtatacatgatcgttgatgagctatttgctgcttgcattcatcccggcgctaataagatacgcaaggagatccgcaatgcgttaggtgctaacaacactgtgccacgtagtctcgacatattgcggcgcactatgataaacgcaaatgagcccgagctggttgaggttacgcccctggtgatcgagcacttgtctttccccaacgagcagggcgagttgttcgagatggactctggcatctaccatctgacggcgaactatattaagggggacgttctaaagttatttttccaaggtgtttcacataaactgaccctgatcctcaaagttgatgggcagagtcttactgtgcatcgaatgttctatgataggttgggtacgggggagatcgtctatgacacccgtaacaaccgaaagaatggtaaccgtgcaatgtcggtaggacagccctttttgcttaaaaaaggctcttatgatgcgacaaatgcggaactactggactttgttagaacattacacatagtgcagcacgctctgggcaccaaaccagtggtggaagagccatcgatagctgttggcaatgatcaaggagaaggtcttaagcgtctctggctacgtctggttgaagtagagcgcgaaacgctgcccacagtcaaagtcattgcgagccctaaggaacgcgatggaatcgttcatgtacaggttaatgagaacatcgacattttagagcttgccgacgatgaggtgattaacgtaaccgcggatgatcatgaaactcacttcggccagctggatgttgctaaatccggtaacggtatactggtgttttcggatgacaatcgcgggaataacttccgcctgcaaaacattcgggaagacacaatcctcaccctgtcaaattcagggagcgacgttagctgggagcggcgagatcgggcactttctcgcattattgctaatgacgcagtaatgggagatctaaccgaccgctttattactggccctcgcggttgccagcccccggcgttaccgatgccgaccgacgaacaaatcaaccgctatgggctggatgattctaaacgcgccgcattcctgtatttgttgcagaatccactcagtgtgttgatgggcccaccaggtacgggtaaaaccacactacttagtgcgaccctagactatctgctgaatgatgcggaagtacgccgagtacttgttgtaagtcaatcacatacagcagttgatgaagtggcaaaccgtgtgcgtgagttgagttttaagcgtcaggagcaatcccctgagttcaagccaccaagcattgtacgcctaggtgaacgtcgccgtattagcgaaggtatgttggacgtccacaccaatgccctgcaggatcaagcacgaacggcctttcaccgcgatctggaagtccgactgctagcgttgtcagcgcgcttgaaattgcctgaggcattcgtactggaatctgctgcgctgtatcgagcctgcggtcgtgaattgttcgagttcactcctgcccgaaatgaagcaagagaagccaagcaagataatattgatgtggtgaatcagccaagtataacgcgagaggttcgcctagcggctgaacgtcgactagataacctgacgaatgctttgacaggccggctgtcagcttttaccgatatgcccgaccaggtactggatcacaataagccgctgtttgcggtactcaacatgattgctgagcgacatcagattaacaatcctcagcgcattgagcggatggccgaagtaatgaaggtagcccatcactggtatcagcgattagccaccgacgagaccggctacgctgcctttgctgctcgtactcgtcaattggttgttggcacattggttggcatcgggcatggcggataccaactggataaaagcgcctttgacctggtggtaattgatgaggctgcgcgcgctacattttccgagctagccatagccatgcagagtgcgaaacgagttttgttagtgggggactacaagcaattagcaccgagttatgatgtgggccatgtacgccaagttgcacgagatctaggattaactgagaccgatgtaaaacgaacagattttgaacgggcttacgccttgaacgatggtcatatgttgttgaagcaatatcgaatggcacccgctatcggtgacataattagccactgcttctatgacggcacgcttgccacgggtcgacctgcagctcccgagtggatgtcatccctacccgccccgtgggatcgtacagtatcatggatcgatacctctgacagtaaggtacaggaaactagtattggtaaagcgattgccaatgaggttgaagttaacctattgtgcagtctgctgcgacaattagtcgacgatgaacagacgatggtgcaattacgccagtggaatgacaaagatacaacgccagccatcggggttattaccggctaccgtaagcaagttgagctcctgcagaggaggctggaatctgaatcctgggcagcgccgatacgctcaatgctgaaagttgataccattgactcctatcagggatcagaaaatcgtatcatcttattaagtttagtacgccataactccgagcaaaaaggcggatttatgaccgataatgcccgagtcaacgtggccctctctcgggcaaaagagcgtctgttaatcatcggtgccgggagtatgtggcaacaggtgaatgtatgtcagcctctggcccgcgtcttcgactatatccatcagcagcttccgtgccgtgatagcgaatatcagatcattcgtttggaagacctgccccatatcgcttgcgcagaggtgcaggagactgactatgtataa

SEQ ID NO: 164910 - DNA, 1587 bp, Enterobacter cloacae; identical to SEQ ID NO: 104613

SEQ ID NO: 164911 - DNA, 1020 bp, Enterobacter cloacae
atgaaaatgggatcattttactctgcatttgctctttcgttaattgcgttaagtttaatgggttgtgatgataaagccgttaataaaaacagctccccagcaaacaatatcgccagtacgccagcccagcaacgtcctgcggtacctcaaagtcagaaaattaatgacgagaaaatagatatctatgccagctgtttcaatgagatagataatacaatttacgaaagcaccgatcgctatgttagctggctgagcgattatattaatggccctaccggaaaagaagtggagataaatggaacttatcccatcgactacgatatatcaatgtgtgaggctgatgtcgccagagcccaaaaaatgctgccaggaattaaagcgatggatgatatagcgggtaagtatattgcttcagcaaaacagatcattccattgataaatgaaatgaatgattactatcaaggtaataattacaagaacgatcatttcaaaaagggcaaaaacttacataaaagattcgttctcgtcttcgatgaatttgaaaaagaatcgaaagaatacagtaccaaccttcgagaaattaacacccagcggcaactcatgcaacttaaagatattgaagtaaaagaaggggaatcattcaattattatgcattactcatgatcgttaataataaagaatttaaccatctggctgagaatgatatctttgatacagaccaggccgccctccagataaaaaaacttgaagggatcgttctaaaactgcgggaaaaagagcaagacggtttaaaaggcggagaggcgcgggttgtattagtacctgcttttattcgtgacgcacaagagtacgtcatcaatgccaaaagccgtgtacgtcgagttaaagataatgttccttacactgaagaagaggaaagtctgctccaggattcccctgaagcagtagacggtacgtatcaaaaaatgctcgaatcctttaataagatgatcttaagctacaataattttaatagctaa

SEQ ID NO: 164912 - DNA, 528 bp, Enterobacter cloacae
atgaaaccgattttaatgactcaaaccagtaccaaaattccatatgcaatgaagtatgcgctggttagcgcagaagataagccgttcactgtcaataaattagctctggttcttcttgaggaagttgaaggcttcactgatgagaaaaaaaccaagtcctatgtatatgcgcatctcagaaggctgcaattagccggaatattgaccagaaagcggcaagagaaagtaatgcaatatgagtacagcaagacagagttttaccacttcaacgatacaaagcttgcttctgggcatgcagatgtaagcattgatgagttatctgaagtctttgggcagcaaaaagcacgttacgaagtagagctgaatcaggctattggggagaaggaggttctggaagatttgcgaccagcattgaataacctgaaggcggactatgcgggactttttcgagacatagacaataaagtgcaaaggcttacaggcaagattaatgctgtggacaagctttacagccaaatctcgggctag

SEQ ID NO: 164913 - DNA, 216 bp, Enterobacter cloacae
atgaaccactatgagaaaggaagacatacacccgatatcgagacactccagcgcctggcaagagaactggatgttccgcttcactactttttttgcgtcgatgacgtttctgcagaactggcgtgcttaatcgaacgcatgaatactgagcaaagagcacagttactacagttgctcaaagagaagacctctgtcccctatcctgaaataaaatga

SEQ ID NO: 164914 - DNA, 1281 bp, Enterobacter cloacae
atggatgattttgaactacagcgtgtatttaatcaaataactgctacatcttccccacttgaagcacttaacatttatgagcagcacttcgatttgttgaaggactggcgaatcatctatgcttctaataatgaccatggtccctttaagctacaaaacaaagtcgtcaatggcgcagctggaatttgctccattttcagagggcaatccttatgggttattgatgcgaacatggcaggaaaagaaggcgtggttccctatattgcaggaactggaatatacttcgattctaatgtggcctcattcatttattctttaggatataaagaaaaatttggtccagagctaagaaagcaactggggagaatacagtctttagggattgactatcgaaatatcaatccttacttatatctttttgaaaacagaaagcattttgactccagacctgaaaacattgaatatggaagaaaaacttttgcggtcatgacagcgttatcacaaattgcgggtccgctggatgagtcctggcgggaaatgtacaaaaaatattttttagaacaatgtgaagaaagcattgctccattatttgaaaacttccttttgcagcataataatggggatttcactatccttgatcatcaatttgcgttgaccgagttgttgctaatagaaactaagatactggacatcgccacgaatgataataatgaacataaacttgaaaaacttattcagtttatggatgaaaaattgcaagtaatgatgctacgagagattgctgtttgtgcagatattctttttaatggaaacaatagccaactaacaaagaaacttcgcaaagtcaactgtcgtcatcctgactcacttggtattattcatggttgcgcctgggatttgttcatgtttcgtattatggactggttcagtaatacaagtaataagtttggcgccgatttctatatctcaaaccttgtttcttgtgataaggatgttttggatgttgcagaactcaccaaactaaaagctatcgcattacataacaattcacacgaacatgtcattttcccggacaacagcccggagaaaatactcttttctattctgggggaaaataaacgggaatttctgataaatctattcaactacgactcgcgccaaaaacgcattggctggacacagaaaaaaaacaacaaagagatctatgctggtaagaataaaattattcaggcacttttaaaggaaaagcgagaggagttggcatcattaattcgtcagtaa

SEQ ID NO: 164915 - DNA, 333 bp, Enterobacter cloacae
atgcgttggccctactggattttaaaactgaaagaagctctgttgcctccccggcgagtcattatcgtagagggggacactcccccattgaagctcccacgacgcaatttagtcctagcgcgagaaggcaacgaggattgggcggtggcgtttcactgtccttgcggatgtggcaagcgacttgagttactactgctcaaagaagccaggcccagttggtcaattatgattgatcagaaggacattccaacgctgcttccttcagtgtggttgcaaaacgactgcaaatctcatttctggctgcgaaatggaaaagtgatttgggtcagctaa

SEQ ID NO: 164916 - DNA, 1404 bp, Enterobacter cloacae
atgaaaatcgtaaaccatgactctcgcgtcagacttgctctgagtgagaaccatcacaaaacgctacatcagcatcttttccctggggacggcctggaggccgcggccattatcctgtgcgcacaaagttctgcatctcgctatgtcgtcaaagacatactgctagttgatcattcgacatgccgtatacgcacccacgactacatcagttggcctggtgcctctattgaagatgccattgatatggctgagcagcacaatttatcaataatactcatgcactctcatcctggagggacattggtattttctgatacggataatgacagcgatcgtgaaaccttaccggctttattcgaagccttcgaacggtcagacgctcttcatggctcggccatcatgacttccgacggagcaattaacgcgcggttttataacagccagctggaaattatccctgttggctcagtacattgtgcttgtgacgatctgaaattatggcggctcactgaatatgacagactccagccgcgccccatggctttttcatcacaaatgggtaaagatctacgctctcttaccgcttgtgtcgtaggggtatcaggtacagggtcagtcgtcgctgagcaattggctcgtctcgggatcgggcggcttattcttatcgactttgacgaaattgaatttaaaaacctcaaccgcattctcaattccacaaccgaagatgcgagcaattgcatagccaaagttaccagcatggcagctgcattctctgcatatcgtagtgacatcgaggtggtaacagttaaagccagtatatccactcgcgaagccataaattctgcaggtatggctgatgtactgttctgttgcgtggacagcttcgaaggcagacagatgtgcgatcgcatcgccgcggctttcctacaaccattgtttgatgtagccgttaccattcctaccagacaaactgaaaacggtgcaacaattggggatgtatgtggccgtctggattatgtgaagcccggaggaagtacactcgcggatcgtggtgtttataccccagaaacacttcgccgggagtaccttcaaaaagttgccccctatgaactagatgcacaggttgcagagggatatatcaaaggtatagctgatgaggcaccttcagtgataactctcaatatgcgagctgccagcgattgcgtgatggaattcatcgcccgagcatacccgtttcgccatgacccaaatagcaaacgagctcgcacaattttctcacttgcagccagtgaagaagatttcatcagcgattcagactttgagtgtgcaccaaaccatcatcttggccgtggattaattgagccgctgatgggcatgccgatttttaacaaggaggtgaattaa

SEQ ID NO: 164917 - DNA, 1164 bp, Enterobacter cloacae
atgaacaattcaaactcgccattacaagcattcgttgagcacgaagatattgctctttcccgacgagaaggacgcccgttgcgccctgctcatcattaccttatcgaagtgcttgaccctgactggcatggtactgctatcgaaattaccgatcctgtgccaaccgggcgccagattttaacggctgcaggaaaaaatcctgctgaacaatacatgcttctgatggttgatgaaaaaggcgtactcactgaggttaaccttgaagatcaagtcgatgtatacaatcagggcgttgagcaattcattttcttcgagagtgaccgtcttttttatgcatcactaaatggtcagcgctttccatggggacaatctcacattcgggaaaatgtgctgcgtaaaattggaaaaatccccgataactgctctatttggcttgaacatcagaaccggccagatgagcttcttgaggaagggcaaagcgttaatcttgatgaacccggactggagaaactgtacacccgccaaaaatgctggcagctcaatgtccaaggggtcattatcaactctgagcagccaacaatcattgccagggatgccctcaaagctgcaggttttaaccctgataagggctggattttggtgcttaaggttaagggtgagccaaagcagactattgctatggatgacgttatagatctgagaaaacccggcattgaaaaactgcgccttacccctgcagaaatcaataatggcgaagcggttgttactttttcccaggatttctcgttacttgataaggatagcaactaccttaaccagcagaactatgattgggaaactcgtctcgcaggagctcgtcgctggctgattatccatggctaccccctacccgggggttacaaccacgagcaaatcagtttagccgttgaaattcctacactgtatccagatgctcagttagacatgttctatgtttaccctgcgcttactcttagcaatgggcaaattattcgccagactgaatgtcaggaaacaattctcggtaatgcctatcagcggtggagtcgccatcttaatggggctacacgctggaatccacaaacggatagtgttacgacccatctggctgtagtcgaagaatctcttctgcgggaggtggaataa

SEQ ID NO: 164918 - DNA, 3417 bp, Enterobacter cloacae
atggatgctattgaagcagcccgacaaacggctgaaagtcttcaccaagcagcggcaaaccggggctgcaatctatgcgacctgcttggttatgtccttaatgaagccgagctacgagaagttgaggtttatgctattcccagtggagaccctcagcttaacggcgccagggctctctttgacagtcaagccagagtcatcctttacgaggatgtgggcagcagctttgaaaaagcattcctaatcgcacatgaaattggtcacttagaactcgaaggctcagaagaagatagcctgaccaacaacaccgaacatgaccgggcttctgagagccctgccacgagcattgaaagtgtcgtcgattatgggagtcatgagcggcgggaagtaataatggacttattcgctcgtgaactattacttccccgctatctgatgaggagcatgcatgtcgatgagcacatgtcttctctcgatattgcagataaataccaagcccctttgaatgttgtccagcaacaattagttgatgcgcttttactcccgctctgtaaatcagaatctagtgcccattcgaaccccgtcagcccgattgatttagataagtcgcaacaacttgctgcaatacatcgcggtagcccgtttctacttcaagccggccctggcaccgggaaaacccgaacattagtgcatcgtgttgaatcgttgcttgaagaaggggttgacccaggagcaatcctgatactgacattttctaataaagcagccggtgaactacgagaacgcatttcatctaaacaccctaaagcaatcgctacattatggattggcacgttccattcttttgggttagatatcgttcatcgctttcacgatcgccttggcttgtctgaaaaaccagcactgatatcacgcgatgaagcaatagacctccttgaagacgagctcgcatcgctggacattaagcatttccggaatttgtacgaccctgcattagatctgagcgatatgctatcagccatctcgcgggccaaggatgaggtgatcgatgccactgagtacacagcgctggctgaagcaatgctgtctgcagctacagatgaaactcaaacaatacaagcagagaaatgtctggatgttgcgcacctgtatcaggcatacgaagcattactgaagcaaagggacagtattgattttggcgatttagtctctcttcccgtgaaactggtagaagaagatgctgaggtcagacgtttactttcactacgccaccaacatattcttgttgacgaatatcaggatgtgaaccgggcttctgtacgtttacttaaagcgatatctggtgatagcaagcgactttgggtcgtcggagacgccagacaatctatctaccgcttcagaggagcatcatcgaccaacatggggcgattcgcctctgacttcgatggtgcaacaatcgaaaaactggatactaattatcgttctggcggcgaaattgtcgagctatatcgtctcttctcagaagacatgaaagcttcggaaggtgcattgccacttaagctcagagctaatcgtggcaatctggggagccctcctgaactaagattagcgacgacggtagatgacgaaatatcattgattgcaggagcaattgaagacagccgtttagcaggtatggaatataaagatcaagctatactctgcacgtcaaataatcgtctgagtgaaattgccgctcatcttgaaaagctgggcatccccattttgtatttgggaagcgtatttgaacgcgatgaaataaaagacttactttcattattatctttagtcaccgaccgacgggcttcaggcctgatccgcgcagcgacaatacctagctataaaatagatctgggtgatgtcctcacaattcagaaccgccttcgtgaagtcgactgtcctcctcaagactggatgtcattaacagacgaagactgcgtggttggcgagcgttcagctgactcacttatgcgcctttcacgaattattggagaatttcaaccatacgatgctccttgggcagttttaatgagcctagtcatcgatcacatgggttgggcaaaaaaaatataccaggcaggtgatctacaaagccaaatgaaaggaattgctatctggcaacttcttaatttttcccgcacccccatcaaagggacgggttttccaattgatcggctgttatcaagaattcgacgtattgtattgttatccgaggatcgtgaaatcaggcagttgccgcagtcaacccaggagatcgacggggtccgactgatgaccatacacgccagtaaaggcctggagtttaaggtcgtccaccttccaggtctgatcgctggcggtttacctggatctaatcggtcacctcgctgtcccccaccggatggattgattaacggttcccagggtatgaccgggcttgaagcaacgaaggcaggccatgatgaagaagaagagtgcaaattcttcgtagccacatcgcgagccaaagacaacttggttctctacgcgtcatcagttcaggctaacggtaataagcgaaatcgttcaatttttatcgatcgtatagcttcttcccttattacccgaaaaaacccgccccggaaacagctccgactatctgaatctgaggttctgacgccggccaaaggagcattgtcgctgacggacagacagattagtttgtacgaaaggtgtccaagacgttttctctacacccacatgctttcgttagcaggaaaacgaagtgagagcggttttttgaaaatgcatactgccatctacgagattttagactggctcaaacacaatcatagcgattcttcgcctgatatgaaggaactagaggcccggtttagagagtcctggctcaagagtgggcctgtggaccatagttacgcagatgattatctgcgcataggtcagcgtctggtccaatatcttatagagacccgtcaggggcttaagctggtaaaaccagaagtcctgcaactgtcataccctgaaggaacgatcattgttctgcccgacgaggtaacgctaaataaggatggaacccattgtgtccggcgtattaaaacaggcaaaaaaggtagtgatgaatttgaccgtattgaatatacgctcctgttagaggcagcagggcgtcattatggcaaggatttccaagcgcaggccgtacacttggccggagaaacccaagagatcgtaacagtgagtacccgtaagcaaaaagcgcgcctcgataaagctcaaacagctataacatcgataagtcgtggctttttccccgcaaatccggacagccgggtttgtccgcgatgcccgaacttttttgtgtgtggcaaaattcctattgatgattctgaaaaaaataagtga

SEQ ID NO: 164919 - DNA, 606 bp, Enterobacter cloacae
atgaaatttaaaagcgaagcgtccaaagaagccgtattacacgcgttttcaaaggaaaacaatcgcaatccggaaacactggcgagttatctaaaacgatacccggaatacactgaatcgattatagatttatctattgagttactgactgtgccttctttcgataaattatcgactgaatcgcagtcagatgagaagagcaaaaaagcttggttaacattccaatccatgctgaacccggatgatccggcgtccgcgatatctcaaatcatcgctaatccgctgtctgaaatgaacactcagcagtttaaagaattagcaaatgacttaaatgtcactcgccttttcttgtcccgcatccgcgacaacgcagttcaggtgagcacgatacctgtacagtttattaaattgcttgcacaacatctgaaactacccattgagacattacaggaaatattgactgctccgcctgcgattgctgccgggcagcgttttaaggcctcaggaaaacccaatgcgggacaaaaagttacttttgacgaactattagctacatcagggttaagcgagtcacagcaggtgatgttgaaggccatgaaggactaa

SEQ ID NO: 164920 - DNA, 435 bp, Enterobacter cloacae
atgtactactgggaggtcaattttaaccacgcgctgtccagccttcggaacgatgtgctgaaaagaattggtccagcccggaaaaccgaccctctcatcaactatcaacccttaatgagggaagatgaagaaggtgtagcacttcatcccgaagtcgaggctgccgctgaacgctttttcaacccaaacccctcattattagatgatgaatctttccggttgtgcctgatggaggcgattaacacgctaccagaagatgaaaaacgtgtagttgggttattcttacagggtatacagatcgagtctcttaacccgaaagtgatgaccattgcaaaaacgttagcatgctcagacagaactgttcgcaacagactgagtcgtgcttacgaactcctgcgaacccaactgcagaaggagggctatgatgaaatttaa

SEQ ID NO: 164921 - DNA, 1347 bp, Enterobacter cloacae
atgcgagagaaggggtatggccagaataatacattcttccggtttcacttttggcgcaacactatatatcagcaaagaggctgtaagttacaacggtgggggcgctgccctcagggcatacctgcactctacgataataccgggcactttgttgaggtcgtcaaccagtggcttcttgaacttaaaacagtccgcagactcgtcgatgtcaatacagcggccaaagcgctgctccgatactggaagtatcttgaacgtgaggggctggaatgggactcttttcctccggttaaccgattaaaaccaacttaccggttcagatctgatgatttattggcggcagccagagaaggcagaatagccttctcaacggctaacagttgtatgggacaggtggtcaggttttatatttgggcaattgaaaatcactacctggccatctcaagcaataaagaggccccctttaagattgaatttgttgtacgccagaataatgacatgctggcacatcttcggccccgactcctggttcaaacaagcgatctgcgtatccgggtccctaggcattcagattcaacgatttcctcactaacaccgctgtcaatggaacacctcagcctgatggctgctcatctcaatagtcagtccaaagaatttatcctgatgacacttctcgcctgtgaaagtggtctgagactgaatgaagtctgcactttcaccgtcaatgcgttacaggaagcaaggcctgcaagcgcactcaaatctcgttttcatgtcacgattggcccttccaacggtgtcaaaaccaagtttggtaagacacggattattgaagtttcagcgacgctgctgaacctgctacagcattacgcgctgtctgaaagacggacagcaagattgttcaaatggcagaagcacacccagccagcacagacaattccccccaattcatcccgggccaggaccctaaccggtggagccgctccccgatttgagcccctttttatcagccaacagggaaatcctgttcgacctgaagtactcaacgccagatgggtggcgtttcgtaacacgctacgccaaaaggacccgggctttcgctatcgctttcacgatttgcgaagtacctatgcaacctaccggctacataatttactggaaagcggcctgcctgaaggtgaagcactggactgtctgatgggctggatggggcataagcatgaaaacactacgttcaaatatattcgctttctgaacatgaatgaaacaattaagttcgctttttcagtgctggatactgtcatggagcaggccacagcaatccatcaggggggcacagacagatga

SEQ ID NO: 164922 - DNA, 1368 bp, Enterobacter cloacae
atgatttcagggattaagcagtgcttcgttctactgaacaggccggggcactggttcgacttactcccgacactaggtaaatctcaggcaacgccacacaaggcatacagtgataacgatttaaaaaaacttttacctctgcttcgtgcactgttcaaacaattctcccaccaatttctgaagtgcccggagcgccacttttatgcgaacaacttcaagccgaccatgacttttatctggaaaggggaaaattttagaatttacggggccatcagcaaaatgatggccgcagcaacttatctgatgtcctactacacctgggcaaacaccgcttcgctactggccatacagacaccggacgagactacacaatcaacgaaagaaaagtggtatcagatgcccgtctttaaaagacgttcattcaggataatcacactcaggtttggtgatcacggtgaacttaatattccgaaatattcccttgagttttttaatatgttgctgaaagtctcgcgactaatatctttctgtcaggaaggcaacacacctccccatcttctgataaccgccaggaattcgcaggtcgcccccatgagtgctggcgaactgacacgctttaacaatttcctgcaagaagcatttaacctgaaagatgacaaaggcgagattctgagagctgcaatttcccgttttcgtgccaccggaagccagatgatgcaattgcaccatcgtcccgcgctgagcgcggaacttctcggaaataccacccggacagtacgacgtcattactctgaagggaatgaatttgataatcagtccatgatccaggatgccgtgtctgtcatggcagataaggcctggcatgaagaaagcacagaccaggcaaaacttcgaaggaaagaggatcttggagtagaaattctcacttatgagaacctgttaaagatgcatactccacctgtgaaacaggcccatggcagctattgccaaaacccgtttagcgaacaggctgagcgatttatctcacgggtacgcaggcacggattactttccacagagaaattcgcctgctcggatttgatgaaatgcttctcctgtccacaccagattattgtcgctgaacccaacgatatctggtgcctgatgagttttaaggaatgtctggaagacagtatttatcgacatattgatcaccagcatttttataaaaattatgctgcagttctttccgctgtcgacaagatcctcaaccagattgaaaaaaaagtcctgcaggaagcaacatgtaaactcatggatgacggcccgcatccactctggcaggaacccctagcctttcttccgaaagaaaagctggaggcactgtga

SEQ ID NO: 164923 - DNA, 2094 bp, Enterobacter cloacae
gtgagaaaaagtacactggcaattctgttgcctcatgaacttgaagcacatcaatgccctgaagtccatgacgttattgccctgcacagccagcaacaacaagccaagctcgacgaggttgttttgtgcaaggatgaatccggaaataccatcgcgaaatttggcgatctcagttgggactgttcaagactggtcaccactaaaaactcttcacaccggaaaatcgatttctccgaattccgacaatatccggatctcctgaacgaactgaagctgatttgttacggatggatgttcacgaaaaatctgcagtacagtgctccgaccaaaatgtcgaccatcattggtcgcatatcaggtctgaagatgagttaccgctttctcgcagaacgcagtttgtgcagtatccgcgttcttgacactcctgctgaatgggcaaaattcctttcatttctcgaggctcagaacaaaagcgcaggaacattgacgcatattctttgcgcggtacagcaggccagacgtttatttccctggatgggctatgacagctcggagatgagcttcagccccattaatctgagtaaacgactctgtcggccggaggccacggaacgggaacaaacactggcaatacccgagcggatagccgatgctctcttacgtcacgcagtcaaccttgtagaaacggcatggccataccgggcaaggcttggtgaaaccgaacgtttactccaggaaaattacgaggcgggtgaagaggccgtaaacgaaaaaattcgcgcaggtgtctggaaatggctgaatgaagaaaaagggagcgctgagttcaaacatcgctttgcaaaagaggctgtgtatttagcacctcacaacgcatcagatattattaagcaacaactttccggctatccggactgtccggcccgggccaacggaatatggtggtatcagtatcgggcaaatctgctctcagcgtgctttgtctgttgtgcggccttctcaggtatgcgagaaagtgaactctacgagctcacgcctgaaagctactatagtgcgacccacagcggcagaacatttcattttttaaaagccaaaacccataaaatgggggaaaaacacactgagtgggttgttgcccccattgtgcaaaaagttatcgagctcgtcgcggcattgacagaacacttgcgtaatcaaattcttgaatcggccacaactgcgcgtgaaaaagcccttagcagatgcttatggttgtcacagggacagcgctcaaccctgccgaaacggatctcctgctggaccttgaggctcaccaatttttcccggctggcaggtctgtatgtcactccggaagattatgacgattgcctgcgtgccaaccctaacagcagggagcgaataaagaatcacgtacagacagggagattgtggaaactatcccctcaccagttcagacgaacactcgcttatttcaccatcaaaaaccggctgggaaatgctatcgccataaagcaacagtttaaacacctctatcttcagatgtcagaatggtactgcgaaggcggtatttcttcaaggttacaaggtattgaaatcgataaagatttacaaaaaatgatagacaccgccggtgacgagcagattgcccataaatactggtcgtggtttaaaggcagtgggatattgtcaggaagtcacggcaaggacatcatgaaaatgcgcaatgacctccccctagtgtacaggagctgggacagtctgcttaagcatgttaaggaaaaaaggcttacgcttcatggcaccctgcacgcttactgtaagaatggctatgactgcgacatggggggcgttatcaatccggcattctgtgtcgattgcggctcacatggcagcattatcgatgaagaacaggcgatgtggtggaagaacaagcatgacaacctgacccgctggctgaccgataatcccggcgcttctgttgcagaatttactcactgcatgacgcaaattcgagcggctgagcaagtcatgacggacttttctgtcagttttgctccttaccagcctgaaccccgggtaagaaccgatgagtaa

SEQ ID NO: 164924 - DNA, 192 bp, Enterobacter cloacae
atgaccagtaaagatttacatctaaaagctgtagcgctttttgaaggaaaccaagatgccgctttgaaatggtttaacgccccgaacagagcattagactggaaaacacctacagaggtcattggtaccgaagaaggaaaattaatggttgtttcattaattttgcgtatagagcatgggacctactcttaa

SEQ ID NO: 164925 - DNA, 1188 bp, Enterobacter cloacae
atgcctgataaaataactgtaaaatttagtgacatttgtcgtgagtttaaactatcaagcaaagatcctattgctgatggttacaaccgatatgttggattggagcacttagattcaggatccttgaagattaggcgttggggaatgctcgaagaagacagtccaacttttacgcgagtcttcaaaaaaggtcatattctatttggaaagcgccgcccttacttaaaaaaggctgctatagcagaatttgatggggtttgttctagtgacatcattgttttagagtctaaaccaaacactgttgtttcatatgaattattaccttatataattcagtctgaacctatgtggaattgggctgtacttcattcagctggatctttatcacccagaacaaatttttcttcaattgcaaaactaagcatttctttaccttctaatcctcaggatggttgcctacctgtcttgcgtgcagctgaaagagcgatttatagaactgaaaatgtactaacgcagttaaagcaatcaaaaattaaaacagcttattctcttatgttggctggaaataattaccaacagctatttggtagagaaaaaactaagattcctagtgggtggaagcttattactattggcgatgtacttactgatacacaatatggcttatccgattcgctggagtctgatggtcgttatccagtgcttaggatgatgaatattaccaatggctatgttgatccgaatgacctgaaatatttagactggaaaccaaatgatgcggaaaaatatattttaaaaaaaggcgatattgtattcaatagaacgaatagcatggaatgggttggaagaactgggatttttgaacttgatggtgactatttattcgcatcatatttaattcgtttaattgcagatgaggcgaagctaacgccctattacttaacacaatacttgaatcttccaatcgttcaatatagattaaaagcttttgcaacaccaggggttagtcaagccaatattaatccgggcagtttaaaaagcttacctattttagtcccaccgttgggttgcattcagaaaatagataaagtgttacgagaatttgataaaaatcacaatattgccaaagagtatcatcaaaggatgaacgaacttgtcgatactattaagtcaacatatttcgaatag

SEQ ID NO: 164926 - DNA, 483 bp, Enterobacter cloacae
atgacgttatctgtgacattcaaaaaagtcgttttctttacatcattgctgaccgttatgcaggccagtgcagcgttgcccacctgcgaaaacgagattaaggacattaacacctttctgattcagcagggcgccgcccgaataaacgatgttgatgacctggcaaaaacattgcgcatcctgacacaaaccgggcgcctgccagcccgatatatcaccactgatgaagcgaagcgcctgggttggtcgggtagtgaaacagaaaccctgtggggtcttaaacccaccaataacaaatggataggcggggatagctatgccagcccgaaactcccctcagcgcaagcatggttaagtgcagatatagatgtttttaaaggataccggagtgccaaacgactgatctataccctttccgggccgcagcgctatatcaccaccgataaatatcaacacctggtagatgttaattcctgccaataa

SEQ ID NO: 164927 - DNA, 534 bp, Enterobacter cloacae
atggaactgaaaacagaatgccttcctgcaggcgtgctcggctttaaggcctgcaaatttaaagcgaaagagtgggatccaacgaaatatcgtaaagagacaaaaaatgatgaggagtggtctgggttttatgttggcagtacggaaaccctgatactcggctatatgccggattgcaccgacaaacaggggaatggcacggcctatctcaatattgtggacattaatacccctgcacggattattgtctgtagcgatgagcgatttaaatccccaacgcaagacaaacctgcattattaaaagagcttaaagaagcgttacgcaaaataggtattcctgttgcggatagcgatttcttaatacccacactggcccgctatcgcttctacttcaaatgttataacaatgaagacagtaacgatatggaaatcattatcccgaatgatctggttgataatgttatgctgcaaagctataagcagcaaaacttcataaatggtgtcggccagtcacttgtcaactatggcaaatag

SEQ ID NO: 164928 - DNA, 147 bp, Enterobacter cloacae
atgctaactgaagaacgcgctaaactgatactggcgctgagcgtatcgctgcaggctttatcaacaactccagacgaaggtgattataaaggtaacgatgtctttgacaacgtgcgcgcgttggttgatgcagcaggattcagatga

SEQ ID NO: 164929 - DNA, 216 bp, Enterobacter cloacae
atggttggcaaactgttgccggaccttgaaaccatcgggctggatgcggtattcccggcgattttactggcgttagtggtgccggcttttaaaaatcgcactaccctgatccgcgcctgcagcggtgctgcattgtcactggccgccgtgccgtttgccccggtgggtttaccggttctgctctctttactgggtcttgctgcgaggaaaaaataa

SEQ ID NO: 164930 - DNA, 951 bp, Enterobacter cloacae
atgaaccagctagacggcatcaaacaattcaccaccgtggttgcggacagcggcgatatcgagtcgattcgccactatcagccggaggacgcgaccaccaacccttccctgcttctgaaagcggcagggcttgcccattttagtcatctgattgatgacgcgattgcttacggcaagaagcgcggcaaaacgcaggagcaacaggttgccgaagccagcgacaaactggcggttaattttggtgcagaaattctgaaaagcattccaggacgcgtctcgaccgaagtggacgcccgcctctcgttcgataaagaaaagagtattacgaaagcgcgtcgtctggttgaactctaccaggagcagggaattgatacgtcacgcattctgatcaagctcgcgtcgacgtgggaaggtatccgcgcggcagaggtgctcgaaaaagaggggatccactgcaacctgacgctgctgttctcgtttgcacaggcacgcgcctgtgctgaagcgggcgtgttcctcgtctcgccgtttgtcgggcgcatctacgactggtatcaggcgaaacagcccatggacccgtacgtagtcgaggaagatccgggcgtgaagtcagtgcgaaatatctacgactactacaaacagcaccgctatgaaaccatcgtgatgggggccagcttccgccgtaccgagcagatcctcgccctggcaggctgcgaccgcctgaccatctcccctaacctgcttaaagaattacaggacaaagaagagacggtgatccgcaaactggtgccaacctccaccgtcctgccgaaaccgaaggccatgaccgaagccgagttccgctgggagcacaatcaggacgcgatggccgtggataaactggcggaaggcatccgcctgttcgccgtcgaccagcgcaaacttgaagacctactcgccgccaaactttaa

SEQ ID NO: 164931 - DNA, 405 bp, Enterobacter cloacae
atggcagattacgcattaatcaaaaatggtgtcgttgagaatgtggttatctttgatggtgaggatgatatttttgacgattacacagtagttaagttagacggccttacagccggtattggctggacttatgacggcgaacagtttactgcaccaccagagcctgaacccacccccgaagaacttatcgcgcaggctgaagcaagaaagcaatccctgatagccgcagccaacgactacatggacaaccggcagtggcccggtaaggcggcgctggggcgactgactgatgcagaaaaagggcaatataacttgtggctggattatctcgatgcgctggaagcggtagacacctccggcgcaccagatattgcatggcccagtgagccatattcgtccagttaa

SEQ ID NO: 164932 - DNA, 1149 bp, Enterobacter cloacae
gtggcagaagagaacgacgacaaaacggaagcccccacaccccaccgacttgaaaaagcgcgtgaggaagggcagatcccccgatcccgagaattgacctccctgctgatccttgtcgtaggggtgtgcattatctggtggggtggggagtcgctcgcccgcaagctggcgggaatgctctcaactggcttacgttttgaccacagtatggtcaatgacccgaatctgatcctcagccagattattcagttaataaaaggggccatggttgcgctgctgcccttaattaccggcgtggtgctggtggcgctggtctctccagtcatgctgggcggtctggtgtttagcggaaaatcactgcagcccaaattttcgaagctgaacccactgccgggcattgcgaaaatgttttcggcgcagaccggggccgagctgctcaaggctattctcaaatcggtgctgatgggcagttctgccgggttcttcctctggtatcactggcccgaaatgatgcgcctcatcagcgagtcgccccttactgccatgagtaacgccctgaatctggttggactctgcgcgctgctggtggtgctcagcattatcccgatggtcggttttgacgttatcttccagctttatagccatttcaagaaactgcggatgtcacgtcaggatatccgtgacgaatataagcagatggaaggtgacccgcacgttaaagggcgtatccgtcaaatgcagcgtgctgccgctcgtcggcgcatgatggaggatgtgccgaaggcggatgtcatcgtcaccaacccgacacactattccgttgccttgcgctacgacgaaaacaagatgagcgcgccgaaagtggtggcgaaaggggcggggctgatcgcacttcgtatccgggaaattggcaccgaaaaccgcgtgccgatcctggaagctccaccgctggcgcgtgccttataccgccatgcggaaatcggacaacagatcccgggacaactctacgccgcggtggcggaagtgctggcctgggtatggcagttgaaacgctggcgtctggccgggggtcaacggcctgtgaaacctgagaaccttccggtgcctgccgcgctggattttatgaacgagaaggacactgatggctaa

SEQ ID NO: 164933 - DNA, 2079 bp, Enterobacter cloacae
atggctaatctggtggcaatgttgcgcctgcccggcaacctgaaatcgacccaatggcagatcctcgccgggccgattctcatcctgttaattttgtcgatgatggttctgccgctcccggcattcatcctcgatctgctgttcacgtttaatattgcgctctccattatggtgctgctggtggcgatgttcactcagcggaccctggagtttgccgcgttcccgaccattctgctgtttaccactctgctgcgactggcactgaacgtggcgtccacgcgtatcatcctgatggaaggacacaccggcgcggcagcagcaggtaaagtggtggaggccttcggccacttcctggtaggcggtaatttcgctatcggtatcgtggtgttcgttatcctcgtgatcatcaactttatggttatcaccaaaggtgccggacgtattgcggaagtgggcgcccgttttgtgctggacgggatgccgggcaagcagatggcgatcgacgccgatctgaatgccgggttaatcgcggaagatgaagccaaaaaacgccgtgcggaagtcactcaggaagcggacttctacggatccatggacggtgcgagtaagtttgtgcgcggtgacgccatcgcgggcattctgatcatggtgattaacgtggtgggcggcctgctggtgggggtattgcagcacggcatggacatgggccacgcggcggaaagctacacgctgctgactattggtgatggtctggtcgcgcagatcccggcgctggtcatctccacggcggcgggcgtgattgtcacccgcgtgagtaccgatcaggacgttggcgagcagatggttggccagctcttcagtaacccgcgcgtaatgctgctggccgctgccgtactgggtttgcttggtctggtaccgggcatgccaaacctcgtcttcctgctgtttacggcgggtctgctgggccttgcctggtggatgcgtggccgtgaaacccaaccggcggcggatccggttccggtgaaaatgccggagaatactcaggccgtcgaggcgacgtggaacgacgtgcagctggaagattccctgggaatggaagtggggtatcgcctgatcccgatggtggattttcagcaggatggcgagctgcttggccgtatccgcagtatccgtaaaaaattcgctcaggatatgggcttcctgccgccggtggttcacatccgtgacaatatggatctgccgcctgcacgctaccgtattctgatgaaaggggtcgaaattggcagcggcgatgcctacccgggtcgctggctggccattaaccctggcaccgcggcaggcacgctgccgggcgagcaaaccgtcgatccggcctttggtctggcggccatctggattgaaagtgcgctgaaagagcaggcgcaaatccaggggtatacggtagtcgaagccagtaccgtggtggcaacccatcttaatcatctgattgggcaattctcggcagagctgtttggtcgtcaggaagcgcagcagcttctcgaccgcgtgacgcaggagatgccgaagctgacggaagatctggtcccgggcgtgctgacgttaaccacgctgcacaaggtgctgcaaaacctgctcgaggaaaaagtgccgattcgcgatatgcgaaccattctggaaacccttgccgagcatgcgccgctgcaaagcgatccgcacgagctgacggcggtggtgcgcgtggcgctggggcgcgcaatcacgcagcagtggttcccgggaaccggagaagtgcaggtgattggcctcgacacgccgcttgaacgtctgctgctgcaggctctgcagggcgggggcggcctggagccaggtctggcggatcgcctgctggagcagacccaggaggcgctggcacgtcaggagatgctgggggcgccaccggtgctgctggtcaaccatgcgctgcgtccgctgctgtcgcgcttcctgcgtcgcagcctgaaccagctggtggtgctgtcgaatatggagttgtcggataaccgtcatatccgcatgacggcgacgattggaggaaaataa

SEQ ID NO: 164934 - DNA, 393 bp, Enterobacter cloacae
atggctaaatggctttggattatgctcttcccgctggcggcacaggcggccggggaaggcgcctggcaggcaagcagcatgggcgtgaccctgagcaaccggggtgtcgccatgtcttctactccgctgtcgccctctgaagcggtttccggtctgatggggatggtggtctggaattacagactgattggcccaacgccagccggactgcgggtgcggctctgctcccagagtcgctgtacggaaatcgacggagagaatggcacgacgcaggcgttcaacggcgtgcccgccattgaacctttgcgttttatctgggaagtgccgggcgggggacgtttgatcccggcgctgaaagtgcagagcaattctgtcattgtaaactaccgctaa

SEQ ID NO: 164935 - DNA, 1584 bp, Enterobacter cloacae
atgaaaacacgtaaaattggactcgcaaattatcttgcatacgggtcaggtgatttcctcggggcgggtaccaccgccctgacggcggcctggcttttgtatttttacaccaccttctgtggactcacaccgattgaagcaacgttcatttttgccgcggcacgggtgctggatgccgttgtcagtccgttaatggggttcttgacggacaacttcggtacgacctggctcggaaagcgctttggtcgccgtaaattctttattctgctggggatcccgtgcgtattcagctactcgctgatgtgggtgggggacatgaatttctggtattacctgctgacttatctggtgtttgatattgtctacaccatgattctggtgccgtacgagacgctggtgccggaaatgaccgatgacttcaaacagaaaaccaagttctccggggcgcgtatttccatggcgcagatgtccgccattctggcctcctttctgcccgggatattgctcacgcatttcggtaaagacaatgcggtctccttcttctatgcaagcctggttttctccgttctgtgcgccctgatgctcattttcgtctggtgctttacctgggaacgtccgcgtgaggaatggtccgaagcggcgctgcgggctgaagaagagaagaagaagctgacactcggccagagcctcaatcgtctgttcgtggaattgagttctacgctgcgaattaaaattttccgccagcatctgggcatgtatctcggcggctacattgcgcaggatgtatttaacgcggtcttcacctactacgtggtgtttgtgctgatgcaggaagcctcaatggcctctaacctgctcggtacgatggccatcttccagtttctcgccgtgctcgggatgatcccgctgtgcattcgctttggtcctgcgccgtcctaccgcatggtggtggtactgtttggcctggcctctctttcttacgccgtcctctattatgccgggctgagcgacatctattctctgctgctgctggtttctgccattgccggccttggccgcggcggtatcaactacgtgccttggaatacctatacctacatcgctgatgtggacgaagtgatcaccggtcagcgccgcgaagggatcttcgccggcatcatgaccctcacccgtaaagcctctcaggccggtgcggtgatgctggtgggcatcgtgatgcagatgtccggctttgtcagcggtcagaaagtgcagcctgcggaagtgagccataccattttgatgatcctgagtgtgggcaccctcctggtgctgttctgcggattcctcgtttccctgcgcttcagactgaatttacagacccacagcacgctgcgcgaggagaccgcgaaaatgcgtgcgtggggtcatgcgataccggaatcagcgacgccgcatgcccgcgccactgtcgagatgctggccggtatgccgtatgcgtcactgtggggtaataacaacatcggttatctgaatcgcaataagccagccgcaccttcgctgaaggatggtgcagtactgaattcgacatacaacagaggttaa

SEQ ID NO: 164936 - DNA, 1143 bp, Enterobacter cloacae
atgatgaaagtttggcctgtcaaacatagcccgttattgcgtcaacctgaacgctttattgccagagatgagctgaaagcactgattcaaaaggtgacgcataacctggtcaatatccacgacaagacgggtgagtttttgctgcggctggacgacgggcgcgtgatcgacaccaaaggctgggccggatgggaatggacgcacggcgtcggtttgtacggtatctggcagtattactgccagaccggtgacacaggcatgcgcgacattatcgacagctggtttgctgaccgttttgctgaaggtgccactaccaaaaacgtcaatacgatgtcgccgttcctgacgctggcctgtcgttatgaagagaccaaaaacccggcctggctgccgtggctggaaagctgggcggaatgggcgatgaccgagatgccgcgcaccgatcacggtggcatgcagcacatcaccctggcggaagagaatcatcagcaggtgtgggatgacacgctgatgatgacggtgttgccgctggcgaaaatcggcaaactgctcaacaaaccggagtacgttgaagaggcggtgtatcagttcctgctgcacgtgcagaacctgatggaccgggagacgggcctgtggttccacggctggagttacgacggcaaccataactttgctcatgcccgctgggcgaggggcaacagctggctcaccatcgtgattccggatttccttgaactggttgatttgccggaaaacaacgccgtgcgccgttatctggtgcaggtattgaatgcgcaaattgccgcgctggcaaagtgtcaggacgagagcggcttgtggcataccctgctggacgatccgggctcgtacctggaggcgtccgcgacggccgggtttgcctacgggatcctgaaagcggtgcgtaagcgctatgttgcgcctgcgtatgctgacgttgctgaaaaagcgattcgcggcatcgtgaaaaatatctcgccggaaggggagttattgcaaacgtcgttcggcacggggatgggcagcgacctggcgttttatcgccaaatcccgctgacgtcgatgccctatggacaggccatggcgattctgtgtctgacggagtatttgcggaagtatttctga

SEQ ID NO: 164937 - DNA, 1734 bp, Enterobacter cloacae
gtgaatattcaggctcttctctccgaaaaagtcagtcaggcactgattgccgcaggtgcgcctgcggattgcgaaccacaggttcgtcagtcagcaaaagtacagtttggcgactatcaggctaatggcgtgatggcagtggctaaaaaactgggcatgccgccgcgacagctcgctgagcaggtattgacgcatctggatctcaccggtatcgccagcaaaaccgaaatcgctggcccgggctttatcaacattttcctggagcctgcattcctggcaagccacgttgacgcggcgctgaaatcagaccgtctgggtgtctcccgaccacaagcgcagacggtggtgatcgactactctgccccgaacgtggcgaaagagatgcacgttggccacctgcgttccaccatcattggtgatgccgcggtgcgcacgcttgagtttctcggtcacaaggtaatccgcgcaaaccacgttggcgactggggtacccagttcggcatgctgattgcttacctggaaaaacagcagcaggaaaacgcgggcgaaatggcgctggcggacctggaagggttctaccgcgaagcgaaaaagcattacgacgaagacgaaacctttgccgagcgcgcgcgcagctacgtcgtcaagctgcagggcggggatcaatacttcctcgagatgtggcgcaagctggtggacatcaccatgtcccagaaccagcttacctataaccgtctgaacgtgaccctgacccgtgatgatgtcatgggtgaaagcctgtacaacccaatgctgccgggcattgtggcggacctgaaagcgaaaaacctggcggttgagagcgaaggtgcaacggtcgtgttccttgatgagtacaaaaacaaggaaggtgaaccgatgggcgtgatcatccagaaaaaggatggcggctatctctacaccaccaccgatatcgcctgcgcgaagtaccgttacgaaaccctgcatgctgaccgtgtgctgtactacatcgactcccgtcagcaccagcacctgatgcaggcctggactatcgtgcgtaaagccggttacgtaccggattgcgttccgctggaacaccacatgttcggcatgatgctcggtaaagacggcaagccgttcaaaacccgtgcgggtggtaccgtgaagctgtctgacctgctggatgaagcgctggagcgcgcccgtcgtctggtggcagagaagaacccggacatgcctgccgacgagctggaaaaactggctaacgccgtcggtatcggcgcggtgaaatacgcggatctctctaaaaaccgtaccaccgactatatcttcgactgggataacatgctggcgtttgaaggcaacacggcgccttacatgcaatatgcttacacccgcgtgctctcggtgttccgtaaggcgaacattgatgaaaacgtactggcgaatgcgaccgtgaccatcacggaagatcgtgaagcccagctggcggcgcgtctgctgcagtttgaagagacgctgacggttgtcgcccgtgacggtacgccgcacgttatgtgcgcttacctgtacgatctggcgggtctgttctccggcttctacgagcactgccctattctgtctgcggaaaatgaatcggtccgcaacagccgcctgaagctggcgcaactgacggcgaagaccctgaagctgggtctggataccctgggtatcgaaaccgtagagcgtatgtaa

SEQ ID NO: 164938 - DNA, 561 bp, Enterobacter cloacae
atggcgaactggcaatccattgacgaactgcatgatatttccgcagatttaccgcgcttcacccaggcgttcacagaacttgccacccgtcttggtctggatatcgcgccgcttgaggccgatcacatctctttgcgctgccatcaaaacgcgactgccgagcgctggcgtcgcgggtttgaacagtgtggtgagttgctttctgagaacatgattaatggtcgtcccatttgtctgttcaaactgcatgaaccggtctgcgtggcgcactggcaattcaccgttgtagaactgccatggccgggtgaaaaacgttacccgcacgaaggctgggagcatatcgaaatcgtcctgccgggtgagccggaaacgttgaacgcgcgcgcgctggccctgctctcagacgagggattaagccagccgggcatttttgtgaagacaagttcgcccaaaggcgagcgtgagcgtctgcctaatccgacgctggccgtgactgacgggcaggtgacggtgaaatttcatccgtggaccattgagcagatcgttgccagcgaagcctga

SEQ ID NO: 164939 - DNA, 744 bp, Enterobacter cloacae
atggcgctgctggagatttgttgttatagcgtggagtgtgccgtcaccgcgcaacggaaaggggccgatcgcattgaactgtgcgccgccccgaaagaaggagggttaacgccctcatacggcgtgctgacgtcggcccgtaaggccgtcacccttccggtacaccccattattcgtcctcgcggcggtgatttttgttatacgtcgggtgagttcagtgccatgcttgaagatatcgcccttgttcgtgacctcgggttccccgggctggtgaccggcctgctggatgaagacggtgaggtcgatctgccgcgtatgcgtcaggtgatggacgccgcaaaaggaatggccgtgacgtttcatcgtgcgtttgatatgtgcaaaaaaccactgcaagcgtttgatacccttgccgaactgggtgtggcgcgcgttctgacatcagggcaacagtcttctgctgaaaaaggtctgcaattaattacggaactaaaagcccattccggtgttccaataataatggcgggtgcgggagtccgtgccggcaatctggaacggtttttaaacgccggggtggaagagcttcacagctctgcggggaaatggataccttcacccatgcgttatcgcaatacagggctgtcaatgtcgacggatgctgaagcggatgagtattcacgctacggtgtagatggagagtcggttgcggaaatgaagtcgctgattgagcgctatcacgtgtag

SEQ ID NO: 164940 - DNA, 972 bp, Enterobacter cloacae
atgattgagttcagtaatttctatcagctgatagctaaaaaccatctgtctcactggctggaaactctgcccgcgcagattgccgcctggcagcgcgatcagcagcacggcctgttaaagcagtggtcaaatgcggtggagtatctgccagagctgaccccgcatcgtctggacctgcttcacagcgtcaccgcagaaagcgaagcaccgctcccggccgggcagatcaaccgcatcgaaacgctgatgcgtaacctgatgccctggcgcaaagggcctttctcgctctacggggtgaacatcaacaccgaatggcgctccgactggaaatgggatcgcgttctgcctcatctgtctgacctgaccgggcgcactattctggacgtgggctgcggcagcggttaccacatgtggcgcatgattggcgcaggcgcgcatctggcagtcggtatcgacccaatgcaactgttcctgtgccagtttgaagcagtgcgtaaactgctgggcaacgaccagcgcgcccacctgctgccgctgggaattgagcaacttcctgccctgaaagcgtttgataccgtgttctccatgggcgtgctctatcatcgtcgctccccgcttgaacatctgtggcagctgaaagatcagctggtcagcggcggcgaactggtactggaaacgctggtgatcgaaggtgacgaacatgctgttctggtgccgggcgatcgctacgcccagatgcgtaacgtctactttatcccgtccgcgctggcattgaagaactggctggagaagtgcggttttggggatgtgcggattgccgatgtcagcgtgacgtcactcgaggagcagcgccgcaccgactggatgatcaccgagtcgctggagcagttccttgacccggccgaccacagcaaaaccatcgaaggctatccggcaccgatgcgtgcggtattgatcgcgacgaagccgtaa

SEQ ID NO: 164941 - DNA, 744 bp, Enterobacter cloacae
atgtcagatcgcgacacgcttttttccgcgcctatcgccagcctgggcgactggaccttcgatgaacgggtagccgaagtcttcccggatatgatccagcgctctgttcccggttattccaatattatctctatgatcggtatgctggctgagcgcttcgttcaacccggcacgcaggtctatgacctgggctgctcgctcggcgcggcaacgctgtcggtacgtcgtaacgttcatcatgaagattgccgaatcattgccgtcgacaactccccggcgatggtagaacgctgccgtcgccatattgatgcgtataaagcccctgtaccggtggacgtcgtcgaaggcgatattcgtgagattgaaattcacaacgcgtcgatggtcatcctgaattttaccctgcagttcctggtgcctgaagaccgtcagctgctgctggacaaaatttaccaggggctaaatcccggcggcgcgctggtgctttccgagaaattcagctttgaggatgccgacgttggcgaactgctgttcaatatgcaccacgattttaaacgtgcgaacggttacagcgagctggagatcagccagaagcgcagcatgctggaaaacgtgatgctgacagactccgtagaaacccacaaagcacgcctgcgcaaagccggatttgagcatagcgaactgtggttccagtgctttaactttggctcactggtggcgctaaaagccggagatgcagcatga

SEQ ID NO: 164942 - DNA, 396 bp, Enterobacter cloacae
atggtcagcgcgctgtatgcggttttaggtgcattactgctgattaagttttcatttgatgttgtgcgtctgagaatgcagtaccgcgtttcttatggtgacggcggtttttcggaactgcaaagcgctatccgcattcacggtaatgcggtcgaatacatccccgtcgccttgattttactgctgtttatggagatgaatggcgcagaaacctggatggttcacgtctgtggcctgcttctgattgctggccggctaatgcattattatggctttcaccaccgcttattccgctggcgtcgttccggcatgagcgcgacctggtgttcgcttttgctgatggtgctggctaacctttggtatatgccgtgggagttggttttctccctccattag

SEQ ID NO: 164943 - DNA, 819 bp, Enterobacter cloacae
atgatgtatgtggggttaccccagtggtcgcacccgaaatgggtgcgcctgggcatcaccggcctggaagaatatgcccgacacttcaactgtgtcgagggcaacacgaccctctacgcgctgcctaaagcggagattgttgaacgctggcgggagcaaacgaccgacgatttccggttctgttttaagtttccggcgaccatctcccacaacgccgcgctgcgcaactgcggggatttaaccgaagagttctttacgcgcatgtcgccactggcgaaccggattgggcaatactggctccagcttcccgctacgttcggcccgcgcgatctgcctgccctgtggcagtttctggatagcctgccccgcgagtttacctacggcgtggaggtcaggcatgctgaattttttgccaaaggtgaagcagaaatagcgctcaaccgcggcctgctggaacgtgcggtcaaccgcgtcattcttgatagtcgccccgtccacagtgcaatcccgcacagtgaagcgattgtggatgcgcaacgcaaaaaaccgaaagtgccggtccacgccatcgtcaccgcgcaaaacccgatggtcaggttcatcggtagcgataacatgcagcaaaatcaggcgatgttcgccgtctggctgcaaaaattagcgaagtgggagcaaaccactacgccctatctctttttacacacaccggatattgcgcaggcacccgaactggtcgatgctctctggcaggccttgcaggccgcggttcccgccgtgggtgacgccccctctattccacaacaatcttctcttttctga

SEQ ID NO: 164944 - DNA, 567 bp, Enterobacter cloacae
atgttaacactggatgccagcaaaaccgcgcttgtggtgattgatttacaggaagggatcctgccctttgccggtggcccgcacgctgcggatgatgtggttagccgcgccgctcgtctggcggaaaaatgccgtgccagcggtgcccctgtagtcatggtgcgcgtcggctggtccgctgatttcgccgaggcgttaaaacagcccgttgatgcacaggcgccctcccatgccctgccggaaaactggtggacgtatccggtgtcgctgggcaaacgcgacagcgatatcgaagtgaccaaacgtcaatggggcgcattctacggaaccgatctggaactgcagctccgccgtcgaggtatcgacacccttattctgtgcggcatttccaccaacatcggcgtggagtctaccgcccgtaacgcctgggagctgggctttaacctggtcattgcggaagatgcctgcagcgcggcttccgcggaacagcatcagggtagcatgacccatatcttcccgcgtatcggacgcgtgcgcagcacggacgagatcctcagcgcactatga

SEQ ID NO: 164945 - DNA, 1773 bp, Enterobacter cloacae
atgcgtacagaatattgcgggcagctgcgtcagtcccacgtcggacagcaggtcaccctgtgtggttgggtcaaccgtcgtcgtgatcttggtagccttattttcatcgatatgcgcgaccgtgaaggtatcgttcaggtgttcttcgacccggatcgtgcggatgcgttgaagctggcttctgagctgcgtaatgagttctgcattcaggtcaccggtaccgtgcgtgcgcgtgacgagaaaaacgtcaacgcagacatggcgacgggtgccattgaagtgctggcgtccgatctggttatcattaaccgtgctgaagcgctgccgctggactccaaccacgtcaacacggaagaagcgcgtctgaaataccgctacctggatctgcgtcgtccggagatggcccagcgcctgaaaacccgtgcgaaaatcaccagcctcgtgcgccgtttcatggatgaccacggtttcctcgatatcgaaaccccgatgctgaccaaagccacaccggaaggtgcgcgcgattatctggtcccatcccgcgtacataaaggcaaattctacgcgctgccacagtctccacagctgttcaaacagctgctgatgatgtccggtttcgatcgctactatcagatcgtcaaatgtttccgcgacgaagacctgcgtgctgaccgtcagccagaattcacccagatcgatgtggaaacctccttcatgaccgccgagcaggtgcgtgaagtgatggaagcgctggtgcgtagcctgtggaatgacgtgaaaggcgtcgagctgggcgatttcccgatcatgaccttcgccgaagccgagcgtcgttacggttccgacaaaccagacctgcgtaacccgatggagctggtggatgttgcagacctggtgaaatccgttgagttcgcggtattcgccggcccggctaacgatccgaaaggccgtgttgcagccctgcgcgtaccgggcggtgcggcactgagccgtaagcagatcgacgactacggcaacttcattaagatctacggcgcgaaaggtctggcctatattaaagtaaccgagcgtgcgaaaggtctggaagggatcaccagcccggttgcgaagttcctgaatgcggacatcgtggaagcgattcttgagcgcaccggcgcgcaggatggcgacatgatcttcttcggcgcagacaacaagaaagtggttgccgatgcgatgggcgcgttgcgtctgaagctgggcaaagacctcagcctgaccgacgaaaccaaatgggcaccgctgtgggttatcgacttcccgatgtttgaagacgacggtgaaggcggcttgaccgcgatgcaccacccgttcacctcgccaaaagacatgacggcggcagagctgaaagcgtctccggaagatgcagtggcaaacgcctacgacatggtgatcaacggctacgaagtgggtgggggttccgtgcgtattcacagcggcgaaatgcagcagaccgtgttcggcatcctgggcattaacgaacaggagcagcgtgagaaatttggcttcctgctggacgccctgaaatacggtacaccgccacacgcaggtctggctttcggtcttgaccgtctgaccatgctgctgaccggcaccgataacattcgtgatgttattgccttcccgaaaaccactgccgcagcgtgtctgatgaccgaagcgccaagctttgctaacccgactgcactggctgagctgggcattgaggtggtgaagaaggaagagaaaaactga

SEQ ID NO: 164946 - DNA, 444 bp, Enterobacter cloacae
atgacatacaagcttcccgtttctgtcttagttgtcatttatgcccaggacacgaagcgggtgctaatgttgcagcggcgcgacgatcctgatttctggcagtcggttaccggcagcctggaagcgggggaaaccgcgccgcaggccgccgcgcgtgaagtaaaggaagaggtcaccattgatgttgctcgcgagcaactgaccctgaaggactgtcagcgcacggtggagtttgaaatttttagccatttacgtcatcgctacgcgccgggcattgagcgcaatacggaatcgtggttctgtctcgcgctcccccatgagcgggagatcgtgtttaccgaacacctgaactaccgctgggtggatgcgacggatgccgccgcactgaccaagtcgtggagcaaccggcaggcgattgaagaatttgtaattaacgctgcctga

SEQ ID NO: 164947 - DNA, 741 bp, Enterobacter cloacae
atggcaggtcatagtaagtgggccaacaccaaacaccgtaaagcggcacaggatgccaaacgcggtaagatctttaccaaaatcattcgtgagctggtgacagcggcacgtctgggcggcggcgatccggcctctaacccgcgtctgcgcgcggcggtggataaagcgctgtctaacaacatgacgcgtgacaccctgaaccgtgccatcgcacgtggtgtaggcggtgatgaagacgcgaacatggaaaccatcatttatgaaggttacggccctggcggtactgccgtaatggttgagtgtctgtccgacaaccgtaaccgtaccgttgcggaagtgcgccatgcattcactaaaaccggcggcaacctgggtaccgacggttccgtttcttacctgttcagcaaaaaaggcgtcatctccttcgagaaaggcgacgaagatgtgatcatggaagccgccctggaagccggtgcggaagacgtggtgacctacgatgatggcgcaattgacgtttacaccgcgtgggaagagatgggcgccgtgcgcgatgcactcgaagccgcgggtctgaaagcggacaacgctgaagtttccatgatcccatccaccaaagcggacatggatgcggaaactgcgccaaaactgctgcgtctgatcgacatgctcgaagactgcgacgacgtgcaggaagtgtatcacaacggtgaaatctctgatgaggttgcagcgactctctga

SEQ ID NO: 164948 - DNA, 522 bp, Enterobacter cloacae
atgtcgattatccttgggattgaccccggctcgcgcgtcaccggttatggcgttatccgccaggtgggacgccagctaacctacctcggcagcggctgtattcgcaccaaagtggacgatctgccgtcgcgcctgaagctgatttatgcgggcgtgtcggaaatcatcacccagtttcagcctgatttttttgccattgagcaggtctttatggcaaaaaacgccgattcggcgctaaagctggggcaggcgcgcggcgtggcgattgttgccgccgtgaaccaggatcttccggtgttcgaatatgccgcacgtcaggtaaagcagacggtggtggggataggtagcgcggagaaaagccaggtgcagcatatggtgcgtaccttgctgaagcttcccgcgaacccgcaggccgatgccgccgatgcactggccattgcgattacccactgtcacgtcagccagaacgcgatgcaaatgagtgaatcgcggctcaatctggcgcgaggcaggttacgataa

SEQ ID NO: 164949 - DNA, 615 bp, Enterobacter cloacae
gtgataggcagactcagaggcatcatcattgaaaaacaacccccgttagtgctgctggaagtgggtggcgtgggctatgaagtccacatgccaatgacctgcttctatgagctgccggacgcgggtaaagaggcgattgtctttactcagttcgtggtgcgtgaagatgctcagttgctttacggcttcaacaacaagcaggaacgtaccctgttccgcgagctgattaaaaccaacggcgtggggccgaagctggcgctggcgattttgtccggtatgtctgctccgcagttcgtgaatgccgttgagcgcgaagatcctgcggcgctgattaaactcccggggattggtaagaaaaccgccgagcgtctgattgttgagatgaaagaccgctttaaaggtctgcatggcgatctgttcaccccggccaccgatctggttctgacgtcacctggggcgccgtcaacagatgatgacgctgagcaggaagcggttgccgcgctggtggcgctgggctataaacctcaggaggccagtcggatggtaagcaaaattgccaaaccggatgccagcagtgaaaccctgattcgtgaagcgctgcgcgctgcattgtga

SEQ ID NO: 164950 - DNA, 1011 bp, Enterobacter cloacae
atgattgaagcagaccgcctggtatcggcaggcacccttcaggcagaagacgtggtggatcgtgcgatccgcccgaaactgcttgatgagtatatcggccagccgcaggtacgttcccagatggagattttcatccaggcggcaaagctgcgcggcgatgcgctcgatcacctgctgatttttggcccgccagggttggggaaaaccacgctggcgaatatcgttgccaatgaaatgggcgtcaacctgcgcacgacctccggcccggtgctggagaaagccggcgatctggcggcaatgctgaccaaccttgaaccgcatgacgtactgtttatcgatgaaatccaccgtctgtctccggtggtagaggaagtgctctatccggcaatggaagattaccagctggatatcatgattggtgaaggcccggctgcgcgctccatcaagatcgatctgccgccgtttaccctgattggcgcaacgacccgtgccggatcgttgacctctccactgcgcgaccgcttcggtatcgtgcagcgtctggagttttatcaggtgccggacctgcagcatattgtcggtcgtagcgcgcgctatatggggctggagatgagcgaagagggcgcttttgaagtggcgaagcgttcgcgcggtacgccgcgtattgccaaccgcctgctgcgtcgcgtgcgcgactttgccgaagtgaagcacgatggcaccatttcggcagagattgccgcccaggcgctggatatgcttaacgtcgatgccgaaggctttgactatatggaccgcaaactgctgctggcggtgctggataaattctttggcggaccggtcgggctggataacctggcggcggcgatcggtgaagagcgtgaaactatcgaggatgttctggagccgtatttgatccagcagggattcttacagcgtacgccgcgtggtcgtatggcgacggtgcgggcgtggaatcatttcggcattacgccaccgtcaatgccgtaa

SEQ ID NO: 164951 - DNA, 453 bp, Enterobacter cloacae
atgaaaacaatgacggctctgactattgccgctctgactatggcggctttgtctggcgccgcgaatgccgctatttccggaacccaaacatggaaaatggtggataataaacttgaaaataccagtaacggacgaaaattatgtatgactggcattgcttaccagcaggcggtgatggagccatgtggttctaatccagaattgcagaatattcgtgaggtcaatttcgctattaatgggatgctgatgctggaaacatatccagaatatgccttcgcaccagcaagcggcaaagtttatatacgcgaatatgaacctattgcgagtcattgggactatattaacggacagctgaaaaaagttgataccgatggtattgtcaagtgtcttgatatggaaggcggtataaacgtcccaggtgccaaattgcatttagcaacgtgtaccaggtaa

SEQ ID NO: 164952 - DNA, 789 bp, Enterobacter cloacae
atgattgaactgttactgcccggctggctggccgggattatgcttgcctgcgccgcgggtccactcggctcgtttgtggtctggcgcagaatgtcctatttcggtgataccctcgcgcacgcctctttgctgggcgtggcttttggtttactgctggatgtaaatcccttctacgcggtgattgtcgtcaccctgctgctggcagccgggctggtctggctggagaaacgtccgcacctcgccattgatacgctgcttggcattatggcccacagcgcgctctcgctgggtctggtggtggtgagtctgatgtcgaatatccgcgtcgacctgatggcctatctgtttggcgatctgcttgccgtgacgccggaagatttaatttccatcgccttcggtgtggtggtggtactcggtattctgctctggcagtggcgtaacctgctggcgatgaccgtcagcccggacctggccttcgtcgacggcgtgaagctgcaacgggttaagctactgctgatgctggtgacggcattaaccatcggcgtggcgatgaagttcgtcggggcgctgattattacctcgctgctgatcatccctgccgccacggcgcgccgttttgcccgcacgccggagcagatggccggtgtggccgtgattatcggaatgattgcggtaacgggtgggttaaccttctcggcgttctatgacacgcctgctgggccgtcagtagtgctgagtgcggcggtgctgtttattttcagcatgatgaaaaaacaacctaatgcctga

SEQ ID NO: 164953 - DNA, 756 bp, Enterobacter cloacae
atgacgacactggtttctctcgataatatttcggtctctttcggccagcgccgcgtcctctctgacgtgtcgctggatctgaagcccggcaaaattctgacgctgcttggtcctaatggcgcaggcaaatccacgctggtacgggttgtactgggtctggtgacgcccgatgaaggtgttatcacccgcgaggaaaaattgcgtatcggctatgtgcctcagaaattacacctggatgccacgctgcctttaacggtgagtcgctttctgcgcctgcgccccggcacgcggaaagccgatattctcccggcgctgaaacgcgtacaggcgggccaccttattgacgcgccgctgcaaaaactttccgggggtgagacgcagcgcgttttgctggcgcgcgcgctgttgagcagcccgcaattgctggtgcttgatgagcctacccagggggtggacgttaacggtcaggtcgcgctttatgatttgatcgatcagcttcgccgtgaactgaattgcgccgtgctgatggtctcccacgatctccatcttgtcatggcgaaaacggacgaagtgctgtgccttaaccatcatatttgctgttccggcacgcctgaagtggtctcgatgcacccggagtttatctccatgtttggccctcgtggcgctgaacagctgggtatttaccgtcatcatcataatcaccgccatgatttacagggacgaattgtcctgcgccggggaaatggacactcatga

SEQ ID NO: 164954 - DNA, 960 bp, Enterobacter cloacae
atgattagtcgcattatgttacataaaaatacgcttcttttcgcagcattatccgctgccctttggggtacaaccgcacaagatgttaacgcggcggttgtcgcttcgcttaaaccgcttggattcatcgcgtcggccattgccgatggggtgacggaaacccaggttttgctgcctgacggggcctctgagcatgactattctcttcgcccttcagatgtaaaacgcttacaaaacgcggacttagtcgtctggattggaccagagatggaagcgtttatgcagaagtcggccaaacagattcccggcgataaacaggttgcgattgccgggctttccggcgtgaaaccgttgctcatgaaaggcacggatgacgacggtgatgaacatgaccatcacgcggcagagggtgaaaaaggtgatggagatcaccatcatggtgagtacaacatgcatctctggctttccccagagatagcgcggctttcagcggttgcaatccacgacaaattagtggaacttatgccgcaaagtcgagccaaactagacgccaacctgaaggattttgaggcacaattagccgcaaccgataagcaggtaggtaatgagctcgcaccgttgaaaggaaaagggtatttcgtttttcatgacgcctatggctactatgaaaaacactatggtttgaccccgcttgggcacttcaccgtcaaccctgaaattcaacctggtgcgcagcgtttacatgaaatcagaacacagttggttgagcaaaaagcgacatgcgtttttgctgagccacagttcaggccagcggtcgtagaagccgtggccagggggacatccgtgcgcatggggacccttgacccgctaggaacgaatatccagttgagcaaagcgagctattcgcagttcctcagccaactggcgaaccagtatgcgagctgcctgaaaggagattaa

SEQ ID NO: 164955 - DNA, 1320 bp, Enterobacter cloacae
gtgcaacagatagcccgctctgtcgccctggcatttaacaatctgcctcgaccccaccgcgttatgctggggtcgcttacagtactcaccttagcggtcgccgtctggcggccctatgtttaccacccgagttctgcccctatcatcaaaaccatcgagcttgaaaagagcgagatccgttctttactgcctgaagccagtgagcctatcgaccaggctgctcaggaagatgaagcgattccccaggatgaactggacgataaaatcgagaacgaggccgggatccacgagtatgttgtctctaccggtgacacgctgagcagcgtgctcaaccagtacggtatcgacatggggaatatcagtcagctcgctgctgcagataaagacctgcgtaacctgaaaatagggcaacagctctcctggaccttaacggcggatggcgatctccagcggttaacctgggagatgtcccgccgtgaaacccgcacctacgatcgcactgcaaacggtttcaaaatgaccagtgaaatgcagaagggcgactgggtgaacagcgtgatgaaaggcacagtaggcggaagcttcgtttccagcgcccgtgatgccggtctcaccagctctgaaatcagtgcggtgatcaaagccatgcagtggcagatggatttccgcaagctgaagaagggcgatgagttttccgtgctgatgtctcgcgaaatgctcgacggcaagcgtgagcagagccaactggtgggcgtacgtctgcgctctgatggcaaagattactatgccatccgtgccgaagacggtaagttctacgaccgcagcggtacgggactggcgaaaggctttatgcgcttcccgacggctaaacagttccgcgtttcctctaactttaacccgcgtcgtctgaacccggttaccgggcgcgtcgcaccacaccgtggcgttgactttgccatgccgcagggcacgccggtgctggctgtgggtgatggtgaagtggtcgtggctaaacgtagcggtgccgcaggctactatgtcgcggtgcgtcacggtcgtacctacaccacccgctatatgcacctgcgtaaactgctggttaaacctggacagaaagtgaaacgtggcgaccgtatcgcgctctccggcaacaccggacgctcgaccggcccgcacctgcactatgaagtgtggattaaccaacaggccgtaaacccgctgacggcgaaactgccacgcaccgaaggcctgacgggtaaagatcgttctgattacctggcgcaggtgaaagaggtgataccgcagctgagcttaaactaa

SEQ ID NO: 164956 - DNA, 972 bp, Enterobacter cloacae
atggaaacaaaaaaaaacaatattgaatacattcctgagtttgaaaaatcctttcgccatccgcgcaactggggcgcctggctcggggtctacacctttgcaggcatcgctatgctgcctgctgcgctgcgcgatcccctgctggggaaaattggccgtctggccgggcgtttaggcaaaagcgcgcgtcgccgtgcgcagatcaacctctattactgttttcccgaaaaaagcgatgccgagcgcgaggctatcatcgatgcgatgtataccaccgcgccgcaggcaatggcaatgatggcagagctggcgctgaaagggccggaaaaaatcgttgaccgtgttgactggaaagggctggaaatcattgacgaaatgcgtcgcaatgacgagaaggtgattttcctcgttcctcacggttggggtgtcgacattccggcgatgctgatggcttctcagggtcagaagatggcggccatgttccataaccagggcaacaaaatctacgactttgtctggaataccgtacgtcgtcgttttggcggtcgtttgcatgcgcgtaacgatggtatcaagccgtttattcagtccgtacgtcagggatactggggctactatctgccggatcaggaccacggaccggagcacagtgagtttgtcgacttctttgcgacctacaaagccacacttcccgcgattggccgcctgatgaaggtgtgtcgcgcccgcgtgatcccactcttcccggtttatgatggtaaaacgcaccgtctgagcattgaagtccgcccgccgatggatgacttgctgaccgctgacgatcgcaccattgcgcgtcgcatgaacgaagaggtggaaatcctggtggggccgcataccgaacagtacacgtggatattgaagctgcttaaaacgcgaaagccgggtgaaacggagccctataagcgtaaagagctttatccgaggaaataa

SEQ ID NO: 164957 - DNA, 1443 bp, Enterobacter cloacae
atgtccagaaggcttcgcagaaccaagatcgttaccaccttaggcccggccaccgaccgcgataataaccttgaaaagattatcgccgcgggtgccaacgtggtgcgcatgaacttctctcacggtacgccagaagaccataaattacgtgccgacaaagtgcgtgagatcgccgctaaactgggccgccatgtcgctatcctcggcgatctgcagggtcctaaaattcgtgtctccaccttcaaagaaggtaaagttttcctcaatatcggcgataaattcctgctggatgccaacctgggcaaaggcgaaggcgataaagaaaaagtcgggattgactataaaggcctgccagctgacgtggtgcctggcgatatcctgctgctcgacgacggacgcgtacagctgaaggtgctcgaagttcagggaatgaaagtgttcaccgaagtcaccgtcggcggcccgctctccaacaataaaggtatcaacaaactgggcggcggcctctctgcggaagcgctgaccgataaagacaaagcggacatcgttactgcggctctgatcggcgttgactacctggcagtctccttcccacgctgtggcgaagatctgaactatgcacgccgtctggcccgtgatgcaggctgtgatgccaaaattgttgccaaggttgaacgcgcggaagccgtttgcgatcaggacgccatggacgatgtgatcctggcttctgacgtggtgatggtggcccgcggcgatctgggtgtggaaattggcgatcctgagctggtcggtatccagaaagcgctgattcgtcgcgcacgtcagctgaaccgcgcggtgatcaccgcgacccagatgatggaatccatgatcaccaacccaatgccaacccgtgcagaagtgatggacgtcgctaacgccgtgctggatggtaccgatgcggtaatgctgtctgcggaaaccgctgcgggccaatatcctgctgaaaccgtggccgcgatggcgcgtgtctgcctgggcgcagagaagatcccaagcatcaacgtctctaaacaccgtctggacgtgcagttcgacaacgtggaagaagcgattgcgatgtctgccatgtacgcggcaaaccatctgaaaggggttaccgcgatcatcaccatgaccgaatcaggccgtaccgcgctgatgacttcccgtatcagctccggtctgccgatcttcgccatgtcccgtcatgaacgtacgctgaacctgacggcgctgtaccgcggtgtgacgccggtgcacttcgacagcaccaatgacggcgtggcagccgcgcacgatgccgtcaatctgctgcgcgacaaaggttacctggtgtccggtgatatcgttatcgtgacgcagggtgatgtgatgagcaccattggctcaaccaacaccacccgcgttatgaccgtcgagtaa

SEQ ID NO: 164958 - DNA, 966 bp, Enterobacter cloacae
atggaagccacaggggtaatatcggctaatcgaatgaagatttcatccatttatgaaatcgtttccacccccacgagcgccctgttaacaatgaatatgcttgaaaaaatccagtatcaactggaacaccttagcaaatccgagcgaaaagtggctgaagtcattcttgcctctcccgctcaggcgattcattcaagcatcgccgcgctggctcaggaagcaggcgtcagcgaaccgacggttaaccgcttctgccgtagcctggaaacgcgcggctttcctgattttaaactgcatctggcacaaagtctggcaaacggcaccccttatgttaatcgtaatgtggatgaagacgacagcgtagatgcctacacggcgaaaatttttgagtcagctatggccacgcttgaccacgttcgtcagtctctggatatgagttcggtgaaccgtgcggtggatttacttacccaggccaagcggatcgcgttcttcggacttgggtcgtcggccgccgtggcgcacgatgccatgaataaattcttccgcttcaacgtgccggtgatttattccgatgacattgtgctgcaacgcatgagctgtatgaattgcagtgaagatgacgtcgtggtactcatttcgcatactggccgcaccaaaagtcaggtggaactggcgcagctggcccgtgaaaacgatgccatggtgatcgccctcaccaccgccggtacgccgctggcacgagaggcgacgctcgccattacgctggacgtcccggaggataccgatatgtatatgcctatggtttcccgtctggcacagctcacggttatagacgtgctggcgaccggttttaccttgcgccggggcgcaaaattcagagataacttgaagcgagtcaaggaagcgctgaaggaatcgcgttttgataaagaattgctcataaagagcgatgtttccttaaagtag

SEQ ID NO: 164959 - DNA, 1476 bp, Enterobacter cloacae
atggcggtaacgcaaacagcccaggcatgtgacctggtcattttcggcgcgaaaggcgatcttgcacgccgaaaattgctgccttccctgtatcaactggagaaagcgggccaaattcatccggatacccgtatcctgggggtagggcgcgccgactgggataaggacgcttataccaaagtcgtccgcgaggcgctcgaaactttcatgaaggaaaaaattgatgaaagtttgtgggataccctgagcggtcgtcttgatttctgcaacctggacgtcaatgacgtcagcgcgtttaaccgcctgggcgccatgctggatcagaaaaaccgtgtcaccattaactatttcgccatgccgccaagcacgttcggcgccatctgcaaaggtctcggcgaagccaaactgaacgccaaaccggcgcgcgtggtgatggagaagccgctgggtacctctctggcaacctcgcgtgaaatcaacgaccaggtgggcgagttcttcgaagagtgccaggtttaccgtatcgaccactatctcggtaaagagacggtactgaacctgctggcgctgcgttttgctaactccctgtttgtgaataactgggacaaccgcactatcgaccacgtggaaatcaccgtggcggaagaggtaggtatcgaaggccgctggggttactttgaccaggcaggccagatgcgcgacatgatccagaaccacctcctgcaaattctgtgcatgatcgccatgtcaccgccgtctgacctgacggcagacagcattcgcgacgccaaagtcaaagtgctcaagtcgctgcgccgcatcgaccgctccaacgtgcgcgagaagaccgttcgcggccagtacactgccgggtttgcgcaaggcaaaaaagtgccgggctacctggaagaagagggcgcgaacaaatccagcaacaccgagacttttgtggcgatccgcgtggatatcgatgactggcgctgggcgggcgtgccgttctacctgcgtaccggtaaacgtctgccaaccaaatgttccgaagtcgtcgtctacttcaaaaacccggaactgaacctgttcaaagagtcctggcaggagctgccgcagaacaaactgaccattcgtttgcagccggacgaaggggttgatatccagatcctcaacaaagtgccgggcctggatcacaagcataacctgcagaccaccaaactggatctgagctactccgaaaccttcaaccagacgcacctcgcggatgcttatgagcgtctgctgctggaaaccatgcgtggtatccaggcgctgttcgtgcgtcgcgatgaagtggaagaggcgtggaaatgggtcgattccattaccgaagcctgggcagccgatcaggatgcgccaaaaccgtatcaggcgggcacctgggggccggttgcatcggtggccatgatcacccgtgatggccgctcctggaacgagtttgagtag

SEQ ID NO: 164960 - DNA, 1812 bp, Enterobacter cloacae
atgaatccgacattgttacgcgtaacacaacgcattattgagcgctcgaaggagacccgttcggcctacctcgcccggattgaacaggcaaagagcaataccgtccatcgctctcagctggcctgtggtaacctggcgcacggcttcgcggcctgccagcccgatgataaagcctccctgaaaagcatgttgcgtaacaatatcgccattattacctcctataacgacatgctctccgcccaccagccgtatgaggtctatcccaatatcattcgtaacgcgctgcacagcgtgaatgcggtaggtcaggtcgcgggtggcgtgccggcaatgtgcgacggtgtgacccaggggcaggatggtatggagctgtcgctgctcagccgcgaagtgattgcgatgtctgctgcagtaggcctgtcacacaacatgtttgatggcgcactgtacctgggcgtgtgcgacaagatcgttccgggactggtgatggctgcgctgtcgtttggccatctgcccgcgatctttgtgccgtctggcccgatggcaagcggcctgccgaataaagaaaaagtgcgtattcgccagctgtatgcggaaggaaaagcagaccgtcaggcgctgctggaggcggaagccgcgtcctaccatgcgccgggtacctgtacattctacggcacggccaacaccaaccagatggtggtggaatttatgggcatgcagctgccgggctcgtcctttatccagccggatgcaccactgcgtcaggccttgactgaggccgctgcccgtcaggtgacgcgtctgaccggaaacggcaatgaatggatgccgatgggcaaaatggtcgacgaaaaagtgatcgtcaacggtattgtggctctgctggccaccggcggttcgaccaaccacaccatgcacctggtggccatggcgcgcgcggcgggcattctgatcaactgggatgatttctctgagatctcttccgtggtgccgctgatggcacgtctttacccgaacggtccggcggacatcaaccacttccaggctgcgggtggcgtaccgctgctgatgcgcgagctgctgaaaggcggtttgctgcatgaagacgtcaacaccgtggcaggctttggcctgcagcgctatacccaggagccgtggctgaacaatggcgagctggcctggcgcgacggggcgaccgcatctctcgatgcgcaggtgattgccaccatcgacaaaccgttctctcctcatggtggcaccaaagtgctgagcggcaacctcggtcgtgcggtgatgaaaacgtctgctgtaccggaagagaaccaggttattgaagcgccggctgtggtgttcgaaagccagcacgacgtattacccgcttttgacgcgggtctgcttgataaagactgtgtggtggtagtgcgtcatcaggggccaaaagcgaacggcatgccagaattacataaacttatgccaccacttggtgtattattggaccgccgtttcaaaattgcgttagtgaccgatggacgcctctccggtgcatccggcaaagtgccttcagctatccacgtcacgccggaagcttatgacggcggtttgctggcgaaagtgcgcgacggtgacatgatccgcgtgaacggtcagacaggtgagttaaccctgctggtggatgaggcagagctggcggcacgtcagccacatattcctgacctgagcgcatcgcgcgtggggaccggacgcgaaatgttcagcgcgctgcgtgagaaactctccggtgcagagcagggcgcgacctgtattacgttttaa

SEQ ID NO: 164961 - DNA, 642 bp, Enterobacter cloacae
atgaaaaactggaaaacaagtgcagaagcaatcctgaccactggccctgtcgtgccggttatcgtggtaaacaagctggagcacgctgtgccaatggcgaaagcgctggttgcgggtggcgttcgtgttctggaagtgaccctgcgtaccgcctgcgcgatggatgcgattcgcgctatcgccaaagaagtgccggacgccatcatcggtgcgggcactgttctcaacgcgcaacagctggcagaagtcacggaggccggagctcagttcgctatcagccctggcctgaccgagccgctgctgaaagcagcgaccgaaggcactattcctttgatcccgggtatcagcaccgtgtctgaactgatgctgggcatggactacggcctgaaagagttcaaattcttcccggcagaagccaacggcggcaccaaagcgctacaggcgattgcaggtccattctctcaggtgcgtttctgcccgacgggcggtatctctccggcgaactaccgtgactacctggcgctgaaaagcgtgctgtgcatcgggggttcatggctggtgccagcggatgcgctggaagcgggcgactgggatcgcatcacgaaactggctcgcgaagcggttgaaggcgcgaagcaataa

SEQ ID NO: 164962 - DNA, 1179 bp, Enterobacter cloacae
atgactcgtttaggaaccgcgctgcgacctgcggcgacgcgtgtgatgctgttaggatcgggcgagctggggaaagaagtcgccattgagtgccagcgtttaggggtagaagtgattgccgtagaccgctacgccgacgcgcccgccatgcatgttgcccatcgttcttatgtgattaacatgctggacggagaggctctgcggacactcatcacgcaggagaaaccggattttgtggtgccggagattgaagctatcgcgaccgatacgctgatcgcgcttgagcaggaaggtcagcgcgtggtgccttgcgccaacgcagcgaaactgaccatgaaccgcgaaggcattcgccgcctggcggcagaggagctggggctgcccacttcaagctaccgttttgcgggcgataaaaccgcattcctgcaggccgtcgatgagatgggttacccgtgcatcattaagccggtgatgagctcatccggaaaaggacagagttttatccgcgacagcagcacgctggacaaagcctgggattatgcgcaacagggtggccgtgccggagctggccgcgtgattgtcgagggggtggtgaagtttgatttcgaaatcaccctgcttaccgtcagcgccgtggatggcgtccatttctgcgatccgatcggtcaccgccaggaggatggcgattaccgcgaatcctggcagccacagcagatgagcgccctggcgctggaacgtgcccaggatatcgcccgtaaaaccgttctggcgttaggtggttacggtctgttcggcgtggagctgtttgtctgcggcgacgaggtgattttcagcgaagtctcccctcgcccgcatgacaccgggatggtgacgttgatatcgcaggatctctccgagttcgccctgcatgttcgcgccttccttggcctgccggttggcggtattcgtcagtacggcccggcggcctcggcggtgatcctgccgcagctgaccagtcagaacgtgacgtttgataacgtcgagggcgcaacgggcgccgggttacaggtacgtttgttcggtaagccggagatcgacggcacccgtcgtctgggcgtggcgttagcaaccgggaataacgtcgacgaggccatcgcacgcgctaaagcggcggcagcgaacgttaaggtagcaggataa

SEQ ID NO: 164963 - DNA, 651 bp, Enterobacter cloacae
atgtcaggctggttaaatcaactgcaatccatgttagggcagaaaacatcaggttccggcgaccaggggctaagcaaactgctggtaccgggggcgctcggagggctggcagggctgctggtcgccaataaatcctcacgtaagctgctggcaaagtacggtaccggcgcgttgctggccggtggcggcgctatcgccggtaccgtgctgtggaataagtacaaggacagggtacgcgcggcgcaccaggatgaatcccactttggggaggagacttcgccgctggatctgcgtacggagcggctcattcttgcgctggtgtttgccgcaaaaagcgacgggcatattgatgataaagaacgagcggctatcgagcagcagatgcgagaagccggcgtggaagagcagggcagaacgctggtggcgcaggccattgagcagccgctcgatccgcagcgtctggcgcaaagcgtgcagaatgaggaagaggcgctggaactctatttcctgagctgtgccgccattgatattgaccactttatggaacgcagctatctcaacgccctgggcgatgcgttgaaaattcctcaggatgttcgcgaggggatcgagcaggatatccgggagcaaaaacagacgctacagggctag

SEQ ID NO: 164964 - DNA, 2061 bp, Enterobacter cloacae
atgccaccgaaagcccgacgtactccgtatgcgattaccacccatggcgatacgcgtatagataactattactggctacgggacgattcacgttcccgcccagaggtactcgactacctgcatgaagaaaacgattacggtcgcaaggtcatgtccagccagcaggcgcttcaggaccagctgctgaacgaaatggtgcagcgcattcctcagcgcgatatctccgcgccctggaccaaaaacggctatcgttatcggcatatctacgagcccggcagtgaatatcccatctatcagcgacagtcggtattaagcgccgagtgggatgaatgggatattctgctggatgccaaccagcgtgccgcccacagcgagttttatacgctgggcggtatgtccatctccccggataacaccattatggcgctggcggaggattatctctcccgtcgtcagtatggcctgcgattccgcaatctggaaaccggtaactggtatccggaaatgctggaaaacgtctccccggattttgtctgggcgaacgattccgagacggtctattacgttaaaaagcacgccgccacgctgctgccttatcaggtgtggcgccacattgtaggcacggactccgccgatgacgaactggtctatgaagagaaagacgaaacgttttatgtcagcctgcataaaacgtcctcacgccactatgtgattattttccttgccagcgctaccacctcagaagtgctactgctggatgccgaactgcctgatgcccagccgctctgctttctgccgcgccgaaaagaccatgagtacagtctggatcacttccagcacagcttttatctgcgctcaaaccgcgagggaaaaaactttggcctgtataagaccaaggtgcgcgacgagcgcaagtgggaggtgcttattcccgcgcgggaacaggtgatgctcgaagggttcacgctgtttaccgactggctggtggtggaagagcgtcagcgggggttgaccagtatccggcaaatcaaccgcaaaacgcgcgaggtgatagggatcgcgtttgacgacccggcctacgtcacctggattggttttaatcctgagcctgaatcgtcccggctgcgctatggctactcgtcgatgaccacgccggatacgctgttcgaactggatatggataccggccagcgccaggtgttgaagcaaacagaagtgaagggatttgaatccgacaattatcgtagcgaacacctgtgggttaccgcgcgcgatggtgtcgaggtgccggtttcgctcgtgtatcacaaggcgcattttcagaaaggtaaaaaccctatcctggtttacggctacggctcctatggttccagcatggatgccgacttcagcagcagcagattaagtctgctcgaccgcggctttgtttttgccatcgctcatattcgcggcggcggtgagctgggccagcactggtatgaagacgggaaattcctgaaaaagcaaaacacgttcaatgattacctcgacgtttgcgacgccttaattgaacaaggctatggctcaccgcagctctgctttggcatgggcggcagcgcgggcggcatgctgatgggcgctgtgatcaatcagcgtcccgagcgttttaagggcatcgttgcgcaggtaccgtttgtcgatgtggtcaccaccatgctcgacgaatctatcccgctcacgaccggggagtttgaagagtgggggaatccacaggatgaaacctattatcgctatatgaaagcgtacagcccgtacgataacgtggaagcgaaagcctacccgcacatgctggtgaccaccggtttgcacgattcacaggtgcagtactgggaaccggcgaaatgggtggcgaagctgcgggaactgaaaaccgacgacaacctgctgctgctctgtaccgatatggactccgggcacggagggaagtcggggcggtttaaatcttatgaaggggtggcgctggaatacgcctttttgatcggcctggcgcaggatacgcttccaggccaggctgaacgttaa

SEQ ID NO: 164965 - DNA, 663 bp, Enterobacter cloacae
atgctgcgcgtcattgataccgaaacttgcgatcttcagggcggaattgtggaggtggcctcggtcgacgtcgttgacggaaaaatagtcaacccgatgagccatctggtgcggcccgatcgccctattagcccgcaggccatggctatccatcgcatcactgaatcaatggtggcggataaaccctggatagaagacattatcccgcactactatggcagcccgtggtatgtcgcccacaacgccagcttcgaccgtcgggttctccccgacatgcccggggagtggatttgcaccatgaagctggcgcgtcgcctgtggccggggatcaaatacagcaatatggcgctgtataaatcccgcaagctcagcgtcagaacgcctgaagggcttcaccatcaccgcgccctgtatgactgctatatcaccgctgcgctgctgatcgatattatgaatacttccggctggacaccggatgatatggcgacgattaccggtcgtcctgcactgctgacgacgttcaccttcggaaaataccgcgggagagcagtatcggatattgcggataaagatccgggctatctgcgctggctgtataacaacctcgacaagatgagcccggagctacgcttaaccctgaagcattatctgggtgaagcttaa

SEQ ID NO: 164966 - DNA, 651 bp, Enterobacter cloacae
atgtcacaatggaatatagcggcagcccagtatggcgggcagtatcacagtgttgatgagcacgttacccatcacctacgcttcattgccgaagcggcacagcagcagtgcgatctgctggtcttcccggaactctccttaaccggctcaggcacaacgacgttacctcccccaccgtgcgacgcgcagctggaacccttgcttgatgcggcacatttttaccagattagcgttattgccgggcttccccttgagcggaatggccagcgtcagaaaggtctcgtgctctttacgccctctcggccgagcatcgtgcgctatccgcaaggcggcggtgcgagcctggttccgggggataaacagctcaccatcattgatgcgcagggcgattcccccaatctcgatccgcaggcaacgctgttcaccagcagccagtcggtaagggacaaccgctggcggcagtccatcagcaccctgcaacgctttgcacacaaatatgccattgcggtattaatggcgaacgccagcaccggcagcgcattatgggatgaaaaaggccagttgatcgtgcgggcggataaaggcgagctgctgttgaccggcacgcttaaccgacagggttggcaaggcgatatcattcctttaggctaa

SEQ ID NO: 164967 - DNA, 231 bp, Enterobacter cloacae
atgaaaatcaatctggccgcccttcctcaggacgagatggataaagtgaatgtcgatctcgcagccgctggcgttgcgttcaaagagcgttacaacatgcccatcgtggctgaagttgtggaacgggaacaacccgcccatttgcgcgactggttccgggaaagattaattgctcaccgtctcgcttcggtcaacctctctcgtctgccgtacgagcctaaagttaaataa

SEQ ID NO: 164968 - DNA, 372 bp, Enterobacter cloacae
atggggttatccacttcacgcacggtatgcgcgctggtttttctggcatcagtcattatctcgcccgctgtgctggcgcatgcgcatcttaaacagcagagccccgcagcagacagcgtggtgagcgctccgcagtcactgacgctgaatttttcggaaggtatcgaaccgggatttagcggtgtggtggtgacggatgcgcacaagcaggtcgtcaaaacggcagccgtaacgcgagacgaaaagaacaaggctcaactgatcgttccgctggcgcaaacgctggcgaccggaacctaccgggtggactggcatgtggtttccgtcgacggccacaaaaccaaaggcagctatcactttagcgtgaaatag

SEQ ID NO: 164969 - DNA, 870 bp, Enterobacter cloacae
atgctggcactggtctatgttgggttgcgctttatccatttcgcggcgctgatgctcgtttttggtaatgcgctatacagcgtctggttggcgccttcctctctccatcgtctgatggctctgcgtttcgcgctgcagcagcgggtggcatctttaatcagcctggccgctgcgcttctgatgttcatgcttcagggcggattaatgggcgacggctggggagatgtgtttaacccgcaagtctggcacggcgtactggggacgcagtttggcagcgtctggctgtggcaaattatcctggcttccattacggtcgctgccgcgtggcttgcgccgctgaaaggctcccggctgctactgctcgcaatggggcagtttgtcctgctggcaggggtaggccacgcgacgatgaacgaaggtccgttgggggctgtgcagcgtctcaatcatgccgttcatctgttatgtgccgcaacctggctcggcggattactgccgctgctgttctgcatgcatctggcaaaagggcgctggcagaacgcggccatctacaccatgatgcgtttctcgcgcgtaggccactatgccgtcgcgggcgtgctgctcacagggacgatcaattcgctcttgattctgggcgtccatattccctggcaggctggctacgtgcagcttttattgttcaaatgtgcgctggtggcgttgatggtggcaattgcgctggcaaatcggtattttctggtgccacggtttcgtccggattccgggtgggcacaacagctttttatcaggatgacacaggcagaagtggtgctgggagcgctggttctggcagcggtcagcctgttcgccacctgggaacccttctga

SEQ ID NO: 164970 - DNA, 339 bp, Enterobacter cloacae
atgaaaaaaacagtactttcgctcttattgctggcctgcacggggagcgctctggccgcgccgcaggtgatcaccgtcagccgttttgaagtgggtaaagacaagtgggcgtttaatcgcgaagaggtgatgctgacctgtcgtccgggccatgcgttatacgcgatcaacccgagtacgctggtgcaatacccgttgaatgaggttgcagagcagcaggtggccagcggcaagagcagcggccagcccatcagcgtgatccagattgatgacccggctcacccggggcagaagatgagtctgacaccgtttatcgaacgcgctgacaagctctgctag

SEQ ID NO: 164971 - DNA, 942 bp, Enterobacter cloacae
gtgtctaatacacacctgcataacgatgtgttctacccacatcgcacaaatataatttccgagctggtgaacggcgaacgtgtcccgggacccatctggcggaaacgcgattatcggctgaagttccttttacgttcgcttctgttctggtcttccacccgtcgcatgctggaagccctttcagggcgtgacgatttcgacaaacttctcgccgctcaaattacattgcccagcaagacccatcggcagtatctgatgcgtggcctgaccgcgaacgatcgcgccgacgctatcgttaaccattattactggatcgatagcctgaaagagcgcgccctcgcccaggcgctgaccagcccgcaggaacaaaccgttgttcagttccatgcaaaagagggcgtgatctatacggttaatgcatcctctgccgggaaagccgagcgcgaaggtgagagcacgctgtggctgcgcgataacgaggatacgctgcttgccagcctgacctttagcgtagcccgcagcaacggacaacgcgtaatagtaattggcgggcttcagggcccccgccgctgcgtgtcgcgggacgtcattaaacaatccacccgcgcctgtcacggcctgtttcctaaacgcgtgctgatggaagttcttttccagctggccttacagtcatctgttaaggcgatttttgccgtcagcgacgagggacacgttttccgcgcattgcgctatcgcctcagcaaaggccgccatttccacgccagctatgacgaattctgggattctctgggcggtaaaaaggtctccggcttctgctggcaactcccgctgcagatggaacgcaaatctctcgacgagatcgcgagcaagaagcgtgcggaataccgccgtcgttttgaattgcttgacgaaattgaggcgtcggtaaaatcccgcttttaa

SEQ ID NO: 164972 - DNA, 645 bp, Enterobacter cloacae
atgtatcagcgaatagagggtgggatgtggcgtcacgtctgggttgtcagcgatatacatggctgttatcaatggcttatggacgaactgaaacgccgccattttaatccgtatgaggatttgcttatttccgttggcgatttgatcgatcgcggtcctgacagcgtaaaaacactgcagctcatcaatgagaaatggttcagagccgtgcggggtaaccatgagcaaatggcaatggatagtctggacaataacgattctgcgctgtgggcgatgaatggtggcgtgtggtttacgcgccttgatcgcgagcagcaggcgctggcgcgaacgttactaaacgcctgccgcgaattgccgcatattatcgagataagctgcgcaaacggtctcaatgttattgcgcacgcagattaccccgccgcggaataccgctggcaaaaaccggtgagcgcccagcgcgtgctgtgggatcgcgacaggttgatgggctttatggtgggcaaagggcaggggattagcggtgcggatcatttctggttcgggcatacgcccgtcgacaggcggtatgattttgataacctgcactatattgataccggagcggtgttcgacggttacttcacgctggcacagctacagtaa

SEQ ID NO: 164973 - DNA, 240 bp, Enterobacter cloacae
atgacgaaaaccagcgtgcgtattggcgcttttgagatcgacgacgcagagctgcgcggcgaagcacaaggcgatcgaacgttaagtattccctgcaaatccgacccggatttgtgcatgcaactcgacgcatgggatgcggataccagcgtcccggcgatacttgatggcgaacactctgttctttaccgtgagcattacgatagcaaaaccgatgcctgggtcatgcgccttgcctga

SEQ ID NO: 164974 - DNA, 1398 bp, Enterobacter cloacae
atgcgcgaggcgctcccctctcacctgtcgttagatgattttatcgccgcctgccagcgtccgttacgccggagcattcgcgtcaacacgctgaaaatcagcgtcgatgattttctgacgctggtttccccctacaactggcagcttacgccggtgccctggtgtgcagaggggttttggatcgagcgcgatgacgaagatgccgtgccgctgggaagtaccgcagaacatctgagcggtctgttttatattcaggaagccagttcgatgctgccggttgccgccctgttcgcagaaggcaacgcacctgaacgcgtgatggacgttgccgccgcgcccggctcgaaaacaacacaaattgccgcccggatgggtaatcacggggcgattcttgccaacgaattttccgccagccgcgtgaaagtcttgcatgccaacatcagccgctgcggtatccagaatgtcgccctgacgcattttgacggacgcgtgtttggcgccgccttgccggaagcgttcgatgccattctgctcgacgccccctgctccggtgagggggtggtgcgtaaagatcccgatgcgttaaagaactggtctgtggaaagcaatcttgagatcgctgccacgcagcgcgaactgatcgacagcgcctttcacgccctgcgacccggcggcacgctggtgtactccacctgtaccctcaaccgcgatgaaaacgaagacgtctgtctgtggttgaaagcgcaatacccggatgccgttgagttcctgccacttaacgatctgtttgccacggcagatgaggccgccacgccggaaggtttcctgcacgtgttcccacagatttacgactgcgaagggttctttgtggctcgtctgcgcaaaactcaggcggtggctcccctgccagccccgaaatttaaggtcggcaatttcccgttcgccccgctgaaaggccgcgatgctgtgcaacttaaagccgccgccaataaggttgggctgatctgggatgagaatctgcacctctggatgcgtgataaagagatatggctgttcccggcacccattgagccgcttattggtaaagtccgtttttcacgtatcgggatccgcctggcggaagtgcataataaagggtatcgctggcagcacgaagcggtcatcgccctggcggacagcgataacacgtttgaactgacgcatcaggaagccgaagagtggtatcgtggtcgcgacgtttacccggaaaccaccccgtctcaggatgaggttattgtgacgtatcagggcttcccgttgggtctggcgaaaaaggtcggctcgcggctgaaaaatagttatccgcgggagttggtccgcgatggccggttgtttacgggtaacagtcccaccgactaa

SEQ ID NO: 164975 - DNA, 2634 bp, Enterobacter cloacae
atgagtcaggaaacccccgcttcgccgactgaagcgagaattaaaactaaacgccgcatttcgccattctggttgctgcctgtcatcgccctgatgattgcaggctggcttatctggacgagctatgaagatcgcggaagtaccgtcaccattgatttccagaccgccgacggcatcgtcgccggacgaacccccgttcgttttcagggggttgaagtcggtacggttcaggacatctcactcggaaaagggctgaacaaaattcaggtgcgggtcagcattaaatcggacatgcaggacgcgctgcgcagcgaaacgcagttctggctggtcacgccgaaggcgtctctggcgggtgtctcggggctggatgcgctggttggcggtaactacatcggtatgatgccaggcaagggcgaaccgcaggatcactttgtcgcgctggatacgcagccaaaataccgtctcaataacggcgatctgatgatccatctgcaggcgccggatctcggctcactgaacagtggctcgctggtctatttccgaaaaattccggtgggtcgcgtttacgattacgccatcaatccgaacaaacagggcgtgaccatcgatgtgctgatcgaaaggcgattcaccaacctggtgaaaaaaggcagccgcttctggaacgtgtctggcgtagatgccgacctcagcctgagcggtgctaaagtgaagctggagagcctggccgcgctggtaaacggagcgattgcctttgactccccggagaactccagccctgctgctgccgatgatacgttcgggttgtacgctgatctggcgcacagccagcgaggggtgatcgtcaaacttgttctgcccgatgcgaaaggtctgaaagccggatcaacaccgctgatgtatcagggtctgcaggtaggtcagctcaccaaaatgacgctcaaccctggcggctcggtgacgggcgaaatgaccgtcgaccccagcgtggtcgatctcctgcgcgagaaaacgcgtatcgagatgcgcagtccgaagctctctctgaacgatgccagtctcagcactttgctgaccggcaacacgtttgaactgatccccggagaaggaaagccaagcaacaacttcgtgatcgccccggcggataaagccctgctgcaaaaaccgggcgttgtgacggttacgctaaatgcacccgaaagttatggtattgaagccggtcagccgctgatcctccacggtgtccaggtgggtcaggttctggagcgaacgctttccgaaaacggcgtgagcttctcggtagcgatcgatccgcaatacagcaacctcgtccatggcgacagtaaattcgtggttaacagccgcgtcgatgtgaaggtaggcctggacggcgtagagttccttggtgccagtgccagcgaatgggttaacggcggcattcgcattttgccgggcgataaaggccccatccgcgaaaattacccgctgtatgccaacctggacaaagcgattgaaaacagcctgagcgatctgccgacgaccacgctgaccttgagcgccgagacgctaccggacgtccaggcgggttctgtggtgctgtatcgcaagtttgaagtcggggaagtgatcgccgttcgcccgcgtgcggacgcgtttgatatcgaactgcatatcaagccggagtatcgcaagctgctgacgccaaacagcgtcttctgggccgaaggcggcgcgaaagttcagcttaacggtaacgggctgaccgtgcaggcctccccgctctcacgcgcgctgcgcggcgccattagcttcgataacctcagcggtgcaggcgcaaacctgcgtaagggcgataagcgtattctcttcccgtccgaaaccgccgcgcgtgccgtgggtgggcagattaccctgcatgcgtttgatgccggtaagctggcggaaggcatgccgattcgctacctgggcattgatatcggccagatccagaagctgacgctgatcacctcccgcaacgaggtacaggccaccgcggtgctctacccggaatatgtgcagaccttcgcccgcaccggttcccgcttctcggtggtgacgccgcagatttcggccgcaggcgttgaacatctcgacactattctgcagccctatatcaacgtcgaacccggccagggcaatgcacggcgtgatttcgaactgcaggaagccaccatcaccgattcgcgctacctcggtggcctgagcattgtggtggaagtcccggaagcaggctcacttggcatcggcacgccggttctgttccgcggtattgaggtaggtacggtaacgggtctgacgcttggtacgctctccgatcgtgtgatggtggcgttacgtatcagcgaccgttaccagcacctggtacgaaataactcggtattctggctggcatctggctactcgctggacttcggcctgacggggggcgtggtgaaaaccggtaccttcaaccagttcatccgtggtggtattgcgtttgccaccccgccgggcacgccactggcgccaaaagcgcagtcagggaaacacttcctgctgctcgaaagcgaaccgaaagagtggcgtgaatggggaacggccctgccgcgttaa

SEQ ID NO: 164976 - DNA, 1284 bp, Enterobacter cloacae
atggccttaaaaacaaccaaaattacgccgacaaaaaagataacggtccatacggtaagagacgctttgcctcgtgcacattatcagcgttgcccccagtgcgatacgctttttatgttgccgaagatgaaatcgcaccaaagtgccttttgcccccgatgtgacgcgaaaattcgtgacggccgagactggtcgttaacccgtctggccgccatggccgtcaccatgctgctgctgatgcccttcgcctggaccgagcccctgctgaagctctacctgcttggcgtacgcattgatgccaacgtgctgcaggggatctggcagatgacccgtcagggcgatccgattaccgctgccatggtgctgttttgcgccgttggcgcgccactggtgctggttgcagccattgcctatctgtggtttggcaacatcctggggatgaatcttcgcccggtgctgctgatgctggataaactcaaagagtgggtgatgctggatatctatctggtcggtgtgggcgtggcatcaattaaagtgcaggattatgcttttctgcagccgggcgtcgggctttttgcctttatctgcctggtgctgctcagcatcctgacgctgatccacctgaacgttgagcaactctgggagcgtttttaccctcagcgccctgccacccgtccggatgagaatctccgcgtctgtctgggatgccattacaccgggttgcccgatccccgtgggcgctgtccgcgctgccacatacccttgctgcatcgacgcaataacagtctgcaaaaatgctgggcggcgctgattgcctccctggtgttcttgatccccgccaatatgctgccgatttccatcatttacgtgaatggtgcccgtcaggaggatacaatcctctccggcattatctccctggcacacagcaacgttggggtggcggccatcgtctttatcgccagtatcctggttccttttaccaaagtcgtggtgatgttcaccctgctcatcagcattcactttaagtgtgaacaaggattacgaacccgaatactgcttctgcgatttgtcacctggattggccgctggtccatgttggatctgtttgtgatttcgctgatgatgtcgctaataaatcgcgaccagttacttgcttttactatgggacccgcagctttttatttcggctctgcggtgatattgactattcttgctgtggaatggctggatagccgcttactttgggatgcacatgagtcaggaaacccccgcttcgccgactga

SEQ ID NO: 164977 - DNA, 498 bp, Enterobacter cloacae
atgaacaaaacagaattctacgcggatctgaaccgcgattttaaggcattgatggcgggtgagaccagcttcttagccactctggcaaatactagcgcattgttgttcgaacgtctctctgacgtgaactgggctggcttttacctcctggaaggtgacacgctggtacttggcccgttccagggcaaactggcttgcgtgcgtattccggtcgggcgcggtgtatgcggtactgcggtggccgagaatcaggtacagcgtgtggaagatgttcatgtgtttgacgggcatatcgcctgtgatgccgccagtaattctgagatcgtactgccgctggtggtaagaaatcagattattggcgttttggatatcgacagcaccgtcttcagtcgcttcacaaccgaggacgagcaagggctgcgcgagctggtggcgaatctggaaaacgtccttgccggcaccgattatcaaaaattctttgcgagcgtcgcaggataa

SEQ ID NO: 164978 - DNA, 687 bp, Enterobacter cloacae
atggaaaatcaacctaagttgaatagcagtaaagaagttatcgcatttctggccgagcgtttcccgcagtgcttcagcgcggaaggtgaagctcgtcccctgaaagtcggtatttttcaggatctggtagcgcgcgttgagggggaaatgaacctcagcaaaactcagttgcgatctgccttacgtctttatacttcgagctggcgttacctgtacggtatcaaaccgggcgcgactcgcgtggatctcgacggcaacccttgtggtgagctggacgagcagcacgttgaacacgcacgcaagcagcttgaagaagccaaagcacgcgttcaggcacaacgtgcagaacagcaagcgaaaaaacgcgaagccgcagcggcaaacggccaggaagaagcgcctcgtcgtgagcgtaaaccgcgccctgcgccgcgtcgtcacgataataacgatcgcaaaccgcgtgcagacaaaccagcagccaaagctccacgtgcgcctcgtgaagagccgcgccataccccggtttctgacatcaacgcgctgagcgtgggtcaggcgctgaaggtcaaagcgggcaacaatgctatggacgccaccgtactggaaatcaccaaagatggcgttcgtgtacagctgacttctggtatgtcaatgattgtacgcgcagaacacttgttgttctga

SEQ ID NO: 164979 - DNA, 2049 bp, Enterobacter cloacae
atgaacactttttttaagctcaccgcgctggcgggtctgtttgctataacaggccatgctttcgcagtggacgatatcacgcgtgttgatcaaattccggtactcaaggaagagacgcagcacgcgacggtgagcgagcgcgtgacgtctcgttttacccgctcgcactatcgtcagttcgatctcgatcaggccttttcggccaaaatctttgaccgctatctgaacttgctggattacagccataacgttttgctcgccagtgatgtcgagcagttcgctaagcgcaaatccgaggtgggtgatgagttgcggtcaggcaagctggatcttttctacgacctctacaacctgtcgcaaaagcgccgctttgaacgctatcagtacgccctgaaagtgctcgaacgtccgatggacttcaccggcaacgacaattttaatcttgatcgcagcaaagcgccgtggccaaaagatgaagccgagttgaatgcgctgtgggacggaaaggtcaaatacgacgaactgagtctcaagctgaccggcaaagatgaaaaagagatccgtgacacgctgacgcgtcgttacaaatttgccattcgtcgtctggcgcagaccaacagtgaggatgtcttctctctggcgatgacggcctttgcgcacgaaatcgatccgcacaccaactatctctccccgcgcaacaccgaacagttcaataccgaaatgagcctgtctctggaaggtatcggtgcggtactgcagatggacgatgattacaccgtgatcaattccatggtggcgggtggcccggcctccaaaagcaaagcgatcagcgtaggtgaccgcattgtcggggtcggacaaaccggtaaaggcatggtcgatgtcattggctggcgtcttgacgacgtggttgcgctgattaaaggtccgaaaggcagcaaagttcgtctggaaattctgcctgcgggtaaaggcactaaaacccgtatcgttaccctgacccgtgagcgtatccgtctggaagaccgcgcggtgaaaatgtcggtgaaaaccgtgggtaaagagaaggtgggtgtcctggatatccctggcttctacgtagggctgaccgacgatgtgaaggttcagctgcagaaacttgagaaacagaacgtcagcagcgtcatcattgacctgcgcagcaacggcggtggtgcgctgacagaagcggtatcgctctctggcctcttcatcccgtctggccctgtggttcaggtgcgtgataacaacggtaaagtccgtgaagatgccgacaacgacggtgtggtctactacaaaggcccgctggtcgtgctggtcgaccgcttcagtgcgtctgcgtctgagatctttgccgcggcaatgcaggactacggccgtgcgctgatcgtgggtgagccaacctttggtaaaggcaccgttcagcagtatcgatcgctgaaccgtatctacgatcagatgctgcgtccggaatggcctgcgctgggttcagtgcagtacaccattcagaagttctaccgcgtcaacggcggcagtacgcagcgtaaaggcgtcacgccggatatcatgatgccgacaggaacggaagagaccgaaactggcgagaagtttgaagataacgcgttaccgtgggacagcatcaatgctgcgacctatgtgaaagcgggtgatatgacgcaatttggccctgaactgctgaaagcgcataacgaccgcatcgcgaaagatccggaattccagtacatcatgaaggacattgcgcgtttcaatgccctgaaggataaacggaatattgtttctctgaactacgcccagcgtgagaaagagaacaacgaagacgatgccacgcgtctggcccgtatcaacgaccgcttcaagcgtgaaggtaagcctctgctcaagaaactggacgatctgccaaaagattaccaggagccggatccttacctggacgagacggtgcatatcgccctcgacctggcgaatctggaaaaagataagcctgccgagcaacccgctccggcgaaataa

SEQ ID NO: 164980 - DNA, 882 bp, Enterobacter cloacae
atgatgcgaatcgcgctcttcctgctcaccaacctggcggtgatggtggttttcgggctcgtgctaagcctgacaggaattcagtcgagtagcgttcagggtctgttgattatggcgctgctgtttggttttggtggctcgttcatttccctgctgatgtcaaagtggatggcgctgaaatccgtcggcggtgaggtgattgagcagccgcgtaacgatatggaacagtggctgatgaatacggtggctcagcaatcccgtcaggccgggatcgccatgccgcaggtggccatttaccatgcgcccgatattaacgcgtttgccacgggtgcccgtcgtgatgcatcgctggttgctgtcagcaccgggttgctgcaaaacatgagccgtgacgaagccgaagcggtcatcgctcacgaaatcagccatattgccaacggcgacatggtgaccatgacgctgattcagggcgtggtgaacaccttcgttatctttatctcccgtatcctggcgcagattgcggcgggctttatgggcggcaaccgtgatgaaggtgaagagagcaacggtaacccgctgatctacttcgccgtgtcgatggtgctggaactggtgttcggtattctggcgagtattatcaccatgtggttctcgcgccaccgtgaattccacgcggatgccggctctgcgaaactggtgggacgcgagaagatgattgctgccctgcagcgcctgaaaaccagctacgagccgcaggaagcgaacagcatgatggccttctgcatcaacggtaaatcaaagtcgctcagtgagctgtttatgtctcacccgccgctggataaacgtattgaagcgctgcgcagtggggaatacctgaagtaa

SEQ ID NO: 164981 - DNA, 1374 bp, Enterobacter cloacae
atggaaaagaacctttccgatggtctgcctttgcccctgcggtatggcgccattgctacgattattattgggatctcaatggccgtcctcgatggcgcgattgcgaacgttgccctgcccactatcgccagcgacctgcaggcctccccggccagctcgatatggattgttaacgcctatcagattgcgattgtggtttccctgctctccttctctttcctcggcgacatgttcggccaccgtcgggtctatcagtgcggcctggtggtgttcacctttacctcgctgttatgcgccctgtctgactcattgcacacgctgacgctggcgcgcatagcgcagggctttggcggtgcggcgctgatgagtgtaaatacggcattgatccgcttgatctatccgcaacgccaccttggacgcgggatggggataaactcgtttattgtcgcggtttcctccgccgccggaccaacaattgccgcagccatactctctgtcgcctcatggcaatggctctttgccataaacgtgccgctgggtatcgtggctatcttctttgccctgcgttttcttcctgctaacggccccaaaagtaccatgccgcgttttgacgtccccagcgcagtgatgaatgcactgacctttggtctgctgattactgccctgagcggctttgctcagggacaatccatggcgcttaccggcatcgagcttatcgccctgctggtaacaggcttcttctttgttcgccgtcagctcgccctgcccgttcctttgctgccggtagatctgctgcgtatccccctcttttcgctctccatctgtacgtccatttgctcgttctgcgctcagatgctggcgctggtttctctgcccttctttctgcagagtgtggtaggacgttcggaggtggagaccgggctgctgctaacgccctggccactggcgacgatggtgatggcaccgctggcgggttacttaattgaacgtattcatgccggtttgttgggtgcggtgggactggccgtcatggcaaccggccttttcgcgctggcactgttaccgtcatcacccagcgatctggacatcgtctggcgcatgatcctctgtggtgcggggttcggcctgtttcagtcccccaataatcacaccatcatcacctctgcgccccgtcaccgcagtggcggcgccagcgggatgttgggaactgcgcgccttctggggcaaagcagcggcgcggcgctggttgccctgatgtttaaccttgccgggcaaaacggtaaccacgttgcgctgctcaccgccggcgcgcttgccaccctcgcggccatcgtcagcggtctgcgcgttacccagcccagggttcaggcataa

SEQ ID NO: 164982 - DNA, 792 bp, Enterobacter cloacae
atggcaattgcggatttggataaacagccagattctgtttcttccgtgctgaaggtgtttggcatcttacaggcgctcggagaagagcgtgaaattggtattacagagttgtcgcagcgtgtgatgatgtcgaaaagcaccgtttaccgctttttgcaaaccatgaaatcactgggttatgtagcgcaggaaggagagtctgaaaaatactctctgacgctaaagctgttcgaactgggtgcccgggcgctgcaaaacgttgatttgatccgcagcgcggacattcagatgcgtgagatctcccgtctgaccaaagagaccatccacctgggtgcactggatgaagacagcattgtttacatccataaaatcgactccatgtacaacctgcgtatgtattcgcgcattggccgccgcaacccgctttatagcacggcaattggcaaggttctgctggcgtggcgcgatcgcgaagaggtgaagcagatccttgatggtgtggaatataaacgcagtacggaacgaaccattaccaatactgatgaactgttaacggtactcgacaaggtgcgtgaacaaggatacggcgaagataacgaagagcaggaagaagggctgcgctgcatcggcgttccggtgtttgaccgttttggcgtggtgatcgcgggtttaagtatctctttcccaaccctgcgcttctcagaagagcgtctgcacgagtatgtggctattctgcacacagccgcgcgtaagatttccgagcagatgggctatcacgactatcccttttaa

SEQ ID NO: 164983 - DNA, 240 bp, Enterobacter cloacae
atgcgcgtaattattcgaacgattatagtactggcgatactctggattggacttttgttaaccggctacggtgtgcttgtgggaagcaccgaaaatgcagcaggcttaggtattcagtgtaagtacgtaacagcacaaggcgtaagcacggcgcagtatctccattctgatagtggcatcattggtttaaccaactgcccggtactgagaaagatgtccgtcgtggttgataatggctaa

SEQ ID NO: 164984 - DNA, 144 bp, Enterobacter cloacae
gtgaaaaaaatacgctgggtgattctgattgtcgtactgatagcgtgcgtggtgttatggacgcagacgatcaatgtgatgtgcgatcaggatgtacagttttttagcggcgtttgcgcaatcaataagtttatcccgtggtag

SEQ ID NO: 164985 - DNA, 291 bp, Enterobacter cloacae
atgggtgagttactgaactcagggttgctgaatgtagcatccctgatgatctctttggttgttctgctggtgggtctggtcatttggtttttcgtgaaccgtgccagttcccgtacaaacgaacagattgaactgctggaagcgctgctcgatcagcaaaagcgtcagaatgcgctgctgcgtcgtctgtgcgaggctaacgaaccggaagggaaagacgagtcaaaagaggctgtcgctgaaaacaaccaggatcaggacgattttatccgtctggtggctgagcgctga

SEQ ID NO: 164986 - DNA, 210 bp, Enterobacter cloacae; identical to SEQ ID NO: 164246

SEQ ID NO: 164987 - DNA, 1701 bp, Enterobacter cloacae
atgagcgctggcaatttcacaccagcgcgttttgcgctgctctgttttgctattttctgcagtctggcttttttactgggtcgtgttgcctggctacaaatcatcaaacctgacaacctggtgaagcaggaagatatgcgatcgctgcgtcagctgacgattgatgctccacgagggatgatcacggatcgtgaaggccgacctctggcggtcagcgtgcccgtcagagccgtatgggccgaccctaaaacggtactcgcaaaagggggcgttggttttgacgatcgctggcaggcgctggcgagcgcgcttcatctctccctgaataccctctcttcgcgcattaacgccaatcccaggggccggttcatttacctggctcgtcaggttgatcctgcgcaggccaaatggattgataaactgaatttgccgggaattaacctgcgtgatgaatcgcgccgtttttacccggcaggccacgtggcggccaatctgattggcttcaccaatattgacgggcagggcattgaaggggtggaaaaaagctttaatactcagctgacgggtaaagcgggtgtccgacaggtaagggaggatcgctacggccgggtggttgaaaacctgacggaagttgcgcccacgccagcgcataacattcagctcagcatcgacgagcggctacagaccattaccgaagacgcgctggataatgccgtggcctggaataaggccgaatcaggggcatcggtattgatcaatatcccaaccggcgaaatactcgccatggcgagttacccggacttcaaccccaataaccgggaaggcgcgacaattaacgattttcgtaaccgggctattagcgatacgttcgaacccggttcgaccgttaaaccgctggtgctgatgacggcgctgcagcaggggctggtccagccggacagcgtgattgacacccatccttatacacttgatggacaccgtattcgcgacgtgggctactacccggagctgacgatgaccgggatcctgcagaaatcgagcgataccggagtctcccggctctcgctggcgatgcccatacagcaccttcttgatacctaccggaactttggttttggcacgaacacgggtcttggcttaacgggggagagcgcgggcctgttgccacagcgtaagtactggagccagctcgaccgcgcgacctttgccttcggctatggcctgatggtgacgccgctccagcttgcccacgtctatgcgacgattggcggatttggactggagcgtcccctgtcgatcacccgcatcgatccccccgttatcgggcaccgcgttatgccggaggagatcgcgcatgaggtggagcatatgatggagagcgttgcgctacccggtggcggtggcgttaaggccgcggtgcgtgattaccgcgtggcggtaaaaaccggtacggcgaagaagattgatgacagcggcaaatatgtcgataaatatgtcgcctataccgcgggcgtcgcacctgcgagcgatccgcgttttgcgctggtcgtggtgattaacgagcctcaaaacggggcgtactacggtggggcggtttcagcgccggttttcagcgaaatcatgggcaacgtgctgcgcctggagaatataaaacctgatggcctcccggccggttctgaccaccttatcgtcatgcggtaa

SEQ ID NO: 164988 - DNA, 816 bp, Enterobacter cloacae
atgtccttcagttgccccctttgtcatgcgtcgctgatgcgctcagataaaagttatcgttgtccgcagggacatcagtttgatatggcgaaagaaggatatgtgaatcttctgccggtgcagcataagcgctcccgcgatccgggcgatagtgcggagatgatgcaggcacgccgtgcatttctcgatgccggacactatctgccgctgcgggagacagttgcgcagatgctggatgatatgttgcctgattcggcgtccgccatgctggatatcggttgtggagaaggatactacaccgcgcggtttgcggaagtggcgcgtgagaagggggccgtaacattcggtctcgacgtgtcgaaagtggccattcgcgcggcggctaaacgctacgctggcgtgacgtactgcgtggcttcaagccaccggttgccgttcgaagatgccagtaaggacgctatcatccgcatctatgctccctgtaaagcgcaagagcttgcacgggtggtgaaacccggcggatgggtcatcaccgtcacacccggcccgcgtcatctgatggagctgaaagggctgatctacgacgaagtgcgtctgcatgccccccattctgaacagctggcaggttttacgctgaagcaggagcagtcagtggcgtatcacatggatctggaggggcaggaggcggtagcactattgcagatgacgccgttcgcgtggcgggcaaaaccggaagtttgggcggcgctagcggcccggacgacatttagctgccagacagatttcagtatccatgtctggcagcgcgacgcttaa

SEQ ID NO: 164989 - DNA, 720 bp, Enterobacter cloacae
gtgtcaacatactcgttgaaaaacgtggcacgtacggatcgctttcagcacgcttacggtgcaaaagagatcaggcgagaccatagatacatcaactgctgtttactgggggcagtgatgtgtcatatggatatccccggtctggacgctgttatgaatatctccgctacgatccttctcgcttttggcatgtccatggacgcttttgctgcctccattggcaagggtgccacgctccacaaacctaaattctcagaagcactgcgtaccgggctgatttttggcgccatcgaaacgctgacaccgctcatcggttggggtctgggtatgctcgccagccagttcgtgctcgagtggaatcactggatcgcgttcgttctgctggtgtttctcggtggccgaatggtcatcgagggttttcgcggcggggatgatgaagatgcggaaccgcaataccgccatggattctggctgctggtgacaaccgctatcgccacaagccttgacgccatggccgtcggggtgggtctggctttcctgcaggttaacattatcgccactgcgctggccattggctgtgcaacactgattatgtccacgctgggcataatggtcggacgctttatcggcccgctactgggtaaacgcgccgagatcttaggcggtatcgttttgatcggcattggtgcccagatcctctgggcacacttcgcgggttaa

SEQ ID NO: 164990 - DNA, 459 bp, Enterobacter cloacae
atgactgtcacggacatcgtactggttttatttattgtcgcccttctggcttacgctatctatgacgagttcattatgcctcgccgccacggcgagacgctactgacccttcccctcttacgccgcggacgcattgatgcgtttatcttcgcgggtctggtggtcattctgatctacaataacgtcaccagccacggtgcaatattaaccacatggttattatgtgcgctggcattaatggcgatataccttttctggatccgttcgccaaaactcatttttaaaaaatacggattcttcttcgccaacgtatggatagaatataaccgcattaaagagatgaatttatccgaagacggtgtgttagtgatgcaattagaacaacgccgcctgctcatccgggtcaagaatattgatgaccttgagaaaatctacacattactccttaaaactcaataa

SEQ ID NO: 164991 - DNA, 852 bp, Enterobacter cloacae
atggttgatatgacaaaaactaccaccgagaaaaaactcactccgggtgatattcgtggcgtgttcatccgttctaacctgtttcagggttcatggaacttcgaacgtatgcaggcgctgggcttctgcttctccatggtaccggcgatcaagcgcctgtacccggaaaataacgaagcacgacgtcaggcgattaagcgtcacctggaattcttcaacacccatccatatgtagccgcgccggttctgggcgtaacgctggcgatggaagagcagcgtgccaacggcgcagagattgacgatggtgcgatcaacggtatcaaagtcggtctgatgggtcctctggccggtgtaggtgaccctatcttctggggtacggttcgtccggtctttgccgcgctgggggcgggtatcgccatgagcggcagcctgctcggtcctctgctgttctttatcctgttcaacgcggtgcgactgctgacacgttactacggcgtggcctacggctaccgcaagggcgtggatattgttaaggatatgggcggcggcttcctgcagaaactgaccgagggggcgtcaattctcggcctgtttgtgatgggggcactggtgaacaagtggacgcacgtgaacatcccgctggtggtatcgaccatcaccggccaggatggtcagacccgcgtcaccaccgtgcagactatcctggatcagctgatgccgggcctggtaccgctgctgttgaccttcgcctgtatgtggctgctgcgtaagaaggtgaacccgctgtggatcatcgttggcttcttcgtcatcggtatcgcgggctacgctgtcggcctgctgggtctgtaa

SEQ ID NO: 164992 - DNA, 801 bp, Enterobacter cloacae
atggagattaccactcttcagattgtgctggtgttcgtcgtcgcatgtattgcgggtatggaatccgtacttgatgaatttcagttccaccgtcctctggtggcctgtacgttgattggtgccgtactgggtgatatgaaaaccggtatcatcatcgggggtacgctggaaatgatcgccctcggctggatgaacatcggtgctgccgttgcgccagatgccgcgctggcctccatcatttcgaccgttctggttattgccggtcatcagagtatcggtgcaggtatcgctctggccattcctctggccgcagcaggccaggttctgaccattatcgtacgtaccatcaccgttgctttccagcacgcggcggataaggcggccgaaaacggcaaccttacagcactctcctggatccacgtttcatccctgttcctgcaggcgatgcgtatcgccattccggcggttatcgttgcgatctcagtcggtaccagtgaagtccagagcatgctgaacgccattccagaagtggtcaccggtggtctgaacatcgcgggcggtatgatcgtggtcgttggttatgcgatggtcattaacatgatgcgcgcaggctacctgatgccgttcttctacctcggcttcgtcaccgcagcattcaccaacttcaacctggttgcactgggtgtcattggtgccgtaatggcgattctctacatccagctcagcccgaaatataaccgcgttgcgggtgccccagcgcaggctgctggtaacaacgatctcgataacgaactggactaa

SEQ ID NO: 164993 - DNA, 966 bp, Enterobacter cloacae
gtgaccattgctattgtcataggcacacatggttgggctgctgagcagctactcaaaacggcagagatgctgttgggcgagcaggaaaacgtcggctggatcgatttcgttcccggtgaaaacgccgagacgctgattgaaaagtacaacgctcaactctcgaagctggataccagcaaaggcgtgctgtttctcgttgatacatggggcggcagcccgttcaatgctgccagccgtattgtcgtcgataaagagcattatgaagtcgtcgccggcgttaacattcccatgctggtggaaacctttatggcgcgcgacgacaacccgacttttgatgagcttgtcgccctggcggttgaaacgggccgtgagggcgtgaaagccctgaaagcacagccggttgagaaacccgctcccgcggcagcagcagcaccgaaagtggctacaccggcaaaacccatgggcccgaatgattatatggtcatcggccttgcacgtattgatgaccgattaatccacggccaggtggcaacgcgctggactaaagagaccaacgttcgccgcattatcgtcgtcagcgacgaagttgccgccgacaccgtacgtaaaacccttctgactcaggttgctcctcctggcgtcaccgcgcacgtggtggatgtcgccaagatgatccgcgtttacaacaacccgaaatacgcgggtgagcgcgtaatgctgctgtttactaacccgacagacgttgagcgcattgttgaaggcggcgtgaaaatcacctccgtgaacattgggggtatggcgttccgtcagggcaaaacgcaggtcaacaacgccatttcagtcgatgcgaaagatatcgaggcattcaacaagctgaatgcgcgcggtattgagctggaagcccgtaaagtttccactgaccagaaactgaaaatgatggatttgatcggtaaagttgggaaataa

SEQ ID NO: 164994 - DNA, 1560 bp, Enterobacter cloacae
atggaattcttaatggacccgtcaatctgggtgggattgctcacgctggtggtgctggagatcgttctcggcatcgataacctggtgtttatcgccatccttgcggataagctgccgccaaaacagcgtgataaagcgcgtctgattggcctctcgctggcgctggtcatgcgactgggactgctttccgtcatttcctggatggtcacgctgacaaaaccgctgttctccgtcatggattacaccttctccgggcgtgatttaatcatgctgatcggggggatattcctgctctttaaagcgaccacggaactccacgagcggctggaaaaccgtcagcacgacgatggacacggtaagggctacgccagtttctgggtggtggtgctgcagatcgtcgtgctggatgcggtcttctcgctggatgcggtaatcacggcggtcggcatggtgaaccatctccctgtgatgatggcggctgtggtcattgctatggcggtaatgctgctggcgtcgaaaccgctgacgcgtttcgtcaaccaacatccgacggtggttgtgctctgtctgagcttcctgctgatgattggtctgagcctggtagcggaaggttttggcttccatattccgaaaggttatctgtacgccgcaattggcttctcgatcctgattgaactgttcaaccagattgcgcgccggaactttattaagcagcagtcgaatcagccgctgcgtgcccgtaccgcggatgccattctgcgtctgatgggcggtcgtcgccaggtgaacgttcagtctgatactgaaaaccgtaatccggtgccggttccggaaggggcgtttgtagaagaagagcgctacatgatcaacggcgtgctctcccttgcttcccgttcgctgcgcggaatcatgaccccgcgcggggaaatcagctgggtcgatgcgaacctgagcgtggatgaaattcgtcagcagttgctctcttcaccgcacagcctgttcccggtgtgtcgcggtgagctggatgagatcatcggcgtcgtgcgcgcgaaagagatgctggtggccctggaagagggcgtcaacgtagaagccattgcggctgcatcgcctgcgattgttgtgccggaaacgctggatccgatcaacctgctgggcgtgttgcgacgcgcacgcggcagcttcgttatcgtcaccaacgagttcggtgtggtgcaggggctggtcacgccgctggacgtgctggaagcgattgccggtgagttccctgatgccgacgaaacgcctgagatcgtcgccgacggcgaaggctggctggttaaaggcacgaccgacctgcacgcgctctcgcacacgctcggggtggaaaacgtggtcaacgatgaagaagacatcgcgaccgttgccggtctggttatcgccgtgaacgggcaaatcccgcgtatcggggatgtgattgagttgccgccgctgcacattaccattgttgaagccaacgactatcgcgttgatatggtccgtattgttaaagaacaatctgtccacgatgaagaagaatag

SEQ ID NO: 164995 - DNA, 1599 bp, Enterobacter cloacae
atgcaaactgcacaaacgatcattaaacattaccgccgaaaacgcgttatcgtctgtgtgacggttgcgatccttacgctcattctgaccctgggcgctcgctttatttctcagcgcaacgttaaccagcagcgggtactcgacttcagcagccataccgttcgctctctggataatcttctcctttcgctggaaaaacgccgcagcgtgttccagcagctggtgggtcaaccctgccctcaggcacatttggccctgcgaaaacaggcggccattttacaaacggtacgctccattgccctgattaaagacggtatcctgtattgctccagtgttttcggcagccgtaatattcccatccgcgactttctcccggaattacccgccagcacgccgaagctgattttatcgaccgatcggtggctgatgaagggcagtccgatcttgatccagtggaacccggtgtcccaggacggggaagatggcgtcattgagatcattaatattgatttgatcaccagaatgatactggagcccgagcgtccacttattgatgatgtggcgttatccgtgggcgatcgttttttgcgctatggtcaacgggtcaccgatagcctgactttcggaaaggctggcgcgcttgttcagctgtcatccacccacaaccccttctccatcatcgtcagcgggccaggtccaggagagctggccctgaagacgctgcccgcgcagcttccgttgggtcttatgctgagcctgctgctgggctatctcgcctggctggcgacggcgaacaggatgagtttcacgtgggagattgatatgggcattgcggcccgggaattcgagcttttctgccagccgctggtgaatgcccgaactcaggcgtgcgtcggcgttgaaattctgctgcgctggaataacccgcgacaggggtggatctccccggaagtgtttattcctctggcggaagaacataatctgattgtccctctgacacgctatgtcctcgccgaaaccgtacgtcagataggctactttccttccagcgccggttttcacatcggcattaacgtcgctgccagccatttccgtcacgcggtgttgttacaggacctgaaccgcctctggttcagcgctaacccgcgtcagcagctggtgattgaattaacggaacgggatgccctgccggatgcggaatatcgtattgtgcgcgaactgcatcgcaaaggggtgaagcttgccatcgacgattttggtaccggaaacagctccctctcctggcttgaaaagctgcacccggacgtactaaaaatcgaccagtcgtttatcaccgccattggcaccgacgccgtgaattcaacggtgacggatatcatcattgcactgggtcagcgactcaatatcgaactggtggctgaaggggtcgaaacagaggagcaggcgcgatatctgcgccgccatggtgtatcggtcctgcagggattttactatgcgcggccgatgccgctgagagactttccacaatggctggcgggaagtgctcccccgccagcacagcataacggacacattgtgcccttaatgcccctgcgttaa

SEQ ID NO: 164996 - DNA, 1365 bp, Enterobacter cloacae
gtgattagtatattcgacatgtttaaagtgggaattggcccttcgtcttcccatactgttgggcctatgaaggccggtaaacagttcgtcgatgatctggtcgaaaaaggattactggaaagcgttacccgtgtcgccgtagacgtttacggatcactgtcattaacgggtaaaggccaccacaccgatatcgccattattatgggtctggcaggcaatatgccggacactgttgatattgatgccatcccggcatttatccgcgacgtggaaacgcgcggacgcctgctgctggctaacggccagcatgaagtggatttcccgcaggatgacggcatgcgttttcgcagcgacaacctgccgctgcatgaaaacggcatgaccattcatgcctggagcggtgaaaaagagatttacagcaaaacgtactactccatcggcggtggcttcatcgtcgatgaagagcattttggcaaagacagcgttggcgacgtcagcgtcccgtatccgtttaagtcggctaccgagatgttggggtactgcaaagagaccggtctttccctgtccggtatggtgatgcagaacgaactggcgctgcacagcaaaaaagagattgaagactattttgctaacgtgtggcaaaccatgcgcgcctgtattgaccgcgggatgaacaccgaaggcgtattgcctgggccactgcgcgtgccgcgtcgtgcctctgccctgcgccgtatgctggtgaccacggataaattctcgaatgacccgatgaacgtggtcgactgggtaaacatgtttgccctggcggttaacgaagagaacgccgccggtggccgtgtcgtgacggcgccaaccaacggtgcctgcggcatcgttccagcggtactggcctactacgatcactttattgagcctgtcacgcccgatatctatatccgctatttcctcgcggcaggggccatcggcgcgctgtacaagatgaacgcgtccatatccggtgcggaagtgggctgtcagggtgaagtgggcgttgcctgctcgatggctgccgccggtctggctgaactgttgggtgcaagccctgagcaggtttgcgtggcggcagagattggtatggagcataacctcggtctgacctgtgaccctgtcgcgggccaggtacaggtaccgtgcattgagcgtaacgcgattgcctctgtcaaagcgatcaacgcctcacgcatggcgatgcgccgtaccagcgaaccgcgcgtgtcgctggataaggtcatcgaaaccatgtacgaaaccggcaaagacatgaacgcgaagtaccgtgagacgtcgcgtggtggtctggctattaaggtgcagtgcgactaa

SEQ ID NO: 164997 - DNA, 579 bp, Enterobacter cloacae
gtggagaaagagaacctgacgctggatgattttctgtcgcgctttcagcttttgcgaccgcaggtcaaccgcgccacgctgaatcaacgtcaggcggcggtgctgatcccggtggtgcgccgggagcagccggggctgttgctgacgcagcgctcgccgcatatgcgtaaacacgccggtcaggttgcttttcccggaggcgcggtggacagcaccgatgcgtcgctgatcgccgccgcgctgcgggaagctcaggaagaagtggccatcccgcctgaggcggtcgaggtgataggcgtgctgccgccggtcgacagcgtgaccggttttcaggtcacgcccgtggtgggtattatcccgccgggcctgcagtatcacgccagcgtcgatgaagtgtcagccgtgtttgagatgccgcttgaagaggcgctccggctcagccgttatcatccgctggatattcagcgtcgagggcatgatcatcgggtctggttgtcctggtatcagcattattttgtctggggcatgacggcggggatcattcgtgaactggcgctgcaaatcggcctgaaaccttga

SEQ ID NO: 164998 - DNA, 1338 bp, Enterobacter cloacae
atgccacacatgaacatgcgcttccccactgtattgacgttgccctggcgtgctgacgccgcggagttctggtttgcccgcataagccaccttccctttgccatactgctgcattctggccatgcggatcacccctacagccgctttgatattctggttgccgacccgcttaaaacgctgacaaccgatgacctggcgccgacgcacgatcccctgatgcagcttcagcaagcgctcaacgcgttaggcttatccgccacaccagacccggatctcccttttcagggtggcgcgcttggtctgtttggctacgatttgggtcgccgtttcgaaacgctgcccgagcatgcgcaggctgatatttccctgccagacatggccgtggggctgtatgactgggcgttaattgtcgatcaccagaaaaaaacggtttctctgctgagccatagtgacgtgcaggcgcgactggcctggcttgaagcgcaacagcccgccccggcccagatgttcaggctgacctccggctggcgctcgaatatgagcgagacggaatacgatgaaaaattcgcgcgcgttcaggcgtatctgcaaagcggcgactgttatcaggtgaaccttgcccagcgtttccaggcgacttatcacggagatgagtggcaggcgttttcccgtcttaatgccagcaacaaggcgccgttcagcgcattcgtacgtctgcctcagggcgctatcctcagcctgtcgccagagcgctttattcatctggccgagggggtcattcaaacccgcccgattaaaggcacactaccgcgtctggcggaccccaacgccgatcgccagcaggcggagaaactcgccgcatcgccgaaagatcgcgccgagaacctgatgatcgtcgacctgatgcgtaacgatattggccgcgtcgccgaacccggcagcgtgcgcgtgccggagctgttcgtcgtcgagcctttcccggcggtacatcatctggtcagcaccattaccgcgcgcctgcccgccacgcgcaccgcctgcgatctgcttcgcgccgcgtttccgggcggctccatcaccggagcccccaaaattcgcgcgatggctatcatcgacgaactggaaccgcaccgccgcaacgcctggtgcggcagtatcggctatatcagcctgtgcggcaccatggataccagcatcaccattcgtaccctgacggcctgcgacggcaatctgtactgctctgcaggcggtggcattgtggcggatagccaggtcgaggcggaatatcaggaaacctttgataaagttaaccgtatcctgaaacaactggagaactaa

SEQ ID NO: 164999 - DNA, 195 bp, Enterobacter cloacae
atgtttgcaggtttaccttctctgagccatgaacagcagcagaaagcggttgagcgaattcaggaactgatgtcccagggaatgagcagcggacaggcgattaccgtcgtcgctcaggagattcgcgccagtcattccggcgagcggattgtggcgcgattcgaagatgatgatccagaagatcaagaggagtga

SEQ ID NO: 165000 - DNA, 345 bp, Enterobacter cloacae
atgacgattaagcgcattgatgccgaagcccgctggtctgatgtggtgatccacaatcagacgctctactacactggcgtaccggctaacctggacgcggatgccttcgagcaaacggccaacacgctggcgcaaattgatgccgtgctggaaaaacagggcagcgataaatcccgcattctggatgcgaccatttttctggccaataaagatgattttgcggcgatgaacaaagcctgggatgcatgggtggtggcgggtcacgcgcctgtacgctgcactgtacaggccacgctgatgaaaccggagtataaggtcgaaattaagattatcgcggcggtttaa

SEQ ID NO: 165001 - DNA, 1911 bp, Enterobacter cloacae
gtggcagacgatttttcccctgaaggtcagttagcacaagcgattcccggcttcaaaccgcgtgaacctcagcggcagatggcgcacgccgtagcgcacgctatcgacaaggcgcagccgctggtggtcgaggccggtaccggcacggggaaaacctacgcgtatctcgctccggcgctgcgggcgaaaaagaaggtcattatctccaccggttcaaaagcgctgcaggatcagctctacagccgtgatttgcccaccgtggcgaaagcgctgaaatacaagggccgactggcgctgctgaaaggccgttctaactacctttgcctggagcgccttgaacagcaggcgctggcgggcggcgatctgccggttcagaccctgagcgacgtgattatccttcgcgcctgggccaaccagacggaagagggggatatcagcacctgtgcgagcgtgccggaagactctcctgcctggccactggtgaccagcaccaacgacaactgcctcggcagcgactgtccgctgtataaagactgctttgtggtgaaagcgcgtaaaacggcgatggatgccgatgtggtggtggtcaaccaccatctgttcctcgcagatatggtggttaaggacagcggcttcggtgagctgatccctgaagcggatgtcatgatcttcgatgaagcccaccagcttccggatatcgccagccagtattttggccagtcgctctccagccgccagctgcaggacctggcaaaagatttcaccatcgcctaccggaccgaactcaaagatacccagcagttgcagaagtgtgccgaccgcctggcgcaaagcgcgcaggatttccgtttacagcttggtgaacccggctatcgcggtaacctgcgcgagctgctggcggacaaaaacatccagcgcgcgctgctgctgctcgacgatgcccttgaactctgttatgacgtcgcgaagctgtcgcttggtcgctccgcactgctggatgccgccttcgaacgcgccacgttgtaccgcggacggctgaaacggctgaaagaaatcaaccagccagggtacagctactggtatgaatgcacctcgcgccacttcaccctggcgcttacgccgctgaccgtggccgataaatttaaagaggtgatggcgcagaaaccgggaagctggatctttacctcggcaaccctgtcggtgaatgacgatctgcaccactttaccgagcgcctcggcattgagcaggcggagtcgctgctgctgccaagcccgtttgattatgaaaagcaggcgctgctctgcgtcccgcgcaatttaccgctgccaaaccagccgggtgcggcgcgtcatctggcggcgatgctaaagcccatgattgaggccaacaacggccgctgctttatgctttgcacgtcgcacgccatgatgcgtgacctcgccgagcagttccgtgccaccatgaccctgccggtgctgttgcagggggaaaccagcaaaggacaactgctccagcagtttgtcagcgccggtaatgccctgctggtggcgaccagcagcttctgggaaggggtggatgtgcgtggcgatacgctctcgctggtcattatcgacaaactaccgtttacctccccggatgacccgctgttgaaagcgcggatggaagactgccgcctgcgcggaggcgatccgttcgacgaggttcagctgcctgaggcggtcatcacgctcaagcaaggggtagggcgcttaatccgcgacgtgaccgatcgcggcgtgctggttatctgcgataaccggctggtcatgcgcccttacggcgcaaccttccttgcgagcctccctccagcgccacggacgcgggatataaaacgcgcggtgcgttttctggcaaacccaacggcggagtaa

SEQ ID NO: 165002 - DNA, 696 bp, Enterobacter cloacae
atgcgaattctggctattgataccgcaacagaggcttgctctgttgctctgctgagtgatggtgctgtttctgctcatttcgaagagtgcccacgggaacacacccaacgtattctgcccctggtaaaagacattttaactcagggcaacaccgccttaaccgaccttgatgccctggcctttggccgcgggcccggcagctttacgggcgtccgtattggtattggcattgctcagggactggcgctgggcgctgacctgccgatgatcggcgtctctacgcttgcgacgatggcgcagggggcctggcgtatgacgggcgccacccgcgtgctggctgccattgatgcccgcatgggggaagtttactgggcggaatatacccgtgatgagaacggcgtctggcacggcgaagagacggaagcggtacttaaacctgacgcggtcactgaacgtcttaagcaactgtccggcgagtgggcgaccgtggggacgggctggccggcatggccagacatggcgaacgacactggcgtgacgctggtggacggcaacatgctgctgccagcggcggaagacatgcttccgattgccactcagctgctcgcagcaggaaaaaccgttgctgttgaacacgcggagccggtttatttgcgaaacaccgtcgcgtggaagaaacttccgggccgcgagtga

SEQ ID NO: 165003 - DNA, 582 bp, Enterobacter cloacae
atggcggttcagactaaagtagtacgcctttttatggcaggcgcggttgccatagcactgagcggatgcgtatccgtccctgatgcgatcaagggcagtagcccgacgccccagcaggatctggttcgggtgatgaatgcgcctgagctttacgtcggccaggaagcgcgcttcggcgggaaagtgatcgaggtgcagaaccagcaggggaaaacccggctggagattgctaccgtgccgctggacagcggtgcgcgacccgtactgggtgaggcctcccggggacgcatctatgcggatgtcagtggtttcctcgatcccgttgatttccgtgggcaactggtgaccgtcgtcggaccgataaccggcgccgtgcagggtaaaatcggtaacacgccttataaattcatgaccatgcaggtcaatgggtataaacgctggcgtctggcacagcaggtgatcatgccgcctcagccgattgacccgtggatgtggggtccgcatccttatcgttacggttacccgggttggggctggtataaccccggtcctgcgcaggtccagacgatcgtaactgagtaa

SEQ ID NO: 165004 - DNA, 1719 bp, Enterobacter cloacae
atgacgacgaacactcatttcagaggtgatgcattgaaaaaggtttggcttaaccgttatcccgcagatgttcctgccgagatcaatcctgaccgttatcaatccctggttgaattatttgaacactcggtaaggcgttacgcagaccagcccgcatttgtgaatatgggcgaggtaatgacgttccgtaagcttgaggagcgtagccgggcgtttgcggcctatctgcaggaagggcttgggctgcaaaaaggagaccgcgtcgcgctgatgatgccgaacctgctgcaatacccggtggcgctgttcggcatcctgcgtgccgggatgattgtcgtcaacgtcaacccgctttacaccccgcgcgagctggaacaccagctcaacgacagcggtgcggtggcgatagttattgtttctaactttgcccatacactggaaaaagtggtcgacaaaacccaggttaaacacgtcatcctgacgcgcatgggggatcagctgtccaccgccaaagggacgctggttaactttgtggttaaatacgtcaagcgcctggtgccaaaataccatctgccggatgccatctccttccgccgcgcgctgcatgcgggctatcgcatgcaatacgttaaaccggaagtggtctctgaggacctcgcttttctgcaatacaccggtggcacaaccggcgtggccaaaggggcgatgctaacccaccgcaacatgctggcaaaccttgaacaggtcaatgccacctacgggccgctgctgcatccgggcaaagaactggtgatcacggcgctaccgctgtatcacattttcgcgctgaccatgaactgcctgctgtttatcgagctgggcggtcaaaacgtcctgatcactaacccgcgagacattccggggctggtgaaagagctggcaaaataccccttcaccgccatgaccggggtaaataccttgttcaacgcgctgctcaacaataaagaatttcagcagctggatttctcaacgttgcacctctctgcgggaggcggtatgccggttcagcaggcggtcgccgagcgctgggtgaaactcaccgggcagtatttgctggaaggttatggcctgacggaatgcgcaccgctggtcagcgtcaacccgcatgacattgactaccacagcggaagcattggcctgccggttccctccacggaggccaaactggtcgatgacaacgataacgacgtcgcgccgggcgaaccgggcgagctatgcgtgaaagggccgcaggtgatgctgggctactggcaacgcccggatgcaacagacgaaatcattaaagacggctggctgcataccggcgatattgcggtgatggatgacgaaggcttcctgcgcatcgtcgatcgcaaaaaagatatgattctggtctccggtttcaacgtctatccgaacgaaatcgaagacgtggtcatgcagcacagcggcgtgctggaagttgcggcggtgggcgtgccttccggcagcagcggggaagcggtgaagatttttgtggtcaaaaaagatccttcactcaccgaggaagcgctgataacgttctgtcgtcgtcagctgacgggctataaagtgccgaagctggtggaattccgcgatgagctgccgaaatccaacgtcgggaagatattacgacgagaattacgtgacgaagcccgtgccaaagtagacaataaggcctga

SEQ ID NO: 165005 - DNA, 1155 bp, Enterobacter cloacae
atgggcgcaaacaaaagagaatccgatttgaattaccagatgatcacgaccaacgacgagctggcttcgctgtgcgaagtgacgcgcgactttcctgccatcgctctggataccgagtttgtccgtacccggacgtactatccgcagctgggtttgattcagatgtatgacggcaagcacgtctcgctgatcgacccgctaggcatcaccgactggacgccgatgcgtgacctgctgctggatacggcagtaacgaaatacctgcacgcaggcagtgaagatctggaagtttttctgaatacctttggcatcatgcctcagccgctgatcgatacgcagatccttgcggcttttagcggtcgtccgctctcctggggctttgccgccatggtggaggagtatacgggcctgacgctggacaaaagtgaatcccgtactgactggctggcgcgcccgcttaccgaacgtcagctggaatatgcggcggcagacgtgttttaccttctgccgattgccggacaactgatgaaagaggcggaggcctccggttggctctctgccgcgctggacgagtgtcgtatgacgcagctgcgtcgccaggaagtggttgatccgaaagacgcctggcgtgatatcagcaacgcctggcagctgcgtacgcgtcagctggcgtgcctgcagctgttagcggactggcgtttacgcaaagcgcgcgagcgcgatctggcggttaactttgtggtgcgcgaggaacatctctgggcagttgcgcgctatatgccgggtagcctgggggagctggacagcattgggctttcgggcagtgagatccgtttccacggtaaaaccctgctggcgttggtcgcaaaagcgcaggcgttgccggaagatgcgctgccggaaccgctgttgaatctgatggatatgccgggttaccgcaaagcgtttaaggatatcaaagcgctggtgcagaacgtcgccactgaaagtaagctgagtgctgagctgctggcatcgcgtcgtcagattaaccagctgctgaactggcactggaagctgaaaccgcagaatggcctgccggaactgatggcgggctggcgtggggaattgatggccgatcgtctaaataccctgctggaagggtatccgcggtaa

SEQ ID NO: 165006 - DNA, 270 bp, Enterobacter cloacae
atggcattactggatttttttctctcgcggaaaaagaacaccgccaacatcgcaaaagaacgtctgcaaatcatcgttgcggagcgtcgtcgtagcgacgccgagcctcattacctgccgcagctgcgtaaggacatcctggaagtgatctgtaagtacgtacagattgacccggagatggtcacggtgcagctggagcaaaaagacggggatatttcgattctggagctgaacgtgacgctaccggaagcggaagagtcgcgcccgtag

SEQ ID NO: 165007 - DNA, 813 bp, Enterobacter cloacae
atggcacgcattattgttgttacttcgggtaaaggaggcgttggcaagaccacctccagcgcggccatcgctactggtttggcccagaagggaaagaaaaccgtcgttatcgacttcgatatcggcctgcgtaacctcgacctgatcatggggtgtgagcgtcgcgtcgtgtatgacttcgtcaacgtcattcagggcgatgccacgctgaaccaggcgctgattaaagacaagcgcaccgagaacctctacatcctcccggcctctcagacgcgtgacaaagacgccctgacccgtgaaggtgtcgaaaaggtactcgaggaactgagaaaaatggagttcgacttcgttgtctgtgactcccctgccggcatcgaaaccggtgccctgatggcactctactttgctgatgaagcgatcatcaccaccaaccctgaagtctcatccgtgcgtgactccgaccgtattctcggcatcctcgcctccaaatcccgtcgtgcggaaaatggcgaagagccgatcaaagagcacctgctgctgacccgttataacccgggtcgcgtcaacaagggtgacatgctgagcatggaagacgtactggagatcctgcgcattaaactggtgggcgtcatcccggaagaccagtccgtgctgcgcgcctctaaccagggcgagcccgtgatccttgatacgacggcagatgcaggtaaagcgtatgctgatactgttgaccgtctgctgggagaagaacgtcctttccgcttcattgaagaagagaagaaaggtttcctcaaacgcctgttcggaggataa

SEQ ID NO: 165008 - DNA, 708 bp, Enterobacter cloacae
atgtcaaacacgcccatcgagcttaaaggcagtagcttcaccttatcagtggtacatttgcatgatgcaaaacccgaggttattcgtcaggcgttagaagacaaaatcgcgcaggctcccgcttttctgaaacacgcccctgttgttatcaacgtgagtggtcttgaggctccggttaactggaaacttctccagcaggccgtctcctctactggcctgcgaattgtcggcatcagtggctgtaaagatagcgagctgaaagcggaaatcgaccgtgccgggctgccccttcttaatgaaggtaaagaaaaagccccgcgtgcagcgcctgctgccgtgcaggcgccccctcctgtggtgcaaaacgttactcccgtcacaaaaacgcgaatgattgacgtaccggttcgttccggtcagcgcatttatgcaccaaactgtgatctgattgttacaagccacgtcagtgctggcgcagagcttattgcagatggcaatattcacgtttacggtatgatgcgtggacgtgcgctcgcaggcgcaagtggcgatcgggacgcgcaaatattttgtactcacctgacggcggaactggtgtccatcgcaggtgaatattggctgagcgacaagatcccagccgaattttatggcaaagcggctcgtctgcgactggcagacgacgcgttgaccgttcaaccgttgaattga

SEQ ID NO: 165009 - DNA, 276 bp, Enterobacter cloacae
atgttttgtgtgatctacagaagtacaagccgtgaccagacctatctttatgtcgaaaagaaagacgatttttcacgcgtgcctgaagaattaatgaagagctttggccgaccacagctggcgatgctgctgccgctggatggtcgtaagaaactggtcaatgccgatctggataaagtgaaaacggcattagccgagcaaggctattatttacagcttccaccaccgcctgagaatttattaaaacagcaccttgaggcgaacgggaaaaaatag

SEQ ID NO: 165010 - DNA, 660 bp, Enterobacter cloacae
atgtatcaacatcataactggcaaggtgcgttactggattatcccgtcagcaaagtggtctgcgtgggcagtaactacgcaaagcatattcaggagatgggcagcgcaacaccagaagagccggttctgtttattaagccagagacggcgctttgcgatatccgccagccgctggcgttgccgcaggggctggggtcggtgcatcacgaagttgagctcgcggtgctgatcggcgccacgctgcgccaggcctccgaagagcatgtccagaaagcgattgctggctacggcgtcgcgctggatctgacgctgcgtgatgtgcagggaaaaatgaagaaggccgggcagccgtgggaaaaagccaaaggctttgacaacgcgtgtccgatttcgggattcattccggtcagtgaatttaccgccgatccacaggatacgccgctcagcctgaaggtgaacggtgacatccgccagcagggcagcacggcagacatgatccataagattgtgccgctgatcgcctacatgagccgcttcttcaccctgaaaccaggcgatgtgatcctgaccggtacgcctgaaggggttggcccgctcctcagcggcgatgagctggaggtcggttttaacggcctgtcgctgaaaacccgcgtgctgtaa

SEQ ID NO: 165011 - DNA, 441 bp, Enterobacter cloacae
atgaacgacatccctttctggcaaagcaaaactcttgacgacatgactgacgcggaatgggaatcattgtgcgacggctgcgggcagtgctgcctgcacaagctgatggatgaagatacggacgaaatctacttcaccaacgtggcctgcaagcagttgaacattaaaacctgccagtgccgcaactatgagcgtcggttcgaatttgagccggactgcatcaagttaacccgtgataatctgcccacctttgaatggctgccccatacctgcgcgtatcgcctgctggcggaagggaaagggttaccagactggcatccgttgctgactggttcgaaagcggcgatgcacggcgagcgcatctcggtgcgccacatcgcggtgaaagagtccgaggtgcgggactgggaagaccatattatgaatcaccctaatcggtga

SEQ ID NO: 165012 - DNA, 531 bp, Enterobacter cloacae
atgttgagatttttaaaccagtgctctcgcggtcgcggagcgtggttgttgatggccctgaccgcctttgcgctggaaatggtcgcgctgtggttccagcacgtgatggggctgaaaccctgcgtgctctgtatctacgagcgctgcgccctgtttggcattatgggtgcgggcctggtaggcgccatcgccccgaaatcgccgttgcgctacgcgggtattgcaatctggctgtacagcgcctggaaaggaattgaactctcctggcagcacaccatgatgcagctgcatccgtcaccgtttatgacctgtgattttgccgcccgcttcccgagctggctgccgctggataaatggctgccgcaggtgtttgtcgcatccggtgactgctctgtccgtcagtgggaattcctgacgctggagatgccacagtggctggtggggatttttgtcgcctacttcatcgtggcgttgctggtgctgattgcccagccgttcaagccgaagaaacgtgatttgttcggaaggtaa

SEQ ID NO: 165013 - DNA, 1539 bp, Enterobacter cloacae
gtggaaatttcttttgggcgcgcgctgtggcgcaattttttaggtcagtctcctgactggtacaaactgatactgctggttttcctggtcgttaacccccttatttttagcgtgaacccgtttatcgccggatggctgctggtcgcggagtttatcttcaccctggcaatggctctaaaatgttaccctctgctacctggcggtctgctggcttttgaagcagtggtcatcgggatgacgtctgctgagcatgtcaaagcagagctggcgtcaaatctggaagtgctcctgctgctgatatttatggtggccgggatctactttatgaaacagctgctgctgtttatcttcactcgcctgttgctcagcattccgtctaaaacggtattgtcgctggcgttttgccttgctgctgcctttctttcggccttcctggatgccttgaccgttgttgcggtggtgatcagcgtcgccgtcgggttttacgggatttatcaccgcgtggcctcgtcccgcccgggcgaagacttgcaggatgacagccacgttgaggcgcataaccgtgaggtgctggagcagttccgcgcgtttctgcgcagtctgatgatgcatgctggcgtagggactgcattgggcggcgtgatgaccatggtgggtgagccgcaaaacctgatcatcgccaaagcggctgaatggcattttggcgagtttttcctgcgcatggcccccgtgagcgtgcctgtccttatctgcgggttagcaacctgcattctggtcgaaaagttcagggtattcggctacggcgcgcaactgcctgagccggtccgcagtgagctgcataaatttgacgagcagagccgcaaacagcgcacgcggcaagagacgctgcgtctgattgcgcagggtatcattggcgtctggcttatcgtcgcgctggcgttgcatcttgcagaggttgggttgattggcctctccgttattattcttgcgaccacctttagcggcgtaacggatgagcatgctattggcaaagcgtttacggaagccctgccatttaccgcgctgctggccgtcttcttcgcggttgtggcggtgattatcgatcagcatctgtttgcccccataattacctttgtgctgcaggctgcaccagacgcgcagcttacgctcttctatctgttcaacggcctcctgtcgtccatctccgataacgtctttgtcgggacggtctacatcaacgaagccaaatccgcgatggaagaaggcattattaacgcaggacagtttgagctgctggccgtagccatcaataccggcactaacctgccgtcggtagcgacgccaaatggacaagccgccttcctgttcctgctgacctctgcccttgcgccactcatacgtctttcttatggaagaatggtctggatggcgctgccctatacgctggtactcacaattgtgggattgctttgcgtcaaaattaccctcattccctgtacgcaatggctgatacaagcgggtatacttgcggcgcactaa

SEQ ID NO: 165014 - DNA, 720 bp, Enterobacter cloacae
atggtcattaaggcgcagagcccggcgggtttcgcggaagagtacatcattgaaagcatctggaataatcgcttccctgcagggtccattcttccagctgaacgcgaactctctgaactgattggcgtcactcgcaccacgctgcgtgaagtgcttcagcgactggcgcgtgatggatggttgacgatccagcacggcaagccaacaaaagtaaacaacttctgggaaacctcggggctgaacattcttgaaacgctggcgcgcctcgaccacgaaagcgtaccgcagctcattgataatctgctctcagtgcgtaccaacatcgcgacgatctttattcgtaccgctttccgtcagcacccggaagatgcgcttgcagtgctggccagcgcaaacgaggtcgaagatcatgccgatgcctttgccaccctcgattacaacgttttccgcggtctggcgtttgcctccggcaacccgatttacggtcttatccttaacgggatgaaagggctctatacccgcattggtcgtcactactttgccaatcccgaagcgcgcagtctggcactgggtttctaccataagctcagcaagctctgcactgaagggctgcacgatcaggtttatgaaaccgtgcgtcgctacggtcatgattccggtgaaatctggcatcgcatgcaaaaaacgctgccgggcgatttagcgattcagagtcgctga

SEQ ID NO: 165015 - DNA, 1533 bp, Enterobacter cloacae
atggctactattgattccctgaacaaggacaacacacgtctgagcgatggacccgactggaccttcgagctgctggatgtctacctcgccgaaatcgaccgggtagcaaaactgtatcgcctggatacctatccccatcaaattgaggtgattacctctgaacagatgatggacgcttactccagcgtcgggatgccgatcaactatccgcactggtcgtttggtaaaaaattcattgaaacggagcgcctgtataaacacggtcagcaggggctggcgtatgagattgtgattaactccaatccgtgtattgcgtatttaatggaagagaacaccattaccatgcaggcgctggtgatggcccacgcctgttacggccataactcgtttttcaaaaataactatctcttccgcagctggacggatgccagctccatcgttgattacctgatcttcgcgcgtaaatacatcaccgactgcgaagagcgttatggcgtggatgaggtggagaaactgctcgactcctgccacgccctgatgaactacggcgtggaccgctacaaacgcccgcagaaaatctccctgcaggaggagaaagcccgacagaaaagccgcgaagagtatctgcaaagccaggtgaacatgctgtggcgcaccctgccgaagcgtgaggaagagaaagccgtcgccgagacgcgtcgttatccctccgagccgcaggaaaacctgctctactttatggagaaaaacgccccgctgctggagccgtggcagcgtgagatcctgcgcatcgtgcgcaaggtcagccagtatttctatccgcagaaacagacgcaggtgatgaacgaaggctgggcgacattctggcactacaccatcctcaaccatctgtatgacgaggggaaagtgaccgagcggttcatgatggagtttctccacagccataccaacgtcgtgtttcagccgccttataacagcccgtggtacagcgggattaacccgtatgcgcttggctttgcgatgttccaggatattaagcgtatctgtcagtcgccaacggaagaagacaagtactggttcccggatatcgccggttcagactggcttgaaacgctgcattttgcgatgcgcgattttaaggacgagagctttatcagccagtttatgtcgccgaagatcatgcgtgatttccgcttcttcaccgtgctggacgatgatcgtaacaactacctggagatttctgcgattcataacgaagaggggtatcgcgagatccgctcacggctctcttctcagtacaacctgagcaatcttgagcccaatattcaggtctggaacgtcgatttacgcggtgaccgttctctgacgctgcgttatatcccgcacaaccgcgcgccgttggataaaggacgtaaagaggtgctgaagcatgttcaccgcctgtggggctttgacgtgcagctggaacagcagaatgaggacggcagcgtagaactgctggaacgttgcccggcgcggttgaatacgttgtaa

SEQ ID NO: 165016 - DNA, 1299 bp, Enterobacter cloacae
atgcgtgttgtcatactgggaagtggtgtcgttggcgtaaccagcgcctggtatttaagtcaggcaggacatgaggttaccgttatcgatcgtgaatccggcccggcgcttgaaaccagtgcggcgaatgccgggcaaatctctccggggtatgcggcgccgtgggcagcccctggcgtaccgctgaaggcgatcaaatggatgttccagcgccatgcgccgctggccatcagccttgacggcacgccgttccagctgaagtggatgtggcagatgctgcgcaactgcgatacccgccactacatggaaaacaaagggcgcatggtgcgcctggcggaatacagccgtgactgtcttaagaccctgcgcgcgtcgaccggcattgagtacgaaggccgtcagggcggcacgctgcagctgttccgcaccgcgcaacagtatgaaaacgccacccgcgatatcgccgtgctggaagatgccggcgtaccttaccagctgctggaggccagccagctggggcaggtggagcctgccctggcggaagtggcgcataaactgacgggcggcctgcgtcttcctaatgacgaaaccggcgactgtcagctctttacccagcgtctggcgcacatgtgcgagcaggcgggggtgaaattccgctttaacaccgctgtcgacaagctgctgtcggaaggggaaaaaatttacggcgtgaagtgtggcgacgaggtgatcaaagcggatgcctacgtgatggcatttggctcgtactccaccgccatgctgaaaggcattctcgatattcctgtttatccgctgaagggctactcgctgaccattccggtgaaagaagagagcggcgccccggtatcaaccatcctggatgaaacctacaaaatcgccattacccgctttgataaccgcatccgcgtgggcggcatggcggaaattgtcggcttcaacaccgacctcctgctgccgcgtcgtgaaacgctggagatggtggtgggggacctgttcccgcgcgggggctttgttgagcaggcgacattctggaccggtctgcgtccgatgaccccggacggtacgccgattgttggccgtacgccgtttaaaaatctgtggaccaataccggacacggcacgctgggctggacgatggcctgcggatccggtcagctgctgagcgacctgatttccgggcgcacgccagccattccatttgacgatttaagtgcggcgcgctatcaatcagggttcacgccatcgcgtccacagcatctgcacggcgcgcataactaa

SEQ ID NO: 165017 - DNA, 1071 bp, Enterobacter cloacae
atgtcccgtcctgttctggctcagctggatctgcaggccctgaaggaaaacctgcaaattgttcgccgggcagcacctggttcgcgcgtctggtcggtagtcaaagcgaatgcctacggccacggtattgaccgtatctggagcgcgctcagcgccaccgacggttttgcgttgctcaatctggaagaggctatcctgctgcgcgaacgcggctggaaagggccgattttgctgctggaagggttcttccaccccgaggatctgccgttgctggataagtatcgtctgaccaccagcgttcacagcaactggcagattaaagcgattcaggatgcaaaactccacgcgccgctggatatctatctcaaggtaaacagcggcatgaaccgtctgggctttcagcctgagcgggtgcatacggtctggcaacagctgcgcgccctgaaaaatgtgggcgaaatgacgctgatggcgcactttgccgatgcggaaaaaccggacggcattgccgatgccatggtccgcattgagcaggcggcagaagggctggactgtccgcgctcgctgtcgaactctgcggcgacgctttggcatcccgaagcgcattataactgggtgcgtccggggatcgttctgtatggtgcatccccgtccggtcaatggcaggatatcgccaacagcggcctgaagccggtgatgtcgctacgcagtgagataatcggcgtgcagacgctgaaggcgggcgacacggtgggctatggcagccgctaccgggcgcagggcgaacagcgaattggtattgtggcaggcgggtatgccgacggctatccgcgcatcgcgccaaccggtacgcctgtctgggtggacggcgtccgtacgggcacggtggggaccgtgtcaatggatatgctggcggttgacctcacgccgtgtccgcaggcgggcatcggttcaccggttgagctgtggggcaatgaagtcaaaattgatgatgtggccgcggcggcgggaacggtggggtatgaactcatgtgcgccctggcgccgagagtgccggttgtaacggtgtaa

SEQ ID NO: 165018 - DNA, 1734 bp, Enterobacter cloacae
ttggatgccgcagcgataatcagccttttcattttgggttctgtccttgtaaccagcagtattttattaagttcattttcatcgcgtctcggcatacctattcttgttattttccttgctatcggcatgctggctggcattgatggcatcggcggtatcccattcgataactacccttttgcctacatggtgagtaacctcgccctggcggtgatcctgcttgacggcggcatgcgtacgcaggcgagctccttccgtgtggccctggggcctgcgctttcacttgccacggtcggcgtgttaattacctctggcctcaccgggatgatggctgcgtggcttttccatctgaatatcatggaaggtttgctgattggcgcgattgtcggctcaaccgacgcggcagccgtgttttccctgctcggtggaaaagggcttaacgaacgtgtcggctcaacgcttgagattgaatccggcagtaacgacccgatggcggtgttcctgaccatcacgctgatcgagatgattcagcagcacgagaccgggctgagctggatgtttgcgtggcatatcctgcagcagttcggcctggggatactgataggtctggcggggggatacctgttacagcagatgattaaccgcatctcgctcccctcggggctgtatccactgctggcgctgagcggcgggatcctgatttttgccgtcaccaccgctctggacggcagcggtattctcgcggtctacctctgcggattcctgatgggtaaccgccctatccgcaaccgtcacgctattttgcaaaacttcgacggtcttgcctggctggcacaaatcggcatgttcctggtgctgggcctgctggttacgccctcggatctgctgccgattgccattccggcgctgctgctgtctgcgtggatgatcttcttcgcccgtccgctgtcggtgtttgccggtctgctgccgtttcgcggcttcaacctgcgcgagcgtgtctttatcagctgggtgggcctgcgtggcgcggtgccgatcatccttgccgtcttcccgatgatggccgggctggataacgcacgactgttctttaacgtggcgttcttcgtggtgctgatttcactgctgttccaggggacgtcgctcggatgggcggcgaaaaaagccaaagtagtggtcccgcccgtgggctggccggtgtcccgcgtggggcttgatattcatccggagaacccgtgggaacagttcgtctatcaactgagcgccgacaagtggtgcgtaggggcatcgctgcgcgatttgcacatgccggccgaaacacggattgccgcgctgtttcgcgataatgtcctgcaacaccctaccggcagcacccggcttcgcgaaggggatattttgtgcgtgattggccgcgaacgcgatctgcccgcgctgggcaagttgttcagccagtcgcctccggtggcgctggaccagcgtttcttcggtgattttattctggaagccagcgccaaatttgcggatgtggcgctgatttacggtctggatgaaggtgctgaagacggtgataaccagcaaacgctgggcgaaatcatccagcaacgacttggcgctgcgccggtcgtcggcgatcaggtggaatttgccgggatgatctggaccgttgccgaaaaagaagataacgcggtgcggaaagtcggtttgcggccgatggaagaggacgcagagtag

SEQ ID NO: 165019 - DNA, 915 bp, Enterobacter cloacae
atgtctcagtttcatctcatcgcgccgtcgggctactgcattaaccaggacgcggcacagcggggcgttcagcgcttactggaatctggtcatcaggtagaaaatcagacaattatcccccgccgccagcagcgttttgccggaacggaagcgcagaggctgaatgatatcaatagcctggtgagtctgaagggtaaggatcgcatcgtccttgccgtgcgcggcggctacggggcgagcaggctgctggagagcattgactggcagggcctggcgcagcgccagcagcaggatccgctgctgatttgcggccacagcgatttcaccgtcatccagctaggtcttctggccctgcacaatgtcatcacgtttagcggcccaatgctggccggtaacttcggcgcgccagagctggatgcgtttaccatggaacacttctggcgcgcgctgcgtaatcctgcctacagcgtggagtggcaaggcaacggaccgcactgggagtgtgaaggtcagctctggggcggaaacctggcgatgctggtctcgctcatcggcacgccgtggatgccggacatcgaagacggcattctggtgctggaagatatcaacgaacatccgttccgcgtcgagcgcatgctattgcagctttatcatgccggtattcttgcgcgtcagtccgcgattgtgctgggcagctttagcggcgctgcccccaatgactatgacgcgggctactcgctggaaaccatggtcgatttcattcgctcccggctggacattcccgtcatcaccgggctggatttcggccatgagcagcaaaccgtcactcttgcgctgggggcgcacgccaggctgaagcatgatgatggcggaagccagctcaccatcagcggccatccggtcataaaggggtaa

SEQ ID NO: 165020 - DNA, 612 bp, Enterobacter cloacae
gtgaaattgagatggtttgcttttttgattgtgctgctggctggctgtagttcaaaacatgattatcaaaacccgccctggaacccggaagtgccggtgaaacgggctatgcagtggatgccaatcagtgaacaagccgggaaggcctggggcgtgagcccgcgtctgatcaccgccattattgcggtggagtccggcggtaatcctacgctcgtcagcaaatccaacgcggtgggactgatgcagcttaaggcttcaacggcggggagagaggtctaccgctatatgggctggagcggacagccgtcgaccagcgagctgaagaacccggaacgcaacatttccatgggtaccgcgtatctgagcattctggaacatggcgtgctgaagggcatcgaggatccggaagtgatgcaatacgcgctggtggtctcctacgtgaacggtgcaggggcgctgctcagaaccttctcctctgaccgcaaagaggcgatagacgagatcaacggcatggacaaagatgagttcgtcgagcatgtagcgaagaatcatccggcaccacaggcgcctcgttatatctggaaagtacagaaagcgatggatgccatgtaa

SEQ ID NO: 165021 - DNA, 732 bp, Enterobacter cloacae
gtgagtcattacagtgagcagttcctcaagcaaaatccgctggctgtattaggggtattacgcgacctgcaaaaaggcgaagtgccgttgcgcatcagctggtcaaataatcagtttatcagcaagatccttgacgtttcgcaggagcgactgattgttgacctgggcagccaggagtatgaaaaccgcgctgcgctaagagcggaacatattgcggtaatggccgaaacccatggagccaaagtggagtttgtcctgccgcgactggaactgagcgaatatcagggacttcccgcttttgtgacacctcttccgggcaacctctggtttgtccagcgtcgtgaatacttccgcatcagcgccccgcttcaccctgcctatttttgtaaggccaaaatgccggacaaaaaagagcttcgtttccgtctctttgacctgtcgctgggcggaatgggggcgttgctggattcagcgaaaccggacggactggtagaaggcatgcgttttacccaaattgagctcgatatgggcggctggggtcgcttttatttcgatgcacagctgattgccatcagcgagcgcacggtggtggacagcaaaaacgaaacgattaccacgccgcgtctgagcttccgtttcctgaacgtcgggccaggcgctgagcgcgagctgcagcgtattatctactcgctggagcgtgaagcacgggaacgtgcaaataaagtcctgtga

SEQ ID NO: 165022 - DNA, 255 bp, Enterobacter cloacae
atgggtatcatcgcctggattatctttggtcttatcgctggcgctatcgctaaactcatcatgccgggaaacgatggcggcggcttcattttgacctgtgttctcggggttgttggtgcggttgtgggcggctggctggcgacgatgtttggctttggaggcaacatcagtggttttgacatgcacagtttcctcgttgctgtcgtcggtgccattgttgtgctgggcatattcaggttactgcgacgagcctaa

SEQ ID NO: 165023 - DNA, 2103 bp, Enterobacter cloacae
atgaactcctcacgttttacgttatgcgctctggccggtgccgtcacgctggcattgcaggtccaggctttcgccgaagaatctaccatcgtcgtcacgggctcagagcagggcagcgcgctgccggcctggacgaacagcgccacgaaatcggccgttgccgaaagtaaaacgccccaggtcatcaatacgctttctgccccggaaattgaaaagcgtcatgcgaactccgtgaatgaaatcctgcgctatgccccgggcgtctcaaccgaagtgcgcggtaatacctcctacatgagcgaatacaaaattcgtggctttaccgtcgatcaggagttctataacggattgcagttgccctataacgtcaccggcaataccaaggctcgtatcgatccgctgttgattgacagcgtcgatatcctgaaagggccttcatcggtgctttacggcggtggttcgccgggcgggctggtgaatattcaaagtaaaaaaccgcagcgggaagcgcgaacggaggtcggttttaataccggtaaccgcaacctgaaagagggctatctcgactcaacggggcagatagccgacagcgactggaattaccgtctgctgggcaaggcgacggagaatgacgatcagccgcacaccacccggtatgaaaattacctggtcgccccgtccgtcacctggcaacccgacagcaaaacccgtctcacgctcgatgcgctggcgcaaaactccccgagcctgacgccgtcaaatccgctcccgctgtcttatctgcgctcgaaatatgccgatcgccgtgattacgccggagatgaatggagtgggtttaagcagcgccagtggatgctgggctatagctttgaacacgagtttgacagcggctggggctttaaccagaaagcgcgctattttgacgtcgatacccaccagcgcagcgtctatgcgacaggaacggggagtgaggtttatcagctcaaccgctttgcttacaccaccgatgaagatcttaagagcttcaacatcgacaaccaggtgacgaaaaccgttgcgctgggtgaatggcagcaccatctgctggccgggtttgactatcagaagatgaactcgcatttccactaccgttacgcgtcggccacgccaggcatggacatgcgcgatcctgactatgcgcaaatcagcgaaggcgcattggggctctacaccgcccagaagaatcgcctcagctatcagcagaacggttactacctgcaggatcaggtggaattcggtggcttaaatctgttgggtagcctgcgctacgacgattaccgctccgtcaccaccgattacctgaaaaacggggataaagcctgggtgtcgcaggaccgcgtcaccaaacgtctgggcgcgctttacgccttcgataacggtgtttcaccgtttatcagttattccgaaggttttgcgccggtgtcaccgcagggaacgcttacggcaaaagacgtcaaaccgaccaccagcaagcaggtggaaggcggggtaaaatatctgctggctgaatacgccaccacctttaccgcctcggtgtttaacatccggcagaaaaacgttgtcacctccgatccgggcttcctgaattatcgtcagaccggggaagtggaatccaaaggggcagagctctccgccattagccgtccgacggacaacctgacgctgattgccaactatgcctacacccatgcgatcaataccgaagatgataaataccagggtaaacgtccaactcaggtgccggagaacgctttcaatctgtggggggactacactttcgagagtacgccgctgaaagggctgatgctgggggctggggcacgctacaccggtccgatggaaatttcaccggctaacgatgcgggtaaactgggcggcaccacgcagtacgatctggcggcctcgtaccggatgggcgaaatcctgccttcgctggcgggacttacgcttaaggcgagtatgcagaacatcaccaataaagagacgctgacctgctacgacgcaaccaactgctggattgggcgtgacaggacgtatcagctaggggcgagctacagcttctga

SEQ ID NO: 165024 - DNA, 1686 bp, Enterobacter cloacae
atgataagacctcgcactttacgccctgctcttttgcacctcgcgctgggaggcgcactgctcggtgcgacgacattgagttatgctgatgaacagcctgcgttccagaaaaattcccccgatattttacttggccctctctttaatgatgtgcaaagtgccaaactgtttcccgatcagaaaaccttcgctgatgccgtccccaaaagcgatccgctgatgatcctggcggattaccggatgcagcacacccagtccagctttgatctgcgccactttgtagagatgaacttcacgctgcctgcggaaggcgaaaagtatgttccgcccgcaggacaaagtttacgcgagcatattgacgatctctggcccgtactgacgcgtaccaccgataaagccagtaataaatgggattccctgctgccgttaccgaagccttacgttgtgcccggcggacgcttccgcgaggtctactactgggacagctatttcaccatgctgggtctcgcggaaagcggccactgggacaaaatcagcgatatggtggataacttcgcctgggagattgatacctttggacatatccccaacggcaaccgcagctactacctgagccgctcccagccgccgttcttctccatgatggtggaactgctggcgacgcacgacagcgatgcgctaaagaaatatcgcccgcaaatggaaaaagagtacgcctactggatggagggcgtcgattctcttcagccagggcaagctaaccagcgcgtggtgaagctggatgacggttcggtgctcaaccgctactgggatgaccgcgatactccgcgccccgagtcctggcttgacgacgtcaataccgccaaaaacaaccctaaccgacccgcgactgagatctaccgtgatttgcgctccgcagcggcctcgggctgggactttagctcccgctggatggacgatccgcaaaaactcggcacgatccgcaccaccagcatcgtgcccgtcgatctgaacgcgctgatgtttaaaatggaaaaactgctcgcgcgggcaagccaggattcaggcgacagcgccgcggcgagtaaatacgaggcgctggcaaccgcgcgtcagaaagccatcgagaaccacctgtggaatgataaagagggctggtatgccgattacgacctcaagagtaagaaggtgcgtaatcagcttaccgcggccgctctcttcccgctctacgtgaaggcggcgtcgcaggagcgtgccgataaagttgccgcggcgacctcctcgcgcctgttgaaaccgggcggcattaccaccaccacgatcaacagcggacagcagtgggatgccccaaacggctgggctccgctgcagtgggtggcgacggaagggttgcagaattacgggcagaataaggtggcgatggatgtcacctggcgcttcctgaagaacgtgcagcacacttacgaccgcgagaagaaactggtggagaaatatgacgtatcaacaaccggtacgggcggcggcggtggcgagtacccgctgcaggatgggttcggctggagtaatggcgtgacgctgaaaatgctggatctggtctgtccgaaagagaaaccgtgtgacagcgtaccggaaaatcagcctgcggcgaatgacgaagcggcgccggtgaaagcgacggcgcagtaa

SEQ ID NO: 165025 - DNA, 1341 bp, Enterobacter cloacae
atgcaattaaagaaaacggtaattctgataagcgcattctattccggcgcacttttggcggcacaaccctcaatgaacgtggaagaaaagctggcgcaactggaagcgcaaattcaggagcttaaacagcagcaggccgccgcgacgcaggctgcgccagccgttgtggtgcagtcggaagagccggtgagcaaaaccgctccgccaaaactgacgctctcagggtttggtgatattaaattttacggtgatgtggaatttaatatggatgccgccagtaaaacgggtagcctcacgtctgttaagcaaagtgctaatagtgactgggcgccgggcgataaagaacgctgggatattaacggacgtattttattaggctttgatggttatcgtaaaatggataacggcaattttgccgggttctccgtccagccgctcggcgacctcgccgggcaaatgtacctggatgatgcggtattcttctttggcactgagaatgactgggaaataaaagtcggacgctttgaggcctatgacatgttcccgctcaaccaggatacgtttgtggaatactccgggaataccgcagacgatctctacagcgacggctacggctatatctatatgctgaaggaggggcgtgggcgaaccgacagcgggggcaacttcctgatgaacaagacgctggataactggtattttgagctgaataccctgtttaaagacggcagcgatttgtatgtcgaccagcgttatcacggtgcagaacttgagaacgacaaaaatgtggcctacgtgcgcccggtcatctcgtggcagaatgggccgttttccagcgcggttgccatggagaccaacctggtcaacaacgcttatggctatcgcgacgatgccgggcgctgggtagaccagtcagagagaacgggctacgggttcacgatgacctgggacgggctcaaaaccgatccggaaaacggagtggtcatgaatctcaacacggcttatctggacgcgacgggcgaaaccgactttacctcagctattaatgccctctggcgtaattttgagttgggttacatctatgcccataacgaaatcgacgagtttaatacctcaacgtttgacgcagagtgtgaaaacgactgctggataaccgacccgggcgagtatgacatccataccatccatacctcgtacctgatcccgaacgtcatgaagatgaaaaacttcaacatctatctgggcgcgtatgcgtcatgggtcaatgcatccccgaaagagggtgacaataaaaatgacgatcgctacggtggtcgcgtgcgctttaaatactatttctga

SEQ ID NO: 165026 - DNA, 957 bp, Enterobacter cloacae
atgaccgcacagtcacccgatttgatcagcgaacttttacgcggcatgcgtctgtcgggggtgaaataccgccggattgaagccagtgcaccgtttggcgtcgcgttccatcaggcaccgggcaaggcgcagttccattttgtgagccacggcaacgccctgctgcgaatggacagcggtgcaaccttcgaactgagcagcggcgatgcgctgtttattcctggcggtaatgcccatgccctgctctctgacgacaaggcaaccatcactccagtcaacgctttccccagcgagcccatctgtagttcggtctgtgccattacctgtgagccctgcccggagagcgaaaacaccatcatctttagcgggtgtatggattttgagctgggcggcatgcagccgctgatcaaagcgatgccggaagtgatgatggtcagccggttgatgtccacctggccggaaattcatccgctgctggccgcgatggagcgcgagtccatgacgcgtcaggtcgggtttgccgggatcctcgcccgtctggctgacgtggtggcggcattgattgttcggggctgggttgaagcaggctgtggtaaagcgacgggctgggtgcaggtcttacgcgatccgcgtctgagccgggccatctacgccatgcaccagcagccgggcctgaactggagcgtggcggatctggcgaaagaagcgggcacctcccgctccgtgttcgctgaacggtttctggcggcgacggggacgacgccggcaaaatatctcagcgagctcagaatgcgactggctattcagtatattcgccatgaaaatcaaccgattgaaaccgtcgcgctgcggctcggttacgggtctctggcggcgtttagccgggcatttaagcgcatcatcggccatgcgccgggcacgcttcgggaagtcagccagaccccggaagaggtctga

SEQ ID NO: 165027 - DNA, 1188 bp, Enterobacter cloacae
atgaatgcatgtgtcgaggcgagagaggccgtcgcgcctgccaaacccgcctggcgagccgtctattcactggggctgggggtttttggtttgataacggcggagttcctgcccgccagtttgctgacgccgatggccgcgagcctgggcgtcagtgaggggatggccgggcaggccgtgaccgccacggcgctggtggcgttagtcaccggactgctgatcaccccggcgacccggaaaatcgatcgtcgctgggtattgatgtttttttccgtgctgcaaattatctccagcctgctggtagcctttgcgcccactctgcacgttctgctgatggggcgtctgctgttaggggttgccatcggtgggttctgggcgatgtcgacggccacaacaatgcgtctggttccggcggacaaagtgccgaaagcgctggcggtgatcttctccagcgtgtcgatcgccaccgtggtcgcggccccgctggggagctatctgggaagcctgatcggctggcgcaacgtctttattctctgcattctgccgagcatgctggcgctgctgtggcagatctgggtgctgccgtccatgaagccagagagtagcggtagcctcggcacattgttccgcgtgctgcgccgtcctggcatgattggcggcatgctggcgaccattctgatctttagcggccatttcgccttctttacctacctgcgcccgttccttgaaaccgtcggacaggcaaatgttgaaaccatttcgctgatcctgctgggcttcgggcttgccaactttgtcggcacctccattgccgggcatctgctggcccgtaatctgcgcctgacgctggccctcgtgccgttcggcatgggcatacttgcgctgatgatggtggcgtttggtcatctggcgatgctggacggattactggtggcgctgtggggctttgcgttcggtctggtgccggtgggctggtcaacctggcttgccaccaccgttccggatgaagcggaaagtgccggagggctgctggtggcgtccattcagctggcgattagcgctggcgcggccgggggcggggtggtgtttgacctcaacggggccagcggcgtgtttgccggaagtggtttcctgctggtgacggcgatggtcattgtatttatgggcgtgaaggtcaaagcggcgtga

SEQ ID NO: 165028 - DNA, 1011 bp, Enterobacter cloacae
atggttaaggtcggtattaacggtttcggccgtatcggacgtaatttcctgcgcgcagcgctgggtaacccggatcttcagattgtggccattaacgatctgacggacagcaaaaccctcgcccacctgctgaaacacgattcccttctgggtaaattgcccgcaccggttgaagcggctgacggcgcattgcaggttgatggccagcggatcgtggtgtttagcgaacgcgatccggcaaatattccgtggcgtgaagctggcgtggatgtggtaattgaagccaccggcttctttaccgagcgggaaaaagctgcggtgcacgtcacgcacggtggtgcaaagcgcgtcatcatctccgcgcccggcaagaacgacgatctgaccgtcgtcatgggcgtgaaccacgatcgctatgatccggctcagcacgttgtcgtgagtaacgggagttgtaccacgaacggtctggctccggccgcgcaggtactgcatcagcagttcgggattgagcatggcctgatgaataccacgcatgcctataccaacagccaggcactgcacgatcagccggaaaaagatctgcgcggtgcacgcgcggcggcgctgtcgattgtgccctactccagcggcgctgcaaaagcgctcggcaaagtcatcccctctctggacggtaagctgaccgggtattctctgcgcgtgccggttccggtggtatcgatcgtcgatttgacggtcaccctgagccgtaacgtgactgccgaagaggtgaatgacgcattccgcagtgcggcagccagtgggccactgaaagacattctggggtatagcgatgaaccgctggtttccagcgattatcagggcgatccgcgctcctccattatcgacgggctttccacgctggtgattggcgggaacatggtgaagatcctggcgtggtatgacaacgagtggggattctccaaccgcctggtggacctggcggtgctgatggataaaaaagggctgtaa

SEQ ID NO: 165029 - DNA, 981 bp, Enterobacter cloacae
atgaagaagatcttaattatcgtccctgacggcggcatgctgtttgaagccgccggtatcgccgacattctgatgcaggctaaccggctgcacccggaagggcttgcgcacccccgctaccgcattattatcgccaccacgcagccgcaccaggtgatccacggtcagtccggcctgaatctgctggcggactatcgtctgcctgaactggatccgcgtgaaccgctggacaccattatcatcaccggacgcgggatgaacgagcaggagagcacggcggtggtggactggctgcaccttgctgcgccgcatgcccggcggatagcctccatttgcggcggcgcgatgctgctggcccagagcggcctgctggatggtcgtcgcgcaaccacccactggcggttgctggagaccatgcaaacccagtatccggctatccgcgtcgaaggcggtccactgtatattcaggatggtcccgtctggacctccggcggcgtgagctcggggtttgatctcactcttgcgctggtggaggatgactatggtttcaccctcgcccgcgacgtggcgcaggatatggtgatgtacctgcgccggcccggcggtcagctgcagtttagccgctatagccttcagccgtccggcgcgtccgggccaataagcgacctgcaggcctggatactacagaacctcactgccgacctgtgcgtagaaaatctggccgagaaagcggcgatgagcccgcgcaatttcacccgggtctttacccgggacgcaggcgttccacctgcccgctacgtaaccgaagcgcgcctggccgccgccagacagctgcttgagcaaacccgtgattcccttgagcgcattgctgagcaaagcgggtttggcaccagcattaacctgcgccgcgtgtttgagaaacagctccaccttaccccgggcgagtaccgccagcgcttccactgccgcaggatggcgtaa

SEQ ID NO: 165030 - DNA, 486 bp, Enterobacter cloacae; identical to SEQ ID NO: 131593

SEQ ID NO: 165031 - DNA, 813 bp, Enterobacter cloacae; identical to SEQ ID NO: 131592

SEQ ID NO: 165032 - DNA, 1077 bp, Enterobacter cloacae
gtgtgggcctctgtttctgacaaagcaaagcgatttaagttctttgtcatttcagacgttatccccgatcgtcattgtagtgtctctggcgaaacggcgtctgaaggaatgggtaaacgaagatctctctatttgcatccgcagcagcgcgatcgcatccaccatcttgcatcaggatttctgtggcgaagcgaattgcccacatggctgctgatcctgacgatttacgctggctggtttaccacgctgacgttctggcaaacgctcggcctgctgcccgccacgctgctgcttatctggtttaccgcctggtacatgtccctgcagcatgagttgatccacgggcatcccacgcgttttgcctggcttaaccagctgtttggcacgctcccgctggcggtctggtatccctatggcctgtaccgggattcccatctggcgcatcatcgtcacgacagtctgaccatcccggtggatgacccggagtcgtactattttacagaggcgagctgggcgcgcttttctccctggcagaagcgcatgatccaggcccgcaataccttctgcgggcggatagtgctggcaccgctgctggatattttgcagacgctggggatcgccgtggcggcctttcgtcagcgtcaacggcgggcgatggcgatgtggctgattcacgctgtgcttctggcggcgcttttcacctggatgacgcataacggcttttcacccgtctggtttgtgctggcggtaagctatccggcgctggcgctgaccaaggtccgttccttttacgaacatcgcgcggcggacgatccgctggcgcgttccgtcattaacgaggctgggctattctggcgggtactgtttttaaatctcaactaccattccattcaccacgatttaccgggcgttccctggtatgggttacagacgatctaccaccaaaaccgcgaggcgtaccggcagcgtaaccacggttttgtagtcaggggctatggcgaatggctacgccagttctcgacccggccagtggcggtcaccgttcaccccggaaaacaagaggaaagatatgagtaa

SEQ ID NO: 165033 - DNA, 759 bp, Enterobacter cloacae
atgagtaacctgctggcgtttcccatgtatgccgtggatcgcgccgacactcgcgcgctctggctggcggtacaacaacgtctggccgaccggggcgtgtacgttgagcgtgtcccccgctggcccgaatcagacctgctgcaccactggcagcagccggcgctgattctcagccagacctgcggctacccgctggtcacgcagctcccggaggtgcaggtggtgggctgttttcactacacggcagcgggatgcgaagggagccactaccgcagctttctggtgacgcgctcggaggatcggcctcttacgctggcggattttcgcggacgccgggcggtctgtaattctcctgactcgcagtccggctatcacgcgctgcgaaaaaaagtggcaccgtgggtgacccgcgcccctttcttttcgcaaacgtcattcagcggcagccaccgtcagtcgctgattgacgtcaaacgtgggaagggtgatatcgccgctatcgactgtgtcacctgggcactcctgcagcgtcatgagccggaagcgttggcggggctgacggtgattgaccaaactccgctaacgccgggcctgcccttaatcacgtcgcctcatacacctcctgacacgcttaacgccatccgcgatgcgcttcacgcgctggtaaccgtcccggagcaccgggcggtctgtgatgcggtgctgatcggcgggtttagcgtggtcacgcgccaggcttatgcgttattgtccgcatga

SEQ ID NO: 165034 - DNA, 897 bp, Enterobacter cloacae
atggatattaaacagttaaaatacttaattgcgctcgacgagacccgtcattttggtaaagcggcctcgcagtgcaacatcacccagccgaccctctccatgcgcatccgcaacctggaagaggagctcggtctggtgctgattgcgcgcggacagcgctttgagggttttacgccagagggcgaacggatcctggcgtgggcgcgtgctctgcttgccgctcacgacggactacaggcggaagccgcgctgtgcaaaggccaggtggtgggtgaattacgcctggggatggttccgctggcgagcgtcgatccgatgatctttatccgccagctgacgcaaaaatacccggagctgacctacagcctctattccatgtcctctgcacacattgccgatggcgtcagccgcaaccagctggagctgggtatttgctatctcaacagcatcgataccagtctgtttgacattattcagttgcctgagacgaagatgggcctgctgcatgatattcgtcatttccagctggacccgaggccgctgacctggcaggacctgacggattttccgctggggttcctgacaaaagggatgcattaccgggcgcatatggaggccagctttgccgccgctggaatcgaacccagatccgttttcgagagcgactctacgttccagatcattcaggcggttcagagcggcgtttgctgcgccgtgatgccgctgaacaacgggcttgaggcactaaacaaccatttcaggattgtccccatcgccgacgcgaacattgaggcgcccatcggcctgataatgcgcaggcaaaaacccctctcctccctggcgctgcgctgttttaccgacgcgcaggagatttatcatgcggacaataacgcataa

SEQ ID NO: 165035 - DNA, 2289 bp, Enterobacter cloacae
atgaacaagaaaagacgctcagttcccggtatcagacactatgatggccctgccggcggctggggtgcgctaaaagcgacagccattgcggtacgaacccagatggatacctttgatgcccccgccacgctgctgcgcaccaaccagcctgatggttttgactgcccgggctgcgcgtggcccgataaagaacacaaatcgaccttccagttttgtgagaacggcgccaaagcggtaacctgggaagccaccagcaaacgcgttacccccgcgttcctggcggaaaacaccgtctcttctctgctggctaaatctgactttgagctggaagggtatggtcgtctgacgcatcctctgcgctatgaccgggtaagcgacacgttcaagccggttgagtgggacgaggcgtttcaacgtatcggcgaggtgttgcgcgagcttgaaccggaccaggtcgagttctatacctccgggcgagcctctaatgaagcggcgtatcttttccagctgtttgcacgcgaatacggcaccaataacttccccgactgctcgaatatgtgtcacgaggccaccagcgtcggtctaccccgctccatcgggatcgggaaaggcaccgtctcactggacgacttcgataacaccgaactggtgatctccatcggccataaccccggcacgaaccatccgcggatgatgggtacgcttcatgagctggcgcgacgcaacgtgccgattatcgtctttaacccgttacgcgagcgcgccctggaacgttttgctgacccgcaaagcgtcattgaaatggcaacctatagctcaacggacatcgcctcgacctacttccaggtgaaggccggaggcgatgccgccgcgctgaaaggtatggccaaacacctgctggaaatggaggccgaacgcggtaacgtgctcgaccactcgtttatcgcagaacacacccagggctttgatgactttgccgccgacatcgcgcagacgcgctgggatgacattgagcgcgagtccgggctcagccaggctgcgctcaaaaaggtggccgaggcctatgcgaaatccaacgccaccatcattacctacgggatggggattacccagcacaataaaggcacggcaaacgtccggctgatcgctgatgtgctgcttctgcgcggaaatatcggcaagcccggtgcgggaatatgccctcttcgcggccactctaacgttcaggggaaccgtaccgtcgggattagcgagaagcccaccccggccttcctgaaccgtctgaaagaggtgtttggctttgagccgccttctcaccatgggcatgatgcggtgcaggcgacccaggccatgatcgacggtcgggcgaaagcgcttatctgcctcggcggtaactttgccgtcgcgatgcccgatcacgagaacggcttcccggcaatgggtaaccttgatttgagtgttcacgttggtactaagctgaaccgtacccatctgctggtgggtaaagagacgtttattttcccatgccttggccgtaccgagctggatgttcaggccaccggtcgtcagtccatcaccgtcgaagactccatgtcgatggtgcacgcctcctccggcaagctgaaacccgcctcaccgttactccgttcagaacccgccatcgtcgccggcatggcgaaagccaccctgcaggagacccgcgtggactggataacgctggttgaagattacgaccgtatccgcgatctgatcgagcagaccatcccgggctttgaggactacaatgcgcggatccgtattccgggcggcttccgaatgccgcttcccccaacgaaacgcgtctggccaacggcgacgggaaaagcgatgttctccgtattcgacggcgtacacgagaacgccagcggcgaaggcgagcatgttctgcgtctgattacgctgcgcagccacgatcagtacaacaccaccatttatgctctggacgaccgctaccgtggcgtgtttggccgccgcgacgtgctgtttatgaacgaagaggatatggccctgtcagggctggaacacggcgaccgcgtggatatcgaaaccgccctgcccggcagcgttcagcgtctggaagacattaccgtagtggcataccacatcgcgcggggttcagtcggggcttattacccggaggccaacgtgctggtgccgctcgattatctggataaggacagcggtacaccgtcttacaaatccgttccggttcgcatcatcctgcgctcgaaagagatccgaatgctgtaa

SEQ ID NO: 165036 - DNA, 495 bp, Enterobacter cloacae
atgaaaatgcgcgtactgttttcacttctgtttgtcatggcggtggcgggctgtaaagcgccacagaaacctgcaatcaacgacgacacgatcgtgaccagtcaggtcaacggtgtcaccttaacgcaccgtcacgccgtgttaccgccgacggaattcactccgctcaacgagccttatcgtgccatgtatccggcttccctgatgagccgtcctgactttggcggaaaggttatccgtacgctggaaaccggaaaaacctacgtggtgctgggtcaggttgaacactactggatggcgcttgccgatgagggtaatgaccaactgattggttacgtcccgatgcgtgcagttatcaaagccgaccagtatgaagcgaccgtccgtaaacaggccattcgtcctaaggcgcgtaaaaaagcgacctgcgttgatgtcgatggcaacagcaaagcctgcaaagacagcgctaacggtacctggatcctgaactaa

SEQ ID NO: 165037 - DNA, 504 bp, Enterobacter cloacae
atgaataataaaaattttcataagctgtggttggtcttttacgcggcggttttcgcccttgtgagtggttgtacgtcgtcttcacacagcgacccctcccgctacaatctgcagtttcaggctcatccacaaatcaatgattctgcgccgcttaaagtccgtgtgctgttgttgaaatccgatgcggatttcatgtccagcgacttctattccctgcagaacaacgcgtcagcaacccttggcgcgaatctgctgaacagcgatgtgttcttcctgatgccgggacagctgtcgaaaaccctcagcggtcagagcgatcccgaggctcgctacatcggcgtgatggcggaatatcagaagctggatggtaaaaaatggcgcgtgtctctccctctgcctgtgccaggcgaaaatcatatctaccagttctggaaatggtccgcggatgaactccaggccaacgtttttctcgacgtaaatggcattcgggtcatcagccagtaa

SEQ ID NO: 165038 - DNA, 1344 bp, Enterobacter cloacae
atgacgaaagcagaaaaggtcgtctggaccgaaggcatgttcctgcgtccacaccattttcagcggactgaaagttatctgctcaaccacgttcgtgaatggggtgcgttgcagcgttcctatctttggggctttcttgatgttgaactcgacgaagcgatgcttcgtcagggatgcattgccctgagctactgcagtgggcttctgccagacgggaccttcttccaggtgcgcaacggacgcaatggtcctgtgccgcttaaaatccctgacaatctcaccaacgaaaaggtggtgctcgcgctgccggtacgtcgtggcgagcgggaagaggtgatcttcagcgaagagccggcctcgctggcgcgcttcatcgcgttcgagcaagaggtcgaagacgacaacgccatgtcggtgggggatgccaccgtacagtttggccgcctgcgcctgacgctgatgctggaaaaagatctcacggcagaatggaccgccatcggcgtggcgtttgtcactgaaaaacgccacgacaaccacgtccggctcgataacagctacatcccgccgatgctgaacgccaataacagtccgcagatctacagcatgattaacgatctgcacggcttactggtgcagcgcagccagcagatcggcggccgtctgcgccagcctggccgttttaacacctcggaactgattgaatttacgttactgtcgctggtgaaccgtcatcttggcgaggtttcgcatttaaaaacgctgccgctgctgcacccggaaaccctctggcgcagctggctgccgtttgcgtccgagcttgccacctggactccacaacggaccacggagagcgtgctgccggtctacgatcacgacgatctggcgaactgcttcagtaagctgatgctgatgctgcgtcaggggctgtcgctggtgatggaagaccacgctattcagctgccgcttaacgagcgctcgcatggtcttaacatcgccaccgttcctgaaaccagcatggtacgcgagtttggcttcgtgctggccgtcaaagcgaatgtgcccggcgaacacctgcaaacccatttccctgcgcagatgaaaatcgcgccggtgtcgaaaatccgcgatctggtccagcttcagctgccgggcattatgctgcgcgccatgccggtcgcgccgccgcagatcccgtggcatgcaggctacagctatttcgagctggagaagggcagcgagctgtggcacgagatggataagtccggcgccttcgccctgcacctggcaggggagttcccggggctggatatggagttttgggccatccgtagcccgacagaataa

SEQ ID NO: 165039 - DNA, 1239 bp, Enterobacter cloacae
atgcaggaacgacaggataccggcagtgatgccgcgtttaccggagccagtagcaacaatcagctggtggcggccgctaatccgctgctcaatgcgattccgcagatccgtcattcggtttcacatgacgatcaggtggcgttacgccagcgcctgatcgatgagattcgccgttttgaagtccgctgtcagcaggcggggctaccctacgaagtgatcgttggggcgcgttactgcctttgcacggcgctggatgaggccgctgcgcttaccccctggggcagcagcggcgtctggtcaagcaatggccttctggtgacgttccataacgaaacctggggcggcgagaagtttttccagctgctggcgcgtctgtcgcagaacccgcgcgaacatatcctgctgctggagatgatcaactactgcctgctgctcggtttcgaagggcgttaccgtgtgctggacaatggtcgcacccagcttgagaccatcaagcagcggctgtggcagatgattcgcggcgtgcggggcagctatccgccaccgctgtctccccacccggaagatcgcccggtgctgcgtaagctgtggcggccgatggttcccctgtgggcctgcgtggcgctggccgggtttatcgcctgcctgttttatatcgtccttaactggcgtcttggcgataacaccagtccggtcctggcgaagatttatcagtcccagctgccggaaaccaccattcagcaaccggcccgtcagttgcccgctgtgctaaacctgcgcggcttcctgaagcctgaaatcgaggcaggtctggtcgcggtaaaagatgaagcggatcgcagcgtcgttatcctgaaaggagacgggctgtttgcctccgcctcgacggtggtgcgtgaccgttatgaaccggttgttaaccgcattgcgcaggcgatgaacaatgtcagcggcaaaattctggtggtgggttacagcgacaacgttccaatccgcagcgcgcgcttcgcttccaactatgagctttctctggaacgcgcccgctcggtacagaaaatgctgcaaggaagcctctctcagccagaccgcgtgaaagcggaagggcggggtgagattaacccggtagcaccaaacacgacgccggaaaaccgcgcccgtaaccgccgtgtggaaattactctgctggtgtcgcctgaaaatactcaggctgagctgaacggattgccgcaaggaaactaa

SEQ ID NO: 165040 - DNA, 3621 bp, Enterobacter cloacae
atgctgactacacttctttccattctgaccaaccgcattctgtggagcttcctgggcgtaaccgcgcttgcggcggtgatctggatgattggtccgctgttgtccattgtggatacccgacccctggaatctgaacagaaccgcattatcagtattgctgtggtctatctgctctgggcgcagggacacattctgccacgtctttataacgcctggctgaaccgcaagctgatggacaagctcaacgagaacaccaccagcccggaagcggcggatccgcagaaacgcctgaacagcgaggaacaaatccttgccagccgtttcgatgaagccgcgcagatgctcaaaaaagcgcacttcagcaaagcaggacagggcgcccagtggacgcaacgcttcagcacgcaatacctgtatcaactgccgtggtacgtcattattggcgcaccgggctccggtaaaaccacggcgctggttaactccggactgcaattcccgctggctgaccgtttcggtaagaccgcgctgcgcggtatcggcggtacgcgcaactgcgactggtggttcaccaacgaggctgtgctgctcgacacggcgggccgctataccacgcaagaaagcgagcaggtgcaggacgccggtgaatggctgcagttcatggggttactgcgtaagtaccgtcgtcgtcagccgatcaacggcgtcattgtcaccatcagcatctctgatctgctcacccagtctgcggaggcgtcacgccagcaggcggtgaatctgcgccagcgtctttctgaactgcatgagcagctgggtatccgcttcccggtttacgtgatggtcaccaaagctgacctgctcaaaggcttccgtgcgtggtttgccgactacgacaaagcgcagcgggaccagatttggggctttacgctgccgtgggagcagaccaaacacgccgattacgacctgatgggcaacttccagcaagagttctcgctcttgcagcagcgcctcgatgccgggctgccggaaaccatgctgaaagagcatgacgcgaaaacccgtgctgaagcgtatctcttcccgcaggagttcgccgcattgcgtcccctgctggcggattacctgagcactgtcttcgcccgctccaactttgaaaccgagttctctccgcgtgggatctacttcgccagcggcacccaggaagggatgccgtttgaccgcgtcatgggcgaactgaaccgtgcgctctctctgccggaagggggagagagtgataactgggattcggtaagtaaagacgcgccgatccctggggcgaaaggccaaagcttcttcatcaagaacctgctgcaaaacgtcattttccaggaagccggcattgccggagaaaaccgctggtgggaactgcgtaaccgggcggtgatctggtccggctatgcggcgctgctggccctgctggtgatactcggcggactgtggctgaccagctatgccaaaaataaggcctatctggaagaggtggatgcgaaggtgccgctgctggatcagcagagcaaagccttgcagaaccagccgcagcgcgatctgttcgatctgctgccgctgatgaatggtctggttgatctgccaaaaagcgatgcgtttgatgtaaacgatccgccggtttcccgtcgcatggggctctaccgcggagatgacgtcagcgatgcctctcagtctctgtaccagaaagcgctggatcagctgctgttgccagcggtcgccatgcacatcaccacctggcttcgcaacgataatggcagcgacgtggagtacagctatgaagcgctgaaagcctatcagatgctttaccagccgaagcactacgacggcaaattcctgcattcatgggtgatgctcaatctgcagcgtaacctgccgcagaacgtgacgaaagcgcagctgcagcagcttgaatggcacctgacgcagctgctggagccgaaaattcaggcttcgccgtacgcgcaggacgcgtccctggtggcgcgtgaacgcgcgctgatcaatcagcagccgttatccactcgcgtgtatggtcgtcttaagcgtctgctggagcatgatgaaaaccttaagccggtctccctttccgacctgggcggaccgcagagcgagctggtgttttcacgcaaaagcggcaagtcggtaagcgacggcgtgccgggtctttatacgccagacggttactggaaaagctttaacagccagatcgacagcgtgaccaccgcactgcatgaagacgacgcctgggtgttgggcgccgcgacggcgcaggaggataaacagcagatcgacaacgccgtgcgtcagctctacatgcgcgactttatcgctacctgggatcgctttctcgccgacattcagcttaacaacagcgccgatctttcccagcgcatcaacacagcgcgtctgctctcaggcgcaaactcacccctgcgccgtctggtgcagaacctgagccaggtgctgacgctgtcgcgcgatacgccagccccggaagacgccggtaaagcgcaggcgcagagcaaccgtgccacccgcacgctggaagcgctgttcagtaataatgacactgccccgacgcaggccgctgccgttacccaggccccggaacagctggtgacggaccactatgcaccgatgattgagctggctcagccgctggagaaggggggcaagaccatcgtctttgatgattttcttaagcaggtggatgagctttatcgttacctgaccgccgtacaggatgccgccaacagcggcatgccagcgccgggcggcgaggcgatcagccgtctgcaggccagcgccggtcgtctgccgggtgggctgcagaccatgttcagcaatatggcggtaggtgccagcagcgatacccagcgccgcgatctggagaacgtgcgtaagcggattaacgtcgaagtgggcgggttctgccgccaggccattgccgggcgttatccgctggtgcgtagcgccagcacggaagttaccccagacgacctcgcccgcatgtttgcgccaggtaccgggctgatggacaccttctttcgcgacaacctgaccaataaagtcgataccacccaggcaaactggcgctttatgccgggcatcgacggtaaaacgctgccgggaagtgaagggctgctgagaccgttccagcaggcccagtcgattcgcgacgccttctttgcgaatggtgccaccacgccgtctttcaaggtcacggtacgcaccgtgcgaatggataacaccatcctgaacctgacgctggacgttgacggccagctgctgcgctacagccacggtccgcaagccgttcaaatcatgaactggccggggccgggcggcaccaaccaggtccgcatgcagttggggctggctaacggcagcacggcgacgctggtgaccaacggtgcctgggcactcaaccgctttttcgataaagcgagcaccagcccgggcgccggtagcctgagccgtcaggccaccttcaacgtcgacggacatcaggtcacgctggagtttgcgccaaacagcattcgcaatccgttccagctaccccgtttctcatgcccataa

SEQ ID NO: 165041 - DNA, 717 bp, Enterobacter cloacae
atgacgaatacccctgcgatgaaccgctacagctggtatggcaaattacccagcgccggagatttcctgcagcgccgctttcctgacaccttacagcgccagtggtcgcactggttccaggttggcctgcttgcctggcagcaggaagagcagcgtagcggagaacgcccgttcaccaaagcgccggtgtggaattttgttgtccccccaatgctgggcagccagatgatccagatgggctgcctgctgcccggtcgggacagcgttggccgacaatacccggtgtgcatccagctgagcttcgccccgtcagaatggtcgaccagcctgctcagccaggcggaaagctggtatcagcagattggtcgtctgggactgcacgcggtgcgcaacagcttttccgcctcgcagctggatgaaatgctgatgtccattccggctccgcagcccgtcgagccgcaaaagcgttccgacatccttgacgtgattggctatgacgaggacggtcagagcacgctgggctggccgcaggcggcagagtgttttgacccgctgcgtcagaccagctactggtggaccaaccgctgcgacggttacccgctgtacacccatgtccacagcggcaactttaccgggcagcttttcaccctgctgttcgacccggcagggggcgcccgcccgggacgtcacggtctttatccgcccatgtttgaataa

SEQ ID NO: 165042 - DNA, 1017 bp, Enterobacter cloacae
atgaatatcgaagaatttctcgcgcccataagcccggataaaccctgtggcgacaatctggaatacgacgctgacttccaggtgatgaaccaggcaagccaggggaaagcggaacagcagtttggcgacaccattatcccggcagagcctgctgactggaatacggtagaaaaatacgccaccagcctgctggcgcgcacgaaagatttgcgcgtgatgctggcgttaacccatgcgtggacacgccgccgcgggctggcaggctacgcagacgggctgctgctggtgcaggaggcgctcgcgcgctactgggagccgctctatccgcttctggaggagtatggcgaaaccgacccgttctatcggattaatgccctggcggggctgagcgataaatcggaactcaccattgcggtacgcaacgcctcgctgctgcgttcaaacggcgatgaaatttcgctgcgggacgcccaggcactgctggacggcagtaaaactgaatgcccggactatccggggggccgtccaagattgattgacgaactggcccgcggtgaccagccagggactgccgcggtaatcgtgattaacgagcggttgctggccatccgcgcgctgcttaccggatatctcggtgaaagcggtgtacccgagatggaacaactgctgaagaccacaggactggtcgccagtgcctgtcaggtgaccgacatcagcaagctgttgccgggccgcgaggcgcaggctgaaccgcaagccgatcatcaacctgcggcaacacaacccgttcagccggttaccgactggcgcagcgtgcaggtcaccagccgtgccgatgcgcagctgatgctggaaaaagcaaaacagtattttgcgcagtacgaaccgagccaccccgcaccgctgatgattgaacgggtgcagcggctgtcagaacttaactttatggacattattcgcgacctggcgccagacggcgttaaccaactggaaaacatctttggacgccgcgaataa

SEQ ID NO: 165043 - DNA, 525 bp, Enterobacter cloacae
atggcaatgagtaacagtgggcagaaattcatcgcacgtaaccgtgccccccgcgtgcagatcgagtacgacgtagagatctacggtgcagaacgtaagattcagctgccgtttgtgatgggcgtcatggccgatctggtcggtaaaccggtggaaaacctgccggcggtcgacgatcgcaaattccttgaaatcgacatcgacaactttgacgaacgcatgaaggcgctgaagccgcgcgtggcgttccaggtggataataccctgaccggcgaaggtaagctcaacgtcgatctgaccttcgacagcatggatgacttcctgccggacgcggtggcccgcaaggtggagccgctgaacaagctgctggaagctcgtactcagctctccaacctgctgacctacatggacggcaaaaacggcgcggaagagctgatcgcaaaaattctgcaggatccgacgctgctcaaatctctgagccagttgccgaaaaatgacgacagtgcgaaaggtagcgaggaataa

SEQ ID NO: 165044 - DNA, 1500 bp, Enterobacter cloacae
atgagcaaccagactcaacaacatgagcagcaggcgggtcaggccttcagccaggatgaattcagcgcgttgctgaacaaagagttccgcccgaaaaccgatcaggcgcgttctgccgtggaaagcgcggtcaagaccctggcacagcaggcgctggagaataccgttaccttctctaacgatacctatcgcaccattcagaacctgattgccggtatcgacgaacagctctctcaacaggtgaaccagatcattcatcacgaagagtttcagaagctggagagcgcctggcgcggtctgagctacctggtgaacaacaccgaaactgacgagatgctgaagatccgctttatgagcatctccaagcaggagctgggccgtaccctgaagcgcttcaagggcgtgggctgggaccagagcccgatcttcaagaaaatctacgagcaggagtacggtcagtttggcggcgagccgtttggctgcatcgtgggcgactactacttcgaccacagcccgcaggacgttgagctgctgggcgaaatggcgcgcatcggctctgcggcacactgtccgttcatcaccggtaccgcaccgggcgtgatgcagatggagtcctggcaggagctggctaacccgcgcgacctgaccaaaatcttccagaataccgaatacgcggcctggcgttcactgcgtgaatctgaagatgcccgctatctggggctggtgatgccgcgcttcctgtcgcgcctgccgtatggcatccgcactaacccggtcgacagctttgattttgaagagcagaccgacggcgcaaaccacaacagctattcgtgggcgaacgccgcctatgcgatggcggccaacatcaaccgctccttcaaagagtacggctggtgcacctcgattcgcggcgtggagtccggtggggcagtcgaaaacctgccgtgccacactttcccaagcgatgacggcggcgtggacatgaaatgcccgaccgagatcgccatcagcgaccgccgcgaagccgagctggcgaaaaacggcttcatgccgctggttcaccggaaaaactccgactttgctgccttcattggcgcgcaatctctgcaaaaaccggccgagtaccacgatccggatgccaccgcgaatgcgcgtttggcctctcgtctgccgtacctgttcgcctgctgccgctttgcccactatctgaagtgcatcgtgcgcgacaaaatcggctccttccgcgagcgcgaagagatggaacgctggctgaacgactgggtaatgaactatgtggacggtgacccggcgaactcctctcaggaaaccaagtcccgtaaaccgctggcggctgcagaagtgcaggtgcaggagattgaagacaacccgggttattacgccgcgaagttcttcctgcgtccacactaccagctggaaggcctgaccgtttccctgcgtctggtttctaaactgccgtcgctgaagacgaaagacgcgtaa

SEQ ID NO: 165045 - DNA, 483 bp, Enterobacter cloacae
atggctattgatatgtttctgaaggtcgagggtgttacgggcgaatctaaagattctaaccacaccggctggactgatattacctccttctcctggggcgcttcccagccaggtaatatgagcgttggcggtggcggcggtgccggtaaagtaaactttaacgatctgcacgttaatgctctgatcgacaaatccaccacagctatcctgaaacactgcgccagcggtaaacacctgaccaaagttgaactgtccgtctgtaaagccggtggtcagcaggtggaatatacccgcatcacgctggaagatgtgctggtgacttctgttcagtacaccggtgcagacaacggcgataccgttggtgtgacctacgcgttccaggctgcgaaagtgaaacagcagtactgggagcagaccactgccggtggtaaaggtgctgaaagcagcgctggctggaacatcaaagagaacaaagaagcgtaa

SEQ ID NO: 165046 - DNA, 492 bp, Enterobacter cloacae
atgtctcatatgcgtcctgctttcggtgccgcctggaaccgattcagagaagtgaacgtaaacgtagaacaggttggtaagttattaggtggaaaggttcagcataatattgacgccggaatttttaaaaacgcctgcccgattcgtatgagctacgttttaaattattgcggcattccgattccatctaatagcaaatatgcaacagtgaccggaaatgacaaaaagcgctatatgtttcgggtaaaagacatgattgcatttttacctacagtactgggcaatgcagatatgtcagtatcatccccaacgcctgcccaatttgcaggaaagcaaggcattatcatctttaccggacacggctggagtgacgccaccgggcatgtaaccctctggaatggaaatatttgctctgatgattgccatttccttggctctcctggtaatggttcgtttatccctaccaatgcaacattctggagcctgaaatga

SEQ ID NO: 165047 - DNA, 354 bp, Enterobacter cloacae; identical to SEQ ID NO: 131591

SEQ ID NO: 165048 - DNA, 990 bp, Enterobacter cloacae; identical to SEQ ID NO: 131590

SEQ ID NO: 165049 - DNA, 399 bp, Enterobacter cloacae; identical to SEQ ID NO: 131589

SEQ ID NO: 165050 - DNA, 1755 bp, Enterobacter cloacae
atgcgattcacgattatttctacgaaacccggtcatcagccgccgcagagcagctgtgatttttatgccccgggcggcaccattgggcgcggtacggataacaatctggtgttgccggacaatgaccgcaccatctcgcgcctgcaggccattgttcacgttgacgccaatggtgaatgtcgcgtcactaaccgtggcagcgtcacccgcgtggtattaaatgatattccgctggagcgggggcgtcaggttgaactgcaggatggcgacattctcggtattgatgactaccgtatcgaagtggccgaacttatccacgacacgcagccggtgagccgcatggccgccagcatgcagcagcaggcgcatccgacagccgcgccagcgccagcatcgcaaccgaagcctgctaaccctgcgccacgcggtaaagcggaaccaactgccgtgccgtcggaaatctgggatagcctgatgcaggagttttccatctccgacagcatctccagcaaccgtgcaaaaccgcagtcagcggcttcgcaggatccgttctctcagcctgcggcgccggagcgtaatgctgaagatccgctggcgatgttcaacgacagcgatcccacgcttgagcataagaatgtcgacccggacacgctgttcggcgaagaaacgctgttcaaaaaagagagcattttcgacgacgtgacgccttccacgctggtgccgccagttgagactcaacccgcccctaaagaagatgcggtagatgaactcgatccgctggcgctatttggtggcaaggccagcgcgccggctgcacgtaatgatgacccgctcgggctgatgggcggggcgccgttaacccatccggatgacatcactgacgaaaagccagcgcctgaaccagagcaggaggaagacgtccttgccggttccccgctttttgcccctgagccgcaggaaacgccgcgtgcagaagaggagccagtgagaccagattacgcagggttcacgatgcctacgccgcaggccgttgcgcgcagcagcgctcagacccctaaaggccgactgcgtatcgatccggttaataacgctgcttctccatctgctaccgcgaacactggagagaagggcgatgtgttgcagggggaactgctgcaggcactgctggaagggatggggctgagcgaaatgcagcctgtcccgcagtttgaccgggaaaatatgcgtcagctggggcagatcctcggtatgttctctcagggcaccgtggcgctgctctcctcgcgctctattctaaaacgcggcgtaaaagccgatatgaccatggtgctggacgatgccaacaacccgttcaagctgttgccgaccgggaaaacggttctgatccagatgtttggcaccccgatgccgggctttatgccaccaacgaaatccgtgcgcgatgcgctgatcgatctgcaggcgcaccagctgggcatgatctccggcatccgcgccattattgccgcgatgctgcaatcctttaatccggaacagctggaagagcaggcgaagcaaaacggcatgacctcgcgtctggcgctgccgggcagccgtaaagccgccctgtgggactattttgttcgcagctatggcgagacggcgggcgagattgaggatgacttccacaccctgttcggcgaagccttccttcatgcgtatgacatggaggtgaatcagtacaaagactcacagagcggatcggaagacaaatga

SEQ ID NO: 165051 - DNA, 798 bp, Enterobacter cloacae
atgaatatcgcaacggcttctctctcccgccaggggacgcgcgccagcaaccaggatcagacgggagaaaccattggggaacgttcagcctgctttgtcgtctgtgacggcatcgctggcctgccgggcggtgaggtggccgctgaactggcccgcaacagcattatttcccgcttcgatggcgacaaacaccttaacgcgcagcatatccgtgattatgtgcagaccgcgaatcgcaccattctcagcgaacagcaggccgttcaggattatcgccggatgggcacgacgctggtcagcctgtttattgaccgtgattatggcctggcctactgggcgcatgccggagacagccgtctgtatctgtttcgccggggatggctgtggcatgtcaccaccgaccacagcctggtgcagcagatgaaagatgccgggcaccagaccgacaacctgaacagtaatctgctctatctggcgctggggattgaaaacggtgggccggaagcgagctacagcgatgtcgtgcaggtcgaagacggcgatgcattcctgctctgcaccgacgggttctggcacggcgtcagcgaagagcaaatgaagcaatcgctgcatatggtcaatacgccccaggaatggctgaccttaatgaaccaaatcattcaaaagaatggcgagcaggaggggaatgcgcaggataactacaccgccctggcggtatggatgggcaaccctcaggacaccactttgctgcataccctctctgatgcagcacaatttcttccctgcggaactgattag

SEQ ID NO: 165052 - DNA, 993 bp, Enterobacter cloacae
atgaaactttggctatcgggtttggcacttctggcggtgacctccaccgcgcaggctgagaatttccgcatcgtgcagtctcctgcgcagaagctggatatctggatcgacaacatcaaagacaacaccccgcaaagctggtgtaagccggaggtggcactgcgcatcgtggcgaacggcaagaaggatgtctctgtgctggaaaacttcgtgccacgtcttggctcactgctggaacaccagtgcagcaaagtgaacacgctcagctggacgctcaacgatccggcgggaacgacgctggcgcaaggaaccgccgccaaagcgcaggagtgggcgctggtggtgaaacagcagcaggcgacgccagccgtgacgacgaccactgccagcggggcgttaatgccgccggatcaaaacgttgcaacccatacggttgccgctgaccgcacgccgtggcaggagtttaccctccaggacggctgtcacctgcgcaccttctgggaaggcggcgcatccgcaccggcgctctttattccggattctgataccacccgctgcggcaatggcagctggctcagcggtcacaccgtgatctcccagtcccgcaacggcgggcaaaaagagatggctgtgacgtacattcatggcttcccggtcatggggctgaatcaaaacgctgacccggaaaacgcgctgatcacctccgtcaacaaagagcgcatggtgttcagcaccccaaacagcgaccagagctggatgatcctgccttacgataacgcgctcaacggctggaaaagtaacggcacggtggcagtagagatttcccgtgaaaccgccagcgatgatgcaaagctgcaggcgcgtattgcggcggtgaagaaaacctggagcgcctgggtcgcacccggcacctcactgaatatcgttttgattgacaccctgcgccctcagctgcgcgatccggccgtgggcgcatggcgcgcggcgaattaa

SEQ ID NO: 165053 - DNA, 813 bp, Enterobacter cloacae
atgaatacgctctatcaacagctggcgggtgaaacgctcaacgacgcgctggcgcgtctggaagccgggatcaaagcccgtccggcagatgccgaccttcgcgccgcgttcgtgcagtttttaaccctcagcggcaactggacccgggcgctgacccagctgaaaagctggctggcgctgaagcctcaggcgaagccgaccgtcacactgctggagcaggccattcagggtgagctgcagcgtgcgcaggtgatggcgggccaggcgcgtccggccatgcctgaaactcagtggccgtggctgaccacgcttgccgccgcgcttaacgaagagggcgagcgcgcccaggcgttgcgcctggaagcccttgaacaggcgcaggcaacggcgggacacatcatccttgaaaacgaggagacgcaggcgtttgactggctgatggacggtgatgcccgtcttggtccggtgtgcgaaacccttgttaacggacgctatttctggctgccgtttaacgctattgcggagatccgtttccaggcgcccgccagcgtgaccgatctggtatggcgtcatgcgctggtccgtcttaccgacggtaccgagcaggtgtgccagatcccggcgcgctatccttttgcggctgatgccccggatgcggtcaaactggggcgcactaccgagtggcatccgcttgatgagagcggcacgctgtatgaagggctgggtcaaaaagcctggctgagcgagcaaagcgaaagcccgctgctgtcgttaagcctcgtgacgtttgcgacggacggagccgatgagtaa

SEQ ID NO: 165054 - DNA, 564 bp, Enterobacter cloacae
atgagtaatcccgctggcgaaggcgatctgctgcgcagcggctggcaggcccgcagcaagcaggataaggtgggggcgcgcgacaaaatgcagccctcgctgctggatcgccttacggataacgacccggaaaaaaagcgcgagccagccaacagtaatctgatcacccacgctgcgctgcgtcgcaatgtcctgcgggatctgcagtggctgtttaataccatcaaccatgatgcctccggcgatctgagcgccttgccgcaggtgagccgctcggtgatcaacttcggcgtcgcgccgctcgcaggtaagcgaatgtcagatatcgaatggcacgatattcagcgcaagctcaccgaggccatcatcaattttgaaccgcgcattttgccgcagggattgcaggtgcgctgcgtgtcggatacctcctcgctggatctgcacaacgtgctctccattgagataaaagggcgtttatggtgtgtgccgtacccgctggagtttctgtttcgcaccgatgtcgatctggaaaacggccattttgaactgaaagatgcggggtaa

SEQ ID NO: 165055 - DNA, 1872 bp, Enterobacter cloacae
atggaaagtaaactgctcgaatactacaaccgtgagctggcctacctgcgtgaaatgggggccgagtttgccgagcgctacccaaaagtcgccggacgactgggcatgcgcggcattgaagtggcggacccgtacacggaacgcctgatggaaggtttcgcttttctgacctcccgcgtgcagatgaaaatggatgccgagtttccgcgtttctcccagcgtctgctggagatgatcgccccgaattacctcgcgccaaccccatcaatggcgattgcgcaaatcgagcccgacagcagccggggcgacctgagcaatggctttattgtgccgcgcggcaccatgatggacagcctggcgctgaaaaagaccggcgtaacctgcagctatactacggcgcacgaggttaatctgctgccgctgaaaattgacaacgtggagctgggcggcgtgcctgctgacctgccgctggcacagctggggttaagccagcggggaatcaacagcgcgttgcggatccgcattgcctgcgacggcccgcaaaacctcggccatctgaatttcgaccagctgacgtttttcctcagcggcccggacattgaagcgctgaagctgctggagctggtgatggaacatcacgcagggatcgtctgccagacggtcagcccgcaacctcagcgacagctgctggcgtcggatgccctgtgtcaggagggctttgccgcggatcaggcactgctcccggacgatctgcgcaactttgacggttatcgtctgctgcaggagtatttcgcgttcccagcccgtttccgcttcatcagcctgagcggcctgagcacgctgctccagcgctgtgaaggcgaaaaagccttcgatatcttcatcctgctggataaatcagatgaacagctggagcgcgtggtggatgccagccatctggcgctgcactgcacgccagtcatcaacctgttcccgaaggtggcggcgcgtcaaaagctgaatgaaggccagcacgaataccatctggtggtcgataacatccgcccgctggattatgaaatttacgcggtgaataaaatcttcggcagcgcggacggtcagcgtgacgaccagacgtttcgtcctttctggagcacctggagcggtgacgcgggcaactacggggcctatttttccctgcgccgggaacagcgcgtgctctctgagcatgcccagcgctacggcacccgtaccggctatatcggttcagaggtgtttgtttcgctggtggatgaacagcacgccccgtggcaggaaaacctgcgctacatctctgccgaggtgctctgcaccagccgcgacctgccgctgatgctacagcaggagcttgggcagttcatcatggccgactccatgccggtgaaatcgttgaccctgcgtaaaggcccgacgccaccgcgtccggcgctggcagaagggttcagcacctggcggcttatcagccagctgcagatgaactacctcagcctgatggacagcgagaatgaagagggggctgccgcgcttcgccagctgttagggctgtatgccaacctggccgaaacggccgtggcgcgtcaggtggagggggttcgccactgcgtgctggagccggttcaccgccgcgtgcctgaacccggtccggtcgttttcgcccgcggaatcggcattaccctgaccgtagacgagcgggcgttttccggtgccagcccgtggcttttcggcagcgtgctggaacgcctgtttgcccggctggtatccatcaacagctttactgagttcaccctgaagagtcagcagcgcggtgagatcggctactgggcaccgagaatgggtaaaagggcgctggtatga

SEQ ID NO: 165056 - DNA, 1044 bp, Enterobacter cloacae
atgagtgacgctgccactgcaccgctgcgcgtgcatcgcctgacgaagctgccggagacgttctggcacggggtccgtcaaacgccctggcgctacgatctgtttcagctgttaaggcgtattgatgctcagggcggcgagcgctacccgctgggacgcgcgccgctaccgaaatttgagccgctgcgcatcggccagcagccgtcgatgagctttgcgccgtcgacgctggccgaggtcagcctgcgggaagagagcgggctgcatgaggtgtctatcctcagcttcgggctgtttggtccgaacggcccgctgccggttcacatgaccgaatatgcccgcgagcgtattcatcatcatcaggacaccagcctgagcgcgtttgtcgatctgtttcatcatcgtctgacgctgctgttttaccgcgcctgggcggatgcgcagcctgccgtctcccttgatcgcgctgacaacaaacgctttgagggctacctggcctcgctgattggcatgggacagccgggccagatgaataaaggcagcctgagcgcccatgcccgctttacccacgccgggcatctgacccgtcacagtcgggatccggaggggctggagaagatcctgcgcaactattttaacgccccggtcaggctggtaagcaacgtgccgcagtggatgccgctctccacgcgtgagcaggcacagctgggggaaggtcgccgtatgccgcgcatgggggaatccgcctttcttggcgtcgccgtccgcgacgtacagcataagtttcgtattgaaatcggcccgctgagcgctgaagagtacaaccggtttttacctggcgaagcgtgggtcaccgaactgcgcgactgggtgcgccagtacattggggtggagtttgaatgggaaacgcgggtgatcctgcatgaagacgcggtgcagggtacttcgctcggcagcaatgggcaattaggctacaacacctggctgggccttcagccgcagcctgtcccgcgtggcgatctggtctatcgcgcagagcggtaa

SEQ ID NO: 165057 - DNA, 2616 bp, Enterobacter cloacae
atgtcagaaattagccgtgccgtgctcttcggcaaactggatacgctgttatttacctcgctggaaagcgcgactgccttctgcaagctgcgcggtaacccctatgttgagctggtgcactggctgcatcaactgatgcaacagcaggatggcgatttgcagcaggtcatccgccactttgccctcgacgaacagcaactgacgcgcgatatcgtggccgcgctggatgcgctgccgcgcggcgcgagttccgtttccgatctctccgaacatatcgacagcgccgtagagcgcgcctgggtctatggctcgctgaagtttggcgtcagccgcatacgtggcggccatttgctgatcggcctgctcaaaacctggaacctggcaaacgtgctgaaaagcatttcggcgcagttcacccgtcttaacgtcgaggtgctgatcgagcagttcgatacggtttgcgccaacagcaaagagacgcagcaggctgcggccaccgtcgaggcgccagcgggtgcggtaccagcagcgcagggtacgctggctcagtacggccaggatctcaccgcccgcgcccgcgaagggaagattgacccggtagtcgggcgtgatgaagagatccgccagatggtcgatatcctgatgcgtcgccgccagaacaacccgctgctgaccggtgaggccggcgtcgggaaaacggcggtggtggaagggctggcgctgcgtatcgccgatggcgacgtgccggagccgctgcaaaatattcagctgtggctgctggatatcggcatgctgcaggctggcgcaggcatgaagggcgagtttgaagcccgtctgcaggcgttgatcaacgaggttcagtccagcgccacgccgattattctgtttatcgatgagatccacaccctgattggcgcaggcggccagcaggggacaggcgatgcggcgaacctgctgaagcccgctctggcgcgcggacagctgcgtaccatcggcgccaccacctgggcggaatacaaaaagtacatcgagaaagatccggcgctgacccgtcgtttccagacggtgcaggttcacgaaccggacgaaacgaaagccattctgatgctgcgcagtaccgtatcgccgctggagatccaccaccaggtgctgctgctcgacgaagcggtcagcgcggcggtgaagctgtcgcatcgctatatcccggcgcgtcagctgccggataaagccgttgcgctgctcgacaccgcctgtgcccgcgtggcggtcagccagagcgcgccaccggcgcaactggaagattgcctgcgccatcttgccgcgctggacgtggagattgagatagccgaacgcgaagcgcgcgttggtgcaggcgtttatgagcgcgtaacggcgttaatcacagaacgtgatgcgtatgaaagcaaacgtgaagccctgacccagcgctgggaagaggagcgcagtctggtgcaggaaattatccgcctgcgcgccgcgctgtttgcctcgggcgaggaggagtccgccgggctgcacagccagctggcggaacagcagcaggcgctgaaaacgttgcagggcgatgagccgctgctgtttgcggcggtagatgaaaacgtggttgccgcagtggtttccgactggaccgggatcccgctggggcggatggtgaaaaacgagatcgacgcggtgctgaatcttgccgacacgctgaaccagcgcgtcatcggccagcgtcacggtctggatctcattgcccgtcgcgtgaaaacctcgcgggcaaaactcgacgatcccaacaaaccggtgggcgtctttatgctttgcggtccatccggcgtcggtaaaacggaaaccgcgctggcgctggcggaatcgctgtacggcggcgagcagaacgttatcaccatcaacatgagtgagttccaggaagcgcacaccgtttccaccttaaaaggtgcgccgccgggctacgtcgggtatggtgaaggcggtgtgttaaccgaggccgtgcgccgccgtccgtatagcgtagtgctgctggatgaaattgaaaaagcgcacccggacgtccacgaaatcttcttccaggtctttgacaaaggctggatggaggacggtgagggacgccacatcgatttccgcaacaccattattattctgacgtccaacgttggcactgacctgatcagcgctatgtgtgccgatccggaactgatgccggaaccggacgccttaagcggcgcgctgcgccagccgctgctggaggtgtttccgcctgcgctgttgggccgcctgctggtggtgccgtattacccgctcagcgacgcgatgctggggcagattgttcgcctgcagctcaagcgcattcagcgtcgtctggaagagaatcacaatatcatttctgagtttgacgacagcgtggtggaacagattgttcagcgctgtaccgaggtggagtctggtggccgcatggtagatgctattttgaccaacaccctgctgcctcagatgagccagatcttacttaccgccagccgcagcgacgagcagtaccgacgtctgcatgtcacctgcgagcagggcgagtttcactgtcagtttgccgcgtaa

SEQ ID NO: 165058 - DNA, 1419 bp, Enterobacter cloacae
atgacggataatgataacaatcggactgtcccaaacgcgctcccggtcgggtaccgcttcaacgagtttgaaatcaaagaggtgatcggcggcggcggttttggcatcgtttatcgcgcgtgggatcaccagctcgaacgcactatcgctatcaaagaatttatgccttcctcgctcgccgtgcgcggcgacgacatgacccttgtgctgcgcagcgagcgctttggcaaagcgttttccgcaggcctgaacagcttcattcaggaagcccgtctgctggcgcgctttaaccacccgaacctgctgcatgtcctgcgtttctgggtgcaaaatgacacggcatacatgggtacgctgttttacagcggcaccacgctttcgcgcctgcgtgaagaaaaaccggagctgatcaacgaggcctggatccgccgcacgctgccgatgctgtttggcgccatcaagaccatccacgacgaaggctatctgcaccgtgatatctcgctggataacatccagatccaggataacggcctgccggtactgcttgatttcggctccgcgcgccgcaccatcggtaacctttctgacgaaacggaaaccatgctgcgaccgggttttgcaccgatcgagcagtacaccgacgacaacgaaagcgagcagggaccgtggacggatatttacgccctcggcgccgtgctgcgtaccctgatcgtgggttctccgccgccggtgagcgtggtgcgttctattcaggatacctgcaagccgctggtggaaattatgccgcagggctattccatcccgctgctgcaggccatcgaccgcgcgctggcgctgcacatggaagaccgtccgcagtctatcgacgaattcgccgcgctgatcgagatgccggttgcgggcataaacgatgtgctgacggcgaaaaaaccgggcaccatgctggtaccggtggaagaggaaaagccggcttcagcactcgactggcgtcgttacaaaatcccgggcatggttgccgcaggcgtgctggtgggtgtggtcgccggagcgatgttgttcagcggtggcaaggatgcgccagagcaggctgcgcaggcacccgcagagacgcgtccgacggaaaccgccgcgaacgcgccagacgtgaagccagaaacggctaaggtgagcgagcaggcgacggcgcaacaaacgccaccgcctgtcgaaagccctgttgcgctggtctatatccgtattcaggacggcgaaacgctgaaagtgaacggcgagccaaaagcgctgcgtccggcgaccaacggctatgcatcgctcaagctgcccgccggtgaggtgaagattgaactgcagggcaacgggaaaacgcgcagccagacgctggatattgccaagccgggcacctggctggtgaatccgtag

SEQ ID NO: 165059 - DNA, 804 bp, Enterobacter cloacae
atggaagtgtacgatcttcgaagccaaaggcttcgtccaaaggaattcgaaaagattgtctctcctgtctatgcacggagcgacgtagggcgtgagtttgttgtggtgcgaggcgtttcaaatccatttcacagcattgatggtttaacgttacgacatcgcttcgaatttaatcctaatgccgtttttgatcccctgtatgcgcaaaatcttaataaaatacagcggttaattgattcaggggaggtggtcttaatagatcaccgtcaacggacaaaagccctatatccctttttcatctctgagtcaggggagttgttttgtgttgatgagacgatctacaactcagcttttgtgaattacgtcctcgaacgttaccgaaataatgtcgctctatttggaaaaccagccccaacgcgtgattcattcgttccctctaccaataattacgggccgggttactggaaaactgttgaagatgattatcatggcacaaaaaatgttgtgattatggcgattaatcgactgacgagtatgggggatgagggacgagtatttggatcggacggtaaagattacatgaatacgtcgcgcgataaaattcagcgctggacagcgctacccggagatctggatggagaatcgcgcgtgtttatatctaagaaatcggtcatcagacgatacggagaacaacgatccatttatcagaaataccttgagagtgatgatgcctgggcagtaagtggtaaatcatggcaatggatacctggagtcagagaagaggattatgaatttaaaaagtaa

SEQ ID NO: 165060 - DNA, 414 bp, Enterobacter cloacae
atgttcatttccgggatgagcgcatcactcagatcattatccgttacaagcctaagcaatgcgccgttgtcatttaagatcaccagacaaaatgaatatatcaatttctacaaagctgacgatttcaaactggatgatggaacgagcattacagaaattggtttacgtttaagcaaagataacggcgacatggcgcctttactgaatttttcaccgtcaggtcaatgcataacgcttgataccgttaaaatgcactttccgcaactggtgctcactgactatccgcaaggccgctctgagaatgaagtgaccagttataccgcgccaaaagacagtaatggacaaaaggtgagcttcagtttcaccgtgaaaaaacctgactgtctggattctgtcgtcataagcgccgaataa

SEQ ID NO: 165061 - DNA, 567 bp, Enterobacter cloacae
atgacaattaacgtgaaaaaaaacactccggtatttcttttttctgccctgatgtttacctgtctgagcagcaatgtggttttggctcaggtgatgccttccgttctgacaaaacgggatttttctgtgcagattaaagaccagcctgtcgcattgggcgaaagatggactcctgatattgcccgtaaaattgacgtgccgttggaaggccattttgtcggtgaagttccttttgacggaacaaactataaattctaccagcatcaaaaggctgggttagaaatattcagttccaatctctggtgggataaagcagaaaaaagcgttgacgattatatcgtgtcccagattacgctgactgcctcagatattttaacgccgcgtggcgttcatgtgggttcaacaatcagagagctgaacaatgcgtacggcgatggtcagttcgaaaatgattccggggagaagtggatttcctatgaattgggtaagaaattgctctcttttaaggttatagacagtcaggttgtgaaaataaccatgaattacgaaaatggtacttcagagtga

SEQ ID NO: 165062 - DNA, 447 bp, Enterobacter cloacae; identical to SEQ ID NO: 131585

SEQ ID NO: 165063 - DNA, 159 bp, Enterobacter cloacae
atgcgggtgctggtgtctgaggcggtgaatgggaatggggttgttgggctgttgttttgggattttgtcgggaagcagattgcgttgcctttagtaaaagggaatcatccgggagagggttttgtggagtggcatcggagagaggtgtttaaggggtga

SEQ ID NO: 165064 - DNA, 1095 bp, Enterobacter cloacae; identical to SEQ ID NO: 131758

SEQ ID NO: 165065 - DNA, 396 bp, Enterobacter cloacae; identical to SEQ ID NO: 131757

SEQ ID NO: 165066 - DNA, 387 bp, Enterobacter cloacae
atgcttaaaccggactttcttatcaacggtgagcagacggtagttctggatgccaaatggaagctattagataacagagccggtgacagtctgaagaagtatgaaatgagccaggttgacctgtatcagatgttcgcctatgggcaaaagtaccttcatgggcaaggcaatatgatgctgatttatccccgccatcagtactttgctacaccattgccggtgttccgtttcgacgaagatttatctctatggtgtgtgccctttgaccttgaatctggtgagttggtaaaaggcgagtggcaggattcgttccgttgcttccccggtgatgatccttcaccagtttatgacgaacaacaaaatagccacgaattacttgtgggttag

SEQ ID NO: 165067 - DNA, 1164 bp, Enterobacter cloacae
gtggacaacggctcaatcaccttctttgatattactgcttgtgggttttatcgtttaaagaataaacccgaagagcttgattataaattcggcgatcttatgggggttttggacgatttagaagggtggctcaaggataaaaattttgagcagactctcccatggaataaagaagaacaacctctgcgaacacgagtttacagtcgaggccttgtgagagacggccagactaaagatgcagtaattgttttataccgtgaagtggggaacggtaacggaatacatggtattaaggtcggttctaaagtaagtggtgatagtaaaggaaccattagggcgggaagagaacatggtgaggataaaataatttggggtgaaccctgctattactggattattcctgagttgaataaaatagcatcaatcagattcccccattctttcgctgatacttatcttttcgcacaatacttcattcagcatgtaaataataatagtaagttaggtaaaagaacgaaatctaagcgtacatttgaatcagctaagacccctggtcgttgtgtggatgtctacaatactaagtttcaatataaagatggtaaaaatgagataaactgtatcttcaagtttgtattggaagaaacaaaacttaaagccgctgaggaaaactttgaaaggttaaggcataaaattacacacacattgataaaggatacaacggtaataaaccaaaatgacacaaggcaaccattgttgaagctaacaagtgtagctttagcgtctctggtgggtgaagaaaagcgtaataagcttattggggcacctcctgttttggaacagcctcgtaaaattgaagttaaaattgacggtgcaccatcatcggatgagcttagaaatctcttctcaatgagaggtgaagagtctgaatgggatgtgggttttttactggctgatcgtgctaatccggtttggctcagtagctatgtagccaggactaaacttcctcttcaagattcggatgggtttgagcattattcagcgcgttttttactggatgaaataaacaaaattcgtgatgatttgattagtgaagtaaaatacgctgaggaagcatccattaaagaatctgaagctgcatccacaaaaaagatagcggaaggttga

SEQ ID NO: 165068 - DNA, 537 bp, Enterobacter cloacae
atgacagaaacggaaggtttgataataacagttgcaaaacagcaggcgattaattttgttgctgttgttttgtgctgcgttataagctatttttcgttcaaaagtttttcctataatgatgcaaaagatattttaggtgcgcttataaatatttcagcatctatattcactattgtcggtttatgggttggttttttatatccgaatgcaatgaatagtattgttaaggatgatgtaagttatataaaaaatgagcatgactcaccaagaatagaaaaattagtttatacaataatcacatctgcttgtgttatggctgggattctaattttctttttggttaaggcagtgttttatgcattacctgtttatcaggccaataaagacttgtttaaatacattggtatattcttcatttactttattagctggatgcaattaaaatgcgttatgagcctgattttaagtaatttacattttgttaatcacttacatggacgtttagcaaaagcgaaattagaacactatgatgaataa

SEQ ID NO: 165069 - DNA, 1041 bp, Enterobacter cloacae
atgaaatcctcggcttattacaacgaaattgatccctatgcagctcagtggctgcgtaacttgatcgctagcggtcacattgcacctggcgaagttgatgaaaggagtattgaagatgtcacacctgacgatctgcgaggattcacgcaatgccacttcttcgccggaattggcgtctggtctcattcactgcggctcgccggatggcctgacgataaaccagtctggaccggctcctgcccgtgccagcctttcagcgcggcaggcaaaggagatgggtttgctgacgagcggcacctttggccccacttcttccacctcatcagcgagcgcagacctcagcatgtctttggcgaacaggttgcaagcggtaacgcaaacgcatggttcgaccttgtacaagctgacctggaaggaatgggatacgccttcgggcttgtgccgtttgcggcagcgggcgtcggtgcgccgcacatcagagagcgggcctactgggtggcccacgcctgtagtaggagacatgacgggcggaccgagacctccggacaaaaagcgaggcccggcgccggggatgcaatcagcgaccgcgttgacgggatggcctactccaacaaccgaatcggcgatgagggagaaacgatacgcacagggagggatgccattctcaatggctgcggcgctaaccagttgggtgacgccaacatcacgcgactggaaggactcggcaggaatgacggcgcagcgggacggcaaagagcgactggaccagttgccgcggcaggcgtacacatgcgggcccttgaggttaacggtttttggcgagatgcggactggctcttatgtcgagatggcaaatggcgtccagttgaacccggcacattcccgctggttgatggggctgccgcgcgcctgggacgagtcgagcccggggtggcaagagtggcaagcagcaaccgcgtcggccgactcaaaggctacggtaacgctataaacgcacaggctgccgctgaattcattcgagcttacttggaggtcgcgtga

SEQ ID NO: 165070 - DNA, 228 bp, Enterobacter cloacae
atgaacgtgttatctaacgaaacagtgaggatggtattcaatctcggcattgcttctctcgaaaaagaagaggatttaataataagcaagcaaattattgttgctgcgtttgctgagattattgaatctcgaaaaaattgccagccaactctgtacgagaaacttttggctgatagtaatggcaggataaaatgggagactcctcaagatcttggtaggtctgtgtga

SEQ ID NO: 165071 - DNA, 879 bp, Enterobacter cloacae
atgcagaacgttcatggcttatcgctgattacaacattggttaacctcagactcaggggtaaacctgtatcaatcgggacaggtttcttttacaaaaatgaaaaaggctttatctttttggcaacaaattaccatgtcattacaggtattagtccatcagataaagcttcaaaagccgtacacggtgatgagatcgtaatacagttaagagacaaagaggggaaggcatacgatcaacacatcccgttatttatctctaattccaataattggctcgaacacccaactgatggtgaagcggatattgttttaattcctctcccatctaaacttttggaaaatgctgacttcgcttatatcagcaaagaaactactttaaatgacgtttcattacatccatcttttcctgtagttatgattggttatccacatggatacagagattctgtaaacaatctccccatttggaaaacaggtagcttagcaagcgagccagagtacgattttgatggtaagaaagttattgtcgttgatatttctgctttccctgggatgtctgggtcaccagcgatctatgtgtctcacaacggttatgccaacaagaaaggggacgttttcgtgggggggggtatggctgttcattttttaggcatttatgcaagtatgcaaatgcttaacagtgatctgtacctcgagcaagtacagaatcagtcaagttacaaagtatcacatagcgaatctttacagcttggacatgtctggaaggctcaattattagaggaaattgcagattcttttgatccagagacttactttagacattttaagaggaaggtaataatgccagctgttcagccttcatttataactaaattttaa

SEQ ID NO: 165072 - DNA, 504 bp, Enterobacter cloacae; identical to SEQ ID NO: 99888

SEQ ID NO: 165073 - DNA, 255 bp, Enterobacter cloacae; identical to SEQ ID NO: 99887

SEQ ID NO: 165074 - DNA, 324 bp, Enterobacter cloacae; identical to SEQ ID NO: 99886

SEQ ID NO: 165075 - DNA, 447 bp, Enterobacter cloacae; identical to SEQ ID NO: 99884

SEQ ID NO: 165076 - DNA, 507 bp, Enterobacter cloacae; identical to SEQ ID NO: 99883

SEQ ID NO: 165077 - DNA, 327 bp, Enterobacter cloacae; identical to SEQ ID NO: 99867

SEQ ID NO: 165078 - DNA, 330 bp, Enterobacter cloacae; identical to SEQ ID NO: 99866

SEQ ID NO: 165079 - DNA, 132 bp, Enterobacter cloacae; identical to SEQ ID NO: 99860

SEQ ID NO: 165080 - DNA, 318 bp, Enterobacter cloacae; identical to SEQ ID NO: 99859

SEQ ID NO: 165081 - DNA, 360 bp, Enterobacter cloacae; identical to SEQ ID NO: 99858

SEQ ID NO: 165082 - DNA, 342 bp, Enterobacter cloacae
gtggtcggaacttcattcagactcagaaggcttattgtaggtaatactgtatttcggtttcttttgcagagacaattttatgtgttcctgacgtggggagtgatcaccttcttacaggctgttctctttgcattagccggtgaatacaggtattccctgctttgcctttttgtgtctgctcttactcctggtctggccccgaacgacagctttgccgaacccttaaagagccaaaacgcggcgatacgcgccctggctacttatggaagtcgccattacaggaaatgtcgtttactttgcctgctggcagtcatattgatgatgatgagcgtcataaaataa

SEQ ID NO: 165083 - DNA, 507 bp, Enterobacter cloacae; identical to SEQ ID NO: 99838

SEQ ID NO: 165084 - DNA, 894 bp, Enterobacter cloacae; identical to SEQ ID NO: 99832

SEQ ID NO: 165085 - DNA, 405 bp, Enterobacter cloacae; identical to SEQ ID NO: 99830

SEQ ID NO: 165086 - DNA, 174 bp, Enterobacter cloacae; identical to SEQ ID NO: 99893

SEQ ID NO: 165087 - DNA, 189 bp, Enterobacter cloacae
atgaaaatgggcgaacatatggagccagttattgagctcctcgaagaactgaacggtaacgatacagacgcaaagctaaaactccttgctccggttatctctgaatacatgcttaacgctgatgtaacgggctttgaagtatctgctggagtaatgaaagtgtccgttgatatcagtgtggatggctaa

SEQ ID NO: 165088 - DNA, 594 bp, Enterobacter cloacae
atgactaatacagcaagtcgtgtttcacgaattctttttaaagagattgtggatggcgatgtaagaaaaatacatgcagattccaatgatagcgacactggtggtggagcccgcgatttccgttttgggtcatactctgaattagaacatatttttcattctatgtttccatctccaatacaggattatcgcagaagaagtggtgtgacatctttagtcactatttattctggatatttctactggcaagatcctgtgacaggtcaaactttaagacagatatcttatttcgaaccaccgaccgatgctcgtccacaagagggcagaattacaaaaattcacgagcatccttgcttatcaactgcccttatgccgaactccagtacaaccaacagagtgtttttgttattaacacaaatggatgatggtacggtttggcccagctatgttgaagaacgaacattgaggtcagttggtctatgggctaatgaagtaactacaaaaatgcttaactgcattgattctccccgtagagcaaatcaatctgttattggttattatgattttacaactcatgatagatattgtaattga

SEQ ID NO: 165089 - DNA, 1032 bp, Enterobacter cloacae
ttggcgaatattagaccagactttagtattccagaagttaaaaacattactgaatggcgactatttttatcattatacgattcaggcataaagtgggacgataaacaatcaggttggaatgttaaatttagtcgtgaagttgatatgacgaaagataaaataaatttccaaaaaacgtttacacccaatcatatacctgtaatcgaaggaagaatggtttcacaatatcgttttggctgtaaaggctatatatcaggatctggaagaagtgctctttgggaaagttaccccattggtaattcattaattagcccacaattctggattgctaaaagtaagctgtcttcattaacgcatgaaagaattaaatcgaaaagagttggattttgtgatatttcaggccaaactaatgaaagaaccttcatggccgctttaataccagaaaatgtagtttgtggtaataaagtaccaaccattctctttgataatgataacaataatgaatgtttatatgtttggttagccataacaaatagctttgtatttgactgggcaatacgcagaatactgaccactacggtgaactattttttgttacaaagcattcctttccctcgtataattaggggaggcttaccatggcatagtcttcttgaaaaagcacaagaaatctcatcgttagataatgttggatattcatatgaaaacttgttgagaatatcttacttaagagcagaaatagatgcagaaatagctattgcatatgggctttgtattgaagatatggaagtcattatgtctgattttcctttattagatagaggtcaaacgccactaaaaggcgaaaaaaaatctacgataactcgtgatttgatattatcaacattagcgagaaaacttggatttaattcaacaacatggcaggccagaaaggatgaagcaacatcgagtggtgctgttgcttatatatcttctcaggccatttttaaagaaggtagtatcgttactaaaaaggttgtcaataatgactaa

SEQ ID NO: 165090 - DNA, 447 bp, Enterobacter cloacae; identical to SEQ ID NO: 131585

SEQ ID NO: 165091 - DNA, 300 bp, Enterobacter cloacae
atggcagcacctcgcccattagagcatgatctgacaaaagaagcagaggatttgcttgcaagattctcaggcgagtatgttatcaagtattctttgaataggtttgaggctagaatgcttcttttagaagctgtatcctcaagatttggtgggttcgattatttagaatatcaaaatgaatttaataaatcatgtgcgaaacatattttagctgatatactgaataagtcagaaaaattagtgagcctgataactactattccgatccccccacattattctaagtattttatcccgtga

SEQ ID NO: 165092 - DNA, 195 bp, Enterobacter cloacae
atgagtaaatatcaggttggagataaggttaggcttaagtctggtggcccaattatgacagtgcaccaaattggagtgcatcacccaccaatgtatcgcggcaatcatcgctgccaatggtttgcgggcaagaaactcgaagaaggttacttcccggacgactcattagaggaagtcgaggatgacgatcaataa

SEQ ID NO: 165093 - DNA, 201 bp, Enterobacter cloacae
atgaccaataacaatggcggccaggcatttccggtcgcaggtagtgagcaaaattatcctatcgaagggatgacgctgcgtgacttcttcgcggcaaaggctctacaggcaattgccgacccatgccatagtccggaattgttcgctaaccgcgcgtatgaaatagcagacgcaatgctccgcgcccgggaggcatcatga

SEQ ID NO: 165094 - DNA, 396 bp, Enterobacter cloacae
gtgaaaaaatgggaaattaatcaggctgccgggcgttttatccgctcgcatgaggaggtgcagcgaatcagcatccgtaaccgtctgaatgattttatgcaggcgcacggcgcggagctggccgccgccctctccccggagctgatgaattatcccaggcaacatcccgccgttcagcgctgcgccatgcagcactcactcgactgtctgcgtgaggcgctacaggtctggctggccgccggtgagaaaattaattattcggcacaggataatgacattttaacggccatcggattcagacctgacgcggcttcgcgcgatgataatcgtgaaaaattcacgcctgcacagaacctgaattgcacccgccgccgtacagaactggccgtgcagtag

SEQ ID NO: 165095 - DNA, 183 bp, Enterobacter cloacae
atgtgctcagtaactaacatccagcaagtcaaatggcagcgttacgcagacatggagaagctcaaggatattgatgcgcagattgccgatgcggaacgagctgtgagcttattggcagagcgtcgccgtgagctggtaaatcgcttggggctcaataagccagacggtccggaggctgcatga

SEQ ID NO: 165096 - DNA, 657 bp, Enterobacter cloacae
atgaagtgcaagattgaagattgcgatcgggaatgtagatacatggagcagcaggtatgtcaaaagcattatttcaggatgatgcgatatgggacatatgagctcacaaagcatgggaaaggaaagggattctctactaacgcccagggatacgtgatgattaaagagccactacatccactggcaatgaaaaatggatgtgtgtacgaacacagaaaggttatgtatgcaaagtacggagagcagttaccaccatgcgaattatgcggaaaaactgttacctgggataatgcgcatattgaccacaaggatgatcgagtcaacaacaacgaaccggataatctcagagttctgtgcaatgcctgcaatgtgatgcgatcgcgtattcacatcccatcccacaccagaaaaagcagccacgccatcacgttcaatggggaaaccaaaaccccagcagaatggtcgcgcgacccaagagtaagcatcgccggaaatacaattctgtttaggctcaggaaaggcatgagcgtagaacaggcgctattcggtgaaaagcttacacatcgagggaagaaggcaaatggctaccagccgaaatacggcgagtatcagcagaagcttaaagacctgcgtgaaagcagaagtgaggcagcatga

SEQ ID NO: 165097 - DNA, 183 bp, Enterobacter cloacae
atgctcacaacctcagaagcccaatcctacgagcagcagagcatacgtcgaactctgtgcgcaggctgcacgaaagagctaacgccagaggaaacctacgcatgctctgagtgcgtggatgaatggctgatttatcgtgatccgaacggagatatctcagatggcaatataccggagcagtaa

SEQ ID NO: 165098 - DNA, 228 bp, Enterobacter cloacae
atgagcagcttagaagatgactacgcagaccgactcgctgaccttctcgaagatatggaaggtgacggcgttgactctgtcggaatgattatgaattgggtagccggatatgttcagggaaagatggaaggcaatggcgcggaagcctacatgtaccagtttgaagatgccgacatgattatccagttacaggaaccggaagaaaccacagcagcgaggttgcattga

SEQ ID NO: 165099 - DNA, 174 bp, Enterobacter cloacae
atgacttacatagcactggcaatttacatgtgggtggcagggattgtcacccagtgggcgcatgacggaatgggcaggaaagaaaccgtatcgcagtacataaggtcaataactatcggcatcacatggccttattgggtactgccgatttggtggaggatgctgatgaaatga

SEQ ID NO: 165100 - DNA, 186 bp, Enterobacter cloacae
atgagctggtatttgtttacatacaaagattggatatcgcacaacgcatataccaataacaaaaaaccattctacggaagcaaccctgaatcagctcgacaggcagctatttcgtcttgcactggaagattcgaattagaagatatcaagcttatcgaggtaagtgatgaggaaactaacgtttga

SEQ ID NO: 165101 - DNA, 174 bp, Enterobacter cloacae
atgaaagtaagaatgattgaaaactggagcgagcgagatgaccacccaaggaaagatgatgagctatgggtagtggataaggtttatggagatgactctgagcttgagcgatattgctgccgatggggaaatgaaatcatcgacgtttatccgtacgaatgccaagagctttaa

SEQ ID NO: 165102 - DNA, 453 bp, Enterobacter cloacae
atgaacacacgagacaaaatactcaaccacctagaaagcaacaaaccaacatctgcaagagaatttcaccagcttaccggcgcaccaaaatcccgcatcactcaactactccgtgaactcacagaatcaggccagcttgaaatccacagtgtccataacggcatcaagcgttataggctgactgagcttcatgccaaccgtcgccaggcaattctggactggctggagagcggaagcgaaggcacgtcatcggttatctcagaagaaaccggagtagacctgcaaatgaccgcgcagattctggcatcgctaagcaaacagggtgaggtttatcgtgagtggttaggctgcgagaaggtgtggctgtatcgcaagaatgcaccgtttacgtttggcttagccaacccactgactgcatttatcaaccagagactgagagaggtgcgaacatga

SEQ ID NO: 165103 - DNA, 282 bp, Enterobacter cloacae
atgaatggaattgcaactcaaagcaagaaggcggctcgtatcgaatcgaccttgctaaacaagctggctctgatgggtcagaagacattcgctaaagccatgggcattcctgaataccaggtaagccggtggaagaacggtttcttctctcaggtgagcatgatgctggcggttctggaatacggaatcgaagacgaggaaatggctgagctgacaaagcggctggctagttatctcacaaaagaaaaacgtccagctgttggtagcagtctggacgcttaa

SEQ ID NO: 165104 - DNA, 186 bp, Enterobacter cloacae
atgttcaagaaggaagttattgaccacttcggaacccagcgagctgttgctaaggctttaggcattagtgatgcagcggtttctcagtggaaggaagtgatcccagagaaagacgcctatcgactagaagtcgttacagctggagccctgaagtaccaagaaaacgcctatcgccaggcagcttaa

SEQ ID NO: 165105 - DNA, 255 bp, Enterobacter cloacae
atgacctcgccagccggattaagtatccctgagggaatggtgattctcgtcgatccagaagttgagccgcgaaatggaaagctggttgtcgcaaaacttgaaggcgagaacgaagccaccttcaaaaagctcgtaattgacgcgggtagaaagttcctcaagcctctcaacccccagtacccaatgatggaagttgacggaaactgtaagataatcggcgtagtagtagacgccaagatagcaaaccttccttaa

SEQ ID NO: 165106 - DNA, 141 bp, Enterobacter cloacae
atggggtttggcattgggttgaaggttgcgatcactgcaatggctctcctcaggattgggcgtattgcagatgcgaaaagcacgatgtttgtgtcgattgcggcattgatagagagcacgcatcaacttcacaaaccatag

SEQ ID NO: 165107 - DNA, 135 bp, Enterobacter cloacae
atgaacgcagttgaatttacaaaatggatggcagagcagaatatcaccggcgctgatgaaaaggctgtgtactacatggctctgctatggattcacaaagcaaaagaggctgcaaaggctctgggggaggagtga

SEQ ID NO: 165108 - DNA, 201 bp, Enterobacter cloacae
atgggacgtaaatttaaagtgtggttggattctggtgctaaccagcactcgaattatgagcaggaagtggatattgaggaagacttaaacattacatctgatgaatgggatgcgctttcagaaactgagaaggacgaggtcatgagagacgtggcgtgggacagaatggattggggtttcgttgaaatagaaagcgaatag

SEQ ID NO: 165109 - DNA, 975 bp, Enterobacter cloacae
atgagtaacgcattacaaataagcattattaaaaccgacgctggtaaatgcttcataacagattgctctgctaaggatggttaccattataactaccatcaatcaagaatagccgatctgtactttgacggtgaaaaggccagcaagacgtttcacagaaactggcttgagttaaaaggttatccagagaagattgagcgtatgatttctggcgaaaaaacgaatctccgttacgagttaaaagaccctgaccttgagagcgtgaagtatcctcttacccttgcctatgacgatagagattcaattgatgaagaaattaggtcatcgctctattcattctgttttgatgttgttccagattacttcgtagaagttgacgctgatttagtactgatgtgtgaagtagaaaacttccgtgaggcaccagacttcaactatccagcggttaggcgcgttcagtttagtgaagagccatacagaataacaaacatcaatatagctcactcgctcgtagattgcctgataattccagagccgcttagagccagtagcccatgcgaaatttcatcaaaggaaatgtatgaccttgtccggcaacatattaaggataatatcaaaacatcgctagctcgcattacaagtgattatgacttctgctttacagtgaagaaaatcattccgctacttgagcctcatacatattcatatcaggacatttttgccagaaccaaaaagcaacgagcaaagcttcacttcaaaactgcgacatctaaagaaattgaaattttccagatgacgcatgagcaaagcaactacaaaggttacacagccattaaaggctttaaggccagcaatgaatgggagcttaaggagatgattgataatttcctttcgacgctcatggataccattcacgcaccaatagagcagtgttcatgctgtggcggaacaggctacatgcaagacatcaaatag

SEQ ID NO: 165110 - DNA, 171 bp, Enterobacter cloacae
atgcagacattaaatctcgcaggggctaccccgatgggtagcttcaacgcaatcacgtccattcaacactcacgccgcaatatcctgaccggtgcagacttcaagcagcctcgcgttaagagcttgctggagcgtctggttgagtttctgaaccaaaaggtgcagccatga

SEQ ID NO: 165111 - DNA, 165 bp, Enterobacter cloacae
atgaacaaaaaaagaattattgagcagcaagctttttggatggctgaagactggaagcctctgcgtgaaataaagaaattagcaaagcaatgcgaaacgcgacttcctgctcgcctgaaggtgaagctggctacgaaggtcgctaatgacatggggattttctaa

SEQ ID NO: 165112 - DNA, 171 bp, Enterobacter cloacae
atgcagccgacaacaacaatcgaagagagtcagagggtgcgccgtgtaacgacgatgcaggctctgctgtggcgttacaggggtgaccgagagcgcatgcgtatgtatctcaacctgtcgcgcttagaagtgctaaatcaacgttatttcctgggcggatgcccgttctga

SEQ ID NO: 165113 - DNA, 633 bp, Enterobacter cloacae
atgagcattcaattttatgagcgacttgctgatatacaggcgcacttaaacgcgccgaaaaatcagtacaactcatttggtaaatacaaataccgcagttgcgaagatattctggaaggtgttaagccacttctgaaaggacttttcctgtcaattagcgatgaaattgtgctgattggcgatcgctattatgtaaaagccacggcaaccatcactgacggtgaaaatagccactcagcgagcgctatggcgagagaagaagaaaacaagaagggaatggatgctgcgcaggtaacgggagccacaagctcgtatgcgcgtaaatactgccttaacgggttattcggtatcgatgatgccaaagacgctgacactgacgaacacaaacagcagcaaagtgcacagcagcctgcaaagcaacaacagtcagcaaatcatgccaaaccgcatgattctcgctctcctcagcagttcttgactgacttctcggcatacgcacttaaggcgaccctgccagagcttgaagaagcatggaaggctgtagacaagaagctttctggcacagagcagcatgacaaggccaagtcagtttatttagatcgcaaatcagaaatagaaggggtagcagcataa

SEQ ID NO: 165114 - DNA, 378 bp, Enterobacter cloacae
atgagcattaacgtaatcgtcgcatccggaaacataggaaaggatgcagagcagcgatggacgcaaaaccagaagtgtatcgcatcattctctcttccagttaaacagggatttggggagagagaaaaaacctcatgggtaaagtgcatgctgttcggtgcaaaggcagaaaagcttccgcagtatctgactaaggggataaaagttacggtgactggtgagtttgtcatggaggaatggacagaccagaacggcggtaaacgatctcagccagtaatcatcgtcaatgacattgattttggctcttctggtaataaacaagccacacaacagcattccgagccagagccagattacgacccaagcattccattctga

SEQ ID NO: 165115 - DNA, 561 bp, Enterobacter cloacae
gtgaaactgattgatattttggtgcgagatttacctgggcttggtggatggccgaaagataaaacagtagcttcacatggaccaaataattgcgtcatgtttcatgagttgggagtgacgccgtttgtgtatgcaggactcaagtttgagggcaatgacatcgtcacaaaagaagaatacgaagctgcaattgcagccagcaagccagaatggaatggcgagggtgtgcctccggtaggaactgaatgcgaatattcactaaacgctggtcgcacatggttcaaatgtaaaattgactatgtactaggcacgcaaggtttaatcatgcttgctgacgtgtatgaaggcggtcaatttgtgggctttgcagagtatgatgggaagttgaaattccgccctatccgctcagaagcagataagaagcgtgatgaggccgccaaaggtcttatcgagtatctagacacagaggcggatatagacaacgtgttttccataaaggatgtgatcggtttttacgacgccatagcagccggaaagattccacacatccgcatcgactag

SEQ ID NO: 165116 - DNA, 576 bp, Enterobacter cloacae
gtgattctggccgtcaataacaacccgatgcgcttcaccgaccgcagcggcggtgtgtcacgtcgccgggtgattattcatttcccggagcagattgccccggaggaacgcgacccgcagctcagggataaaattgcgcgcgagctggccgttatcgtgcgccagcttatgcagaaattcagagacccgatgaccgcccgcgcactgctccagtcgcagcagaactccgacgaggcactcagcatcaagcgcgatgctgacccgacgtttgatttttgcggttatctggaaatgctgccgcagaccaacgggatgtttatgggtaatgccagcatcatcccgcgtaattatcgtaaatatctttatcacgcgtatctggcctatatggaggctaacgggtacaggaacgtgctcagcctgaaaatgttcgggctggggctgcccatgatgctgaaagagtacggcctgaattatgaaaagcggcacacaaagcaggggatacagaccaacctgtcgctgaaagaggaaagctacggcgactggctgccgaaatgcgatgaacccgcagttacataa

SEQ ID NO: 165117 - DNA, 1227 bp, Enterobacter cloacae
atgaagctgactgctcgtcaggttgaaactgcgaaacccaaagagaagccctacaaactggccgatggtggtgggctttacctgctggttaatcccaacggtaaaagatactggcgtctcaaataccgttcgttaggtaaagagaagctgctcgctattggcgtttatcccgatgtttctttagctgaggcccgaagtaagcgtgaggatgctaaaagaacattagcggctggcaacgatccctctcttgaacgaaaaattgagaaacttagtcgtcaacaagacgctgaaaactcgtttgaggctatcacacgggagtggtatcagcgtcgctatgaccgctggtctgtctcctaccgcgaagaaatgctgagaacctttgagaaagatgtatttccttatatcggtcacaggccaatcaaagatatcaagccgatggagttgcttgcagttctttcaaagatagaagcacgaggggcaacagagaaagtccgcaaggttcgtcagcgttgtggagaggtctggaagtatgccgttgtgactgggagggccgagtacaatccagcacctgatctagccagcgccgtgagtcctcatgagaaagagcactatgcttttttaacccaggatgaattgcctgagtttcttcggactctgaacgcctatgccggtagtgtgcttgttaagattgcgatgcaattgctcattttaacaggagtaaggccaggggagttgaggcaagcggagtggcaggagtttgattttgagaaaaaggtttggaatgtaccagcggaacgtatgaaaatgcgccgccctcatcttgttccattatcaagccaggcaattgacctgcttaatcaacttaaacccataacgggagcaggagcgttattattcccaggacgtaataatcctaagaaaccgatgagcgatatggcattgactgtgttggtcaggcgtatcggctatgccgggcgcgttacagggcatggattccgccacacgatgagtaccattttgcatgagcagggattcaactcggcctggattgagttacagctggctcacgtcgataagaactcaattcgtgggacgtataaccatgctcaatatttggaaggtcggcgggagatgatgcagtggtatggagatttcatcggtcaagcaggcaaatccggatcatcgctagcttatgcagctattagcttgactgctgaattagagtga

SEQ ID NO: 165118 - DNA, 324 bp, Enterobacter cloacae
atgaaatttctacctacaacaaatatgcgggcggcgaagccatgcctgtcgcccgtgactatctggcaaatgctacttagtcgtctgctggaacagcattatggcctgacactaaacgatacacctttctgtgatgaaaccgtcatacaggaacatatcgatgccggtatcactctcgctaatgccattaactttctagtcgaaaagtacgaactggttcgtatcgatcgcagagggtttagctggcaagaacaaacgccatatctcacgtttattgatatcatgagggcccgtcgcgatctgggtttaatgaatcgtaattag

SEQ ID NO: 165119 - DNA, 357 bp, Enterobacter cloacae
atgaacaatcactcagaatccggtgccataccggagaatcccccctgccagcagtgggggctaaagagtacgatcacaccctgttttggagcacgtctggtgcaggaaggcgaccgcctgcattttctcgctgaccgcgccgggtttaacggtgctttcagcgacgagcatgcattgcgcctcgaccaggcctttccgttgatactcaagcaactggagctgatactcaccagcggagaactctccccccgccatcagcactgtgtcaccctctatcacaacgaactcacctgtgaagccgatacgcttggtagttgtggctacgtatacatcgccatttatcccactcaacgttaa

SEQ ID NO: 165120 - DNA, 471 bp, Enterobacter cloacae
atgaaacgttacttatctgtcttgttcgccgtactggcgttcactggcgtcgcacatgcgatccccaatatgtgggccagcggttttggtatgggggtgaccgaatatagcattaccagtccggagaaggtggtgtttaatctgaactgtactggcaatccggatgcgcagaatattctgcagcacagtgttgatctcaccctgcctgatggaacatcagtcagttctcatgacgacgggacggaaataacggtcgtcatggataacagtcagtatccgctaccatcatttctcggctggcgaaacggtgataatgcctgggtgtcatttattgacgccctgagccaggctgcgaattttgaggtttacgtcaacgataaaaaagtcggcaccttcagtccggcgctaaagaatacgcaaaaagaactgtctgacctcagtgagtgccgcaccacacactacaacgattaa

SEQ ID NO: 165121 - DNA, 459 bp, Enterobacter cloacae
atgaaattactcaccacagccttaatggctattgccgttgggtttaacatcaaccatgtgcaggctgatgtcttcagtggcttccaggggagtatcgatggcgggatccctgcctacactcgcgatatcactgcgaacaacaaaccctactggtgtactcagcgtaagttgctgaagaagagttgttccgttgtctccatctcttccaataagcgggttgctattgttactcgctacactggtagtaaggcctgcccaggtggcttctacggcgtcgtagaccgtgctaacggtgatgcgatggatgtctttccaaccaaaggtcaactgaacatcgaccaggtctgttctaccgattttaaagtgggttttattaaacccgctaaccgtaacaccctggcgtctgttgctttgtactacaaaggcaaaatcgtcgagatactcgactattcagaataa

SEQ ID NO: 165122 - DNA, 708 bp, Enterobacter cloacae
atgtctcaggctgaacgtcgccatgaccggcttgcggtcagactgtcgatgattattggtcgtctggtggcgggtgaaacgctggatatgtgcaaactggccgccgagtttggtgtgtcggtccgcaccctgcgccgcgatttccgcgaacgactgatgtatctggacctcgagtatcgtcagggccggtgccgtctgctgtccggcagtcgccagagggaactggtagtaatgacttttgcccgccagtcaggcatcgaagcgctgtttccggaactggatggtcatcttgtcagttcacttcttggtggttcgggcgaatccccctgtctcatctggcaggggagtgcttctccggctgtcaccgatagtggagtctttacccggctggtgaatgccgtccaggaatgcaggaaagtgaccctgcgatgcaacggatgttgctatacagatgtcgctccctatcgactggttctgtatgagggtggatggtatctgacaggaacgcatcagactcgcatcatcgcgctgccactggcgaatattcgggcagtcacttcccatcccgccagttttactcctgatgccaatatgcgggacatcctgtctcgctccgaatttttacaagcgctacctcattttcatgtttttcattcactgctctgtgacggcagttacgggcaacttatccataaggaacaggtatga

SEQ ID NO: 165123 - DNA, 777 bp, Enterobacter cloacae
atgatcctgagagagcttaataatgaatttaaaagcacccacgactacaataatttcgtacgggaaatgaaaaatgggttaaaatccagcataattccggaggcgaattttgaatggataaaggactacagctccgcttattttgcatggaatgtcctttcaaccatgggccctcaggaagttaactcattggaggttgattttaaccgcaatctgaaacctctcattaagcaaaatctgatccccatcattccggaaaaccaaaagaaagcactatccgcaatatatgattgttttgataactgggatgtgaatttactctttaagaccaaaacactctcttccttaaaaaatatctggattcagcgaaaccgggagttaccagaaccatttaaatggattgaccttaaaaatcttaagcaatgcgaatgggcttttaaatatgttatggagcatatcaaacccgattacatgccttcattcatgactgaaatcagacaggaacaggtgattacatttctcactgctgtactgtattcctggcctgcccaccctgacacccggcgtttgatgattcagcggatgaaaaaaacatataatcaaaatgtattccgtgaaaatattacaggtaaaaaagtgattaacacgtacgtccagaaggatattaaagaaaagctcgatatgctggcaaagaaaaacggtcgaaaaattaacgaagagctggaagtaatcattatgaatgcctggcatgcagccagatatgcagaagataaataa

SEQ ID NO: 165124 - DNA, 177 bp, Enterobacter cloacae
atgcgtatgttttacgtagtcaaatacgttgattttatcgtcataatttacgtattaaaaaatgtagtgaaagtactgctatacagaaggtgtaaaggtacatttttactggatctgaatgtaaaacaacaggatatcttttcttctttactcccggaaggtaatcgtattcgttga

SEQ ID NO: 165125 - DNA, 186 bp, Enterobacter cloacae
gtgaccgtagcgccacggtgtcaaatgaaggggttactgctaccgtggcgattaatgtccaaggcatatggggcaaaagaagaatatgaggtggtcattaacatgtatgtctcaaaatattccacgggactggttgacctgcgaaggtcaaccttcctcgctttttttacgtatcagtccggttag

SEQ ID NO: 165126 - DNA, 207 bp, Enterobacter cloacae
atgagtacccgcccctctcttctggaagaccagtttgttgacatggcatttattacgagtctgaccgggctcacggataaatggtactacaggcttattaaagatggcctgttcccgaagcctgtgaaactggggcgaagctcccgctggctaaaaagcgaagttgaaaactggcttcaggaacgtattaaccagtcccgtaaataa

SEQ ID NO: 165127 - DNA, 594 bp, Enterobacter cloacae
atgaaagactataaaccgcgttacgaagaactgaataaatattaccagacctggctgacgggttatacccggctggcggtatgccagggcatgtgccatcagaatatctaccaccatcataccctgacggtcgggagctttaattttccgggcgaaaacgaggtgattgcgattgttcccaggtgtcttcaccggattatttatggcagagccgcagccccactgacggttaatgatgacctgagcgtcagtttatttactcaggagcatctgctggcacatcatcccatgctggaagggattttgctgtctgagtgcgtgcgattaaaacagcgtcctctggcaaacaagctcatcagtttgttctgccagttcagcggtagcgagttgcgtctgaagctggtctggctgtgctggtacgatttgatgctggggaacagtctggatgactggaatgacaatctcagattcaaaaaaggccacgaaatggaaatctggatcaataaccggcaggaagaaaaccctgcgctgactcgtctgatggacgagtacgtctgctttgcgtggcgaacgacagctgaaccactgagttag

SEQ ID NO: 165128 - DNA, 570 bp, Enterobacter cloacae
atgcaaaacaatcaacgatgggagccagactggttcctgagagcactcctgaataaccatatagacaaaatggttgaacgctattcctgcctgcgtgctttacgcatcgatctattctaccaggatcataccgctaagtttttcttgcaggatcaccagcagctcgaatgggatgtcagaaaactgatgaaccttatgatgcaactcgaagcagttgtcggttttttctgggttatcgaatggaccgaagaccatcactatcattcccacgtcgtgttctggctggatggtagtaaaactcagaatacctatccctgggcgcagcaggccggtttgtactggagcgatatcactgaccgggaaggctggtatcaccgatgtgagtttaaagagcattacgcggccaatatcaacattccggtacgctacagcgaccaagacagtatcgacaacatccgtcaggtactggcgtatctgaccaaaatccagcagaagcatggcctgccgctctacggctgcaacgaagtaccaccgcgcccactgacaggacgaccacgacgcagtctctga

SEQ ID NO: 165129 - DNA, 399 bp, Enterobacter cloacae
atgtacgcaaaatccttcaaggcgcttgacggtaatggtcgtctgattggtgcacgtaccgcgcagaccgccccttatgatcgctatacatgccacctctgcggcagcacgctgcaataccatccagaatacgacacggagcgcccatggtttgaacatatcagccacaacatgacggaaaatggacagcaacactgcccttacgcaaagcctgacaaggatgagactagattggtacatcgtttgcgaatatttgtgcctaacgtcacccctatagtgtttagtgacagctggcattgttcgctatgtgattcagattatcatggggaacgttactgccttagctgccaaacagggcgttttagcctcaagctgagagcagaatcatgctatgtgtga

SEQ ID NO: 165130 - DNA, 909 bp, Enterobacter cloacae
atgagaactttatctaagcctaaaaatattgattctattaagaatggtattgatatatcttcagcagttcgcacattgctttcatttgatgagccagaaggtatttcatctttacgtaaagatgaagctagcctcatggctgaactaattaagtatgattacgagatgaagcaaaatggttatttaaaccatgactctgtaaggaactttattaagcataagaccgctttggaatggatttattctaggccaagcaaaaagagaaagactgctttcattgatgccattcgtcaggcttatgccgatgagggtattttatgcccatattgcggggtatcaccttgtagaacgttggatcactactatagtaaagcattattgccacagttttcttttttgccagaaaatttaataccgtgttgtggtgattgtaatagagataagggatcgaaaaaagcttttagtaaatggagacgattttacaaccctttctatgatgattattctgtttttgaaagtgatgagccgttattgattatcatttttaaagagaaccctcatcctaatgtagatatgaattatataataacagctaaccataacctcccctatttgacaagaaagcatattaactatcatattaacgcggcaaatatagcaaggggacattatgaatcaatatctaattcattctggagagtggcgcaagatttaataaattatcggaaactattgagtagccggagtatttccgagcagatttacgactctcttctgaatatgcatattaagagaaatgataacctatcatatgattgggaatttataattagatattctttagtgaagatacaagttaactcatggatttataggagtaattcaccaaaacttgatttgggtaactaa

SEQ ID NO: 165131 - DNA, 1656 bp, Enterobacter cloacae
atgataactgtaaaagatgttggctttagtgctgggagagattttaaatgctcgttgagtattcgtggggtaaaacgtataaataaaaactttaaaggtaaaaaaatatttattgctgatgcagttatttcagctttaactcaagaggataattttggttatcatctagatgacgacgaaaaagttcctctgaggattatttttatcggaaaaatagataaagaaattgatcttttagaactgcttgaagacagtggtggaatgtcgctgtatagaatcaaaaaagaatttaagtttgactatgtgacccaagtttctgaagacgcatacagatatataaataaaaatctgagtggtgaggatgcgttattacttctaaaatcgttaaacgacatgggagtttatcttaatatatataagtcgcgctcatttgcgaacaaatatctacatgacagtattatcaatttacttcttgataatacattcagtacatatgcattccaacatgggtataagcatattatgaataatgaaggggttatatatgaaataatgcggccgcaaaatctcatatattctgatgaaattaatggtaaggttagttttcaatttactaatagcgttgatattaacatcccatttcatgttctcattggtaaaaatggaagtgggaaaacacatgttttatgtaatttaataaaagataaggtctttggtcggtatgttcgcggctctgatgaaactgtttatagtagattgattgtggtttcgaatactattaatgataagtgttatagaccatcagcgatttctcgcgataagagtaggcttaataattatcattttatctcattaacatctgaaaaatacttcaataaattcttccctcgaggaagtaaattaacattgctatctttagttgagagggtcgtcaaaagagatattactaaagagggtttttttagacaaagtgagttattggattctgtaattaaaaaaataataccagattttactttttctataaaaagcaaccttaatacatatcactatgatagtttctccgaattaataagacgtgagaggacaactggtttttctgcaaatgttgatcttctaacgggagttgaggttgaatattatttgcctgacgctgagatcgttttttataaggatggttctccttttaactttagctcaggccagttatcatttttaattggtatgttctcgattatatcaacaattgagaataatagctttgttattatagaagagccagaaaactatttgcatccaagccttttaactcattttattaattctgttactcatatccttagggatactaattctattgctttaatttcaacacactctcctctcgtgcttagggaaacaccttcagaccaaataactattctacatcgaagtaatggtaaaacatactacaaacaaacaaatattgaaactttcggtgctgatacccatcagattatgatagatgtatttggtgatttatactcgaatgcaatttttagggaagaagttaaacggatggcggatagttattctattcaacaaataatagataaattctctaaattttcttctgatactctgaataagattctaatggagaaaaaaggcaaatga

SEQ ID NO: 165132 - DNA, 1776 bp, Enterobacter cloacae
atgtcaattcttataagttctgttaggatttcaggttttagaggtataaaggaaattgaggttgagctaggacgtattgccgttttgttaggtacaaacaatgcggggaaaacatccttcctaaaatcgttgcaactagctttaggtgattaccaacgttactttagtgatgaagatcttcatatagatagttctgggttaaaagttaatgaagttatcgttgacttaaaaataatacctacggatgaacattataataaaacagaagagtttgacgaaaaatggattgatgttttcggtgataatattgcagtagatgcaaatggacatgagtttgtggctattcgtacaaaagttcagccagatgagataaaaggtgggtttaatacacaacgttattatttgaatgaatggggggagtttgagggatggaaagagattgttgtcaacgagagaagaaaggtaagaacaaaagttgatgcaatcccctatatttgtattgaggctcagagggatatacatcatgagcttaaagataaaagctcatatatagggaaggtcttatcatatattaaatatgaagatgaagatgttactgcacttgaagaaatgataagttcaataaatgaaaccgcagtgagtagaagtgagccgcttcaaagcttaaaaaattcacttcaagggttaaaccaatcatttctaggatcaagccacacagaaataactcctttccctaaaaaaatccgagatctatcaaagcaatttacagtacatttcggagatgaagaaaaccattcattttcaatggaatatcatggcactgggacgagaagttgggcttcaatgcttacagttcaatcgtttttaagctttatgcatgaacggcatgagctcgaaaataaggcgctacatccaattgttggagctgaagagccagaagcgcatctacatcccaatgcacaaagaaccttgtttaaacagttatcatcatctcagggacaaattatactaagtactcattcaccatacctgagcgcaatggctgagatagaagatataagatcattcataaagaaaggtgatggagtaacagtaaattgtctgaagaaaagaattgaacatgatgaaaaaaatgcattaaaaagggagataatgttaacccgtggtgagttgcttttctctcgagccttaattttatgtgagggtgttacagaagaacaattaataccatccatgtttgaattgtatttcggtaggacgatgttcagtgttggagttaactgtgtaagtgtcagtggtaaaaattatccaccattcattaaacttgcaagtaatttaggtatccctgtctgtattattagtgataatgatggtgatactcatggtgagataaaccgtcaggtagcacgtttagttcgtgaagatggcctcgtattgaatcctgattgtttctccttagagttcctcaaagaaacaaatgatattgaagctgagttatacaacgagttgaatattcgtgaagaaataattgaatcattagtgttaagtgaaaccaaagctagtcctaatgaacggtatcgagatgccaagaaaagagaaatagaggctttacaagatggtgctataattgaaaaaatgcgtgactcaaaagctagttatgcagggtatttaggggtgattctagcacagaatgcaaatggaaagagaattgaggagttacttccggaatctgttattattgcatttaataaagttaggggatggcttgagctatga

SEQ ID NO: 165133 - DNA, 1899 bp, Enterobacter cloacae
atgattgataatttatcacaatctcaaattgaagttgttaaagctcctatgggaggggctatacaagttcttgcatctgcagggtctggtaaaacaagagtgcttactgagagggttaggttcattctcaataactctgctagaggaagtgtggttgctttaacattcacaaataaagcagcagatgaaatgcttgaaaggttagatgatggctcagaaaatcgtgataggatttggattgctacgattcattctgttgcacaaagggtactcgaaagttatgggtatactattgggttaccaaaagaattacatatatttgaacgtgaccaagatcggatggaggttttcctacattccttaagagaacagggggttaatattgatgaatacttagatgttgaggacgttagagaaaagcgcaatcgtgaaaaaattataagtcaatatcttaatgtgttctctatgattaaaagagagcttttaactgaagatgaagtaaagataaaattcagttccaatccgcgtatttggaatatttatcaagattatcagtctgctttattggaaagtggtggtgtggattttgatgatatacttttatatgcacataaaatcctattaaatcaagattcggtagcaagaatatatcaaaaaaaatacgttgctttatttgttgatgaagcacaagacttaaacagagctcagtacgaatttataaaggttctctgcggtgataaaataaaagatgtcatgatggttggtgatagtgaccagatgatctatggttttaatggttcatcatcagattattttattaaatcattcgtgaaagattttactcctaaaacttattatttaaacgagaactatagatcttcgaaagcagtaattgaattagctaataaattaaaaccaaatagccaagttggtgttaatgctgctcttgatggctataaatcttttaatgctttaccagatgaagaatctgaagctatatgggtttgtgatagcattcaacatatactggatttaaaaagacatccagaaattgagggcgatattgattgctctaaaattgttgttataggtagaaatagatttgtttttaaggctatggaaagtgagcttaaaaaaagaaatataccttatttcctaaagcgtagtgatagaaatgaatcgcctgtttctcttattgggaaaatagtcgatcttgctataagggttaaggttaatccaaaggattgggttgatgggaagagattatataaactaatcggtttggaattaaatccagaatcagatgttacctacgatattagcaaagtctatgctgacataaaaaaatcatctaacctaaataaagatttaattagcttggttttagcacatattgaacatatatctgtagacacacctaatattttgaagttctgtttagatattaaatcagaactggtgaatttaggagcaaataccaaagattctgctaaagaagatgatattgccacagggattaaagatatagagcagcttcaatccatgtggacacgattcaaacgtaaaggcctcggtgataatctatcctcatttaggaatgcacttgctttgggtcagcttaatgatgataccttaaataatgggattatgttaagtactgttcatacaatgaaaggacttgaaaaagatatagttttccttatcggtatgtgtgagggggtttttccagattatcgagctaagagcaaagtcgagctagatgaagaaagaaataatgctttcgtagctataacacgatctcggcgttggatttttgttacttatccagaaaaaagaatgatgccttggggggattataaatatcatcctgcatcaagattcttcctcgatatgcagtaa

SEQ ID NO: 165134 - DNA, 771 bp, Enterobacter cloacae
atgatgtcattatgttacgatgcgtggatggtcaccgaatttggaaactctcccctttacacgaaagtcgagatagcgctcgccgcagacattgctacggctgtgctgccttgtggtagccaacttccctctgaaaatagcctagtagagcgctttgaggtcagtcggacaacagtgcgaaaagcgattgaaaatttagtggcccgcggcttggtcgagatccgacgcggcaagggcactttcgtcactgagccgaagctcacccaagaattgaacgagttaagcggattcgtggaagacatggtaacgcttggccgccaccctaccgctcggctcttggacaaacgacctatgcccgccacaaaagaggtcgcgcagcacttaggcgtcacactcggcgcacaggtctaccgcatcgagcgcgtgcgcttggctgatggcgtggccatgtcgttcgacgaaacctatttgccgctcgatattggcgagaaggtcgcgagcaacgatctggaggcagagccgatctttgacctgctggaaaacaagtacgagttgcctttggtcgaagcccagtatcaactcgaagcggctacagcaaatgagcacgtcgctcaagcattagggatcgaggtcggaagtccgattttccttatcgagcgcacctcctacaccgaggggcatcggccggtcgattacgaaaagctctactaccgtggcgatctgatccggttttccacgcgattgtcccgacgtgtgcgcacgcgaacgtga

SEQ ID NO: 165135 - DNA, 861 bp, Enterobacter cloacae
atggaaaactcaatgattctttggctattcgtggccgccttcggcgcgagcgccttgggtggtgtgctgggcatgtcaagcggcatctttattgtgccgattcttacgctgctatttggcgtggatattcacgtggccatcggtgcgagcatcgtctcggtcatcgcttgttcgtgtggcagtgcagcgccattcttgaaagggcgcttgaccaacatccggctcgctatcgttctagagacggccaccacgcttggggcggtaaccggtgtgctcctgatcggtattgcctcaacgtcctttctctatggcttgtttgccgtcattctggtcgtctcggcaaaacagatgcttgctcgccgtcgtgaggtgattgataccagtgcgcccaatgtgaagagctggggtacggtgctgcgcctgcattcgagttttcccgaccgtgtcctagaccgagacgtgccgtatcaagtcggtcgcgtgccgctcggcctatcgttgatgtacggcgcgggcctgatctcggcgctgctcggcatcggctccggtgcactcaaaatcccggcgatggacactgccttgcggctgcctatcaaggtttcatccgccacatcgaatttcatgatcggcgtgacggcggcggcgagcgctggggcctacttcgtgcggggagacattgatatcggcattgctggccccgtcgccttgggctccgttgtcggggcgctactgggagcgcgcttgctgatggggcttcccgccgacaagctgcgtatcttctttgtcattgtcctggtcctactcgccattcaaatgcttctgagcgctttgggcgtgcatattccaggaggctcggcatga

SEQ ID NO: 165136 - DNA, 318 bp, Enterobacter cloacae
atgaggtctagaaccgacaatttcgaacgccgtgaacagatcatcgctgcattgctttggtatggcacctggcttgcctcggctgttattactgctggcatgaccttggatgccctccagccgttcgagggtcagctaaacctgggttttagcggctacgacatcgtgaaagccggtgtggcgctattcattcttttgccggtggcgcgcgtggcactgatgttgggtatctttctgcgcgagcgtgactatgcttacacggcgatttcggcccttgtcctggcaatcatcgcggcgggaatcataatcggactgtaa

SEQ ID NO: 165137 - DNA, 474 bp, Enterobacter cloacae
atggaaattagacggttcagaattggggacgagggcgcgttatttcaggtctttctatcggctgtccatgacatcgcatcacgtgactacaccgctgcacaaatagaggcttgggcaccgacagacatcgccccagaagtgtgggttagccgcatgagggaattacgaccgtttgtcgttgaagccgaaggtgaaattgctggatacgctgacattcagcccaacggatacatcgatcatttctttgtgtcggaggcctatccgcgacgaggtgtcggtaccttgctaatgagtcgtgtccatgacgaagccaagctactggggattagcgaactcacggcggatgtaagcaagaccgctgaaccattctttctacgccacggttttcaagtggtggagcgaggatttcctattcggcggggcgtgacactgcaaaatgcactgatgcgaaaagacttacatcacaggacatga

SEQ ID NO: 165138 - DNA, 615 bp, Enterobacter cloacae
atgctgattggctacatgcgagtatctaaagcggatggatcccaaaccacggacctgcagcgcgatgcgcttcttgaagctggtgttgatcaggcgcagttgtacgaagatcaggcatccggcaagcgcgaagaccggccgggccttgctgcctgcctcaaggcgctgcgcgagggcgatacattaatggtgtggaagctggacagattagggcggaatttgcgtcacttgatcaacacggtccatgatctgacagcgcggggagtcggcctcaaggtgttaaccggccagggtgcagccattgacacgacaagcgctgccgggaaattggtttttggcatcttcgcagcgctggcagaattcgaacgagagctgatctcggagcgcaccgtagccggcttggcttcagcacgagcacgtgggaggaaaggtgggcggccgttcaaaatgactgcagccaagcttcggctggcaatggcgtccatgggtcagcctgaaactaaggtgggcgacctttgcgctgagatgaacatcacacggcagacgctgtaccggcatgtatcccccaagggagaactaaggccagatggcttaaaactgcttaccagaatctga

SEQ ID NO: 165139 - DNA, 1164 bp, Enterobacter cloacae
ttgtcctcgtggctcaatcgtgtcgccgtctgctatcagatggacatgatcgacctgttggaacacgatctcggtcacggtcaggtcgatgacctggacaccgcaccgccgctgtcgctactgacggcgctttcccggcgaagcggcatcgagctggatcggctgcgcggcatgagtttcgcaggctgggtgccgtggctgttggacagcctcgacgattcggtgccgtccgtcctggaaacctatacgttccagttttcggtgctgctgccaaggcgcaaccgcaagaccagatcgatcacgcgctggcgcgcgtggatacccagccagccgagtcgccgggcgtgcccgatctgtttgaacgatcccgcgagccaggctgtgctgctcgcatggaagctaccgttgatgctgagctgcccgctgcatggctgctggttggaattctattggggcgtgccagggcggttgctcggttgggagaacatcgatgctgccccgcgcacggccagcgacgcgattgcggcgatggaccgccgcacctggcaggcgttgacaacggggtatgtggagctgccgtgccgacgcatccatgccggcgtctggtttcgattgcttcgcacgcttcttgatgagctgaacactccactttcgcattgcggggcacatgcgggatatatccggcacgtctgggaatgctgcggtcatccgctgcgtgccgggcaaagcctatggcgtccttatgaaattctgaacccggtagtgcagttaccgatgctggaggcggcggccaccgccatcgcccttatcgaatcgaaggtgttgagtccgcccggggagcaagcagcgctgttcgtgtcagagccacaagccgggttcaccaacggtctgccgatggataagcgaaagcaagaacctatcaaccactggcaggaggcgatcaaagtgatcaacgaagccgtcgccgaggcgcggcacaaccccgagacggctcgctcgctgttcgcgctggcatcctttggacgacgcgaccccgaatcactggaacgcttgcgcgtcacctttgccaaggaaggtatcccctcggaatttctgtcacgttatgtgcctgatgaaccctttacatgccttagtatgaatgacgggttaagtgacaacttttga

SEQ ID NO: 165140 - DNA, 909 bp, Enterobacter cloacae
gtggacgaatatcccatcatcgacttgtcccacctgctgccagcggcgcagggattggctcggttgccggcggaggaacgcatccagcgtatccgcgccgaccgctggatcggctattcacgcgcggtcgaggcgttgaaccggctggaaaccctgtatgcatggccaaacaagcaacgcatgcccaacctgctgctgatcggcccgaccaacaacggcaagtcgatgatcatcgagaagttccgccgcgcacatccggccagctctgaggccgatcaggaacacatgtcggtgctggttgtgcagatgccgtccgagccgtcggtgatccgcttctatgtcgcagtgctcgcggcgatgggtgcgccattgcgtccacgcccacggctaccggaaatggagcaactggcactggcgttgctgcgtaaggtcggcgtgcgcatgctagtgatcgatgagctgcacaacgtcctggccggcaacagcgtcgaccgtcgggaattcctcaacctgctgcgcttcctcggcaacgagctgcgcatcccgctagtcggggtcggcacgcgcgacgcctacctggcgatccgctcggacgatcagttggaaaaccggttcgagccgatgatgctgccggtgtgggaggtcaacgatgattgctgctcattgttggccagcttcgcggcatcgctcccgctgcggcgtccgtcccagattgccacgccggacatggctcgctacttgcttacgcgctgcgagggcaccatcggcgaactggcgcacctactgatggcgacggccatcgccgccgtggagagcggcgaagaagcgatcaaccaccgcacgctcagcatggccaactacaccggccccagtgagcggcgacgccagttcgagcgggaactgatgtga

SEQ ID NO: 165141 - DNA, 1680 bp, Enterobacter cloacae
atggagtcagacacatcaccaattgtcgagcaaggcgtggccaccttatccgaagaggcatgggcacaggcccggcaccgaacggaagtcatcgggccactggttgcgcttgaggtggtcgggcatgaagccgccgacgccgctgctcaagcgcttggcctgtccaggcggcaggtgtatgttctgatccggcggggccggcaaggcgcagggcttgtaacagacctggctcgcggccgatccgacggcgggaaaggcaagggacgtctgccggagccggtcgagcgcatcatccgcgagttactgcaaaagcgctttctgaccaagcagaagcgtagcctggcggcgttccaccgtgaggtcgcgcaggcttgcaaagcgcaaaagctgcaggtgccgacgcgcaacactgtggcgttgcggatcgccggcctcgatccgcgcgaggcaactcttcgccgggaaggccaggatgcgtcccgcagcctgcaaggtgtcggcggcgtgcctcccgctatgaccgcgccgctgaagcaggtgcagatcgaccacacggttatcgacctgatcgtagtggacgagcgcgaccggcaaccgattggccgtccttatctcaccatcgccatcgatgtgttcacccgttgtgtggtcggcacggtggtcacgttggaagcgccgtccgccgtctccgtcggcctgtgccttgcgcacgccgcctgcgacaagcgcccatggctggaggggatggacgtggaaatagactggccaatgagcggcaagcccatgctgctctacctggacaatgcggccgaattcaagagcgaggcgctgcgccgtggctgcgagcagcatggcatccagttggaatatcgtccgctcaggcagccgcactacggcggcatcgtggagaggatcatcggcacggcgatgcaaatgatccacgacgaattgccgggaacgaccttctccaatcccggccagcgcggggagtacgcctccgagaagatggcttccctgacgctgcgagagttggagcgctggctcgcattagcggtcggcacctatcacggctccgtgcacagcggcctgcttcagccgccggccgcgcgttgggccgaggccgtggcgcgtgccagcgttccgtccgttgtcacccgcgccacggctttcctggtcgatttcctgccaattattcgccgcaccctgacccgcaccggcttcgtcatcgaccacatccactactacgccgacgcggtcaagccgtggatcgcacggcgcgaccgcttgcccgctttcatgatccggcgcgacccgcgcgacatcagccgcatctgggtgctggaaccggaggggcaacactacctagaaatcccctaccgtaccttgtcgcacccggctgtcactctctgggaacaacggcaggcgcttgcgaaactgcgacagcaggggcgcgatcaggtggatgaggcggcgctgttccgcatgatcggtcagatgcgcgaaatcgtgaccaccgcacagaaggccacgcgcaaggcgcggcgtgatgcggatcgccgccagcacctcaaggcgtcagcaccgcttgtcagacctgcaccgccggacgcgaatatggctgacccgcaagcagacaacctgccgccggcgaaaccgtttgaccaaatcgaggagtggtag

SEQ ID NO: 165142 - DNA, 627 bp, Enterobacter cloacae
atgccgcgaattctcatcctgtacggttcagtacgagagcggtcctacagtcgttttgcagcggaagaggccgggcggttgctggcaaagatgggggctgaggtgaaaatatttaacccatccggtctgccgttacccgatgatgcgcccgaaagtcaccccaaagtgcttgaactccgcgagctggtcaggtggtgtgacggaatggtctggagttctccggaaagacatggcgccatgagctcggtgatgaaggcccagattgactggatacccctgagtgaaggtgctgttcgtccttcccagggtaaaacgctggccgtcatgcaggtttgtggtggttcacagtcgtttaacacggtcaatcagatgcggatacttggccgctggatgcggatgttcaccatccccaatcagtcgtcagtgccaaaggcatggcaggaatttgatgatgaagggcgcatgaaaccctcaccctggtatgacaggattgtcgacgttaccgaagagttgttcaaaatgacgttactcctgaaagggcacacagcctacctgtccgaccgctacagcgaaaggaaagagagtcatcaggagctcgcggcacgggtcaatcaggccaaaatctga

SEQ ID NO: 165143 - DNA, 1134 bp, Enterobacter cloacae; identical to SEQ ID NO: 119510

SEQ ID NO: 165144 - DNA, 267 bp, Enterobacter cloacae; identical to SEQ ID NO: 140997

SEQ ID NO: 165145 - DNA, 195 bp, Enterobacter cloacae
atggctactaccctcaccccgtcgtacccgcagtttgtctttgtgtttgccgccgttcgtcgcgcagaccgtaaaccccgtatctgtatgctccgcaccgttgccggtgatgaacacgctgcacgtcgttccctcgttcgcgattacgtcctcttgtttgctggccgtctgccggttgcggaggtgcgcgcatga

SEQ ID NO: 165146 - DNA, 663 bp, Enterobacter cloacae
gtgctgcataaacgtatcattccagtcaccgaacaccggcggcagggcaacaacgccctcacaggctcctgcggccgcagcagctttgttctggccgtcaccgttaaggtcacggtcggcggcgagcacaatctgacaggccggatatttctgacggacaaggcttgccagagaaaggaggttcacggacgacagcgccaccatgacggtttcaccggtcaggtgatgcacggtgagtgcggtcgcatagccctccgctatccacaggcgttttccggcctgttttttcccttcgatggtatggcacgctccttttaccgccccgcctttcagggtgcgtttgagaccgtcagaattgataagctgaaggttaaccagtgcgccggtatcatcatacaacgggacaaccacatcaccggcgcggaacgtcacgccgccggttttatgcatcgacgtcagtaccggacattcccggtcggggaagcccttgcgggtcaggtaggcgttgccgctggccggtcgggttttctccatgagcctgacggccagtgcggccgccgcctggcggtcagcctccgtttcagcctctgcggccgcaatcacttcgggggcaaccggtggcaggttgccggtcacggcgtccaccctcacggcagcctctga

SEQ ID NO: 165147 - DNA, 663 bp, Enterobacter cloacae
gtgctgcataaacgcatcattccagtcaccgaacacaggcggcagggcaacaacgccctcacaggcttctgcggccgcggtggctttgttctggccgtcgccgttaaggtcacggtcagcagcgaggacaatctgacaggccgggtgtttctgacggacaaggctcgccagagaaaggaggttcacggacgacagcgccatcatgacggtttcaccggtcaggtgatgcacggtgagcgcggtcgcatagccctccgctatccacaggcgttttccggcctgttttttcccttcgatggtatggcacgctccttttaccgccccgcctttcagggtgcgtttgagaccgtcagaactgataagctgaaggtttaccagtgcgccggtatcgtcatacagcgggacaaccacatcaccggcgcggaacgtcacgccgccggttttatgcatcgacgacagtaccggacattcccggtcggggaagcccttgcgggtcaggtaggcgttgccgctggccggtcgggttttctccatgagcctgacggccagtgcggccgctgcctggcggtcagcctccgtttcagcctctgcggccgcaatcacttccggggcaaccggcggcaggttgccggtcacggcttccaccctcccggcagcctctga

SEQ ID NO: 165148 - DNA, 762 bp, Enterobacter cloacae
atgaacacccttaccaaagaatggctccagcagacaatcgcggagcttgaagaagagcgcgatgcgacgccaggcgcagtaaaagaagatgcagccctggctctggctgcgatgaagatcgcgctggcatcgctcgaagcggagcctgccattcatcgctggcgcagggtgaccgctgagccatacggcccttatccttggcattacggtaattttatctgcttctcaaaaccagttgatgggattgaggacgagtattattacgccgccccgccagcgccggtatctgttcctgagcccattaagcgtaatgatgcggatggatggtgggtgtacaaagggcgtagagtcggtggtggctgcgcggagtggtacaaccgggctcttgatgactgccgcgccgccatgcttcagggtgtcgaacctgtaagccagcgtgatgagttgccgctggattacctgcaagggcacaaagaaggccttgagtgggcagcacgaatggcagaggccaatcacccagaaaccggagactggctttacgatgacccgctggaattggctaaggcgatccgcaaggggcctgacatgccggaagccgcaggcagctatccggcaatcccggatggttatgcactggtgccggttgagccgacaatggcaatgttggacgagttcgattcaattatcgaccatggggcagaagactcaaaagatgcctggagtaggctgctcgcagcagcggcaccgcagcaggaggcgtga

SEQ ID NO: 165149 - DNA, 393 bp, Enterobacter cloacae
atgctggatcaacctgatggtggatatgttagccacgaagactacgcagcacttgagcagaagcttgcagagtctcagcgcgaattccgtgctgctgatgcgactatcgagaatctgcagatgcaggatgagaagctggctgcggagaatgcggggctgaaggctgcgattgacgcaactatcggatggcagcaatcaaccgatccggagaatatcgaaagcgttcgaatgctagtcgacattaaaaccccagccaccgatgctttcctggctgatgtaatggcgcagggggtggagatggcggcttgcgctcttgatgacgtaaaccagtttaattacgcaaacatgcttgacgatttagcgcagaaacttcgccaggaggcagtccaatga

SEQ ID NO: 165150 - DNA, 423 bp, Enterobacter cloacae
atgagcaacatcgacaaacaggcgctgcgcctaacagcagaaaaggcaaaagataacttcatgccgaactttatggtccccactcgggatgtgctggcgctgcttgatgagctggaaactaaagacaagcgtaatgcggagctggaagaccttcttgaagctgaaattaagtcatggatgcaacggtacgatagtgcaaataaccgaagagaagccgcagagaagcgcatagcagagttagaaagtgattctcagtcacaaaagttagttgaagcaatcattgttgcgatagaaaacgaacaggaacgtctttttgatgaagattacctaatggattcgaaagaatgcattgacgtaattcgtgaagaagtaaagcgatgggatgattcccgcgccgctggcattcgcatcaaaggagagtga

SEQ ID NO: 165151 - DNA, 756 bp, Enterobacter cloacae
atgattcactaccacggtgggcctattactcctgatacgtgcgcaatgagagcatggaaagggcgacatgcgtttatcagttttgcgcattcaggccagatcaatctcgctgctgaatactgtcagtcgttcgcgctggacaacggtgcattcaccgcctggaaagcagctggcaaaaacaaaatcgactggagcgattactacgagtttgttgctcgctggaagaatcacccaggattcgattttgccattatcccggatgttattgatggcggagaggaggaaaatgatgcgcttctgaatgagtggcctcacggaaaactagctggcgttccagtgtggcacatgaatgaaagtgacgagcgatttattcatttgtgcaatgagtttccgcgagtggctatcggtagttgtggcgactatgacgtaaagcgcccaactcttgcggtagccagaatgaaagacctgattcgtcacattgttgatgagcatggtcagccggttacgaaactacatggattgcgcatgttaaatccgctgatattcacaaaattacccttagccagcgcagatagtacgaacgtcgctcgaaacatcggtattgataaagcctggtctggggcttatgcacctgcaagtaaagagacacgcgcagcattaatggtagaacggattgaggcacacaatagccctggttctcttgcgtattgtgaacaacgcgaccgctttgaaatgcaattgcaactggcagtttaa

SEQ ID NO: 165152 - DNA, 276 bp, Enterobacter cloacae
atggtatcaaccgcatccccagcaccatcctgcatggctatcgagcaggaaattcaggccaaagaatcatcagctattgagcacctcgagtctttaactgctcatgatacttatgcgaggatggttattgcggcgctcaggaatggtgcgattactgaacaacatgccatcgttcagtacatgaaaattcagaaacaaagagcagatcattacgaaagcgagctaattaagaatatccaaaggacggcatctgcccctcctgtttttaagccgtga

SEQ ID NO: 165153 - DNA, 189 bp, Enterobacter cloacae
atgccagttgtatcagctggccatgagttaagatgccttgccaatatctctacggtcttcatgattatcaccttaaaaaaatgcccggacgaaccgggcgaactggaagcaagggtctacggagtgccttccttggcgggtgatgcagggtttacagcgcaacgtcatctgaatggcgttctgctgtaa

SEQ ID NO: 165154 - DNA, 480 bp, Enterobacter cloacae
atgcacatgctcaggcgggacgctatagcaaacgccgtgtatcagccgcggcagtgtgatgtaatcaacgcgtgtcttatcagcaacaatcagccgttcggctatctgcatttgatactgaggtgggcgaccagtgccaaggtagaaactaatcaaggtatcagggaagcgtttcagccagcccgtgactggagtgaagaacaagtccactggcatcgcatcatcttcaacaacaactacccggcaggtttgttcggctgcccactcaagcgcgcgacgatgattccagttcgcaccgtggttaccgtcatcaatcagcagatgagcatccagcagcgcagcaagacgttgtgcatgtcctgtgcgagagtgatggccgaccaccacaaacttaatttcttcagccaccagcgaatctccaataaaaaagccgcacgatggcgactactgtctgaatatcagggtgttgcttcgctttaa

SEQ ID NO: 165155 - DNA, 705 bp, Enterobacter cloacae
gtgcgcgacataccagccagtatgattattgatagcgtcgacgccggagtaggcgcgtttatcgacctgttcgaagccgacctgcaaccctttggcggagaccttatccggttccattccggcaccaatggatattacggaaatgtgatctggaaggggaatcagtatcaggcatacccgatagcagtcgaagggttcgagtcaaagaacgaaggcacatatgcccggccaacaatggtggtggcgaacgtcacgggtttactgacgggcataaaccatgacttcgacgacatgcttggggtggtgatcacccgccgtcaggttccggtgaaatacctggacgcggtgaacttccccaatggcaaccctgacgcagatccgacgcaggaagcggtttcccgctacgttgttgaggagatgacggaagagacgttcgagcaggtcacttacacgctggcgacgccgattgactgcgataacgccatcatcccggcgcgaactatccttgcagacgtatgtcagtggcagtatcggggtgttgggtgcggctatgacggcccccctgttgcagacgagcgcgacaacccaaccactgacccggcgaaggacaaatgctctcaccgccgtagcggctgccgcttccgttatccacgaccggaaccaatgccaatcagcagcttccccggctctcagaaggtttcatga

SEQ ID NO: 165156 - DNA, 723 bp, Enterobacter cloacae; identical to SEQ ID NO: 118368

SEQ ID NO: 165157 - DNA, 534 bp, Enterobacter cloacae
gtgctcatctttaaatttgcagggcatttacgccgacatttccgcaaagtcgagctgagcgttgatacccctgcccagggcattcgtcttttgcttgctcagaatcatgagttcaaaaaagcattcctgaacgccagagtaagaatgcgagtggcgggtgaggatgttgaaacgtcttcggtgcagtggcacatggatcggcgcctgaaggatggctctgtagtgctgtttgtcccggtgattgagggggcgggacttgagaccagtacgatagttctcattgcctcactggtgctgtctgccgcctcggttgcttactccatctacatgtcccggaacatgaaaagcaaaacttcagcggaagcggccgaaacaaacaccctcacgaataactcgtttaccagtgcagaaaacagggtcggacaggggcatcctgtccccatactcctcggcgagatggaggtcggcagcaacgtaataagtctcgggatagacacatctaataattccgactgggaagaatcaatcagctaa

SEQ ID NO: 165158 - DNA, 345 bp, Enterobacter cloacae; identical to SEQ ID NO: 95526

SEQ ID NO: 165159 - DNA, 1230 bp, Enterobacter cloacae
ttgattgacttcctatttagaaacattagtcgtcttgataaataccatgctaatttcattcttcctattgtttatgactggaacaataaattcaaagaaggcattaccacgaaacaaagctctttaatagcacttaaattctatcaatcggaaggatatagccgtatttcaaaacctgatgaagctcaccaccttcttacaactattgctaatggcgcaaaagaaacccgagaagaaatatcaaaaatccttgatgagataattacacaacaacataccaattataattcatccttcatcggactttcttatttaatcttaactgagtttgcaggcttaaatattgcaaaagttttaccagaaaaaaccatttctcttgctaaggttttttggttaaaagattatacggatgagaacgatcctatgttccaggcccgtgatgcagaggaaaaaccttttggcattactgatgactatcatttaaaatactaccctgaaagtccctatcaaacacctattctagctttattagtttcgaaccaaaaagcaacaatcgattttattattgattttattaattcagtagctactagtttagtaagatattatggcaataataacatttcacgattaattgttaataactcatattttaatagcacaatttactctaatagagacctctggtgcatgtatcgtggtgtacctatgcatgtcccaaatttagtgtcctctatacttatggctctagagaagtttttcattgatcgaggtaaagcaacctctaatgaaatattcgaatactggctgttatatttattaaaaaaatccaatagtacgatcatctatggacttgttaatagcattgttcttgcttttcctgagaaaacatatagcattgcaaaaatactattttcttttaaggacttctttttatttgataacactaggaaaggtttagaccaatctttaaaggggcaaattaccacagctaatcaaataataggaaaaccaattggtacggatctacatgaaaaggcacgattagatgcttgtgatgaaaagcatagaaagcaatcacttgaagatttattctttagttatcaaattaaaaaaattggtaatatcacagagcaacaatattgcttacagcgggaagagttatggacaattttggataactattactccctgacctgctccccgttgattagtacaccccgatgttag

SEQ ID NO: 165160 - DNA, 792 bp, Enterobacter cloacae
ttgcagttgctggttaagccggccgatttccttcagtgcggcatccatgtccagtgcagcaccctgcgctttcgcctgcgcatccgcactgacaaacaaccccttccctgctctcagggttccccactcatcggtgcgcagctccgttccctgaccgcgggcttttccctgagcgtgcaccaggtgaccagtgttaagctgcgttttgccatattccgtcgcgagcttgatatgctcctcaccgcgcttatcctccatccgcagcttgttgttcgccggagtgcgcagcacgttgcgggtgtggttgtcgcgggtcacggggtcaggatgttccgggtcgtgcagcgcatacgcgatgtacggcaggtcgatgtcgccgttgctgtacgcaatcgccacttcggtcccgtcggtcagtggcgtatgccagccgtacgtctctccggcatacggtttcgccatccgcagccacaggtatgcgaagccctgttcagcatcgtcccggtcaaagtccatcctgacgcggtagcgtccctggtcgtccaggtgggcgtagatatcgttcttttcccggctctcaatgcgggcgggcaggctgccgtggatttccgggcgcgaaacttccgccgggcggaaacagtagcgctctgtgtagggcatgccccacaccgacacgtgcaggcgggaatcacgggccccccggtaggtcaccagggtgaggataacgccttccttcagggccgtaatgacatcgccctgcggctccagcacctgaccgggcgcgaggagtga

SEQ ID NO: 165161 - DNA, 378 bp, Enterobacter cloacae
atgaaatttatgaagccaaaatatctggcgctctttattgcggcggcaaccagctccgcatttgcagcagcgccaggtgcaccgacgatcggctatggcaatgacaaatttgccctggtggaagtggatcaggctgcccaggattataacaatcttgtcaaagtgcataacgatggcgtggatgtaaaagttgagtggaacgtctggagtggtgatgcgccaacttcagcgaaagttctgctggacggacaaaccgtatggaccggcgcagccggcgcgacgggctctgcaacgtttaaagtgaaaaaggcgggcgttatcaggaacaggttgaagtctgtaacgccagcggctgtgcgaaaagcgccagcaagctga

SEQ ID NO: 165162 - DNA, 198 bp, Enterobacter cloacae
gtggatagagaactgagcgagcatgtcatgcttgaaagggtcgagctgatagcccgtctgacaactgagggtatgtgtcaggaaagagatcgtgaaattgcattgaatttaatagctgagatggctagagggaatctacctgaaaatcataatgttgctgcctttctgtcaagttcagagatgactggcatcaaatga

SEQ ID NO: 165163 - DNA, 273 bp, Enterobacter cloacae; identical to SEQ ID NO: 129434

SEQ ID NO: 165164 - DNA, 261 bp, Enterobacter cloacae
gtgtgggatctcgactggaatctggcgtaccgttatctgggcactcgctatgacgttgccgttgatccgaatacctatgcaacagaacgcgtgaaaatgggcggcgtcagcctgtgggacgtcgcggtttcatatcctgtcacctctcatctcacagttcgtggtaaaatagccaacctgttcgataaagattacgagacagtttatggctaccaaactgcaggacgggaatacaccttgtctggcagctacaccttctga

SEQ ID NO: 165165 - DNA, 399 bp, Enterobacter cloacae
atggggacgttaagcagcctgcgcgcgctcttcgacgcggtttacgctgcggtagagatgatcgaaacgttcgttatcaaactggtggcttgcgccatcgaagaacacatggccctgacgcagggcgacgatgcgctcgcagtagcgcagggcgtaatccacctgatgcagcgtcaccaccacggtgatgccgtcgttctgattgatgtcgcgcagggtttccatcacgatgcgggccgattccgggtccagcgaggcgataggttcatcggccagaatgattttggctttctgcatcagggcgcgggcaatggcgacgcgctgctgctgtccgccggagagcgtggagacgcgctggtgggcgaaatgcgccatgccgacgcgggtcagcgcctgtag

SEQ ID NO: 165166 - DNA, 393 bp, Enterobacter cloacae
atggaagttgtagcatgggatttagcggttcagctacaggttaaaggctttaaggttactgtagttaccacggattttgatgaagatattcctgttttagaaaataccccacaaataataaagttaaaaaatatccctaaggcggcatattcgcccggttggtgggctgagactgaaaaaatcattgaaacgtggagaactaaagataatgttagtgcggtaattagcattagcgcaggggcatttagtacacttaaacacaaaaaattattcccaaatgcaaagtttttcataaggtccatcaccacaaatcaaaagtttcgcatctacgttaactttttttatttcagcgaaaagatcgatatttttatcaacccccttttgctcatgtag

SEQ ID NO: 165167 - DNA, 318 bp, Enterobacter cloacae
atgctaactgcaaaactgaagttttttgatatcaatagatgcggatattacaagcacggctctaaaaaaccagacttaggcaacaccactgatacattgcttaaactgaaaggttgggcttctgatggaagagagttcatcaatactcttacctaccaagccgaaaaggaagaggacatccgcaatacctatttttgtggtttggcgtcagacaggcagtacggagaccaccttttaactctttgggcagaggttcccaatgatagtggggtgatatatggtatgccaccgctagggaaggtgcgaacaagttcctga

SEQ ID NO: 165168 - DNA, 438 bp, Enterobacter cloacae
atgtctgggattggtataggtgattatctttctgcaatgagaagtgacaaagagcagcttctctctcgctttcttgacttttggaatgagatttacgttaaagccagggatagccgtaactacactggacatatcacagtatcagactatccaaactgcattattactttggaaggaactggcatcagcctaaccgctcgcaaccgagttgtcttttacggcaagcagcttctcttagagatagatttttatcgagagcataaagataaggaagactctgttctgaaggtttatctggccaacgatggaagcctttatctcggacaccctgacgacagtaaggctttagattttttctacgaagaaaccaacattcctttctttgatcaattgattaggtcagcttctactggaaattttatatctattgatcgctaa

SEQ ID NO: 165169 - DNA, 186 bp, Enterobacter cloacae
atgtccgacacctacctcatcacagtaaaaacaaaatcaggtgaaacgcatgttggcctgatgaacagatcacaacctgaaatcgtaaacggcttcattggtgtggcaaaggaagatggcgcctggatatacctagcgccggatgacgtgcttaagatggagtacgtgccggttagcgatcaatag

SEQ ID NO: 165170 - DNA, 378 bp, Enterobacter cloacae
atggcgattagcattcaggaaataagtgacaaaattaaacagaatcagtcacaaattcaaagcaataagggtaaagtctctgttgtagaagaaagcgccattaacaatttacacagagatggaaggacaagaagtacgctgacaattactttcctaatttgtttcttcattttaattgctggctgttttggttttgttctttggtacaactctcttgccattggatggatgaaggatctccactcgcagggtcttaacaatgagattgcaagcgtaaaactactagagctcgataaagttcttgccgtcataatcggagcccttggaacctcgctcggattcattattggttattactttaaagagaaaaataattaa

SEQ ID NO: 165171 - DNA, 159 bp, Enterobacter cloacae
atggacatatggccatgtttaatgggcagcaatgggtgtcagattttaaacaaaataatggttattaccctggtggcgattaccgaaaagcaaagcctgcatgtgttttttatcgacataaagatgcccttggtgacggatcgcagagtaccagtgtag

SEQ ID NO: 165172 - DNA, 351 bp, Enterobacter cloacae
atgtcgaataagacacagacagtgaatggtgatactgccgagccctggtggggcttgagttgtaacgtcatcccttgttttggtgcacgtctggtccaggaaggtaaccgccaacattatctggctgaccgcgccagcataacaggtcagttcaatgaagcggatttaatccatcctgaccaggcattcccggtcctgttgaagcaggcagagctcatgcttaccagcggcgaactgaatccccgacaccagcattgcgtcacgttctgtgaaaaggggttgacctgcgaagctgatacgctgggttcctgtggccacgtctatattgtcatttaccctactcaacgctaa

SEQ ID NO: 165173 - DNA, 363 bp, Enterobacter cloacae
atgcctcaaatccccgatccgcaggataccagtgatgcggtgcgtacctgtctcaatctcttaccccggcaagctactgaacgtattctgtcccgcctcaaggaggcgattaactatgaacccgttataggcatcatgggcaaaagtggtgcgggcaagagttcattatgcaacgcgctttttcagcaacccgtctgtctgaccagtgatttgctaggctgcacccgggaaccccagcgtctgttactcaccgttggtgagcgcagcatgacactggtggatttaccgggtgtgggtgagacaccggaatacgacgaggaatatctggcgctctataaggcgttgctgggagagctggattag

SEQ ID NO: 165174 - DNA, 897 bp, Enterobacter cloacae
atgaaaaatcttatggaacaacggatttgctcgagtattgccgctggattgaatacggcccgaatgctattggaaggtcggaccctacgtgaagaaagcgatgaacaactgattgagattaaagccgaaagcccagatgaaattgcggttctggaaagaatgatagccagacttgagcttataaaagaagaccctaaactcaatgctgtgattcattaccttgagaaggaaaaatggctgagatttggagtcattatatttagccagtattacgataccgcaaagtgggtagccgactcacttgctgaacgttatcctgatcaggctgtaggcctttatgctggagcaggtcgtagccgactctatcaaaaaggggaaagcgtcaatattgaaagggaaactcttaagcgtatggttgctgagcatcaacttgagataatggttgccacagatgccgcttgtgaaggcctgaaccttcagacattgggtacgttgatcaacatggacttgccatggaatccaacacgtttagagcagcgtattggtcgcatcaagcgctttggccaagttcgtgaaaaagtcagtatgcttaatctcgtcaacgagcaaaccgtggacgaaaaggtttatgaaaaattgtctgaacgaatgcaggaccgctacaacctgttcggttctttgcctgacaccatccgtgatgaatggatagaagatattgaaactatgggtgagaaaatggatgagtatattaatgcccagaaacaggctaatggatttgacctgcgctatacagagacaatgtctccttcggataaagattggcgtgactgcgccaatgtgctttcacgtcgcgatttcacagaattaatgatgtctgggtggggggagagtaaatga

SEQ ID NO: 165175 - DNA, 4044 bp, Enterobacter cloacae
atgaaaaacgatactttggctaggccttcatcaatctatcttgaacgaaacctttcttatggtgacagaacgttcactgaaactgaattactccaagcttcaaggtacattgtgattttagctgaaccgggtggcggtaaaacagagctaatgaataatcttgcccgaagattagagacagaaactgttaatgccagcgtttttttgttcgcaggaattaatgaaaaaaacactccattattgatcgatgcggtagatgaagttgcaacaatcgatcaatcaagcatttatagattattgagtgaagtcaagaaaaacaccccttcattagtaattatgtcaagtcgttcaagtgaatggggacaatcatcaactatagcatttgagcaatttttagggtccccacctctaatagttagattgaacgagtttgatcggcaacaacaatctgaaatatttgaatttcatacatctggcgaagattttaatagtttcgaaagagaagtttgtcgttttaacttagagatgcttttgccaaatccgcaatttttaaaaatgtttgcagacgcttatattgaaagtaatagacattttataaataaacgttcaattttttcattagcagttgaacgtttagcgaaagaggctaatactaaaactcccttgaagccatcacatttaacagtagaacaaaagatcgaacttgcttcagaagcattcgcaaaattacttctatcagcatcggaaggtataacaacatcagaagcgaatgaaagtataatttatccgttactaaaaacacttcttcctaaaaatcaagtatctagtgacatcctttcaacaaggttgtttagaccaggagaatgtgaatatcaacatcgtccagtacataagatagtagttgaatactgcgccgcttatcacttaattaaaagaataaataataatagtgatccacttactctgtggaaatgccttcctattattgcaccaaacaatgtagctcgcgatgaattgagaggcctaatcggatggatggcagcattaggaagcaagtcaatacaagagaaattgattgaaattgatgcttatgcagtattggctaacggtgacccctcacaattagaaccatcatcaaaaaaactacttttaacaaaactgaaagaaattcaagaaaaagatccttatttccggagaggtgatttttggcgtagattcagcgtagctggtttttttacaagagatgtttctgaacaaattagatcattaatagtaggaagtaatgacagtcatttaagaggactcatttttgaattaatctctggctcagaagtagttgaatcgcttgctaacgatatttatgaaattgcaggagacattggagaatccaataatatcagaacttccgcagttgattgtttgttgcatttaaaagattatgatctttttccaacacttcagatattactttttgaagctaccaatttgtcattaaatatgtccgctaaaataattgaaaaaattggtgttgagaatttctcactaaaattcttgtcaaactacttaaaactatgtacacatttatatcccactgaaagacaacctttagaaagagtagttggcactcgatatttcattaagaagtttgtgaggtcactacctacatatcatctcgaaccgttacttaattcattaacttatgaaattacttgtacttgtggaaaagatagctacgagtgctattgtcgactgggtattagtaaaatagttggattgattgttgatcgttactttgaatttgtagcacctccatactcaccagaaaaagtatgggcttggctgcataatcttaattttgttcatcctatacagcaacaacatagcaaatcagttgaagtcattcagtcaaacaataaattaagacaaggaattatttcttttgtatttggcccattgaaagatcgagatgaaatatttgaccttaagatacatacatttcaaaattcattaaatgctcactctggccttcaaatgcgtaacgaagattataaatttattatcacctatgcttttgaaatcgataaccatgagctttgggctggtttcttcagtcctcacagacgatttggtgttaataatcttcgtggaaaagatgaattgcgtcatttaatgcgccaacacgcatgttccaaacctgagtttatgaaagtatggatgcggttaaataaagtttttaaagatatggaaaagaaaaattctggtttacatcgtaaacttgatcgcaagaggaaaagatatgaaaaaaaacgacaagaaaaaagatttactaatatagcttatatcaatgaaaatagaactctgatcgaaagtgggcagcactggaattgtcttctccattttgcgcatcttactctctctaaaccagaccagatagcaaaagaagttggcgatatttcattagttagaaatgccttaaaaaattgtatcggatttatttcagctcacgtgccaaacctccgagaactcgctaaattacagtgtgaatccaaatattcacattatgaaatggtattgtatgcagcctgtttagaaatcttccgagcggaaagaagcctggagcgtgtaccttcatcaatgctagcttctttacgcactggaattaatatgggatttagtgcattaacctctgatgaatccgagttattgaaagctgagatagatagaattctcttcgataatgataaaaattttgctgaggagttcttaagagaatatgttgaaccccagcttcaacaaccatgcgcatacccagaagtatggctacttgaaaatgaaacagtttttaaccatctgcgttcaaaactagctcttgaatggcttgaaaaatatccagatatagatagtgacaccatgtatacacttttcgagattgctgttaaaaacagtaacagagactctttaaaaaaattaatttctcacaagtgtttactattagaagacgtcgaatctttaagaaattctcctgttagtttacaaaaaacattttggtatcttcgggatttttattttaatgatgaagtaaataaaactaggtggcgatatttgtcgctcgacagggaaaacatccttttatttcaaggtgtttctgatagaattccctataacaatcagtctacttggccagaactttcagcaattaaaattgaatatattcttacagctttttacaatctttggcctcaaaccaatccttcgtccgatttgatcaacgacagttcaaatgaagagaaagcatctagattcatgaatgatttagtctggaaaattaattcagatgactcattagatgcattacccgtaactaaaagattattatccgatccaaaattcacattattgaaaaatgcactgctaagcattcatacacagcaagttcgaaaacaagctcttcatgattttgtccctcctactccaaatgaaattgtaaagtatttagataatggagaaattgttacggtcgaatctttacgtcaacttataattcaagaactaaatgattttcaaggcgcattatatggtggcgagtttaattctaccgatagattctatcagaatggacagcatatcagcgagaatgattcaacagcaattattgccgaacgtttaaacttacgtttagaaccgcaagaaatctcaattactctagagcatcagctaaaaaatcataatagaagtgattttacagccacaaaaatattaaatggcaaacgttgcttattagttacagaggttaaagggcagtggcatcgagaattatacaatgctgcatccgcacaactgtatgaacgttactccattcatcctgatgctgagcaacaaggaatttttcttgtactttggtttggaaaagaaattgcggttgcaggaaaaaaaacgcatcagtttcaatcagctgaagagctgaaaaccaaaattgaaggatttttaccccacgaattaaaaaatttaatagatatttttgtacttgacgtcagcagaacttaa

SEQ ID NO: 165176 - DNA, 957 bp, Enterobacter cloacae
atgattaaaaagttgaaattaatttctcctttgttatttaaatattcattattcataataccattttcttctgtttgttttttctatattaccttttttatatacataatatctcaagtaaaggaaggcaatgttttaagtgagttaggaagctttggtgacacttttggggtgatcaacgcttttttctcaggtctaggttttgctgggttaataattacacttgttatgcagcagaaacagatatcaagacaaaataaagaatatcttaaacaggatgactatactaaaaatcaagaatacattagtattttattcaaattattagatatgtataaaaatgttttgaatgaaattgtcataaattatgaacacgagacttttataggtcgagatgctctaaaaaaatcactatttatcttgttgtcaaaagtcaagcaagaaaaagtaaatgagattcctgccgagataaggaggagaatgaaatcgaattctttaactgaagacgatgttgaagttttaaactttattttttataaaaacttaaaactcctaaattactcttttaaacggcaaggcaggtttgtttctacattgcattcattgttatatcatcttcattttaacaaaccagagtcgtttgataatgaagagctagttaggttagttgcttctcaattaacttatatagaatataactatttattttacatattgatatcagataaatcacagcatcagctaagaaatttagttgtaaaactagggtatgtaaaatatatagcccaaagccatattcatgaagtccataaaataatgtgcaaagagatttggcacatcgatattgataaagataaagaggttgtcgactttccgatggatagaaccctcataaaaaaaatagaaactaataaggaaaaaataatggagagattgaatatgttgcttaatgcttga

SEQ ID NO: 165177 - DNA, 1242 bp, Enterobacter cloacae
atgagaaaattatttaaaggtttctacacaccaaatacatctgaagcaagagatatttgggatgatgcatgtacgatttttgtgtttgatacaaacgttcttcttaacttctacagttatgaagaggaaacaagaaatgaattatttgacttattaaatgttattaaggatagattatggttgccacatcaagtagctttagaatatcagatgaggcgtcttgaaattattgcaagagaaagagatacatttcataaaattgacagattttttgaaaggattaatgaggatatttcggttaagattattgatgatttaaaaataaaaagtcgtctaccggtattggcaaaggagttggattccttttcaaaaaaaataaactctttgatcataaaatttcgtaatgaggttttggagcgtcaacaagaactcaaacctgatgttatttcccatgattctatacgggaaaaatttgattcgctattccaaagcaatattggaaacccttatagcaatgaggaactattaaatatatattcagagggtttagctcgttatcagaataaaatcccacctggctttaaagacagacctaaagatgaattagaagagtacatttattctggatgctcatacaaaaaagaatttggtgatctgattatatggaagcaaattctaaatatggcgaaaaaacctcaggtaaaaaatgttgtatttataacggatgagaaaaaagaagattggtggtaccaaattaggaaaaaaatggttggtccactacaagcgctacagacagaaatatataatgaaactgctattgaacattttaaaatgtatgatacatcttcatttttacaagcagcaaaagaatatgttaatgccgatatcaaagagtcttctttagaagatatttcaagcgtgattaaagttaatcgtgaggaaattatctatgattatagagtaaatgagttaaagaatagcatgaataggtcaggggtatcggaggctgaaactattttatcaaatttctttaatctttataagagcgaattaaatacagcaaaaaatgaaaaggaaacgatagatcttgatattttgaaacaagtcaatgctgtcaaagaagttggcgttttagacagcattggtgatgtagggggcacagtgataggcgaaaaaaacattggtgtagtagatgaaaaaaatgatctgccctctgatgtatcaagggatgatgaacaatga

SEQ ID NO: 165178 - DNA, 267 bp, Enterobacter cloacae
atgacaacatatgtggtgatgtatgatttgataaaacataaagattataatcggttaatagaacaaataaagaaatatcctcaatgggctcgccctttagagtctgtatggctcattgtttgcgatgatacctcagcagaaattagagatcatctgatgaaatacatggactcagatgataaattattagttgttaaatcaggtaattatggggcatggaaaggtataactacaacggttagtgattggatgaaaagtcatctctga

SEQ ID NO: 165179 - DNA, 162 bp, Enterobacter cloacae
atgcagacggacggcggcctgggcaaaacttcctgcctcaacggaggcaacgaaaacgggaatatctttcagcgtatcggtcatggacggattgtgtcaatttggtcatcaatgaagggaaaaattatcgccactggcgacgctgagtcaacggtagactga

SEQ ID NO: 165180 - DNA, 588 bp, Enterobacter cloacae
atgtccattgataacgatctgttcgaaagcatacttagaggcgctattagcgctaatattgacgatcttgttaaaactattactgccactgagcctcaacagccttctaaagattccccgcaagaagaagatgatgatgtgggagatgataaagctcaaaaagaggcgcaagcctttgatactcctactgatgatgagcatgaggaacttcaagcattaggctattggagtttgtcgcatcaaagacaagttgattccttgactatacaaaagtctaaagaagaaattgttcggattagttgcgaaaatgacgagttgcgagcaaaaacaaagaataaccatgctatggctagagggcgacgtatcgataatcggttacgtttgcagatggctgctgctacgttccgtttcatgcaatactggtgttgctttgttgcattagtggtcttcatttacgtagcaaaaaatgacggtaatccccccagtgaagtaataattgctctccttggaacaagcacgattagcattgttggtttggttggttttgtggtcagtggattatttaaaagtaataaagataaagagtag

SEQ ID NO: 165181 - DNA, 471 bp, Enterobacter cloacae
atgtataacccgatttgtatcgttaatgaatttattgagcgagcaaagaaaaaggggactgacctcactcacatgcaggcccagaaactgctgtacatagctcatggctatagcttagcgtttctaaatgagcctttgcttgaagaacccgtgtgtgcgtggaggtatggtccggtcataccgtccgtgtattatgctctgcgtcacaatcgttctgaaccgattgcagataaggcaccgacaactgcaattgaaacagaaaccttagatagcaaaacagcttctttgcttgatatggtttacgaaacttatggcaagctttctggagttgttctctctgagtttacacaccgtccgggtacaccttggtatcaagccatggtcaagagagagaatataatcagtgacgcaagtatcaaagattactatctaaaactgataaagcgtgacccggtttgcaacggattgtaa

SEQ ID NO: 165182 - DNA, 381 bp, Enterobacter cloacae
ttgggcgcctttttgtgcacaaaaattaaagatgacggcgagttttacgatcgtctcaaccagctcttcaccaaaacctgtgccgcaggcagccagcttgatgctaattgctcccgccgtcaggaacagcttggtcaacatcaaaaagcccttgattttattaccagttattacgctgacaccctggtagacatgggcacaacctatgacaaacccctcatcgaaccgcaggtcgctgtcgtattgcaacagatggctgcacgcggaaaaaccaaccttaacggttatctcaatacctactggaagaaccttcaggggtactggaaagatggaaaagttgcgcgcgaggcgtggcttagttcatgtaaaaaaaataattaa

SEQ ID NO: 165183 - DNA, 1104 bp, Enterobacter cloacae
atgttagatattaagcaggacaaaactcagacaggatgtgaaattttgactaaagcacgcagtaagaaatttggtaacctaataatcaagacgatgatagggtgcttaattattgccacagcaaatgcacttacattaaaaaacccatcaataacttatttgatgtcaaaaactatttttttgacaggagcgctatggatatccatccctttaattattgcaacaagagctttattcccaagtgcatcaaattcctttaagaggaaatcatggagattggtaataagcacaagaagatattataagttaactagaataaacgagtttctgttacacattggtgctttgggtatatttatagtaggtacgataaaagtaatttttaactttgaaatatcagctttaacttacctcacaattacagtgctaagtttatcctttgcgcttgatatttaccacagagttaaatttataagttctaaaatttggaaagggtttgttggtaaagttgtactagccttatatgtagccatttcatatattatctcaaattatctagcaaggcattgggtgacatacaccacagggttaaaccctaaatattatactgagtttataaattcatttagtattttctttactccaatagcatatttatctatcaccataattctttgcttaattataattataccagaatgtatagggcttttatttttgatgtttttcaatcctataaatgaaagtttcatcaagagaagattcccttcactagccatattgtcagtgcgattaagaaccggaaagcgacctaataaacttacaccacttgaacttgcactgctaagttcgaaagccatggtgtttcgtgtttttggcgctccatttttcttgatcacaattggttacttaatgactcaagcagatcatttatcaggagattttttcgataaggctggtcgtttatggctggtaaactattattatcacactgagcacaatggcaatgtcagtactatgagatattatgatcttgataatgcaaaaacatcagtagcaattttaaaagggagtagatgggaattttttactctagatatttaa

SEQ ID NO: 165184 - DNA, 258 bp, Enterobacter cloacae
atgctgcgcgagaatttcgacgtgaaaaagtgggaaattaatcaggctaccaagcgttatatccgctcgcatgaggaggtgcagcgcatcagcatccgcgaccgtttaaatgattttatgcaggcgcacggcgcggagctggccgacggtgataaaattaattattcggcgcaggatagtgactttttaacggccattggattcaggcatgatgcggcttcgcgcgatgataatcgtgaaaaattcacacctgcatag

SEQ ID NO: 165185 - DNA, 873 bp, Enterobacter cloacae
atgcaattttacttccatgaagttggcataaaaggagcagagagtgcgttccccaaaacagtttataaaaaaataaagacggagaatattgctagtttcactagtaatccagaacatacccagaaacttttaaacgaggaattcagtgatggattttgcaacgtatggggcgtacccaaaggagctgcaagcataataaataaaattcaaattggtgatattgtcttgcttgttaggacaagagctaaggatggagatatacctatattatgcaaaataaaatttatattaaatgaatcatcacctgagttgtcaaaatcattatggggtgatgaacgctttcctttaatatttttatttgaatgtgaagtaattagctacacatggaaagagttagtgaatgatttagggtacagtcataaatttcgcccaaacggtagcatttatagagttatggaagaaaggctaatcattcacaatggtgcagatggatatttacgtaaattaagaaagtcaacatatagcaatgatttaaaaagtgaggttttattttcggaagggttgcaacaaagaaaagaaatttcttttttctctagaaacccacggcttgtttcgatagcaaaagaactacatggatatcgctgccatgtttgcgatttcgattttgaagagtactacggtgatataggaaaagaattcatagaatgtcaccatttgaatccactgtctgaaaataattcagagaaaataattcagactcatctaaaagatgtaattaccgtttgttctaattgtcataaaatgatccataaaagaacccctcccttcagcattgaagaaataaaatgcaaaattaaaaaaataaccccgtaa

SEQ ID NO: 165186 - DNA, 330 bp, Enterobacter cloacae
atgcctaaattaagaatatatttctcggatttttttaatgttgcaccggaaaaaataaaagattatggtgctttcaatatttcgttaattaatgacctaccattgtttatagatccatttttattgttcaataatgaaaagtataaattgctgcatcaaagtataataaagtatgtgtcttttttacgagaccgctctcaacacggtgagttgaatagcggcttgatcaaaagttggtttttattccccgaggtaaagcaaaactggttaggttatagtattgttggcaatgttgtagtggccttggtattgattttgcaaaatcattaa

SEQ ID NO: 165187 - DNA, 261 bp, Enterobacter cloacae
atggcgctgagtcagatcgagcccgagaaaaccgaatcaccgtttgccagtttgtccgagcgtgaattgcagattatgctgatgatcaccaaaggtcagaaggtgaatgagatctcggagcagctgaatctcagcccgaaaacggtgaacagctatcgttaccggatgttcagtaaactgaacattcatggcgacgttgaactgacgcacctggccatccggcatggtttgtgtaatgcggagacgttgttaagtcagtga

SEQ ID NO: 165188 - DNA, 297 bp, Enterobacter cloacae
atgaaaagaaaagttctggcaattgtggtacccgcgttattaatggcaggcgcagccaatgcggctgaaatgtacaacaaaaacggcaacaaagttgatttctacggcaagatggtaggtgaacgcatctggtcggacactgacacaagcaacagtgaaaatgaagatacttcatatgcccgttttggtgtgaaaggcgaaacacagatcaataacgaactgaccggttacggccagtttgaatataactggattggcccctatatttccatacactttttatcacttaacccatga

SEQ ID NO: 165189 - DNA, 489 bp, Enterobacter cloacae
atgcatcttccctggccaaacagcggcgattacggcatgaacctgctgaggttgggaattatctcgctcctggggcccatcgtgtggctgtgcctgagagcaaaaacggtgagtatcacccccacttgtttactattatttgcaagcgcagtgctgtttactcttccggcattttggagggagttttcgcttatcttacgctcctgcagcaacccatcagggaaaaggaaacggttgccctttttttatctacttgccgccgcagctgttattgagtgcgcactctctttggccgggttttactgtccgcaatatctacccaattcactggccgaaaaatactccggctacgcgcccggcatctttcaacaggtaaacgtgaccgcctcgtttcttgcgaccgggcttgccgccctgctcggcacggtgatacttcagccgtcggttgtggcatcgctccagcataaaggctctaaccaacagcgctga

SEQ ID NO: 165190 - DNA, 1248 bp, Enterobacter cloacae
atgaagataagccgcgccgagtttcaatttttctttgaaaaaactgatcagggtgatgcgagcgtgcacattgaacagcatgacgtgcgctttaactggaagggtaagacatataccttcactcgtgggatggataagagcaaggtgatcgccactctcaaacagttggagctatatggtaacgccgacgcagatcgcaagatagcgaagatcaataagcaaaaggcagaatctgaggcattacaggcaaagcgtgcagccgcggttgcacgtacagcaaaactaatgcgtaaagacacaactcttacagaagagaaaattacatcagtttcagcgaaaaatttaccgcagatgctttatccaaaatacccattggaaattgctcaaggcctcccacatatgagagtgctatcgtatcgccgctgggtagggatgaaccataagaaactcaacagaattcccgagaaagaacgcatagcgctttttttagctactgcatcgttaaccgaggatgagttgctagcggtggcgcaaatgttcgctccaatgcctgaattccttctgctggccacgcctaaactggttctgctagtgcctgagtcggatcctaaacttgaattggagaacgagctggaatatacaaaaccgttttacaacaaaatttacggtgccgatccagttgagggtgtttctgatacaacaaaagcggtattagttaccgaaacagcgcctgatgtcgttatttcaagtccaaaagaagaggagccaagccagtcaaaacagcgcatatcgggagtacgcaaaccacgtaaatcgcgaattcgtcagctggtggaacgcgacgctaaaggcgatataccgttttacggtatgcgccgccgtacacaggcacaattccgtgttgacgtggcgttgaactgttttgaacgctgcgtgatttccggtgcaagcctgatgcgttgcgaagcggctcacctgttggcgcacgcccgcaaaggtggtgcgagctttaaaaacggcctgctgctccgtgccgacttgcatactttgtttgacgctggaatgtgcgcgattgatccgctggccatgacaatacattttagtctcaccatcttggaaagcgatcctgatctggctgcttatgaaggtaagactatcaagacagttaagccgattaactccaccaacttggacgaacgttggacgatatttctgacggcttatatggaagtcgacactgccgcataa

SEQ ID NO: 165191 - DNA, 3831 bp, Enterobacter cloacae
atgcaattcatcacacacgggcctgacattccggatgaacttctgcaggcccacgaggaaggccgcgtggtgttcttctgcggagctggaatttcctacccagccgatttgcccggcttcaagggtttggtggaccagatttatcagttgaacggtacaacattttcagaaattgagcgtgaggcctacgagcgggggcagttcgacgccactctggacctgctggaacggcgcttgccggggcagcgtatggccgtccgacgcgcgcttgtaaaagccctgaagccaaagctccgtcgcaagggggctaccgatacccaagcggcactgttgcgcttggcacgaagccgcgaaggtgccgttcggttagttactaccaactttgaccgcatctttcatatggcagccaaacgcactggccaagcgttccaggcctatgccgcaccgatgctaccaactccgaaaaacagccgttgggacgggcttgtctacctgcatgggctgctgccggaaaaagtggacgagactgctctgaaccgtctagtagtcaccagtggcgactttggcttggcctacctcacggagcgctgggcagcccgcttcgtgagcgagttgttccgcaactatgtggtctgcttcgtgggctacagcatcaacgacccggtcctgcgctacatgatggatgcgctggcggccgatcggatgctcggtgaagtcactccgcaagcatggtcactgggtgattgcgagccggggcaggaacacctaaaagccatcgagtgggaggccaaaggcgtcacacccatcctttacaccgtaccggcgggtacctatgaccattcagcgctgcaccaaacgttgcacgcttgggcagatacttatcgcgatggtgtgcagggaaaagaagccatcgtcgtcaaacatgctctggcccgtccgcaggacagcacaccgcaggacgatttcgttggccgtatgctttgggccttgtcagataaatcaggtttaccagcaaaacgctttgcagacctcaatcccgtcccgccgctggactggctgctggaagctttctcggacgaacgctttcagtacagcgacctgccgcgcttccatgtacctccgcacgcagaggtcgacaccaaacttcgattcagcctgattcggcggcctgcgccctatgaccgcgctccgcagatcatgctggtctctggaggagtcagctttagtcagtgggatgacgtgatgtcccatatagcccgctggctagttcgctatttggacgatccaaggctgatcatctggattgcagaacgcggcgggcaaatgcacgaccgttggacatggttgatcgagcacgaactagatcgcttcacagcgctagagcggtatggcaagacgtcggaacgggatgaaattctcttgcatgcccccaaagctattcctggtccactgatgtccaccttgtggcggcttctgctcagtggccgtgtgaaatcgccatggagtaaccacgagctgtatcgctggcaaggccgcctgaaacgcgagggcttgaccaccacattgcgtctggagttacgcgagttacttgcccctaaggtggtgttgaagaagccgtttcgctggaacaacgacgattcgagcagcaccgatgagctctcgcgactcaagcaattagtggattgggagctggtactggcagctgatcacgtgcattcaaccctgcgcgaccttgccgacgagtcatggaaatctgcattgccacacttgttggaagatttccagcaattgttgcgtgatgcactagacctggtgcgggagttgggcggcgccgacgctcgtagcgaccactcgtattgggatcttccttccatcactccgcactggcagaaccgaggtttccgcgactgggtaagtctgattgaatttctgcgcgatgcatggctggtagttcgctccaacgatagtgctcgcgctacgcgcatcgctctgagttggtttgaattgccataccctacctttaaacgtctggctctgtttgcagcgagccaagacgacagcataccgcccgaaaggtgggtaaattggttgctggaggaaggtgcgtggtggctgtggtccacaaataccggacgggaggtattcaggctgtttgttttgcaggggcgtaatttagcaggaattgcacaagaccgtctggaagcagccatcttggctggacctccgcgcgagatgtaccgggatgacttggaagccgaacgttggaaagacttagtggcacgttccgtctggctacatcttgccaagctcagtacatcgggcctcgttttggggctgtcggcggcggcacgcctggcggaaatttctactgcctacccacaatggcagttggcaaccaacgagcgagacgagttctctcactggatgagcggcaccggtgatccagactacgaggacagcagagatgtcgatattgcaccccgtaagcggcaggaactggtgcaatggctcgcaaagccaatgccagaaagccggcctttctacgaagacacgtggcgtgatgtttgccgcacgcgtttttttcatagtctgttcgcattacgtgagctatcacaagatggagtgtggcctctggaccggtggcgtgaagctttgcagacttgggccgaagaagggatggtgttgcgttcttggcgatacgccgcaccgctggtacagactatgcccgatgcagtacttcaggagattgaccatgctgtcacttggtggatgagggtagcctcaaagattagccaccaacaccaagaggacatcctgctgaacctttgtcgccgtgtcctagcactggaaacaggagctgagtctcgcaccatcaaaaacggaatcgagacctatgaccctgtcggctcggcgatcaaccatcccatagggcacgtcacgcaggcactgatctccctgtggttcaagcagaacccgaacgacaatgatctgcttcctgctgacttgaagcccatcttcaccacactgtgtgacgtgcggatagatcgatttcgccatgcccgggtactgctgagttcgtggctgatcacatttttccgcgtggatcgcccttggactgaacagaacctgttgcccttatttagctggagcaatcccatcgaagcaaaagccgtgtgggaaggcttcctctggtcgccgcgtctgtaccagccgttgctgacagctttcaagtcacagttattggagagcgcaaaccactatgtggatcttggtgagcaccgccagcaattcgcaacctttctgacttatgcagcattgggcccaatcgagggatacaccgtggaggagttccgatcggcaattggcgcgctcccacaagagggtctggaggagtccgcgcaggcactctctcaagcgcttgaaggtacggccgatcagagtgaggactattggaaaaaccgtgcccagccattctggcaacagatctggccaaaatctcgcggtctggccaccccacgtatctccgagtctttgactcgtatggtgattgccgcccgaggtgaattcccggtggctttgactgcggtgcaggactggctgcaaccgatcgaacacccgcactacgttgttcacctattgcacgaatctggtatgtgcagcaggtatccagcggacgcactgggcctactgaatgccgtaattgtcgaccaacagtggggccctcaggagttggggcaatgcttggatcaaatagtgcaagctgatgcacagctagaacaagacgcccgttaccagcgattaagtgaatactctcgaaggcgtggcgtgtaa

SEQ ID NO: 165192 - DNA, 219 bp, Enterobacter cloacae
atgcttgtgggtcattcgtatcagaatgaaattgaattggttctgcataaacatacgggtagctgttacatggatgcagaaccggcggcaattatctttatctatttgctgtcagaactgactctactaatgggaaatgagctcaccgacggcaaaccgtgcagaatgcatttcatgctccagtcacacgaacaaaccacacagcaagtttctgtataa

SEQ ID NO: 165193 - DNA, 558 bp, Enterobacter cloacae
atggccagtgatgtgaaatcgctcgggaaggctcttcagcggctgagaagtgaacaggggttgctggcaggcccagaagaatccgttgcaaagcgaacgaaaacactcgttgcgttagccacagtagaaaaagaatttgcaggtaaggttaagaagctatcgcagcggtacgccaactatgatttttatctgcaaggtaatgggcatttaggctggatgttccctgctagcgctgggacagaatcgatggagatatttgttcaggcaaataggctccaatctggtcttaaacagtctcaagtctctcgcatcatgaaatcagccagagatttcagatcgagggcggcaagcttcaaggctaccgctgtcgctattgcaggggatgccctcattgccgaatcagcctaccgagaatttatgcagagaaatccgacgctgctaaccaatcagagacaaaaggaacaagaggaaatccgcgctcaagaagttgaacgccaccagcgtaggaattttatacagaaacttgctgtgtggtttgttcgtgtgactggagcatga

SEQ ID NO: 165194 - DNA, 246 bp, Enterobacter cloacae
atgcctgaacagttcgtaatgaggctgtatgtttcggtaggccggtcctggatacagagagcgttgtacaaaatcgctaatccactgctgaccatcgtatatgcaaacgtgcccgctatcgtggcccgcaatattctggataacggctacgtcaccagcatgaggttgatcgtataccaggcggaatccagcattgaccaatgttcgtcccatttcttttgccagacgcgtattggggatttttaa

SEQ ID NO: 165195 - DNA, 132 bp, Enterobacter cloacae
atgaaggacatcggagttggttatggacatcgaaactcaatgaaggtgtatacagactaccatcccgtcatcaacatgctccatcaaatgaccaatttcgttgatgagatgtctggcaccatgctccgttaa

SEQ ID NO: 165196 - DNA, 1059 bp, Enterobacter cloacae
ttgcagctatattttttaatactaatacctcttacactattgagtgtgctgattatattattcttatttggttggtttaaactagatgagaagaacctattcaatcagcctttattcataacttcaatattactccctttgtattatttcttagcatttggtttatggacgtggaaagatcagaatatattactatcatcaagcggcttcttaaacttctatgaaataagcaagctaccgttattgatacttgcattatccgtaccccttgcatcaataataaacaacattcacagaaccattcaaacagagaagcagatacatgaatcagagagaaaaaacaactttgatataacaataaatcatatgaaacactatacagagctatttaaaaaaattgaatcagaagaactgacagagaagtatgaatatattcaatccataaaggaacccaccataaaaaaagaaataagttttacgccgtcgattcattaccctaatcatttatataaaaaactattcatatccaaagataaaaacagaaccattttattcaaaacagatgagaaattcctaaaaaaaataatgtatgattggaaacatcttaacttctgctttaaaaagctacataaacacgcacaaaccttacgagcaaataaagataacggtaactttagggccgtaaagtgtaaaatatattttgagatgtgcgctgcatatgaaactttatgtaacacattagagcttggagatttcaggcctgcaatctccttcggttttgaggataaagacgatatattccagatacatattccattttatcaccacataactctataccaatccataaaagccattgaaaaattatctcttaaattatttgatattataagagatgaaaacattgatacatacttccctactaaccaacgactattcatctatgggaatggtgctatagatgattggtcatattatttgaataatgtagttgtaatgaatgagctaccaaccagaattacgcgcagctcttcttcttttgtaaactctcacaggtga

SEQ ID NO: 165197 - DNA, 471 bp, Enterobacter cloacae
atgacactcgatgttttatttcatctaatgaaaacgatctcacctgaaaaaaacaccgccggtgaaaatatacatgcgctcattacgttacttttgtcagatagcgatcgcgctgaggcgctatcgcctttcatccatcgactgcatcttttggctttcgcccaaagcaacccgggtaacgccgaagagttgctctcagcgcatttaccaaaagaggatgggatccttccgctgctggactttgcggactggccaaaggtgcgttacgccgcgtcaggcgaagctcagacgcgtgaatcgcaggagtatttccgtgatatgacctcggctgccaatctgttacgcactgcgctgatcgacgccgagcgagcaaagggaacgcctgcgctttatattctggataaattactcaacctgaacagcgccctgccggagcgatataaacagatggcgaatattccctacgcataa

SEQ ID NO: 165198 - DNA, 216 bp, Enterobacter cloacae
atggctgtcgtggttcatctggacaaaatgctggtagaaaagaaaatgacgtccagagccctggctgcctttgtggggatcacggagcaaaacctgtcgctgctcaagtccggcaaggttaaagggatacgttttgatacgctggcgaaaatttgcgaagcgctgcagtgtcaacccggcgacatcctctcctgggagccggacagcccggaatga

SEQ ID NO: 165199 - DNA, 543 bp, Enterobacter cloacae
gtgaatggtgcgagggataaactcagtctggtgctcatcgcaggggtgctgccgctatttctcatcctggttttaatcacccctttgtggatttatttcaccggcgagtcgtttttcatttccactctgctaaagctcgctgaggttcagaatgacgatctggcggttttggcggtttcgacggtttcgccgctacgccagatactcctgctggcgatcctttatctcccggcggggctgtttgccttcgctatctggcagggaatgagcgtcacgcgacaggttcgtcaaaagcagatcctctcccgggccctggcgaacagcgttcgcaacattgcaatcgcaatgctaagccttgggatcgcgctgccggtctgtcgctttttgatccctctcacgatcgcgtggccgggacattactaccaggtcacccttttgcttggggattttgttctgttattaaccggcggtttgctgctggtaacgtttcactccctggtcgaagggatcaaagcggaagaagaaaataaggagttcatctga

SEQ ID NO: 165200 - DNA, 348 bp, Enterobacter cloacae
atgaactggattgatattctctggacgatactgaccttcgtctcggccctgctgtttacgtgcggagcctgggccgcgcggtataaacttcggctggtgaacacaatgctgaccgtcggaatcattctctatagcatggagatgatgcagaccatcacccatctgaacagttcaggttactttttcagaatgctcacctgggtgattcaggcctcttatctcgccattagcgtgtatcacgtgtggccaaaaccgtggatgaaacgcggcgctaactgtctgaacggtggcaagattgccatcgcgctgatgcttatgtcatgcttgagcatgctggtcttaaaataa

SEQ ID NO: 165201 - DNA, 1116 bp, Enterobacter cloacae
atgaataaacggtatgtgtacagccgcaggcgactcttagccgcaggggtggtttttgtgtcgctgattgctgcaggcatctacctgcagccgggcgtcagcactccgtccccgcgccagacgggagatgcaaccatagtctcgttcctgacgccattactcagcggtgcgcgaggcagcgttgccgtcgcattcattacgccgaaaggcgtgcagtacgctctgtgggacagcgattttacgaaacagtatgaaatcgccagcctgaccaaaaccatgaccagcagcctgctgattgaggcgcagcgacgcggcgaagcggcgccacaaacccgcgtcggtgaacttattccggagatagcgggcctggcgagcgatattaccctggcgcagctggcttcgcaccgctccggcctgccgccgctggcgacgtcgttacccgagaaagttcaggtcattaaaagcatcatcctgcgtgacaatatctggaacttcgatgaggagacattaatagagatggtgaataaagccagcgtcgaacgcccggctgaatttgactattccaacaccggctacgcgctgctgggactggcgctggcgcgtgcatcgcatcaatcctttgctcatctcctgcaaacgcgaattttcgctcaggcgcatatgacagactccgtcgtcgccagcgatacgacgcccgcctctttcgcattcagccgcggtcggtccgcttccggcctgagcgaagcgccgtgggtcatgcacgcgtttgcccctgccgcaggcgtgcgctcaaccattgtcgacatgacccattacgcgcagtcgctgctggaaggaaagctcgcatggagcgacgcaatgacgccacagtttgcgactgacgatcccgattcacgcgtaggctatggctggttcaccacgcgcattcaggggcgcgatatcacctggcatgatggtgaatcgtcagggtttgcttccgctattgccttcgaccgacagcgtaaaagcgccgtggtgatcctttccgacaccgcgtggccggtggttgtcccggccatacggctgctgttagcccagccatatcaggcagcagaggcgcatcatgaactggattga

SEQ ID NO: 165202 - DNA, 807 bp, Enterobacter cloacae
atgaaaagaagtctgctgtatggcgtttcgctcgcggggatcgcgctttgcgcccccgcacgcagtgcggatctgtccggttacgcgggactgggcgtcgcggtcagccccgtttattcgggatcgcagcattacgcgcccgggccgctacttaaaggcggcctgagtctgaagagtaaagactatgggcagtgggatctctctacggaaggtcttgcatggacatatagccccgacgccccgtttgccctgagcctgctgctggcctctgatgaggggcgaaaagagacagttaactatcccttctccgcccgaaaaaaccgcgacctgcagggaatgggcgatatgtccgacatgctgatggctggcgcggagatgcgttatcaccgcgaggactggacgatatggctgcgggcgttaagcgcaacgcaaaaacaccggtacggtggcgagacgcagccgcaggcgaggaccgtgaacagcggcgtaaagtccaccctctggcgcgggcaggacgtcgagttttcggtcgcaggtgacatcacctgggcgaacggcggctatcagcagcgccattatggcgtcaccgcgaaccagtctcagcgcactgggtttgaggcatattcaccctcatcgggtttgcaggaagctggggtcgatagcgaactggtctggcacatcagcgaaaatctggcggctggggtggccggccgcgcagcctgtctgattgatgaagcgggtcagagcccgctggtgaaaagccgcatacagtacaccctgtcatccatgatccagtacgagttctga

SEQ ID NO: 165203 - DNA, 504 bp, Enterobacter cloacae
atgcgtaacgttcttttgatgtgcctgttactgacaggatgtgcaacacagatggatacgccggaaaaacgcactcataacttttatacgttttacctcacggctttcgttacagacagcaaagaagataatctcgattccccaaaaatgcgtgagtatatcgcgcgagacacgctcttccgactgcagagaattttctctctctatgagcaggaaattatcggttccgactattttacctatacgcaagactatgccgcggagtggatccctgacctaagcgtaagcaacgcgataaactctgcgtccggaaaacttgttaacgtcgagctgggtgtgggtcatgagcagaagctgcagttaaacgtgtatctgcgtaatgaagacggtaagtggaaaatatatcgcgtcaccgatgcgagccatcattttgaacagtatatttttgacgacagggcgattgctgccgcgcaacgatatgccgcaagtataacgtccccctaa

SEQ ID NO: 165204 - DNA, 291 bp, Enterobacter cloacae
atggcatggaacaaacacgctgcggccctgcatgcacgccagagtgccggcatttcatcgcaaaaacgctgtggtgaatttactcgcaaggcaatacgagcaggtggcgcggatattggaaatgcacccaatgcaaaaaactatggcagggagaaaatccggcaggtcacatggcgatttatgacggtacaacctggtactctgatttcagacaaagagatatgtggggtggtccgggatatcgctccgcacgccctgcttacaaaatttacaggaaaagctgatgcgtaa

SEQ ID NO: 165205 - DNA, 393 bp, Enterobacter cloacae
atgctaactgatttagatacattacgccttcgattcgaagcttctgagcgtgagtcagaacatggatttaacctgcacaaatacggtattgcatacgccgatgaggcaacacaagcaagatgggaagcgtgggtagcctgccgcgccgccatgcttcagggtgccgatggcaactctctggtgattccggatggttgggtgatggtgccggttgagccgacggagaagatggttatcgaaggcttcgagtcggagccagacgaattcttcagtaaatctgaagtgtgggaggcgtatcagaaaatgagtggctgcgaacaagcagcgcatcgggccaagttatgctgggcagcgatgctctcagcagcaccacagcaggagatgaagctgtga

SEQ ID NO: 165206 - DNA, 210 bp, Enterobacter cloacae
atgaaagttaacgttgaacaaagcggtgaaacaatctggtcccgtgataatgaaaagctcgagggtgttgcttgtaccagctatataaaggacggcacacagcagaaaatcattaccgcccttgaggatgcgcttaatcaggctaaaggtgaactactatgctgggatgatagagatagagtaacgaatcgaagccgcaccacctcctaa

SEQ ID NO: 165207 - DNA, 270 bp, Enterobacter cloacae
atgtcatttttgcataagagaatgcacctcaacgcgggggatactgtcgttgtgcagtgctcacatcagtgcaatattctgctgatgacggattcaaactttaacaattatcgaagcggtagaggtttccagcatcatggcgggggcggcttctttgagcaactaccggcacacttacatgctcctcattcaggttactggaatgtcacgctggatttaggaggtggtgcggcttcgattcgttactctatctctatcatcccagcatag

SEQ ID NO: 165208 - DNA, 330 bp, Enterobacter cloacae
atgagcatcaccggacctagatttgcctgtcttttcaccacttcaggctcggtggtatgctggagttctcacacagccaacaaggaaaaaaaatggcaaaatttactgtacgagtggaactgcgcgattcagaagatgcagactatgatgaactccataaaaaaatggaagcagcgggcttttcgcgaacaattacaatcacagatactggtgagacctatgaccttcctaacgctgaatatttatttgaaagtgatgaaacaattgacgatgttggagcccttgccaaaaatacagctagtaaaattaaacccaagcctcgaattttag

SEQ ID NO: 165209 - DNA, 429 bp, Enterobacter cloacae
atgaattatgcctacagtccttcaaaaaatgccttctattatttcggctggaaagatgaatacgatgcagctggtacgtggccaactgatgccgttgaagtagccgacgatattcatgaaaagtattcagcagatccgcctaaaggaaaaattttaattgctggtgctgatggtatgcctgcatggggcgatattcccccaccgactcacgaagaaatcattactgaagcgaatgttgaaaagcagaacaggattgatgctgcgaacgactacatgaacagcaaacagtggcctggcaaagcagcaatgggacggttgaaagactctgaaaaggtgcaatacaacgcctggctggattatctcgacgcactggaggcggtaaatacacttaatgcgccggatatcacttggcctgaactccccgcctaa

SEQ ID NO: 165210 - DNA, 519 bp, Enterobacter cloacae
atgggatttttcagtagattggaaaaaattgacagcggcataaatggcttttatgcccgctggagaaaatggatctggggggcactggcactgccagtggttatttatcttggctggtcggtatgggctgcggtctggggaccaccgtcagggccggtaacgctaattattcacaatgagctcgacaggccaattttaggatttagcgtgaatggcgtggcgggtgcgaatgcatttgcacatggaggtggtgggtcgacctgctgtgggagtatcagtggaaataaggcagatgtcacatggacattggacattactcacgagcaatatcttaaaggtatgaggttagaaacacgccgtacgttaatggctatgcctgcacgccagtggggtgaaaactttctgcacgtttattttttatctggtgataacgtctatttatggtggagcacaggatttaatcaccctgaccctaaagacattaaagaacaaaccgtagaattaaaacaggataaataa

SEQ ID NO: 165211 - DNA, 297 bp, Enterobacter cloacae
atgggcggtcagcgttatcctgaagagttcaaaattgatgcagtcaaacaggttgtagatcgtagtcattctgtttacagcgttttaacacgtctcgatatcgccacccatagcctttacgcctggagaaagaagtacggtccggattcttccactaataaagagaagatagatgctcaggccaagatccgccgtctccagaaagacctgaagtgggctaccgacgaacgggacatattaaaaaagccgcttcgtacttcgcaaagctgtccgactgagatacgcctttatccgtga

SEQ ID NO: 165212 - DNA, 1392 bp, Enterobacter cloacae
atgttccaaacaaccgaacgccacctcaagaccgggagcgatccccgcgcaatgcccgattattcagcattacgtgatgaactcgctaagctatcccatccggctcgcccggatgtgaactggcgatatatcgaaagactctgtctctcactctttgagcagaacggtgtggagctgcaaacggcagcctggtacacgcttgcgcgtacacaattggccggcttattcggacttaatgaagggctggcgatactggaggcactgataagccatcagtgggaggctctgtggccgcagccagtgcatgcccgcatggaaatcctcagtagtctaagtcagcgtcttcagcaacggatgcgctcgctcccgttcaattacggcgacctcagccagctgtatcgggcggaacaactgcttgcctgtttgggggatgtgctgcagcgtctggagcttaagcattttagccagctcgatacgttgcgtaccctgatgcacaatagtgctgttcggctggaaaacagtgatggcattagtagcaccggaccgaacattcagccaggtatcgcgttgcctgcctccgtgattaatgatgaaacagcatccaaaagagacctaactggttgtccgagtgtagatttccaggcaccagatagtgcagttaaatgggtatatgtcgcacaaccggaacagcagccgaacgtggaagtactggcaggtgtgccaacaccaataaaaaaatggaaacccttcatcgccgggatgtgtaccatgctggtgataaccaccgtcgcagtgcggggctggcagtttcttcacaggccagaccctctgcagactcagcttgccgcgtcattggctccgttcccagtaactctctcgcctgaacaactggatatgttgcgtcagcagactacgttaccgaaggaccttatcagccagacacagcagcagctagcccggctggataaattacctcctgactggaatattgcttacagtcgtcagttgattgagcaggccagggtactgtggtcagagcaagctgaacccatggcattacactggcagcaacaactcaatgctgcagcattgccggcagaacgcctgaatggctggtatcaggggatgacaacgttacaaaaactgagtgatcgccttaatgggcttgatgagcaaaagggaaaatacataacggtcagcgaactgaaatccgttgtattttccatccgacagtcttttaaccagtccataccggctgaagaacaactgcgtgtattgtcagaaaatcctgctggagtacctttacctgccgctgcgagatctcaactggagatgcatctgaaacaactgactgcccgatatgctgaaataaaacagaatgcatcagagtaa

SEQ ID NO: 165213 - DNA, 276 bp, Enterobacter cloacae
gtggaatttaaaatgcgctttgaagattattatgaaaatgagtttaaaaatttcttgcaagatatttttaaagcaaacactgcgcctgatgatgatatgctggacgagctgcttgagcattttgaaaaaatcaccagtcatcccgatggaccagacttgatataccacactatagatgaggaagactgcaatccagaggggataactaaggtaatgaaagcatggagaaaatctcaaggcctcccgctttttaaaaactctgaagctgattcgtga

SEQ ID NO: 165214 - DNA, 264 bp, Enterobacter cloacae
atgacagcctcatataaacatcttaatgactatactgaaaatgagtttatccaattcgtaaccgacattgttgaagttaattcaaattcagaggaagaacatcactctttggtatcaaagttcgaagagctggttcaacatccaaggggtaacgggcttatttattatccagaagtcggtgaggacgattcccctgagggaattgtccaggtgatcaaaatatggagaaaatcaaaagggctcccattattcaaagactcataa

SEQ ID NO: 165215 - DNA, 933 bp, Enterobacter cloacae
atgacccaggtctggggggaatggtccctgaccggcgtattgggtgcggcccgggggattccgtatgtagtagcgatgatgtccgcgctctacgttccatctgcgggcgaggggagtgacagggttcatggccgggacgaattctggtacgaggaagagttgcggcagaaagccatcaccggggcaaaagcaacaacccgggtgaggttcttctggcgtcaggatgagcagggcaacatccgggtctatggcgtccatacgggtgaaggtaccccgtatgaaggtgtccgcacggcaaacatggtgtggaatagtgaacataatcggtatgagttcactccagctcatggtgccgatggtccgctgattacctggacacctgagaaacctgaaggcagtgaccttccatcacataccggcagcgacattaagccaatagaccaggctacaatactcgtcacgccaattcctgacggcagagatgaatacacgaccccacctttcccggtgccggatgaacgcgatcttaacgattacattctggtgttccctgcggactccggaattaagccgatttatatttatctcaaaaccgcgagggatgaaccaggtgtggcaacaggggagggtaagacactatcaggttctgaaaaatggcttgaagcagcaagctctggtctgggggaacctgtgccatcacaaatcgctgataagctaagaggacaagagtttagtaattttgatgcgtttagaactgccttttggaaagctgtagctgaggactcagcattgctttctcaatttacaagaggtaaccaggctttaatcaaaaagggatacgcacctttcactattccagaagagcaggttggtggtcgcaaaacatttgaaatccatcataatgagagaatagtagatgggggaggtatttga

SEQ ID NO: 165216 - DNA, 327 bp, Enterobacter cloacae
atgttctcaaacatacatagaattaatttcatagaaggtatgcataaattattaagtgatgtttaccctcagaagtacgatttcttgggcctagacaaaacaaatgccctgatagagctgggtactaaaaaattcaaacatgataatactaggccaaagatacaagccatatatattatgttaatgtttgttatcgggcatggctttgaaaatgatttattccatcagaatgaaaatattttcaatagtaatattcatgatgatgacttttacatattaaaatccaaaggatttattgtacggttcataaatgcactggttttatag

SEQ ID NO: 165217 - DNA, 528 bp, Enterobacter cloacae
atgcgatatagtatgattctaagtttattaacttctttatacacatcaatttctttagcagaggccccaaaaatgaaagataacattttttttactattaatgttagttgcagcggtcagaaagaatgtacatacaataatcagagtgaaattccagtcactgtgagatttcagaatttatattccaaaggttactatattcctttggaatatattaagaaaactggacccagtatcaaattaactgatcgcggcaataaaaagagcatgccactcaagccaaatctagttagttggggtttaaagaaaaaaatgacttacatccctgaaggtgggaatattgaatttacctggactcttttggatagagatatttcacaatttataaatgatggaaacctcaatgttgatgctgatttcaaaattagaacaaaaatatatgatgataaggatagtgaaattggtgactttatttctatgtcaagattagttttaaaaggaagtaacctaaatgaagataaacgctga

SEQ ID NO: 165218 - DNA, 810 bp, Enterobacter cloacae
atgggaataagtggaggcattcaaagtccatctgaggtggctaggtgcgaagatcctgtaataagtgcgacgctaccatgcgcttcttgctggagtaaggactatacaaaggagattaaagtatacactggaaaaaggtattcggatcagttgaacgcggctggcgaatcgtatgattataattttggaacagttcagtataaattaaaaattctctgtaaaactgaaaaaatagttgttgttgaaatcagattcaaaattgaatcggatgatgctgtaaatgatgcggctgtagcgcaagctaaaaaatcattaacagaaggggtcaaaaaatattggggcaataagttttcattaaaaatctccgaccctaaatgtgggaaacaaatactacctatcgagtttaaagtgctatttgtgaaatctgatgaacactatatattcaaaatacacgataaatatgatcgtgaaggtgtcacgggaaatgtcctcgatgtatcgaaagatacaggtccatggacatatgcccacgaattcggtcattgctatgggttacctgatgaatatggatacaatcctgacgcagaagagaatgatcaagtagtttactataaaccggacgggtctcttgattcaccaatttctgttccttataatggaggagatccgagtgatccagcttcaacgattatggctgcatatgggaatgctattattctgaaaagacatggatggattatagctattgaagcgaatgagatttttaatgaacctggtttaggaaggagaataatatgcgatatagtatga

SEQ ID NO: 165219 - DNA, 486 bp, Enterobacter cloacae
atgattaatgatatgacagaacatatgttcttgttacaacgtgcagaaaaatcacgaaggctatatgctcttgttgatggtgctcaatatgaacgattttattcagatgaattatatgaaagcaagagtattaagtcgttattcgaacattctgaggatagaaaaattgcatttgcaggcccttggttgcttgatatttcaaccttaggtagtgactggctgaaaaaaataaacgctcttgagctgaaatatccttcagtttcttggttgttaagttcattggctattaatgatttggcacttcatttaaatggaaatttaaaaattgttctaccaaataatgaaattggtatgctgcgatattatgatccgcgagtgcttatttacttacctgacgttttgactaaagaacagcttcagtcatttacaactgggatagttgcgtggggatttctctatgaggatgaataccattacattatataa

SEQ ID NO: 165220 - DNA, 588 bp, Enterobacter cloacae
atgactatcgaaaaaagccgattcaattcggaggccgccccacaatcctgcgttacccagaaaattattcctcaagcggtcgagggcgatatttctgttatccggtttggtggcatcaaagttcgcatcgtcaatatgggcggtgatccgtggtttattgccaaggatgtttgtgcggcactggaaattgtggatcacaaagtgcctatgcgccgactgaacgacaacgaaaaggaggggtattcaatacccacccttggtggcattcagacaatgacaattgtctctgagtctggtttctacaaactgatcgcccgcagccgtaaagcgtcaatccccggaacggctgccaaccgattcagcgagtgggtatttggtgaggttatcccgcctattcgtaaaaccggctcctatggtgtgccgttcgccttcctgaacgaccacagcaaacgcaaagcagcttacgacaagaaggccagcaagcgcggtaaagacctgcaagcctgcaaaggtgagaagtcccgccttatcgccgaagaagttgaattatggcgcaaatatcaacctcaattgccggaggttcactaa

SEQ ID NO: 165221 - DNA, 474 bp, Enterobacter cloacae
atgaatttacagcatcactttcttattgccatgcctgctctccaggacccgatttttcgccgcgccgtagtttatatttgtgaatacaatgaagacggcgcgatgggtattatcatcaataaaccggtgatgctgggtggacctcttgcagaagatcgcggctttatcctgcatacgccgccggtattctcttccagtattcgaatttcggataacaccgttatcacgacctcgcgcgacgtgcttgaaacgctgggcaccgctgagcagccttctgaagtgctggtggcgctgggctattcgtcgtgggagaaaggccagcttgagcaagagatcctcgataacgcctggcttaccgcgcctgcggacatgaatatcctgtttaaaaccccgatcgccgatcgctggcgtgacgcggcaaagctgattggcattgatatcctgaccatgcctggcgtagcggggcacgcctga

SEQ ID NO: 165222 - DNA, 318 bp, Enterobacter cloacae
atgttagacatcgctgaagtgctcaaagcacgagaaaatgagtttattagtttaagagaattgattactcgtatcagactacagcaaccacatgtcagtgaatccgatatcgcaagttttctttacattgaaaatagtaatagagagctccctgagtgggtgaagcaaggtattgcaagcacgattgaaggtaccgatggtggataccaggattcagaattggtaactctcctgaaggttattcatgaggaagggcatatgcctgaggtgactccaccatctgagcctcctatggacttcgatgatattccattctag

SEQ ID NO: 165223 - DNA, 459 bp, Enterobacter cloacae
atggcgggatggggacagccggtgaaagatcactggtcagcaccagcgtttgatacttatggttttaggcgctccgagttgaagcagttagcggataagcttggaattgacctttcaactcctcttgaggatgttaagcccacatcactgaatggtgttgagcaaaaaccgctcagtgaagctgatgttgagatcctgaaaatggaaatcgactcgcttaaaaagcaggttagaaaactcgaaaatgaacgtcctattttaattaacagatatcgggaagatgaccctctctatcttgcgattaaaattcggaatcaagaatgggcaaagtatgaccctgataatgataggcagacaagaggcaaccaaactgcgattgttagggacttagaggataagggtttttcgaatgtccaggctaaatcaatcgaaatggtcgcctgtcctattaaacgttga

SEQ ID NO: 165224 - DNA, 435 bp, Enterobacter cloacae
atggaaaagaaaaaccgccccgtacagcaggcggctaactcagatattcgcacgtctgatattacgccgaccaccagcccggtacaagtatctaagcgtactccaaagaaacaccgcgcccgcgtctatatgctgcgcactggtgtagagggatggacagaaaatgacattctgcgttattgccgtctttcatccgggcgtaattatgcgtcggagttggaacgccagcttgatattcaactggagcgtatcgacgagaaaaacccggatggtatcggcgcacacctgcgctaccgcttttcctgccgtggcgacgttctcaaggtgatccaacttgtgaaccataatgctgccattaatgaacatcacgggctatctcagcaggatattgccgacattctgaacctctacccggacgcatttaacgccgcataa

SEQ ID NO: 165225 - DNA, 1224 bp, Enterobacter cloacae
atgtcaatttctagaagaaagctgctttcaatggcagcaccggcagctttggccgcaggcgctgctcctcaggcattcggtggcaaaagtaaaaaaactgtgtcagcaccagcaagcctcatgagggcttcaagagcagcgaatttactcgcggatggaaagaaagttgctatagcctgcttcggtgactccactatgtggggatccatgcctggcgctactacgaccaagaattactctaacccaccgaattccttgcaacttgcgcttgatttaatttatccaggtcttactaccgtttcaaataatgcaatacctggcactacaataaaaaaattacttaacgggacagatggtggggtaggttcatatgaggacagattatccaagtctgacgctcttgtgatttattgtaaccactgtctgaatgactgtaactcatatcaaagcgatgagcatgagtataaaagtaatatcatggagtttgtgaatattacaaggcggtacggaaagatacctgtaatagtgacaccttcggtgatatcaccgattagagatggcaaagaatttatgatgaagcgcatgcctgcatttattcaggcacagcgtgatgtggctgcggaaatgaacgtcgatttggttgataatttctactattcacttaaaactagcagaatgataccagcaaataagatcaatggggatggtgttcacctgacagattctgcttatcaaaatgcaggttggaatatggctataccattagtattgccaaataagttgattaataattacgatctgtgtggcctttctacaactcaatattatgataaaattaaacattcgagagcgatatgggatgttgagaacagatttggttctgttctaactggtgattctcttcctgagaagcagatcataaacttcccactgttgcttgactcgccgacagaccattctacactgtccatatgcggtttcactagcgaggcaggtggcatttcgaatatcacctactttgggaaaagtgatgacttgagatactctggaaagattaactacaaaatttccagtggtttaaaacatgaccaagtattcaattcagaaaaatgctttctttcagcaggttttcacattataggaattgaatcttcaaacgagataggcagtggaaactttaactttgcaggcgttcagctttgcccgaaaccatcaaatgcataa

SEQ ID NO: 165226 - DNA, 1023 bp, Enterobacter cloacae
gtgcgcaaaaataactttgatatcctgaggctcatgctggcgttaacagtcatgtttttccatattggagggctaactggtaacggacttcttaagctggcgcctggagatctggctgtaaaatgcttttttgtcataagtggttatttgataagcaaaagctatctgaagaacagtaatctgtacgaatactcgaagtcacgctttctcagaatataccctttatattttatgtgcgtaacctcttgctttttcattggaatgtttttgtattctagtggagcgatggcgtatctccaggatggagcagcaaagtatcttgtggcaaacctcgcattccttaacttcatacaaccagacctgccagggcttttcgtcgataacctcaaaaatagtgctgtcaacggatcgttgtggaccattaaaatagaagttatgttctatatatccgtgccaataatttatggaattattgcgaaggtttttggcaaaaaaataactgttgctgttattgcattgctgtccctgttatcagcaattgctattgagatcatcgtggataagtatggattgagcgagtctttaaaaaatcaactgccatcccttatgatattcttcatggctggtgcagcattgaactttttcacaccatcattcttaaatgttaaatatctgccattgcttttggttgcgctatatttctgcgatagtcatatcttaggtaagattatctatccttttgttgttgcagcatttgtttatataatcgcattcaagacaaaacctatatcaattcatgatagaattggcgatttgtcctatggggtatatattttccattatcctgttattcagtttatgtatcattttggaatgtataagaacttctatatagggttcgtttcaactattgttaccgttttagtactggcatatgcgagctggcatttaatggagaaaaggcttacatctcataataaaaaagaaaaaaccattccgaactctgtttctgacgcagtttaa

SEQ ID NO: 165227 - DNA, 528 bp, Enterobacter cloacae
atggaatatccggcctgcgttcccggcagaatttcaatctgcaccggctcggcgcgcaaacggttaatttgctccatcccctgttcgatatcgcgtaaattaaggataccgcctgtccgtcccggaaacgccattttcagcatgcgcggcgtttcaccttccagacggatcgcttccagccgcccttccagcaccacaatattcagctggccgccggagagatcctgctcggtaagaaaggcgcggctggtgatatatccccggctgatataccagtcagaaatacgggcgagaagctccgttattttctccatatccagacaccggccctgccacggcgcaaccagggcctgctgcgttttcggggaaatgagggtcgtgccggaaagggtaatggtatcaatggtgaagcagggcccggcgccggctgcaggcagaggcctgtcaggcgccgggcgaggaatactccgctccagctcttcacgctgttgctggttctgtaataaaagctgctgctgttgctgctga

SEQ ID NO: 165228 - DNA, 2712 bp, Enterobacter cloacae
atgtttaagttaaaaggttatcaacaacgtgccgttgatgtgatgcaatctttcctatcaaactgcctcagtagtgacaatgttgaagatgcgtataagttagctctgaaagaacaagacctcccttcacacgcttaccgtgattatggtttcgagcaagttccgtacttttgtatgcgtattccaacaggcggtggtaaaactgttcttggctcacatgctgttgaggttgccgcacgtcattacctagagactgaagcccctattgcattatggttagtcccaagcattacaattcgcgagcaaacagtagaagcactgaaaacaccgggtcatccctatcgtgaaaagctcgacgcagcttttaatcgccaagtactggtgctcgatattgatgaagtgactcaaattagaccacaagacttaggcaataaggccattgtggttgtatctaccctagctaacttgagagtttctgacacctctggacgcaaggtttacgcttaccacgaaaactttgagccacactttgccaagattccagcaaatcacccttccttgccgctgttggagacggtttcagaggctgatgtacaagagaacggtttgagtagtcgtgaaattggcagcatcaaattctcttttgccaacttattagccctgtatcggcctgttgtgatcgtggatgaagctcataatgctcgtaccaacttaacctttgatacgttgcgacgagtgcatccagctgctgtcatcgagtttaccgctacaccaaacaccactagcgcaaacggtagtaacgttctgtttcatgtttcggctgccgagttgaaagccgaagagatgattaaattgccgatcgttttgacggaacatcagaattggcaagatgcagttcaggatgctgtgatcactcgtaacaaacttcagaccgatgctcaaaaagacgaagactacatccgccccatagccttgttccaagctgaaaacaaaaatggcgaggtgtctgttgagttacttagagatcatcttataaatcagcttaacattgatgaagataagattgcggtcgcaacaggtagcctgcgagagctagatgggattaacctgtttgaacaaaactgcccgattgaatacatcattactatcgaagcccttaaagaaggctgggattgctcttttgcctacgtattctgttcggtgaagcaagtgtcgtctagtaaagatgctgaacagttacttggccgtgtactgcgtatgccttacgcccgccgtcgaactattgaagatttgaaccgtgcttatgcgcatcttgcgacgtcgaagtttgcaaaagcagctcaagagctgacggataagctcatcgctatgggttttgaggaaatggagatcgcagcatttttacgtgagcaagctccgacgggtggtcaaagggatctattcggtggcgagcaggagcaaactcaagtaaaaccgacaccacttcctgctattgttgtagaggttgaggatttaccagatctaacagagctttccgagtcagagaagaagcagatcacgatgactcgtgatgagcaaactgacactgcggtagtcaaagtgacaggcgaagtctcaccaagcatacaaaaagtgctaacgaagcacataaaagctggtaaaaatagagagtcctttgaacgtgatgttcgagtgcacaatcaggctattgaagccacgaaggcaccttcagaacgtggggaaaaattcggctcacttccttatctgtgcatgctggagcaaggcgagttggagctggttgaatcagaagttttccttcacgcacacagctggaatctgctcgactacccagcagaattgactaactttgcaatgaacgagactagcaatagttttgcgattgacatggacggtaagtctctcacttataagattgccgatcagaaggaagtcatcgctttcaaccaaggctttattgacgttacagagcaagatctcgtccgctggctagacagggagttgcgacaaccagatgtccttcagcatcaacttgttggcttcttgggtcgtctagtcaaaaatttgcttcaaaagcctaacttgagccttacagctttggttcgcaataagttcccattggcccgtgctatacgagatcttatccgtttgtaccgaaaaaaagctcagcgagctggatatcaagcgtgtttgttcggtgttgaaagtacagcgtgtttatccgatgaattcatgtaccacttcgagccgagccactacccatctcgtccaccatactattctggtcgctacaaattccagaaacattactttccgcagaaccttattgaggatttgaaagctacaggtgaggaatacgagtgtgccaaagccatagatggcctaccggaggtaaaacactggattcgtaaccttgtacgccgagatcaagcttcattctggctgccactggctcataacaagttttacccagactttgtatgtgagcttaacgatgggcgaatgctagttgttgagtataaaggcgaagcttatgtaactaatgacgactcagcggaaaaacgtgctatcggtgataaatgggccgaacttagtaatggtaagtgtttatttattatggcggttgagcaagatggtcaaggtcgagatgctcgtcagcagattaaagcggttgttgatcaaatccgtcgttag

SEQ ID NO: 165229 - DNA, 1545 bp, Enterobacter cloacae
atgccaattttgaactggcttaacaaagacgaagctataacaacgtctaaaaaatgcacttataggctactggaagaagttccagaactctcctatggcgatgccgataatgaaaacctgctgattcaaggtgataaccttgaagcgcttaaggctttaatcccttactatgctggtaaagtgaaatgtattttcattgaccctccatataataccaaaagcgcgtttgatcactatgatgataacctagagcatagtaaatggctttctctgatatacccaaggttggagcttttgagagagcttctttcagagcagggtagcatcttcgtaactatcgatgacaacgaaagccactaccttaaagttgtaatggatgagttattcgggagatgcaattttgttacatcatttatttggagaaaagtggatagcccaaatgataataaggtaacaatcactccggatcatgaatatgtcttttgctatgcgaagaatatagaaaaggcagtttttgagcgaaaatcagatagctctattttagactcctatcgttcacctgatgactcttcagaaaaaccatatagagatagattattgaaaaaaaatggaaaggctagtttgcgagaagatcgaccatctatgtactttccaatatcagacccggatggcaatttaatttatccagtccatgatgatggacgagatgctcgttgggctcttggcaaaaaagctgtcgacgagctaatttcacaagataagttggtgtggaaaaagcgtggtgatagttggattccttatacgcgggaatttgcaccagataatcctactcgtccttggcctacaatttggaatgatttacacacaacaaggcaaacgaaagctcatttgacagctttattgggatcatcattgtcatttgatacacctaaacctgaagatttagtcgcacgtattattactatgacgacaaagccaggggagcttgttttagattcttttgctggtacaggaacaacgggcagtaccgctcacaagcttggccgaaagtggatattggttgaaattggaaatcatagccaatcccatatcaaaccgcgtttacaaaaagttatcgaaggtaaagatactggcggtataactatggattcaaactgggaaagtggtggcggttttcgcttctacaaattaggcgaagctgtattcgatgaatacggctgcctcaataccgacattaagtttcccaccttagcatcacatatctggtatttagaaacgaaaacaccacttggcaacaaagccgatactccgttgctgggtgttcataacgataccgcatactacttgctctacaacggcatactgggtgatcgtcgtccagtaggtggcaatgtgctgacaagcaaagtactcaacaacttacccgacattaacaaacatgaacgtatcgtgatctacggtgaatcaagccgtttgggtgaggctcgcttgaaacaagcgaacatcacgttcaagcagatcccatacgacgtcggcactctttga

SEQ ID NO: 165230 - DNA, 237 bp, Enterobacter cloacae
atgaaagagcagatttttctggcgatacgtcaggcattaagtggagctccacgcaaccagtacatggctgagttacacctgcaaatgatcaagtatgctgacgatcttcaagacatcacagcgagagagttttgcgaagaggtcggcttaaagcccagctatggcaccgaatttagcaaaatgagaaaccttaccagccgattgaaacaagctggcttagacgtagataaaatttga

SEQ ID NO: 165231 - DNA, 654 bp, Enterobacter cloacae
atggcactgccgctcacttcgcccagttacagctctatcagcaagcgcgccaagacggtcaatatccactaccgcttgcccagcaagggccctattacccacctggttattgatgctaccgggctgaagctctatggcgaaggcgaatggaagcaacgtaagtacggtaaggaggagcgccgggtgtggcgcaacctgcacctggttgtagatgcccgaacccatgaggctatcgctgccgaagtgagcctggaaaacgttggcggcagcgaggtattgccaggatggcttaatcctctgcgccgccgtatcgctcaggtcagtgctgatggggcttatcacagcaaagcctgcccaaagaaaagaggccaaagccagtatcccccccgcaaaccagcgggatactgggagcaagggcattcgagaaacgaggcgttagcggcactcaaggtcgggcaattgcccgaatgtaaaagggaaagcggttatcaccagcgctcaaaagcggaaacggcgatgttgcgatacaagcagctcatcagcccaacgctgagtctacgcgactataacggtcaggttgcagaggctttggctggggtgaaggtgatgaacaaaatgctaggcctttgcatgcctgttcgccaggtcagctaa

SEQ ID NO: 165232 - DNA, 447 bp, Enterobacter cloacae
gtggatgacctgcagagggtggatgactggctggcggccctgctggcgaatctggaaccggcagcccgcaaccgtatgatgcgacaactggcacaggagctgcgccggtcgcaacagcaaaatatcaggctgcagcgcaatccagacggcaccggctttgagccgcgccgggtgacggccagaagtaaaaaggggcgcattaagcgccagatgttcgccaaattgcgcaccactaaatacctgaaaaccgcagccactgcggactctgccagcgtgcagtttgatgggaaagtccagcgtattgctagggtgcatcattacggtttacgtgatcgtgtaagccgtaaggggccggaagtgcactatacggagcgtaggctacttgggattaacgatgaaattcgaacctcaattgaagatgttttgcttcggtggattgatagttaa

SEQ ID NO: 165233 - DNA, 951 bp, Enterobacter cloacae
atgaattctttgaataaagatttctacagcacagaaaacaagaattttaagctggccggtgaaaatgagctgaaaatagcgataaaaaacgcttataatcttcgttctaaatacgtgcatatacttaaaccgttacctaccgaaatatcagagccatataacctcgatttttgcattaccgtcgacgacaaaccgcacttgacattcaatggattagcggctgtaaatcgagaagtcattctgaaatatgttaatgatatgccagtttgtgaaaaggaagagttcgatatattgagaataattcctggtgttagatttgctcgcttgtcagaagaatattggatgcatgacattagagtattggttaaaggcaactatatttcgatgttcagtgcagtcttatctcgaatcgagaagggaattgtcactggcaaacatgaaataccaaacatgcagtccgttgtaaatgaaattggtaaccgcctcgcgactgagaacaataaagatgacattagaacactaatgtcaatactgactttattatcatcactttatggttttactttagacgatagctatgaaaagacgatacaaaagcactcccatttttatgatagcaaagtaattgaaatgttgctaatcaatactatattaggggtaaaacttgaaagcattgacgagtattatgcatcattcaaagcatacaccctctctaaataccaaaagaacaaaataaaattatctgaatttttcgaatctttgatttgcgccaacctcatcaaccatctctccaaagaaaataacaccccaatcatcaaggagctattagattatattgatttcaacacgcctaactccccaataaaaagcaaacacttccataaaaatcaggagaaagggtttaatgtggctggatatttaaagcttaataaagaatcaaaccctgactaa

SEQ ID NO: 165234 - DNA, 606 bp, Enterobacter cloacae
atgctacaactttgtaatgggaattttttacaaactgataagctttataaaactatacatagaacccctttatatacaaacttagcaataccacaagaagggattgatttttgcattggaaaaatactgacatcttcaatgtacttatctcctaaagtcattatatgtgaagttgaagagaaacaaccatctgaaaacttcgacggtagtccagccgcactcatttcaacaactggacaggatttaatgagtgacctagcacacgtaatttcattctttttttgcggactatgcacaacatcccaatcatttacaaaacaattactaagcggcgaaaaaatatccgggcacaaacccggtgattatataagcaatttctttaatgaaagaattattgtcacacaagaacaagttttagaatttaaattatttttcaataaactggtgaattcccccagaataaattatgagaaatctatccaagcaattcgccggtatgttactgcggccattaggatttccgatgacttagatgcagcatatacattatttgttgcatcaatcgaatctctttctcaggatgccctagaatctgaaataaactga

SEQ ID NO: 165235 - DNA, 426 bp, Enterobacter cloacae
atgaattatgcctatagcccttctaaaaatgctttttattatttcagctggaaggatgaatattatgccgctggtacatggccatctgatgccattgaggtggccgacgatattcatgagaaattttcggccgatccacctaaaggaaaattcttaattgccggtattgatggtttacctgcatggggagatgttcctccgccgactcgcgaggagagtttggcgcaggctcgagtcgaaaaacaaaaccggattgatgctgccaacaattacatgaatggcaagcaatggcctggtaaggcggcgattgggagactcaaagaggaagaattgatacaatacaatatgtggctggattatcttgatgcactggagtctgtagacatctcctgcgcacccaatattaattggccaacaaacaactaa

SEQ ID NO: 165236 - DNA, 1119 bp, Enterobacter cloacae
atgctgcaaaattcttctcttacagaaaataagcctaacctggattatattcaggcgttaagggcactggctgcactgatggtagtcctccatcatgctaaagcctttctggttggaactgtttatgaaaaactttcgtttgatctcttttggccaggagccttcggtgtagatctttttttcataatcagcggatttattatagtttacacatcctacgactatacaagaaaagacttaccaacctttataaaaaagagattcatcagaatttggcctttgtatttcattgcaacaatgatttatgccttactattcaaaaacacagacctgtcaacaatgcatggctttgtttattccgataaaattgatgcagtacaatcactaaatattattaaaagccttttatttatccctcttaatttttatgatcctgtgtattttggcgctgccacattattcgtcggatggaccttaaattacgaagtttatttctatatagtctgtgcaacagggttgctattttccaggaataaatactggttttatgctctttggtttttaacaacgctatttataatcccatcgtttatggggttagccacgactataagacctactatagagaatggtgggtatttcaacctcacaatacaaagcgttgtatgggagtttgtttttggtgcatgcgttgctattttattcaaaaaaaatatgcttaggataaaagatcccaaaaaagcaataccgttaatactcattgcattcgcaatccctgcatatggctatgttacaaaaaggaacacaatgcatggggtagaatatttcggaatgtattattgcataatgtttttccttcttacatcatgccatcaatttataaaggacagtataaaaatacccaaaacaatactttccataggagatgcgtcttattccttatatctcttacaccctatagttttcattgtcttgttcaaattaaaagaacgattactaccaacattagattaccagaacttttatttcatgttcatttcagtaatagtatcaattttagtgtcaatcctttcttataattatcttgagaaaaagttaattaacatatacaaaaaataa

SEQ ID NO: 165237 - DNA, 405 bp, Enterobacter cloacae
atggatttgattgatgtttactggcaggaagagcgggaaaaggagatccaacggcttgaaactgaagtccgccaaaatatagcgtactttcgctgggaaggtgatgagctgtatccattcgcctatgtacataatcgttatggtgaatttcttgagtttgtcggcgacgataacgatcttgatatatacgaccttgataatgttgaggtgctcaacgaaatcattgaatggttcgtggataacgaatcttctgaagggtttattgatgcagagccagctgaatacttctccgcaatggctcttttgcttatcgccgatgcggtctaccccaacccttttcaggatgacaatcctgatacaactatcactcttagtgatatgtcatcatcgttcaacctgcgatga

SEQ ID NO: 165238 - DNA, 267 bp, Enterobacter cloacae
atgtcccattcctttatccgcttacccgaagtacaacgtcgcaccggctacagcaaggcctggatctatcgcctgatgagtcagcagcgttttccttctgccgtgaagatcggtactcgcgctatcgcttttgtcgagagcgaaatcgatgactggatcgatcaacgcatcgaagagtcccgtaacggtatctatctcccgggaatcaaatcacacgctgtgaacgcatccctcaactgtggaaatgtaggggtgaaaaatgcgtag

SEQ ID NO: 165239 - DNA, 558 bp, Enterobacter cloacae
atggaattaaatgaaatcagaaaaagatcgctggtggatgaaaccacagatttttttgaaagaggcgtgtatgaaattcaaatccctggagtggataccgcagcctggcgacaatggtatatgcgtacagatggtagccagtttgcattggtcaatcttggtgaagaaccgcaaattgtctgccggttccatatgaggcaggttgacacatttattccaggattacccacagcattgaaaattcatgcctggcaggatgaccagtctgaacgtaagtgtccacgtggaactcaaacggcctttatggaatgggtattgaggactgaatgcatcgctatcaattaccgtgacgatcttgagtactgggaatgcattgccaggcggttgaaaaggcgatttggtgtggtactcattttgtttgatcgcgaagaaaaatcttatcttcgggaggtcagcagcgaaacagagttacggcagtcactggagcttttcccttacgcctgtacgggcattctggggagaatggatcaggttgaggaagcactggccagagcctga

SEQ ID NO: 165240 - DNA, 528 bp, Enterobacter cloacae
ttgattaggaaatatgaagattatgatctggaaggatacgaagtcccgcttggatatcggctattgaagcgcacagatactcatcgaaatgtagtgtatctggatgctccgtctggtgagcattgtactgcatatctaatagtctggtggtaccctaaaccagatcagatacgtttgcgggtctggcggtcgtatgattttcagcatcagaaggcgataggtgaattaccacaggcatttgtagcccaccagctaaaaacctacgatgttcagctcatgccagttaataatgcgttctggcgtaaattgggagcctgggcgcttgaggagtgttatcagattaccgctgagcatgaccggatattgagccacgaaaagttggtgaaggaattctatggtcttaagcggctaatgctcattcacaaacagccagatgaaacagagtttgaccgattattctggcagtatcggaagatcttccgacgtctggctaatcctttaatcatgaaaagacattccctcaattaa

SEQ ID NO: 165241 - DNA, 1707 bp, Enterobacter cloacae
atgagtgcactttctctctgtattgaatgctggcgcaatattaccgaccagacctatgacttttccttacagtatcgatatcgctttaatcaggaaaaatccgttatagaagtttctccccgggatgacgctgttccggtcaatttttttggcgtcaatgctgaagtggtctgcctgactggaataaatggcagcggtaaaactgctgtcatgggcattctaaatctaacagggatgaaattagagcgggggcagcgtgtagatactggcgagcaggcaatgcgacaggctttcacctatatctttaaacattcagcgtgtctgtatgtgatacaggtaaaacagggtgtgattatcaatttatggaaagcgcgttgcaatgacgtcgttggctcaatggcgctccactgtgaatctatatcatcaacacctatcgctaacacctggtattacgcatcaaataacgttcagttgagcgttgcgttcagtaaaatttcccgccacgatttatcgattgcgcaacgccgtcgatataatagctatgcagctccctatgaaatttatcatgcctaccaggcaatggattattttgaactaagggagagtatcgctccacgcttttatacctggcgtgttcaggcttcctggtatcaacattttcagggagtagatgtaaaaataaaacaagtcaatcagcgcttctcgaagaacgtttatttggcttcgcttgttgtattgaagcttttttggttgatggtgagttatgccgaagaaaacacaggtttctggaaagaggctaatgtatcattacagctactggatatcattcctgagcgtatggaactgcttgaagatattgttcaacttaattcaaatgcgaaaatacttgagttgctggagaaatttgaaccattgtgtcaatctctctttttaatcgacacctatgcattggtgaaattcttatcatatattcaaaaaggccgtagtagtcaaaaaggtaccgtgcggtacgagtttggtccttccgaaaattatgagaaaccgtttaaccatgttcttcctgttttgctgaaaataatgatgctgatgagggagaaggtccccgaatgtcggtttacgattgatccgcccttcagcacgggagaatggaagctcgttgatctttatgctacgctacaacgtaaagctgaggacgcccgactaaaatctaaaaacattcagctactgcttgatgaaccagattctgatttacatcctaaacgacaggcacgtttaattaaaacggtgcttgatatactgtctgcctatccagacgtttattttcagctcatcatctccagccacaacccgatagtaatttcagatttgccccgggcaagtgtcatacccgttgcgccaggccctgaagagctgggtaaaacatttggaagtaatattcatgatttgtataaacatcgcttttttgtggagcaatccgttggagagtttgccagcaaaaaaatacgagatgcgctgaagaatccggatatagatgaaacaacattacgttttttgatatctgaagtcggagagcctgttgtgacgtacgcgcttcaacgcaaactggacaaacccgctctgctggagagacgtgaaattgaacactttatctcacagttgacggatgaacagcgtgctatggtcagaggaaaacttagtgagaaatga

SEQ ID NO: 165242 - DNA, 408 bp, Enterobacter cloacae
atgaatgaaactcttgactcagtttttcagttttgtttatccgatagcgacagagttattgcgctctcaaattaccaggtgttaaacgtaaagataaaacagcgtttcctggtgggaaaatctgatgcgctaaaggagctaaatgagacgtttgcgcttgatgatcgttatgagaacatgatagcagtggtggattatctggcacagcttaaacgtatttacacatcagactggcttaaagagttgcagtctatgtatgacctcacctttactcagacagaactcagacaattgctgctgggtcagtttaatttcagccagccgtcggttcgattacaaccgttaaccaagcttattgacgatctggtaagagatctggacgtgtttaacgataacattctggactga

SEQ ID NO: 165243 - DNA, 483 bp, Enterobacter cloacae
atgaaaaccttgctgggctctgcgacaccagaacaggatcgctacctgttcataaaatctcaggtcctgttctggctactggcggctaccaatggccatgcaaagaacttctcggtctttattgaaccggaagggcgttttcgcctgacccctttttacgatattctatctgtctatccagtgtttggtggccgaggcctcaatcgaagggacgccaagctcgctatgggtctggcaagcagcaaggggaagaagtacgccattgagcagatattcccgtgtcatttcttccaaacggcgaaagctgtgggatttgagcgttctgctatggaagagatcctgacagaactggccggcgccgttgatgccgttattgtgcgcgtgagccagcagttaccggcagacttccctgcaaccatcatcagcgccattttagagggtctaaaagcccgctcagctaggctgataacgggttgggattaa

SEQ ID NO: 165244 - DNA, 912 bp, Enterobacter cloacae
ttggccaaacactctcaaagcttatatactcaaaggttactttccttacccatcttacaaagcatagaagatctttccgttaagacacgactgccacatgcattgctttcgcaatatttaactgataactctcgatactattgtcacatcaaagtaccaaaaaaaactagtggttataggtcaattgatagcccaaatcgacagttaaaagctttgcaacgatggatattacgtaatattctcgaaaaactgcagtcatcaccatatgccactggttttatatcaggcatatcattaaaacaaaacgttcagccgcattccggaaatcaatatattctaaaattggatataaaagattttttccctagcattaaagcgagctatgtttactctattttcagagccgctggttactccaaaaaaatagctttccatttaacatctatatgtactttaaacggctatctaccacaaggtgccccctcttctccttgcttatcaaatcttgtttctttgagaatggatcagcgaattgggaaatattgtgatagacatgcgcttacctataccagatatgcagatgatatatcaatatcaggtaataaacttagtgttataaaaaaagcttggaccgttgttaagttaatcatttgtgaggagggttactcaataaacaaaaagaaagaaatgctttctggaccacgctcccgaagagaaattactggaattatagcaacccctaaattgggcatcggtcagaacagttataactcttatagaaataaaatatttcacctttctaagaaaggtgatcctaatagcaaagaaattattcttggcatcttagcttttattaaaagcgttgatttagaaaggcatgataagctattacgatactataaaaagttgtaa

SEQ ID NO: 165245 - DNA, 552 bp, Enterobacter cloacae
atgaagaagcaatattatgagcatttttacgattttaatgaaaagtttgtttcttatatgcttgctacaataagaatagagtcttatgcctatagacagaaattgttcttcaaaccaattggtgaaaatatttcatatgacaaggcggaagttgattatggttcaggtccaacggcatctaaccgacaaagagctatattgaaccacaacacagatattggtgatggacataaataccgcgggcgtggtttggttcagttaacatggaaaattgcctatgaaaaattcaaattattaacaggtatagatatagttaccaatccagacctttgtcttgaaattagtacggctgtttcaattatgatgaaaggtatgaaagatggcgacttcagggccgggcatacattagaaacttatttgggagcaggtaaaaatgattactttaatgcaaggttaatcattaatggttatcgacatggtattcctgataaagctgacgagtttaaagattacgccgaattatttgaggtgataataaatgaaacaatttag

SEQ ID NO: 165246 - DNA, 594 bp, Enterobacter cloacae
atgaaacaatttagtagtgcgtggtgccttgttttatctgtatgctccttttatgtacatgcagacgctgacttagatgttactgactgttctctaaagggaagtacttcttgcgatgttttcttgaaaatggagagggatattaatgatgtatcttacaaagttgaattggcagatactgaaaatggaaaaaaaatactcccttattttgatatgaatgaaacaatagaaaatgtctctttgcaaaagtatggagacagatatgttttttcaaaagagtatcttgatagcgccaaggctatagagtttattacgtttaagtatgaaaacaagctcctttcacctgtaaggtattattatattgagagttctattgatttcaagaataacgtaaagaaatggtctggcaaggaatgtggtacatcggcaggaacaatcactggaaaaaaagatagcttattgttacaggtggcctcagagttatgtgttaataaagttaagttagcgtacaccccaaataaatatacaggaagtgatatcttattttatctatcgcaatttattaacggtgttgaaaaaaacagctttctgtga

SEQ ID NO: 165247 - DNA, 501 bp, Enterobacter cloacae
atgaaacgtttcccaccgcatatcgtttatatgaagctcgcggcctggcgaacctgtaaaacacacctccactgcggtgagcttctctgtcggatcctgggagaaaccagccagaccgacgcactgtcagtagaaatacatcgctgccagccattctggatattctggctcgatcatccgtctgacgcagcctttgctgaaggcctggggtcgctggttggcgcatttttcaaccttgcagatcatgataaccagacgaatgcgctgctcgtcctgacgcttgctcaggatccgctttcccgggagcacattcagatggggatggagtatctcgcgttaaccgatcctgtctccacggccatcagtcagcaggaggaggaggaggaggaaagtttgctgctgaaatggaaaccaccgcaaatcgtcaaaggtaatgacgacgattctctggaagcggtcgtgaagtttattaaagagactaacaaacgggaaaaagaatga

SEQ ID NO: 165248 - DNA, 558 bp, Enterobacter cloacae
atgccagcccagcgtttcaccggcatacggtttcgccatccgcagccacaggtagccgtaaccgggttccgtcccctcccggtcgaagtcgagcttcacccggtagcgtccctgctcgtccaggtgagcgtagatatcgttcttctcccggctctcaatccgcgccggaagcgtgccgtgaatttccgggcgtgggatttccgccgggcggaaacagtaacgttcggtgtaaggcatgccccataccgacacgtgcaggcgggaatcacgggcgccccggtaggtcacaagcgtgagaagcacaccctctttcagggcggtaatgacacccccctgcggctccagcacctggccgggcgcgaggtgtgcagcattgctgaacaggtgaatacgggccgacctgttgagctcccgctcatggtgaagtcgggcgtagaacgcgccagattcggtttccggctccgggctggcgtcatcgcccgcttcacggtaaggcagtgcgtagcagtaatgctccccggtggggaccgcagccagcgagcaggttacaggcaataa

SEQ ID NO: 165249 - DNA, 261 bp, Enterobacter cloacae
atggcaaataataaggcgtttcatcgggctacgtttttggtttttctgcttagtaccttttattacggtgtgtttttttttgcatttatttttattgtaaacaatgtactgatcgagtttataagttctggaaagattgatttatcatcaaaatcattaatttatctatctgtggtgagcgctatagttggcgtcgccgctggtgccagagtatggctctttgcaaagttagatgaacgcaaagctagaaaatcatcctga

SEQ ID NO: 165250 - DNA, 864 bp, Enterobacter cloacae
atgaaaggcattattttagccggtggttcaggttcacgtttgcatccaatcacattgggaacctctaaacagttattaccgatttatgacaagccaatgatttattatccgctttcagtgctaatgttagctggtatcagggatatccttattatcacaactcccgaagattgtgatagcttcaaacgtctcttaggaaatggtgctcgtttaggcattaatcttagttataaagttcaaccttcaccagatgggctcgcgcaggcgtttatcctcggagaagagtttattgcgaatgataaagtatgtttagtcctgggggataatatcttttttggtcaggcatttggaaaacaattgcggcatgcagtagataatttgagcggcgccacggtgttcggttataaagtaatggatcctgaaagattcggcgtagtcgaatttgatgataacttcaatgctatttccatcgaagaaaaaccgaagcatccgaaatcaaattgggccgttacggggctgtacttttatgataatcaggtagttgaaatagcaaaaaaagtgaaaccgtctgataggggtgagttagaaataacgagtattaaccaagaatatctcaaccagggggctttaaaggttgagcaattaggacgtggatttgcatggcttgatactggaacacatgattctcttcttgaagcttcgcaatttgtgcaaactgtcgagaagcgacagggattcaagatcgcttgtctcgaagaaattgcttataatcaaggctggctgagtaaagaagatattaagtcgatagggagttcactttctaaaacaggttacgggaattatttattaagccttatcaagtaa

SEQ ID NO: 165251 - DNA, 552 bp, Enterobacter cloacae
atgaatatcataaaaactaaattagatggtcttttaataattgaaccaaaagtgtttggtgatgaacgtggttttttttatgagacatatcacgagcaacgctataaaaacgctggaattaaagagagttttgttcaggacaatcgctcccgttccacaggtaatgtgctccgtggtttacattttcaaaaaagaaagccgcaaggtaaattggtaacggtcaccgctggtacagtgttcgatgtagcggtagatctacgtgaagactccccaacttttggtcagtatgaatctattattctttctggtgataataggctccagttttatatcccacctgggtttgcccatggattttgcgttttgagtgacattgctgattttcagtataaatgtacggatttttatgatcctacggatgaaggaggaattatttggaatgataattctataaatatcaattggccgatttctgagccaaatttgtctttaaaagataaggagcttccttcattggaagacgttcgtaagcaattgaaatttggaaagtaa

SEQ ID NO: 165252 - DNA, 831 bp, Enterobacter cloacae
atgagtatttatacagtagtcggcgggaatggcttcattggaagtgaaatagtaagacatctacattctttgcacaaagatgtgtggattcctgaacggaacgatccaaatattttttcaaaaaaacttggcaccttgatttattgcgcaggcaatggcgattgccaactaaaaccatttgatgtcctgactgctaattgcttattactctctgaacttctccagaatgctaactttgaccgcttaatatatgtttcttccacgagattatatatgaatggggatgaaagctctgaaacaagcgatctgataatcaggcaggatgataatcgccgtctctttaatctaacaaaattagtcgcggaagaattatgctttaaaagtggtaagccatttactatcgtgcgcccaagtaatgtttatggggtagcactaaaaagtcccttgtttttgccttctataacacgtaatgcaataatcaacggacgcattgatatgtacgttgataaaaattatgaaaaagattatgtctcagttactgatgtagcggaaagtgtaataaagttgagtaataacaaagaagctgaaggagaaataattaacattgcctcaggaattaatacatcatcagaacagatcgctagcgtgcttattcaaaacacaaattgcgttgtgaattggcatgaaaataatgcgacaaaagaggtattccctattacagatatttcattgctaaataaattgattcctgaatacaaacctcgatctgttctgtctgatttgtcagacatgattcaattattcaaaaatgaactacaaattaaatcatga

SEQ ID NO: 165253 - DNA, 1038 bp, Enterobacter cloacae
gtgataaaaagtgtatggaaatataggggccaatccaggagtgttggaacgctaacttattcaaaccttaccaccgcaaatatattagcgccggatgttggtagtccgcaatatcaattgcagattgataatcaacaatatgctcgtctattctttattccttcacatagacagacattttcatacagacgcgtttctgaaatcaatacaacacgtaaagaaaaaagaactgcttttgatgaaatccataatagcaacgttcagaggcattcaggttacggaggaaatgagcctagcagttacctgatgaaaagaactctattaggatgggtcattaatggttacggcgtgcgtaatggcgataaaataataatgcccgcagatcttcaacaaattaataattttgaagggttctgtgcagtacttagactggttcttcctgaatctcttggttttgatacaattgaggttagagattatgaaatagtattttcatgtaatggaggtgaggatgagtttctactggaaacagcttcaggcgggatctcagctttaattgatattgcttggcaaattttcatgtttgacactgatgcaaaagaaccatttgcagttgttattgatgaagttgagaatcatttacatccaagtatgcagcggaacctattaccaaatttgcttgcagccttcccgcacgcgaagtttatcgttagcacacatagtcccctaattgtcacatcagtcgaagaagccaatgtatatgcactcagatacaactcatccaagaaaataagctctcatttgctggatttccgttcagaagtaatgaatgctgttgatatattagatgaagtgctaggggtttctaccacgatacctgcttgggcgataggaaagctgacattaattttacagaaacataatggacaagatccaactccagaatcattagaggaattgcgctctgaacttattcaagcaggcttaggtagattacttcctcaagctataggagcaatcgcggaggcaaggaaatga

SEQ ID NO: 165254 - DNA, 579 bp, Enterobacter cloacae
atgagaaggttacttcggccagattgtcctaaccctattgcaattcgcaccaattataaaaatgctgataataaagcagcattgcaaaaatgctcacataataaatgtatgtattgtgaaagttatatctctcacgtctattttggggacgttgaacacattcgtccaaaatccaaagacaaatatccagaactcgagtttgaatggacaaatcatggttattgctgtgcgcgttgcaataatgagaaaaacgatcaattcgacaatgactgtcccctcattgatccatactcagaggatccaaatgtacacttgttcgcgtttggatcaatactcagacacaaagcagggagtgaacgcggcgcacttacaattagcacaatcggtcttaatcgcccagagctaattgagcgccgagctataagaataaatgagcttcaaaatgcgattgacgcctgctatagaacaaggaacaatacaatcagagataatttactttctgctttaaaacatgaaagcgatagtgataaggaattctctatggttgcagctgctctcatatcagctcacggactgtaa

SEQ ID NO: 165255 - DNA, 189 bp, Enterobacter cloacae
atgcaggaccatcttttggagtcgttgaaactccagcgtattgatttctttatcaagcttgtagcggctagtgagtgtagcgaagaagagaaacggcttgcgattcagtgggtttctgagctaactgacgagttgatggctaaaattcattcatatgattataaccactcattagatcttatgaattaa

SEQ ID NO: 165256 - DNA, 213 bp, Enterobacter cloacae
atgcagaccgtcatgcataacggcgtgtcctccccaggcaagtgtagccagcgccacgcccccactcatcgtcatcagcaggcaggacaatactctcttattagtgtaaaggaacaaagcaccgagtgtggtaaacagggcacagagcctgacaatccagctaatacccacatcagtttcttctatcaccatctcgataacatggatggataa

SEQ ID NO: 165257 - DNA, 531 bp, Enterobacter cloacae
atgttagataatattttttttaaagcacttgaaacattctttgcaaaagaaagaacaaacataagtattggtatttcagagaggaacctgtgtgcaaggttagcgagatatatcgagtcggaagttgataaaaatgagttggatggttattacgctgatgtagagtataatagaaaacaaaatggcgaggtcaaaactattatagatggagatttgaaagttataagaattagctgtgatcttattcttcatagtcggggtgagaatatcggaagggacaatctcattgcgatagaaatgaaaaaaagtgaacggccagatatagagaaaactaatgatattaataggcttagagcaatgactaaaaaaaattatgatgatatttggtcttttgatgggaaaacccatccagaacatgtttgtggttacgaaaaaggttactttattgagatagataacaaagaatttagttacaatattataagcatttctgatggagaaatcgtaaattcaaaaaatgaaaggttttga

SEQ ID NO: 165258 - DNA, 2244 bp, Enterobacter cloacae
atgaaaatcagttaccccctcagggacaccgatggtaaagagttcagctcgctggatgatgtcatgcggcttatcgacggggaagcgcacggaacctggctgttgggggcgaatggcctctggcacggcgggatccatatcagcgatatctctaatcctttttccgctctgagccttgaatcggttaataccgaagagcctgtgcctctccagtttatggcagacggtactattgtggcctaccggataaacagtgagtatctgacagcaccctactgtggacaacaactgcgctacagcagcagctttgtgctggtgaaatcgcagtgtcaacctgacccgcaaaaggaaaagagctggctggagttttacagcctctatatgcatctggccccggcgtctgattatccttcatctccctgctataaagtcagggacggtcacagcggcatcctgttacgccagtataaaaccgggcaaaacgggctaccggagggggagccggataagggggaagcgggaacttatcctgccccggcgaaaacgaaaaagagcctgaaggcgggcgatcgttttgtctcctcccggacggggcgtttttatgttatgaagaacggaaacgctaccctgacaacctttggactggtccggttactgaaagggaatatcccgggcgatgaacagcactgggtgacgctggatccggaactgatggagctggacggtgaaatgcaggggctgatgccggggtggatgcagagagcgaaacaaaaaggcgtttttgactctgtggcgctaacggccgaaacggaagaatggaaggtcagcgccggaacgcctgtcggatttatgggatgtatggaatcgcccggtgagggaaataccctgctggataaagagtggttcgtgcatctggaggtgctgagtacagacccgaacatgccgggatttttagccaatcctgaaaaagtgaaaggggataaacgctccattctggcggcaaagggaagcgccctgtttacccggcaggataccacgggacagcccgtctttaccgcgacatcagcccgactgagcgcacagtgccagctcccccgggagtcagcaacgccagtcgcggatgaatcgcaaaaacagtggtataaggtcagcggaagcggctggctaccgcaaagagatgtggaggaagtgagccagtacgacctgctgaaactcgggtttcaggcgctggaagaagacagcggtggtgatgtgatggacagcccgtatgaaagctgggttcctgaggcgtttggtgcgataagccgatcggcggaacagggagccgattatcagtacgggctggtgccgcaattctatcgtgatctgatggcagaactggacagtaaccatgacggaaaagtgacggcagaagaaatcaggcaggcgatggcggtgcgagatccagtggtgagggatgtggtaaaccggctggtgataaaacatcacagtgaatggtgtggtggccgttcgacaggccgctgggaaggattttataaggatctggactcgctggaaatccagttctgtgagaaatggcaggcagacctggagtggatgagtcaggttgagggattcagttgcggtgaacctgtctggcatatgcatcctgtggtgtttttaaatgcattaaacaaaactgaaggtgaccgttgtaaggtattattttcaaaagtttcaggggtaatacttcgtcatgaagggggatatgttaatgatcctgatgacaaggggggcgagactaatatggggataacaattgacacatggaaaacatttgctcctggtgatttaaatattccggcaacatcaaaaacccttaaggaaatgacaatgcagcaagcagaaacgatatattacaatcattactggaaaccaaaaggtttttgcaaactagaaaatacaaaaattgccttgatgatttatgattggaccattacatcaggtcgagcaataaagcaaattagaaaacttttgcatggagagtataatgagaaacttagtattaataataatatggatgatgatatgattaattctattaacgatattgataatcaagagcaactccttaatcgaattgctgatataagaaaagactactaccgttctttgacggttactgacggcaaaccaaatgcacaagtgaagttcttgaaaggttggattaatcgagtagatgattgcttaaaggtagaagtatga

SEQ ID NO: 165259 - DNA, 426 bp, Enterobacter cloacae
atgatcaatgccggtcaacatcttgatatcggtgcgatgaaaaatttttctgtaacggtagaaaaagccctgggtatgtttgtccataaagaaggggctaagctggtcgccaaccagggagacatcgagattcaggctcagcacaacacgatggcgcttttggcaaagcagcaggtgatgataaccagcagtgaggatgggatttccatcagcacaccggagacgctgacgctgaatggcggcggctcgtatctgaagctgagtaaaaacgggattgaacatggctcagaagggatgatggtgatgaaagtggcgagctatcgggttccccgtaccggggcatcattgaaagctgttaccgagacattcaggaaaaccacactggaaatgatcccaccacagcggcgcggaaggatttcacggtaa

SEQ ID NO: 165260 - DNA, 273 bp, Enterobacter cloacae
atggtaaacgacaggaaagccgaggaactggaagcaaaggggctgtatcgcagggcagctacacgctggcaggaagtcatgatgatttgtgctgaggacgatgatagggaatgggtaaagcagcgccgtgatatgtgtctgacgaacgtgaagcgcccgccagtgaaaaccgatgattacggcgatctgcataaagcagtcactgagacacaacaccgcatggggatagcgcaaccaaacggcaatgccttccgattaaacggtggtaagtag

SEQ ID NO: 165261 - DNA, 306 bp, Enterobacter cloacae
atgagcaaagacatagcgcagaaaatgacctatcaggaaagagagcagttaaaaacctttgctgatagatgtgcctccagtggagatattcaaagtctgcaaaagacattgagaatgattgctcactggatgagacaaggacaagaaattagctttacagagtacgcatctaactggacggctgcgcaatctggcagagaagacggcaatcaacccaccatagaaatgatgagcgaatggcctttaactggagagcagaagatcgcgccggggtattcagactatatagtggggaaaaagaaatga

SEQ ID NO: 165262 - DNA, 1428 bp, Enterobacter cloacae
atgaaaattattcctataattatggctggcggcagcggttcgcggctatggccactttcgcgtttgacttatcccaagcagttcttaacgcttgaaggtgagcaaactatgcttcagcaaacaatttcacgactaagtaagcttgaaattgaatgtccagttgttatttgtaatgaagaacatcgatttattgttgctgaacagcttaggcaaataaatgctctcaacgaaatcattcttgaacccattggccgcaatactgctcctgcagttgcgttagctgcaattcagtgtttaaaagaacttgctgataatgaagacgcccttttattaattttagcggcagatcatattattaaagataacgctgcctttattaacgccattaagatttccacatcctatgctatagatggtaatttagttactttcggtattgagccttcctcgccagaaacaggttttggttatattcaggctggtgatgaaataagcgttgatggagtttctggtgccttcaaagttaatgcattcgttgaaaaaccagaacggatagtagcagaaagttttttatctgacggcggttattattggaatagtggtatgtttatgtttggtgctcggaagtatctctctgagctgcataaattctgccctgatatttatgattcttgtagtaaagcgatacaatcgcctgacaaggatctgtgctttatccgcattgatcacgagatcttttctcgttgccctgatctttctattgactacgccgtgatggaacatacagctaatgccgttgttgtaccgatgagtgcgggttggagtgatgtgggatcatggtcttcattatgggacattagtgataaagatgaacgaggaaatgttttaattggtgatgtcataacttataatagttcaaacaattatgtccatgcacaatctggacttgtgactatgcttggtgttgaagatttaattgttgtccaaactaaagatgccatcttagtaaccaaacacaatgccgtccaggatgttaaaaaaattgttgaagagttgaaaacgaccggtcgcagtgaatacagagtccatcgagaagtttatcgaccatgggggaggtgtgattctattgatactggtaagcggtatgaagttaaaagaatcgaagtaaatccaggtgaaggtatctcacttcaaacacatttccatcgatcggagcattgggttgtcgttgctggtactgcgaaagtaactctacaggaaaaacaattcttattaggtgaaaatgaatcggtgtatattccggtaggagcgcagcattgccttgaaaatccaggcaaaattccactagaaattattgaggttcgctctggtccttaccttggggacgatgacatcgttcggatagctgatcgatatggccgagtttaa

SEQ ID NO: 165263 - DNA, 228 bp, Enterobacter cloacae
atgcgctctatagaaacattgggtgctaagcgcaaactaatcacaactaataagaatatctgtgattatgatttttataacgaagacaatatacttgtaattgatggttcggttacaaaaaaacaaattcaaaacttcctgcaaaaaaaatataaagcattaacggcagagttgtataataaatattctgttgattactgggttaaagatttcttgagagataattaa

SEQ ID NO: 165264 - DNA, 426 bp, Enterobacter cloacae
atgatcaatgccggtcaacatcttgatatcggtgcgatgaaaaatctttctgtaacggtagaaaaagccctcggtctgtttgtccataaagaagcggcaaagcttgttgccaaccagggagacatcgtgattcaggctcagcacaatacgatggcactgttttctgaaaagcagctgacggtgaccagtagtgaagacgaaattattatcagcaccccggaaacgctgacgctgaacggtggcggatcttacctgaggctgagtaagaacggtattgagcatggttccgaagggatgatggtgatgaaggtagcgagttatctggtgcctggaactggcagcactctgccactggagacaccggactttaaaatgacagacgtcacggtcacgacaaaaaattccgccaaatggaccagtgaatag

SEQ ID NO: 165265 - DNA, 360 bp, Enterobacter cloacae
atgagaatgaccagccgcaaaaaagagatactcagttactttgagccggataacctcgaatgggtgacaggtgagattggtgcgccgccgttcgatgtatcgggcgtggcctaccttcttcatggcatggcgtcgttcgataagcgccaccagctcgaatcaacccggcgaactcttgaaagtatggttgctggtgggttgcttgagcgtgtggcggtgtatgagtctcgtcaggtacggcgcggcggtgagactaacgcaacggtcgtgcgttacggtttacccggtcattgtgctgttatgcgcgatactggcggcgctgataacgcaatatcaggtgaatacatgcgggtcaattaa

SEQ ID NO: 165266 - DNA, 339 bp, Enterobacter cloacae
atgggtaatgcggcaatcacaccactatgggcagcgctccagaatgatggtgacaagctggtttacacgtatgactttggcgactggtgggattgcgtcattgtgctggagaagcaaacacacgatacgagtaatcagcccattagctgcctgcatgggaaaggcaccaccccggcggaaaactcaggcggcttgcatggttacaatgaattgctattacaggccagagagtctgataatcctgagcaggccgagatccacaatttcctgatgctggatattgaacgccgggtttacgacctgagccgcatcaacgacagattgcaggctattaattga

SEQ ID NO: 165267 - DNA, 345 bp, Enterobacter cloacae
atgtcaacatttaaaaaatcatctactgcattacttcttcttaccatcgtcagtacaggtgcttttgcagtctctgaaacatcatctgatgctgaaaatgatgcactggcggtcaccgggaacaaaattaccttaagtcaggcaatcgcttctgccgagaaacaggtgaatggtcaggctgcaaacgctgaatttaaacaggataaatctggtgctgtctatgatatcgaagtagtgaaaaacagtgaggtttatgacgtcacggttgatgcacaaagtggggctgttctgtcatccgctttagacaaaacggatcgtcattcaggtgatgatgactctgagtaa

SEQ ID NO: 165268 - DNA, 279 bp, Enterobacter cloacae
atgagccagttacctgaccagattgaggaagcaacagcagtaagtaaccgcattcgtgccgcgctgggttgcggtgaaatcaccgaaccacacaccccggagaatgtttcacgcgcccgccttttgcgtgtacgtgctggcctttgccatgtgctgacggagattatgcccggaataacagcgagtgcggaacgtgacgagctgtatgcgtggctgtttgagattcactccgtgacaagagctgaagattaccaggcgagactggaggcgggcaaatga

SEQ ID NO: 165269 - DNA, 459 bp, Enterobacter cloacae
gtgcggcgcgctacccagcagcaccgcaaactggaggtccctgattttgtcggtcacaaaactaatctgggtgttgatgtcagagaccagggctccggcggcttcagcggcgctgttcagcgcctgcatctggctgttggcctggttaatctggttaatcgcaggcgccatttccagtaccggtccctgggctttggcctgggcatcagccgtcaggaacagcccttttgccgcacgtacagcgccatgctcatccgttcgcagttcaaaaccggccccgcgcttttcacgctggctgttgaccaggtgtcccaggttcagctgcgttttgccatattccgtcgcgagcttgatatgctcttcctggcgcttatcctccatccgcagcttattgtttgccggggtgcgccacacgtttcgcgtatggttatcactggtgacatgatccggatgctctga

SEQ ID NO: 165270 - DNA, 420 bp, Enterobacter cloacae
atgaaactgccagggaaagaatcgcctgaagtaatgttttttaaatatattgaagaattattttctaaaaatgatgcttctttctggcgaaataaaaacattactaaccaaggttataccaaacaaaaataccttagcgatatacgacctgatattcttgtaattagtgaaaaaatcgaagactttaagataaaaactggaactacaaaaggtatagaaagggacctaaacaaaagtgctttcaataaacatattaacttcttcagacttgtaattcttcattggctacaaaatccagaaaacgttggtgaaattataagcttcgcaaaaaatcttgaaaaacttttctataaagtttgtattcctaacgggatcgagcgtaaagagtggcaattcagttatcgcattgagaagagttaa

SEQ ID NO: 165271 - DNA, 504 bp, Enterobacter cloacae
atgccgggcaaccgcccgcattatgggcgttggcctcaacacgattttccgccatttaaaaaactcaggccgcagtcggtaacctcgcgcatacagccgggcagtgacgtcatcgtctgcgcggaaatggacgaacagtggggctacgtcggggctaaatcgcgccagcgctggctgttttacgcgtatgacaggctccggaagacggttgttgcgcacgtattcggtgaacgcactatggcgacgctggggcgtcttatgagcctgctgtcaccctttgacgtggtgatatggatgacggatggctggccgctgtatgaatcccgcctgaagggaaagctgcacgtaatcagcaagcgatatacgcagcgaattgagcggcataacctgaatctgaggcagcacctggcacggctgggacggaagtcgctgtcgttctcaaaatcggtggagctgcatgacaaagtcatcgggcattatctgaacataaaacactatcaataa

SEQ ID NO: 165272 - DNA, 237 bp, Enterobacter cloacae
atggataagaaaaactacgtaaggatagttgcggcttttattgttgcacttatgtttataattgttccagcagataaaatggttaacggtcagtcatttgacttcacttacaaattcatttggaatcttggcgttcctgaaggtgacatattcccctatgtcgttaatgttccgctcatagcggcgcaaatttttggcgtccttgcaatagtatggttactcagtagagttaaataa

SEQ ID NO: 165273 - DNA, 228 bp, Enterobacter cloacae
atgcaactgagattttgtgcattctacggtttccgtcaaggaggccgtaaggccctgcctgtagacggtttcaaactccatcgcggtaacttcgccgctatcggcaagcagattcagccactactggatgccgggcaatgcttccgcctgcaggtgaagtcgtggcgagagaagcgcagcctggctcagaacgcgctcagccacttgtggtacaaggaagtcagctaa

SEQ ID NO: 165274 - DNA, 321 bp, Enterobacter cloacae
atgtcgtatacatctcccgcgttcaaaagcacagaaacccccatgacgcttgccggcctttgccgcctggatggaaagtaccgcgctatcgaaacctcatcgggctttgctgtcattgacataacccgccagcctctgcctggagacactgttgcgttctcgttctacggcggcatgcagtttgcgagagtgcagggtaaatcattaatcacccctgatggtgatgctatagaaggggatgcacttgacgatgtgcggatggcgggagtggttatatttttgatcaaagaaatcaacaacgacgaactgccaacaatttag

SEQ ID NO: 165275 - DNA, 486 bp, Enterobacter cloacae
atggggcgaaaccggaatgataattatcgaggacataaaatgaacttggaggtatcactcaagcatttgaaactagaacgcgtgcacatcagcgatagcgtaaaaaattcaggggcacaaaaaatgcgtgatattcaaattgttttggagcgctggggagggtgggctgcatgcgatagttcaggagttgactactcacccatcgctgctggctttaaagggcttatacctcaatcgagcaaagctcgcctttcatgctctgatgacgatgctatgattattgagggatgtcttgcgcgccttcagaaaagaaaaccctatgagcactctctcttagttgctcattatttatatagggtatctaaaagaaaaatagccaaaatgctaaagaaagacgaaagaattattcgtattgagatccagttagcagaagggtttattgatggttgtttagctatgctaaacgttaggcttaatatggattaa

SEQ ID NO: 165276 - DNA, 1950 bp, Enterobacter cloacae
atgtacacatcaatttcatctataactcgatacaaaggctttgaacttgaactccccattactttttcagattatttatgtctagtaacagggcgaaatggagcaggcaaaacccgtcttttagaagggataataaataattcttgccttgttattattgatgacgctcagatagatcaaaaccaaacaaccatattaaacatggatattgataatcgaaacatcctcataaattatactaataacgagtatgcaaaacatctttcccaaaaccttcgattattagcatctaccataagcaactcatctgaacttccagaaactcacccgatacccagaaacaatggttcaagaatatatgatcacgaagaatttaaggccagagaaatactccagcatgctgagttattacttggcaaagaatcgcataagctttcagcagatgaaatagaactatcgttattggctcataaggatgttattaacggaaaagtcacgcctactcaaacaagcctaagtcaattaaccgtcaattactaccaaactaagcacaagaatagatggctcaaattcctaaaacaagaaggtggtgattattcattcttatgcgaagatgaattatccaagataatgggattagaaagtcctgctgtcgcttttaacaacacgatacaaaaactttttaggggaaagttctcaattttacttcccgatgaagaaaatgcacattttgattataatccaaaacttattttgaataaaactaacgaaccaattgacatcaaagatttatcagctggtgaaaaaattattttttggttagctgagaaaacttttgagataaaatattccaatccgaaatacgtattcactaataagtctttaattttaattgatgaacccgatgcacatttgcatccgcagatgaccaatgatctcttcttgtgtctaaaacagttgcatgagttgctaaaagttaattttattatcactactcattctccaactactgttgccttatgcccgaatgataacattattaatttaagtttttccgaaaaatcagaaaaatacattgctactaaaattgataaagacaatgctatcgctgaattactcgaaggggtgagtcaaatttcaataaaccctgataataaccgtcaagtttatgtagaaaatgaaaacgatcatcacgtctatgaattgatttatcgcaaagtaaaagacaactcttctagaataaatagatttattaatctttcctttgtaagctcaggtgaaaagatagccgaaaatgaattaaggaaacatctcaaaagatatataaataatgaaagtgaagttagcgatcttatcaaaataattaatggcgagggcaattgggataaagtcgttggaatggtagaaagcttgagaaaaaatggtaatcacactgtaagaggactgattgattgggatcttacagcaagaaaacatttaacagatattatagtatttgctcagggtaaagcatattctattgaaaatgtcgtttatgatccaattagcttattcgcatattatcatcgcaatgacattactcacaacgatttttcctttgaggaaattaataataccccatggcatgaagtattaaataatgacattatcctacagaatgtgattgataatgtaatgaaaagaatattaaaaagggagagcaacagagactatgtcatatcatatatgaatggtcggagctttgaatccgacaaggaatattatcaaaaaaacggtcatgaacttgaagatttgatattcaaaaactatcctaaaatcaatgaattgaaacaaaacaatccataccctccagtaatctatcaattcgtaagaaaatcaacaatagccttccttgaatggggatttgtaaatacggtatttgaagatgcttttgttgatctccaaaactaa

SEQ ID NO: 165277 - DNA, 885 bp, Enterobacter cloacae
atgttaaatttcaaagaattatccattgacggacaagatcttgaacttctagtaagagaaattttgttcggactaggtcatagagtttattggagcgggaaaggccccgatgcaggaaaagatcttatcttcacagagaatttcaaaagtgactttgttcccgcctcacgtaaatggcttgttcaatgcaaacataaagcgataagcggaaattctgtcggtaatggtgatttagatgacattgtcgatagttgtgcccaacacgaatgtaatggctatcttttagttacgtccacgtatccctccgcggcagtttctcagagactcgaagatattacaaataacccaagaaacgacgtcacggcgacatattgggattatgttaaaattgagcaagtactttcctcacccgatttatggtcaattgctcaaaggttttttcccggcagcaccgaaaaatggaagatttatgcaacaacaagcccaaacacttggatagcaaattattcaggatattatttccatataaacaataggattggttcagaatatagattctatctgccagatattgaaaacaaaatagaggaaatcaatagagccattgataccataccagaaaaccatttctttaggttaaggagtgtttactatgatgataaacacggtactttcacatggtacattgattatatgtatccacatggagaaaaaccaataaccgaacatatggcactagaaatgttctttgatgacgattggaatcaacactatgattttaaatcaataaaatactccggctcaagcgatcattatgataaagaccactatgacttttatgatcctcatgtaggtcaattccttttaggtatgagaaggtactga

SEQ ID NO: 165278 - DNA, 306 bp, Enterobacter cloacae
atggccacagccaacaaaaatacaaagtctcaacttactactgtccgagtcccgcacgacgtcatgaaagaaatggagtccgttaagctagatgatgagagcaatgcaggatttattgttgctgcaatgcgcggcgaaattgcacgacgaaaagttggggggtctgtcgaagatactattgtgtcaacgttagaacacttaacccatatgaaagagaaagcaataaaagccggtaaggaaattgaagacatcataaaattagctgatgttgaattgaataatcgggctaattcgcacaaggattaa

SEQ ID NO: 165279 - DNA, 714 bp, Enterobacter cloacae
atggatctcactcgtaatgacgaactccttttgaatgatgcagctagacgctcatttcgggatatggcagaccaggattatctctcagctcgtctgtgttataagcacaaattgaattttcaatttttatggctttcgcaacaagccgtagagaaatatattaaagcgattttactttataatagagttccagtattaaaattaaatcacaatttaaacaaagggctggcaaagattaaagaaatcccatatcttgaattagacctagatgtaaaaagtgagcgattcatagattatctcaatgagcagggcccaaatagatacttccaaaacactatgtataccgaaggctttgaaattataaccttggatagaaccatctgggaattaagaagatactgcaagccactaaactactcacttactaacccaaaaggtgaagtgatagaaatgttagaacatgaattgcataacataaaaaattcgaaatcgaggccttatcatacgttcaaactatttggcggctacttagagaaaagattaaaagataataaattcaatcagggtgatatacttacatggaaaaatttattttttggaagaaataaaaaaaatgcaattaggattggaagatcaatgcatgtgactcatccaacgcattatatgcatccaaatgcaacagaaatgctcagtcgtttctttaaaataaaataa

SEQ ID NO: 165280 - DNA, 213 bp, Enterobacter cloacae
atgactgagatgaacgatttaaacattggcgagactaaaggcggctcagcacatctggacgcgcagaccgttttaaggctaaagcagtaccgcattgaccatcttaaagctcacccggggcagccattacccggcgttgcgcagattgttcggcatgctgttaatgcatggctgaatgagaacagctttgcagtaacggaaggtgaaaaatga

SEQ ID NO: 165281 - DNA, 891 bp, Enterobacter cloacae
atgggattaatatctggaaatacacattgggtattatttttaccttgtgagcaccaaccagaagatcgccatgttcaagatttggttcatggcgtattttgcttagaatcctcaggtatacagccatctaatattagcatatatattgatggccaaaatagagccaactttaataagttgatttcgattgcaacccaacataattatactatcaagcctacatctgaatttttcaccgactgcgatacaaatagttatgaaaatctagttatgtttgtgaccggacatggaagtatgaatggtttggactctgcgccgatcataaccccataccgtttattggacaggttaaaaaacactcctgttctcaagcaagcaatcgtttatcttggtcaatgtttcgctggtgttttcaactacttacctgctgggcagcgtaagagaggtgaagatgccgaccccgatgtcattcttatcggggctacgagtcttcatgaaagtttgagtaatccgacaacggaaaatattaatggtatagattttccttgggttgcaaatcaatttttatatcatgtatttaagtggatatcatccccgaatgatatcgatggggatggaaaacatacagtaattgactcttataagtatgctggaatctcatcaaatatgaccaatcgtagaatgaagataggttcttttgtagcttcggtagacttgcatgagcaatggaatactgcaaaaaaagatcatgaagctaacctggctgatccacaaaaactactccgttatagagcattagatcagcaatactatgaaaaactgaacattaactatattcatcaagagtgctggatattaaattctgtacctgcacaatctgttgaattctaa

SEQ ID NO: 165282 - DNA, 270 bp, Enterobacter cloacae
atgaaaaaaaactatttatcgatgcttataggcgtgacgttattatcaatgtcatcactgtctgtagcttcagaagcgggacacacatccaatcctggatatggcgatggtggaacagcgcagaagcgccagattgacgcctgtgtaaacgcgaatacgtctactgtcacgtcttacgataatgtctcacacgttaagccatgcactggtggtgcctcttacaaagacagagaactcccggcccaaaaaattaaagcaccattcaagtga

SEQ ID NO: 165283 - DNA, 210 bp, Enterobacter cloacae
atgaagattgactgcgagtatgtaaagttggtcccggcaacaccgaaatttgatggcgaaggcaacagggttgacgctgatgatacgctggcgctggataacaatgtcatcatgcttgatactgcactggctctcaattacgtcattaagcagttggaaaaaacacagcaagaacttgatgagcttaagcaaaaaatgtcgggatcatga

SEQ ID NO: 165284 - DNA, 747 bp, Enterobacter cloacae
atggatatcccacgtatttttaccgtcagcgaaagcgaacaccgcattcataacccgttcaccccggaaaagtacgccacgctgggccgcgtgttacgcatgaagccaggcacgcgcattctcgatctcggcagcggttcgggtgaaatgctctgcacctgggcgcgcgatcatggcattaccggcaccggcatcgacatgagccgacttttcaccgaacaggcaacgcgccgtgctgacgaactcggcgtcagcgatcacgtgcgttttattcatgacgacgcggccggatacgttgcagatgaaaaatgtgatgtggcggcctgcgtgggcgccacctggattgccggcggcgtcgccggaacaatggcgctgctggcaaaaagcctccggcctggcgggatgatactcatcggtgaaccctactggcgtcaggttcctgcgagcgatgagatagcccaggcctgcggcgtctcgtccatcgctgactttctcaccctgcccgacctggtcgcctcgttcgacgcacagggctatgacctggtggaaatggttctggcagaccaggaaggctgggacagatacgaagcggcgaaatggatgaccctgcgtcgctggctggcggaaaactctgacgatgactttgcacaagaagttcgcgcggagctgacaattgcgcccaaacgccacgtcacctacacacgagagtactttggctggggggtgtttgcgttgattgcccgatag

SEQ ID NO: 165285 - DNA, 258 bp, Enterobacter cloacae
atgaatttatcccgtcaggaacaacgtaccttacacgttctcgccaaaggtggacgtattgcgcacgtccgcgatagctcaggccgcgtcaccgccgttgaatgctacagccgcgaagggctgttgctcgccgactgcacgctcgccgtcttcaaaaaactcaaaaccaaaaagctgatcaagtccgtcaacggtcagccctaccgcattaacacgaccgggctgaacagcgttcgtgcccagccagataatcgttaa

SEQ ID NO: 165286 - DNA, 843 bp, Enterobacter cloacae
atgcaccaaaggacggcgcacgttcgggtaggtctgtccgggcagcgacccaagccacgcttccagcgcgttgaccgtctcgatacgggccgcgaagcccttgcgttcaagctcacgcttgacgtagcgggcctgttcggacaggaaattgcggtcttcgtgcatcagcaccacgaccggcgtgtagtagccgtaagcgaccaatcccgacttggcgtcgttgatagccacctcagtttcctgcgccattttcagggcgtcggtgttaatcatgcccttctgcgacttgaagacctgcgaccagaacccgcgaattttctgctgccacttcaagcggtagcggttgagcgcggcgacggcttcgtgctgttcaaggaagatgaaccgcgacgaccaccgataggacattggcaggccgtcgagcatgtcgaggatgccggggaaggagttgccggggaagccttcgatggctacgcacgaaatgaacttgttgcccagcttcggcgtgtcgcccggccacagttcgggatagcccagccacgcatccagatacatcgggcaatcagggatgcgcagcgcgataggctcattggtcagcacgtagtgcaggtaattgcacagctcatcactctcgtaggcctcgtcgccctcgcctaccgtgatggtgcccatgcggcgcatgtgcatcagatcgccgaggccgtcttgcaggtcatcgagctttttcttgaagtccagcaacagccggtcggccgggttgctgtcgtctacgccgtcatcgtcgtagaccagttcgcccagcttggaatcccgccgcgtcggcggcaggtattgcaggactag

SEQ ID NO: 165287 - DNA, 315 bp, Enterobacter cloacae
atggaagtaatggaatcgcgtcgtttgacgccattccaccgggcgctccatcgcccgcagcaaatcatggggggcgaacgcgaattgatgctgttctccatgcttgttgcgggcggcctgaccgtttcggccctgaactttgtggccacggtcatcggtgtagcgatctggttggtatgcgtctacgccctgcgcaagatggcgaaggccgatccgaacatgtcgaaggtctacattcgccagctcaagtatgggcactattacgggccgttctcgcggccctatcgggtggccaagtcgccacgtatttactga

SEQ ID NO: 165288 - DNA, 492 bp, Enterobacter cloacae
atgatcgcaaatgctctgtctgcttcgccaatggcgtcgaaggcttctcccttcatgtccaaagcgcgtgcggtgctgaccaatccctacttctggctgatggccgctctgttcttggtgcttctctttggtgccatcgaaccggcgcacgcggctgacgcaaccgaaggcggcggctccggcctgccgtgggaaggcccgcttaccaagctcaagcagtcgatcagcgggccggtggccttcgtgatcgcgctgctcggcatcatcgcgtgcggcgcaacgctgatctggggtggtgaagtctccgagttcacccgccgcatcatctacgtcgttctggtggtctgcatcatcgtcttcgctaacacgctgctgactggtgcgctgttctctggcgctgtggtgccgcacgacgctgcaatttctgccgcagatgtggccgcctacgcgaaggctcacgccgcagtcctgaccggggtagggggtcgctga

SEQ ID NO: 165289 - DNA, 984 bp, Enterobacter cloacae
atggacgtaattgcatccgatccgaagtctcccagcatcgcatcaaatcgtgcagaacacgataagcgcataacggaaaaattgcggcgcgaactcgggccgcaaatatgcgagctgctggaagactcgacagtgatcgaaataatgctcaaccccgacggtacgttgtgggttgaacggctcggggcaccaatggaaaagattggtacgctcccggcctctcgggccgaatcgctcatgggtacggtggcctcgacgctgcgcacccaaatcacggccctgaatccgatcctcgaatgcgaactgccgttggatggttcgcgctttgaggcgttgattcctccggttgtggccgggcctaccttcacgatccgtaagaaggcgtcgaagattttcacgctcgataactacgtggagtcgggcatcatgacgcaggcgcagtgcgaggccatcgaggccgctgtacgcaaccgccgcaacgttctggtcgttggtggcaccggcaccggcaaaaccaccctcacaaacggcatcatcgactacatggcgaaggcctgcccgcaagaccgtatcgtcatcatcgaagatacgggcgagctgcaatgcgccgccaagaacgtcgtcattctccgggccgtcgatcacgtcgatatgacccggctactcaaggcaaccatgcgcctgcggcccgaccgtattttggtcggcgaagtccgcgacggcgcggcgttggccttgctcaaggcttggaacactggccaccccggcggggccgccactgttcacgcaaattcggcacctgcgggccttatccgcatggaacagcttgtggctgaggccacgcaggcgccgatgcacgcgctgatcgctgaggctgtggacttgatcgtttcgattgagaaaacagcaggcgggaggcggatcaaggaagtcgtcacggtcgaagggcacgacggcactcaatacctcactaaaccgatatag

SEQ ID NO: 165290 - DNA, 261 bp, Enterobacter cloacae
atgcctagccgacgcgacaccgatagcaacgaaaacgaaaagccggtgccagcggagcggctgatctttgcccgcaatttccgtaaggcacgcaaggccgcaaaactaagccagcgcgcagtcaaggataagacggggttcgcacagtcatggatcagcgaagtagaaacgggaaagtcaccgctcaacatcgacaacatggccgagctggccaagtgtgtcggtgtgccgctgtggcagcttctcgttcctccgtcgtaa

SEQ ID NO: 165291 - DNA, 1245 bp, Enterobacter cloacae
atgaacgggcctaagccaattagtgacattgtggggggcaatctgctggccagactagagcagacgcaccagaggtatcgcgaaaaagttgaggccgcagccctgcccggcgagacgttcgagcaagccgaaaatcggttgcgcgaagaaggcgaacgcgaacgaaagcgaaaaatcaacgaggtcgcccagcaacaagccgaggcgactttggccgcacagttgcgcgataggagaagtcctatcccgcgaagcccaatccctaacacatcgtcccccagtggacagaccaaacggagcaatcagacttcaatgcgtcgccctcccgagagcgaccgacagcccgatttcttcgtgccgggtctgtacgacgtagccaccaaggacaaccgtagcctgatggacgttgcgctgttccgcctgtcaaagcgcgacaagcgggcaggcgaagtgatccgctacgacctgccggacggcttcgttgaagtgaaggccgggccggatggcatggcgtcgatatgggactacgacattgtgctgatgctcatctcacacctaaccgagtcgatgaatcttttcaatgccgggcgcggtgcgatgccgggcaaaaaattcgtcccgcacgcctcagatattgccaagttctgccgtcgtggcgacggtggccgtcaggccgacgagctggaagcggcccttgaccgcctgctaggaacgaccatcaagagtgtgcgcgagtcaccgtcacgcaacggcaagcgcgttgtgcgcgagacggaagcggaaagcctcattggcccctaccgcgtcgtgtcccgcaccgataccggcaaggtggccagcatcgagattgaggcaccaaactggatttaccgggaagtgaccgaaggtaggcagccggacgtgctgaccgttcacccggactacttcctgatcgagccgggccttggccggttcgtctaccgcctcgctcgccgcgctgcgggcaagagcacggccaagtgggcgtttaagaccatctacgagcgcagcggcagcacgggcacattcaaagagttctgccgcatgatgcgccgcatgatcgacgccaacgacctgcccgaatacgacttgcgcgaggaagacggtcagagcggcccgctgctacttatcacgcgccgcaccgacgcggtggagctggccgccaaggacgaacccgaggcagacggcgacgagcaggagaacggcgagaatgcggccggtgtgtaa

SEQ ID NO: 165292 - DNA, 444 bp, Enterobacter cloacae
atgcagatacgtgaacagggccgcaaaattcagtgcatccgcaccgtgtacgacaaggccattggccggggtcggcagacggtcattgccacactggcgcgctatacgaccgaaatgcccacgaccgggctggatgagctgacagaggccgaacgcgagacgctggccgaatggctggccaagcgccgggaagcctcgcagaagtcgcaggaggcctacacggccatgtctgcggatcggtggctggtcacgctggccaaggccatcagggaagggcaggagctgcgccccgaacaggcggccgcgatctggcacggcatgggggaggtcggcaaggccttgcgcaaggctggtcacgcgaagcccaaggcggtcagaaagggcaagccggtcgatccggctgatcccaaggatcaaggggagggggcaccaaaggggaaatga

SEQ ID NO: 165293 - DNA, 324 bp, Enterobacter cloacae
atgcagcagatacggcactacctcgaccccaacggacgcgaccacttcgccgagtggcgcgatcaggtgcgcgataccaaagcgcgaatcgccatcgaccggcgcatcatgcgcttggaacttggcaacttcggcgatcacaagcccctgcgtgaaggcgtgtgggagctgcgcatcgacgtagggccgggctaccgcgtttattacgccaaggctggcttgaccgtcgtgctgctgctctgcggcggcgacaagcgcaagcagaacgccgacattgaccgggcctgcgcctactggcgcgactggcagaacaggaacgagtaa

SEQ ID NO: 165294 - DNA, 198 bp, Enterobacter cloacae
atgagcaaagagcaacgaacgatcaatgttcgggaacctagcactatcgagccggaagtcatcacgatcaaagaggccaacacctcgaaagtcgatgaaagcacgatgacccagctactcaagacaaccttccgccagccgccagagcgaatctttgttggcgagattggcggcggcgatacaggagaaagtgaatga

SEQ ID NO: 165295 - DNA, 312 bp, Enterobacter cloacae
atgaaagatcgagcacacgacacggctatggccgaagtgttccgcaacgaccccgcctacgcggtcgagctgctgaacagcattcttgaggatggcgaacaaggcgaactcttgattgccctgcgccagatggccgaggccttcggaggcgtgcggcaggtggccaagtcggccgagctgaaccctaaccagctttaccgcacgctgtcacagacaggcaacccggaggtgcgcagtctgaccgcgatccttcgcgctatgggcctgcgactggccatccagccgctgcaccctaccccggccgcccactga

SEQ ID NO: 165296 - DNA, 369 bp, Enterobacter cloacae
atgggattagacattggacaattaagcccgtgggtggtcggcgcttacttagtacccctattggcggttctggcgtggatcgtggtcggtgcattcaaggacggcgaactgccgatgatgccggggcttctggccatcatgctgatgggattcggaatgttcgccgtctacgaacccaagcccgacgagtgggaaacgttcaaggccgcgcacaactgcaaggtcgtggcgaagcgtgacggtcatagcaacaacggaatcggcgtcaccactcgcggcagcgtgggctacatcatcggcgacgatacgcccgatcaggtcgcctacaagtgcgacgacggcgtgacctactggaaaaatgcgaggtag

SEQ ID NO: 165297 - DNA, 360 bp, Enterobacter cloacae
atgaaaatgatggtgtttcttctggtcgtcatggttgcgtacatggcgttcttccgtgatgacggccgggacgcggcggcagcgacctatgccgcgcagcggatcaacgagcaggacaaaattctggttgagcttcaatcgctcaacgatccccacgtatcggatttcgtccgcgattggcgctactacgcgccaacgccttcgcctgagcagctttctgagcttcggataattcagcagaacatcaggaacgataaaagcgttgctgaaaagtacacgctggaatggcaaaacaagaatggcttctgctcaaaggttgaaggcatgtttggcaagatcgaatgcacgcccggcctctga

SEQ ID NO: 165298 - DNA, 456 bp, Enterobacter cloacae
atgatcgactttgacgagatacggaaacaggtggcgatcaagcacaacgtgctgatcggcaaggacgatccgatactggtcacggtcacggtcagcgatatggtcttgggccgctacctcgaactggtttccgaccagtacgacgaagccaacagggccttgaccgtgagcctgcaacagcaggtcgaacagtccaaggaaacggccggaaaggtaatcaccgacgcggccaactacgtcagcgaacaggtgcggcaggccgtgactgccgccctcgccgatgctggcaacgacgtgcggcggcagatagccaacgcgcaggccgcaagccgcgatgcggtggccagtggccgggatgcgcaggcggcgaagaccggcgcatacctggctgcggccttggccggggtcgccgctctggtggccgtggcggccttggtggtcgttcttctgaaatga

SEQ ID NO: 165299 - DNA, 756 bp, Enterobacter cloacae
atgaacgacgtaaccactccggccctgaacaccctcgcccgtcaggttcatttcacgctgcaaggcaagggcggcgtcggcaagtcctttatctcgtccctgctcgtccagtacctcggcggcaagggcctgccggtcacggccgtggacaccgatccggtcaatgccaccctcgccggttacaaggcctttaacacccagcgccttgagctgatggaaaacggctcgctgatcgagcgtaatttcgaccgcctcattgagcaggtagtcgaggaagacaccaatttcgttatcgacaacggcgcggcgtcgttcatcccgctgtcctactacatcgccgaaaacgacgccatcaacctgattggcgagaacggcaagcaggtcatcattcacacggtcatcaccggcggccaagccctgcgcgacaccctcggcggcttcgcctctctggccgagcagatgccgggcaatgcagagctggtcgtctggctcaatgagttcttcggcgacattgaggccgaaggcaaaaccttcgaggaaatgaaggtctaccagaacaacaaggatcgcgtgcgcggcatcgtgcgtatcgctcgccagaccggcagcacgttcggcgaggacgtgaaactgatgctcgatagcaagctgaccttcgatgaaatcaagcagtcgccagacttcggcctcatgtccaagtcgcgtctctcgaaggtcaaaacggcgatcttcgagcagttggccaccatcatctga

SEQ ID NO: 165300 - DNA, 384 bp, Enterobacter cloacae
atggcagacacgccaagcaaaaagccccgccggggcgcaggacgtgtcgcgtttctggcccgcttagagcagttccgggaactgctcgcagcgggtaacgaacagcgcacgatctacgacgactttggcggcgaggcggaattgggcatcagctactcccaattcaatcgctacgtcgtccggtacataacaggagcaaaagacgatgggcaccaaagaaaaggcaccgggcaaatcgccccgccaagcccctccccggcccctacaggagccgcaggaggccaagcaaggggtagcagcaccccggccgaaaaacccggccaaaagcgccccggattccagcacaacccaaacagcggcaacgaccgcgacgacctcatctga

SEQ ID NO: 165301 - DNA, 300 bp, Enterobacter cloacae
gtgaacaacgacgaaaaggccgagctggccgaccgggctgctcagtccggtttgtcgttgtccgcctacatgaaagcggccggactgaacgcgcctattcgggcaagggctgacctgtcagccgtggccgatcttgtgcgcgtgaacggcgaccttggccgggtggccgggttgctgaaattgtggctcgcggagaagcgcgggcagggtgcccggccggtggacgtggaagccgtgatgaaggactttcgcgccctacaggatgaagtccgctcgatcatgatccgggtggccagatga

SEQ ID NO: 165302 - DNA, 2697 bp, Enterobacter cloacae
atgattgcccatcgcatcgagcgcaagccgcaccagtcatcgaacccggccaagctggtcaggtacatggtggcggccaagggcggcatcgacccgacgagctggcagcgaacagccgactacattctggacaccgcgaacgacaccgcgaaaggcgagaaggtcgaaagctaccgcgttaccaactgcggcacggacgaccccgccgacgctgcaatcctgatcttggccactcaggcggccaacaccaggtcgaagggagaaaagacctatcacatggtcttttcgtttcaggctggcgagcggcccccgctggaagtcctgcacgccattgaagacgaactttgcgaatccatcggccttggcgatcaccaacgggtgtccgccgtgcatgtcgatactgaccacctgcatgtgcatgtggccatcaacaaggttcatccgaccggcctacagaacatcgaaccttattacgacaagcgcaggctgatggaggcctgcgaacgcctcgaagtccaatacgggcttcgccatgatgaccacggcttaggagatagaaaccatgagcacaccagagaacgaagcgaccgaatccaacttgatcgaggtcagcgaccagagcagcgcgatagtagatttcgacgatatttacgagagtcctacgatctctcgtttgccgatgaaccagaggccaaaaccctcaacggtctgcgaacgctgtccggctgccgtatggttcgcgcttccgaaagaacttcggtgctattgccgggtgatacacgcggtgatctacagcaacgaggaaaagaacgcgctgacggcctgcgacggccgggacatggcgatagaacagctattggccaagcaggaagcggcggacgcagccgggtaagcggcaaagccgccgacgcggaggcccacagcggcatcgagacgctgaccggatacgcggcccgcgagctggccccggcgatgcgacaggcgacgagctggcaggagctgcacgacgcagcggccgagcacggcctagaggttcgccagcggggcgcaggccttgtcataggcgagccagatttaggtatttgggcgaaggccagcaacgtcggccgcgacctttcgatgaaggccctaaccgaccgtcttggcccgttccagccttccgaacggcaggccgaggcgaaggcgaaccgcaagcggtacgagccgcgaccccggcggccggataacccgacgacagcgggcctgttcaaccagtatcagcgcgagcgacaggcggccattctggcccgccgtcagggcctcgaccagatcaagcgcgagagtgcggctttcaatgcgcaggtgaagcagtggagccagacagagcgaatgcttttgaaggtcgcgggcaaggggccgaccaaacgcctgatgtacggcactatcaaacagcaggccgacgcctcgcgccaaaagaaccggcagagcgcagacgctcgccgtcaggcgctgttcaaacagacgacgatgcccacttgggccgactggctaacgcagcaggccgagcgcggcaacgccgaggcgctggccgtgctgcgcgaccgcgaggaacggacacgccgctggaacggggagctactgaccgccgaccgggccgacaaggccaaggctgttgttctcgacaagctcaagcccaaggcccggaaagacgggacgatggcgtacagcaccatcgacggcggcatggtgatcgaccggaagacgcacgttcaggcgcagaaagccacgactggcgcggcactggtagcgctcgaactggcatccaagcggttcgagggccaagccctcatcgtggaaggcacagacgagttccggcttgaagtcgcccagctcgccggtatgcacggcctcaaggtcacgttcaccgatccggcgatggagcagatgcgccgcgagacggccgagcacaaggaaatggagaaggcctttcaggccgaaatcaaggcatcgagccgcgacgacttcgccgaactggtggacttcggcaaagcgccgttcgagcacgtcaagggcaaccgcaagagctacttcgtcacgctgcgcgacgggaacggcgaagaccgaaccctatggggcgtcgatcttgaaagagcggtcgcaaatagcggtgcggtcgtgggcgaccgcgtgcgtgtcaatcacatgggcagcgagagcgtgacgctaccggacggccggacggtggagcgcaacgaatggcgcatggagatagcaccaaaaggaagccagacagccaagccgaaaccgaaccgtccaacccctgcgccgaacgacatggatgcggcgtttctggccgaaactggcctgtccggcaagacgacgggaaaccggacaggcggaaagcccgcgcagcccgtggattctggcccggcggtgcaaaaatggattgaagaacgcaacaaaaatagagacaaaatatcgtctatagactatcatcggctttggcaatccaccgacgcaggcagggccacatatcaaggtcgcaggcgcatggaagacggtagcgaagtgctgttgttgaagcgcggcgatgaaatgttggtcaagccatccaccccccgcgtagtcgccaaggcggcgacatggaaactaggtcgcgtcgtccagttggacggacgtggacgattcactgacaggagtaacgaggtcgaactatga

SEQ ID NO: 165303 - DNA, 1959 bp, Enterobacter cloacae
atgagcgataaaaattcgtcggcgggtaagctgcggcttatcggcggcgtttatttagtgctgttcatcatcggtttgaacagcatatgtacgcaatttattgcgtaccgggttggctaccatccggcacttgggccgtcactgttcgggcagctttatatgcccttcgactggtggcgatggctgttcaagttctacgactcagcgcccaattcctacaactatgcctttgtgattttcgcgctcggcgtgctggtcggtctgctgacctatgttctctggatcggcttcaagacgcgcagctcgcgcaagcatgaagacgttcacggaacggcgcacttcgcaacgctggacgaggtacgggaaacgggcctactgccgcgtgagggcaagcaagggcagggcgtctactgcggggcgtatgacgaccccgaaaccggcaccacgtactacctgcggcacgacggcccggagcatgtttgcgcccttgctccgacccgttcgggcaagggtgtaggccttgtcattcccaccctgttgagctggccccactcggtgttcgtgctcgaccgtaagggcgaaaactacgccatgacttcgggctggcgtcagaagcacgccaacaacgtgatcctgcgctttgacccagcgaagccgggcaccggctgcgcatggaacccattgggcgaaatccagttccgcacccgctttcaggtcagtgacgcgcaaaacatcgcgctgatggtcatcgactccgatggcaagggcatcgagtccgaccacttccgtagtgccgcgttcgagctgctggtagggctgatcctgcacgcgctctacaagggcgaacaggtaggccgcacgccctgcttgcaggacattggccacatgctgaccggcgtgggcgacttcgccgccccggacacggccaacgaccttgtagacgacccggacggcgacccgaaagcactggccgggctgttcgatgaaatgcgcgaggtgtccatcaatgacggcgacccggcgaaccgggaagcgcagcttgtcattaccggcgtcggcacccgcatggccaacaccccggcccgcgagctgggcagcatcatttcgacggcgaacaacgcccttgcgctgtaccgcgaccctatcgttggcgagaacacttcgcgcaacgacttcaagattgccgacctgatggatcacgaccggccggtgtcgctctatctcatttcaacgccgaagacgtccaagcgccttgtgccgcttacccgcctgttgttgaccatgatcgtgctcacgatggccgacgaaatggagtttgacgacggccgggccaagacggcgcacaagcaccgcttgctgctgatgctggacgagttcccgacgctcggcaaaatcgaagtgttcgaggaagccttggcctacatcgccggttacggcatgaaagcctacctcatcacgcaggacgtgcagcagctctacaaggcttattcaaactacgaaagcatcatttccaactgccacgtccgcatcgcctacgcgcccaacaaggtcgagacagccgaatggatgtcgaagatgacgggcaccaccaccgtcgtcaaagagcaggttacgacttcgggcaagcggttcggtgccgtcctcgacaacgtttcgcgcagctatcaggaagtgcagcgcccgctgatgacgcccgacgaaatcatgcgcctgcccggcccgaccaaggacgccagcggggagaagatcaccgcgccgggcgaaatgcttgtgttcgtcgctggccagccggtaatccgcggccgccaaatcctctacttctttgacccggttttctccaagcggtcgaagctcaagcccgtaccgactgacgttgtgcgcgtggcccagcaatccaagcccaccccggccgccgccgggccgtccaacaacagcaacgggggctttgtcgtccaatga

SEQ ID NO: 165304 - DNA, 567 bp, Enterobacter cloacae
atgaaaggtcgccgcttcggaatcgccgccttgtgcgcggccgcagtgatcggcgttgcgatcacgaccggctatcacgcaggcctgcgcctcaacttcacggactcggccccgcatgggctttggcttgtgcagaccgccgaatcggccagcatcaagcgtggcgagctggtcgaagtgtgcccgcccgcctcgccgattgttcgcctcatgggcgaacggggctacctcgcgcccggtgactgcgaggattccggcgtaaccccgctactcaagccggtgtcggcggtagcgggtgacgccatccagttcgagccgggccatcccgtgaccgtcaacggcgtggccctgccgaacaccgccgctatgcccgcgctgccgggctggcctgccgggcgctacatcgtgcagcccggcgaggtctggctgttttccagctacagcgcgggcagcttcgacagccgctactttggccccgttgtgctggccagcgtgcgcggcattgcccgcccggtcgccgtgatcggcgacccggcggccatcactacgggagtaaccaaacaatga

SEQ ID NO: 165305 - DNA, 897 bp, Enterobacter cloacae
atgatcggcctcgacatgatgatggcgtgcgcgccgaacgtggccccggccacgatagagaaggtcattcaggtggagagcggcggcaaccccttggcgctcaatgtgaacgtcaagtgggtgatcgagcgtgacgagaagggcaacccgatcatggtcacggccgcagacggccagaccaagccgaagcgccgcaaggtcgtcttcaaaagccctatcgccatcaagaccgcgcaggacgccgtgaccgttgcctacatggccatcgacgcggggcactccgtcgatatgggctacatgcaggtcaacagtaccaaccttaaatcgctcggctacaccgtcgaagacatgttcgacacttgcaagaacctcgcagccggtgcgcgagttctgaccgcgttctacagcaacgcgctgccgaaatatccgaacgaacaggccgcactccgggcggccctgtccgcctacaacacgggcgatttcaacaagggttttttgaacggctacttggcccgctacggcgtcggccaacaggtcgccgtgagcgttcccgcgctcaatccgtacacggccccgactgccgtgtttgtacgtcaaccgagaaaggaagaagccatgagcaccaaagaagaagcgagcagcacccagcaggtcgcggaagcgaaaaccgccttggccccgcgtgtcgatcccgtcgtgagcaagtcgcccgaagacagcggcacgcccggcgtgcaggtcgagcacacggcggccgaagcggaagccaacggcgcgttcaaagaaacggccatgtccgaagccgaggcgtgggcctcgaacgcggacttgtccgctgacccggaaggaaccgccatcgtcgtgaacggcaaggccgtgcggaaggggggtaactaa

SEQ ID NO: 165306 - DNA, 3624 bp, Enterobacter cloacae
atgaaaaaggaatacgccgaggaagtcgcggcgcggatcatagagcagttggagcagggcaccgcgccgtggcaaaagccgtggcagcccggcgagctgcgcttgccgtacaacccgaccaccggcaaggaataccgtggcatgaacagcctttggctgcacatgcagggccacagtgatccgcgctggatgacctacaaccaagccgccgccgaaggcgcacaggtgcgcaagggttccaagggaacccatatcgtctactggaagttcagcgaggaacgaaaggccaccgacgagcagggccgcccggtcattgacccggacaccggcaagcaaaagaccgtgaccgtgcagctcgaacggccgcgctcattcatggccgtggtgttcaacggctcgcagatcgacggcttgccgccgctggaagcgcgacccaccgggccagagccggagcgtcacgcccgcgccgaggccatcttggccaattcgggcgcggacattcgccacgaacccggcgaccgggctttttaccgtcccagcacggacagcatcacactgcccgagcgcaaccagttcccgaccgccgacaactactacgccaccgcgctgcatgagctgggccactggacggggcacccgtcgcggcttgaccgcgaccttgcgcacccgttcggttccgagggctacgcccgcgaagaactgcgagcggaaattgcctcgctcatgttgggcgaacgcctcgaaatcggccacgatccgggccagcacgcggcctatgtcggttcgtgggttaaagccttgaaggaagatccaaaagagatcttccgggccgcgtccgacgccgaacgcatcagcggctacgtgatggatttcgagcgtgagcaggagctatcgcaggcagttgaggccgagcttggcccgcgctggactgtagagcaccgcgacacatttgcggccaatcccgagcaggtcgtgatcggcgaaaccaatagcgcagtcgaggcgctggccctattccgaagcaggccagacacaaccgtgaccgataacagaacggaaacggttgaagggcgcacctcttgggttagagacggttccgcgccggagtggtcgccgtcggccaagctggtcgctatggccaacgtggaagaaaagggcgtccggcttccgcagccgcgccccggtgtgcccactgccgaccatcgacttgccgaaacgctgctgctcgccgccaaccatccagagccggggagccacggccaacaggcgttgatgaaagccgccgccgacgcaaccgccgaggccttcggggagccgctggcaggcatccgcgacagcaagctgccggagcaatggaacgggacggcgcgagcggttccggtcgcattacagggcagctatgaggcaggcgacgaggaatatgtacccgtcgaacaagggcagcacacccattggcttgtcgagactcaggacgcgaccggcaactggcattggttcgctactgacttcaatcaggaaggcgcggaggcggccaccacggcgaagcgtcttaataccattggtgaagtcgccgggctgtcagccgggcaggccgacgcgcagcaaggcgtgccggaacagcaggcctacaccgtgcagagccgccgtgtcgtgccggagaacgccgccaatcatgcaggccagaacgccgtctatgtgcagctcgatgacggccgcagggcttggggattcggcgcgaccgacgaagccgccgagcaatccgccgtagaacgtgcgcagcgcgtcggcctcgatgccgaccgggcaccgacccgcaccgttctgcatgagcaaccggagaagcctatgcaatcgcgcacctatctggccgtgccctacgccgagaagaacgaggcgaaggcgctgggagccaagtgggataaggaagcaaaatcatggtacgcgcccgagggcgtggacgtaaccacatcgggccttgcccggtggagcgtggacaagtccaacgtcgtcaccgcgtcggaacccaagcccgccatcgagcagttcaaggacgcattgaaggatgcgggcttgcagctcaagggcgaggtcatcacggacgggaagatgcagcgggtgcccgtcgagggcgaccggggcggtgccaccagtggcgcatacgcctaccacgaagccgggcgcacgccgggcggtttcatccagaactacaagaccggcgaagtcgtacattggaagcccgaaggcaagacgccggaactcagcgccgccgaccgtgcccggcaggccgccgaggcggccgaacagcgcaaggcacgcgatgcggcccgcctgtccgagcacggagcaaccgccgccgccgcgcaagcgttgtggaacgaggccccggccgcgaccgctgacaatgcctattgcaaagccaaaggcatcgccaacccggtaggcctgcgcgtcgtgccggacagtgtttcgccggagactgccgcgcacgggatcaagatcgccaagacagccaaggaagccaaggcgctgcgcgaggctgacccggccaaccgggttttcaaagcgggcgacctgctgatacctggcacagacggcgaagggaaattgtggacgctgcaaagcgtcaatccctacttcaaatcgttcatgaagggcggccggaaagcgggcctctacaccgttgccggtgctgacgatccgcgcaaggcgctggcccaagacggcgattcccctttggtgctcgccgaaggctacgccacagccgacacggtttcgcgtctgctgggcggtaagccggtcatcgtggcattcgatagcggcaatctcgacgcggtggccaccgagctgcgcgagcgtcacccgtcgcggccgttgctgatcgccgccgacaatgaccacaacgcgccgaaggagctggacgccaacggcaagcccaaggtcaacgtcggactggtgaaggccacagaaaccgccgagaagcacggcggcggcgtcatggccccgcagttcaacgacggcgagaagggttccgactggaacgacctcgccgggagccgtggcgacgaagctgcccgccggatgctcgccgagcagatggcggtagccaagcgtgatgccgccataactgccgaacggctgaccacccttgcgcgtacccgcgacatggaagcccgcaacgacccgacgacgagcgccgacgatgcggccgtagcaacagagcgcgggcacgcggccgaagtattggccggtgcgcaatccgcgctcagtgaagtgcgcagcatggccgccgatggcgtaaccggcaacaccaaaggggcaacccgttcggctgctgccgtcaaagccgggatcgaccggaagaccgaggcgatgcacgaccgcgccaaagaggaacgcgaggaagtgctgaaccacggccagaccggcccgctcgatggcgtcaacgctggcgtgtcgtggaaaaagctacccgagcaagccaaacaggcgctcatcgaggacgtgaagaacggcaaggacgtgaccttgccgaaggacgccccggccaagctcaaacagatggcaggccttgaaccgacccccgcgccgcgctcgcgcagccgtgggattgatgcaggcctttga

SEQ ID NO: 165307 - DNA, 2016 bp, Enterobacter cloacae
atgactacattggtaatcgtggaatcaccgaacaaagtaagcaaaatcagcgcgattctcggcgacggctacaaggtcatggccagcgttggccatgtgcgtgacctgccgccgaaagagctgggcatcgaaccgccttccttcgagctgacctatcaaccgaccgagcgcgggcaaggcgttttggccaaactcaaggccgccgtcgcacaggccgaccgcgtgttgctggccaccgaccccgaccgcgaaggcgaggcgatttcgtggcaccttgccgacgcgctacgtctcaaaaatcccgagcgcgtgacgttcacggccatcaccaaggaaaaaatccttgcggccttcgctgcgccgcgtccgctcgacatgcagcgcgtacacgcgcaggaagcccgccgggcacttgaccgcatcattggctaccgcgtcagcccggcattgtccgatgccaccgggcagcgccttggcgcggggcgcgtgcagtctccggccgtccgccttgttgttgaccgcgaacgggccattgccgcattcaaggtcactcagcactacggcgccgagctgattttcgagaacgacgacagcaccaaatggaaagcacagtgggacacgaaaccgcatttgcccgagggcgaaagctacctgctggattccgcgctggccaaactcgccgccgccgttcgcagcgtatcggttgccgaatacgaggacagcgagaagggccgggcacccgccgcgccgttcaccacctcgacgctgcaacaggccgccggtcagcgtctcaagttgaagcccaagcgcacgatggaactggcgcaacgcctttatgagcaaggcgcgatcacctaccaccgcaccgacgccccgaacatggacgacgaaggccgggcagacattgccgcctatgcgcagggcgcaggtctgccgctggccgataagccgcgcaagtggaaggcgaaggagggcgcacaggagggccacgaagctatcaggccgacccatgccgccgatcttgaatgcggggagaacgacgacgagcgggcactgtatcgactcatctggcaacgtgcggtcgcgtcccagctcgccgatgcgacctatgccgtccgcaccgtgcgcctcaatggcgacgccgagggcacgccggtatcgttcaaggcgaccggccgcaccctgctgacgccgggttggctcgccgtctacgccgacgatgccgaggacgaggacagcgaaccagacgaggccgccaacaacccgattccggcgctcgccgtgggcgcggagctggtagcggcggacggccgcgtactcagcaagaagaccaagccgcccgtccggttcaaggaacctactcttgtcgccgaaatggaacgccttggcatcggccgcccgagcacctacgccgcgatcctcgacaacatcaccacccgcgaatacatcgtggccgacaagaagggctatttgcagccgtcgtctatcggcgaagtggtgcgcgatggtctggtagaccgcttcgcgtttatcgacctcgattacacccgaggccttgaggaacagctcgaccagatcgcagaagggcaggccgactaccttggcgttgtgtcggccgcttgggccgcgctcgatgacgagctgggcaagctggaatcggccgacctgccagttgcgcatccgtgcccgacgtgcagcaagccgctgcgccggatcaaggggcaacacgggttcttttgggcctgctctgacagggaatgcaagaccacgctgccggacgccaaaggcaagcccggcgagcgtaaggccccgccgccgccgaccggcattgcgtgccctaaatgcggcaaggagctggcccaccgtgtcgggacgagcaagcccgtcaaacgcggcatgaagccccgaccgtatgacttttatagctgcaccggcttcccgaaatgcgatgcgaagtacaacaccggcccggacggcaagcccgtgttcggtgatgacgagaaagccgcaggctga

SEQ ID NO: 165308 - DNA, 708 bp, Enterobacter cloacae
atgttcgacaatctgcgccgccggttggcatggcgggccgagctgcgcgagcttgaccagaaacaggccccggccacgttggccaagcccgacgacagcaatcccggccgtcttctttggtgcctgccggtgcccggcaagcccgatgttttcatggctctggaaaagggcgagcacgccgatcacgacaggttcgtggtgccggtgaacgccgtggcgttcaatcggctatggctggccggtggcctcaattcaagggagcggccggacggctgtttgttgcgccgggacatgcccgccgatagcaaataccgtcacgcggccgcctgctttgccgaggggccgcagtcgcccgtcccgctggccagcgtctcgctggaacgcggtcgggacggcacccaatcggtcagcttcggcgacggcgtgacgcgcacgttttggctactggccaacaacgtcgccgcgtttcccgtcctgatcgcaggcgaggccgccgccaagcagctcgcgcagctcgccgggacggacggcagcaccttgcgcgtgtccgaggctttccgacaggtcgaaaaggccccggccagcccacagaagccggtcagcaccaaaaaggaaggggtagggcaggggcaagcgaacaatgcgcctcagcgggccgcacagggccacagaaggccgtcccgaggtggcggcatgggtatcgactga

SEQ ID NO: 165309 - DNA, 450 bp, Enterobacter cloacae
gtgagcaaacaacattggaaacagcttaacaacatcaaatattcgctctaccggatggaacgaccatcactatcgccccgcttttcagccgctttactcgcagccattgcaacggcgctcgttgcaggcatggtgctgttgtggggagcttatacagcgtgcctgatcggggcggccgtgggtatcgcggtctaccagttcgtgccactgtcgaagtcgtgggctgagacactggataaccaattgacggcttatgatccggtagacgtggaggcctatgcagaactgcaagacgtaacccgttcgctaggcaggctcgaacttggcgaggtattccgatggttggacagagaacgccatgcccttagttacagtcggccagtgtcattacaaggcccacaatttaaattcatcaacaggcaagtccgccgaaagcgtgacggtgattag

SEQ ID NO: 165310 - DNA, 720 bp, Enterobacter cloacae
gtgaaagctcttaaatccacggccagcccaacgattcaggcctatggcgagctacaggcagcgtttgagcactacaacgctgctctgttcgatggccagctcccgcactgtctcatcacgatgcagcgcgaaaagcgcacctatggctatttctcgtcgcgccggttcgccaaccggcacgaaaagaccatgaccgacgaaatcgccatgaatccatcctattttggtgtcgtgccgctgctcgaaatattgcaaactctggttcacgaaatggcgcacgcttggcagttccatttcggcgagccgggccgacgcggctaccacaacaaagagtgggccgacaaaatggaagccatcggcctgatgccttccgataccggcaagcccggcggaaagaaaacgggcgagaagatggccgactatgcgattgacggcggccccttcatgcaagccactgaggcgctgctaaagaccgacttccgcattacatggttcgacaggcacccgcctgcgggaaccgaaatcgcggcgatcttcggtgacgccgacgacggcgacgacggcggcctgatccagcccgccccggccgggaacaaatcgaaccgggataagtaccgctgcccctgctgcggtgcgcaggcgtggggaaagccgggcctcaagctgctgtgcggcaatgacgattgcaacgccgcgccgttcgagttggccatcaactaa

SEQ ID NO: 165311 - DNA, 231 bp, Enterobacter cloacae
atgagcggcctttcaatcaacacccggcagctcgccgacctgctgaacatcagcgaaggcgagctagttcatgcgatgcggtcaagcgggaagctgcacggcgtgccgttccccgaagtgctcggcaaccataaggccaaggtgcgcaagttcaatttcgcggccgctctgcggttcgtggatcaggtcaacaaagcccgctcggaagggggaaacagtgaaagctcttaa

SEQ ID NO: 165312 - DNA, 339 bp, Enterobacter cloacae
atgaaatcagttatcgagttgattggattaatttttcttggtgccttcctcgctgttccttttgctgcgctgattagggaggcgggtggagtacacaacttcatcgcactggtgatgattggcacgacaacactcggcggaaccgtcattggtatgtcgtgcagaaccaaaaccaaaaagggccgtattggtgccgccctgaccggggcgctgctcggtctaatgctctctgtgggtatgacgaaggccttggaaagcgaccgacaagagcagtgcaaagaagctgacggcgcttttggccgggctttccttgaatgcgatggcccgatgggtgggtga

SEQ ID NO: 165313 - DNA, 672 bp, Enterobacter cloacae
atgagtgactggctgatacaggcgctttgcctgatgggcagcgtgatcggggtggttttattggtgtcaatgattaggcgcgacggcgataacgagttgcgcggcttttatatgttcatgggcttggcggccgtccttattgcccttctgtatatcgtcgcggactccctgcaaaagagtgaggaagtccgcaagaccgctacggcggccgacgtctcacagtcgccggaactgattggcaaggtcgtccgtgtcctcgacggcgatacgttcgagcttctggtagatcagcagcccgtccgcatccgcgtaaccggcattgatgccccggaaaaagatcagccatttggccagcgctcgcggcagtctttggcgggcatggttgatggaaaccctgtagcggtgcgggtaaagggcaaagatcgctacggccgcacgctcggcgcggtctacgccaagatatgcgccccttctgccccttgcctcgccgtttatgtcaacgccgaacaggtcaagacgggtatggcttgggcttaccgtttccacggccaagccgtcgatccggcaatgctgaaactcgaaacgcaggcccgtggcgagcgcgtcggcctgtggtcaacaccgaacgcagtggagccgtggaagtggcggcaccaaaaagaaaccgattga

SEQ ID NO: 165314 - DNA, 339 bp, Enterobacter cloacae
atgaacgtagagaaacgccagcgcatcgagcgccgcattgcacgcgaggccatcaaaggactactcgccgagggctacaagatttccgtctttgacggcgaggaaaccgtactgaccaagagcgtcgatccggccgccatcgaaaaggccatgttcagcacggacgaggatcagtttcacgtcgagcgcgacggcggcgagaagccggaaaccggctgggtgctgttcgtctacggcaacgacggttgggacgtgatcgccgacaacaccgtgaacctcgaaccggcgttgaagggcgcgaccgagctggccgacaagatcgccgaggaagaagcgtaa

SEQ ID NO: 165315 - DNA, 408 bp, Enterobacter cloacae
atgagcgggcgcacgtcactaatcgttgttgttggggcaggtcttgcattcgccgcgctggcgttcggcgtcatgcggcgcagcgaggcaaccacggatttccggcaagcggctgtcgctgaccagcacgcggccgagaactacaacgggttcattcagcaggtggccgaacatgccccggagggcatgaaaaagaccgtggccaccgcttgggcgaactgcgctcgcatcagcaccaaatgggtaggccgtctgcccgtgtcgtctggcccttcgccgcacgaactagacgtgtgcgaggcctcggccgtgcagttggccaccagtcgcggccacgacgccgcagcatcgagccaatacgcccaacgactccgcgctgccagcgcggcggtgcgggctgctaactaa

SEQ ID NO: 165316 - DNA, 624 bp, Enterobacter cloacae
atgcgtaatgcaaaagaaggggtagcgctggcggccatcgtggccaaagaaaccaccgaagggaagtggagcggaaccggcggaggccttggattcggcactggcggccttggtctgttcgttggcggcatgagcggcaccaagcgcgagcagtcgcagcgggccaaagagttcgaggccccgccaaaggcgtcgtttaactggctgtatgtgttcgcgccgctcatcctcttgctggtcatcgccgcaatgttcggtttcggatcgagcttcgtgcagttcatggcagacggtcagccagcggcgaccggcagcctcggccgcgctcaggaaggtcttggccaaatggttagcgtcttgggccagttcgtgccgttgctggccatcgtcggcgcggccttgtggttcatctttgggcgcagtcgccgtgaagacgaggaaaacgcccgattcaaggccgccgaagccgccgaccgcatcaaggaaggcatctactaccggctgcgttacgtcgaggacgaccacgttgtgttcgatccaaaaaccggccgggaagtaccagccgaacgcaatcacatcctttcgctgttgaacgagctggccagcagtgagcaggccgagtga

SEQ ID NO: 165317 - DNA, 615 bp, Enterobacter cloacae
atgttgttacaccttgtaccccgcctgttcgcgtgccgtgtcaacgagccggaatgcgccctgatcgactttcattgtcccgcgctcgggctgaagctgcgcaacggcatcgagctggtcgcccggcgaccgtacccgaacaagcactatctggtggcctgccgcaaagttggccaaaaggccatgaacggctttctggtcgagacgaccgagcgcgtgcgcgagttcacgacgctgacccgctgggccgtcggcgctgatcgcatcgtcaaccatcaggtgcagtatttcgtgctcgatgacgagctggacgccatcaccgactatatgccgctctggtatgcaacgtcgccgagccttggcagcttctccagtcgctggcccgccgtggccaacgactggacaccggccgccgcacagccgcgcatggaactggtcagccgcgaccgagctggccattacgccgaccgcctcgatcacgcaggccgcgtgatcgagcgggccgaagtgttccagttgcataccgtcgagcgtgagcgcgttctgtatcgcagcaattcatccatttatgaccgcatcccgaccgccgatatggcgttccgggccaccatctaa

SEQ ID NO: 165318 - DNA, 630 bp, Enterobacter cloacae
atgcgtgatcctaacgaccccggcacaatggatatagggatgaccaccctaatcggttatgcccgtgtctcgaccgctgaccagtcgcttgatatgcagatcgaggccttgaaaaaggccggttgccatcaggtattcaccgacgtggccagcggggccaaggcggcccggccgggcctagaaaaagccctcgcatacctgcgcgaaggcgatacgcttgtagtgtggaagatcgaccggcttggccgctcccttggccatttggtgcaaaccgcgcttgagctgcgcgaacgcggcgtagggttccgttcgctgaccgatccgggaattgacacggagacccgaaccggcaaactgatgtttaacctgttcgccacgcttgccgagttcgagcgtgacctgatacgggaacgaaccaaggccgggttggccaccgcagcggcccgaggccgccacggcgggcgcaggccggtagtaacaccagccaagctggaaagagcgcgtaagctgatggccgaaaaggggctgaccgtccgcgaggcggccgccgctgtcaaagtcggcaagactgccttgtatgaggctttgaaggacgccggcgacggcgaccgcacggagggagacgaatag

SEQ ID NO: 165319 - DNA, 249 bp, Enterobacter cloacae
atgaactacaccgccctttactcgaccatctaccgcgtgcggaaccttacccgcaccgtcgccaaaatcctcgcttgggcgctcggtctacagctcgccatcctctacggactggcaaccgtcgccgacgcgccgctgatgcagcttgcaggccccggccttcgcttcgcggccgtgctggccgtggtgatcttcgccccgcgagtcttcgacgccgcgctacgccgtatcgccacccgccgggcctga

SEQ ID NO: 165320 - DNA, 471 bp, Enterobacter cloacae
atggcaagcacccctaacagcctgaacccgaccgggcctacgccgaagatgatgccggaaggctcgcgcaaggtctgcgtcctgaacggtagtcgccagctcgaccaggtggtgaaaggcgagtggatgactatcaaggttctgccggaaaacgggctgcccaagggcatctaccaactggccgaagccaccaagccggacaccggcaaggatggcaaggaatccgcctacaccgggcaggttctgcacgtcgatagcaaggcggtctaccagctttccggcaagggcattgtcgagcattcgcgctcggccttcgccgatctggaagccaagggcgaccagatcgttgccggtcgcacctacacggtcggctatgtgaacgggaagggcaccgcccggcccggccaagccgccagtctggcgcaacaacagcagcgcagcgcctcgaaaggcggcggcatttccctttaa

SEQ ID NO: 165321 - DNA, 1461 bp, Enterobacter cloacae
atgagcacacacgacaaagacaacgaccagaacaccgacctgccgcttgaggatgcggaagtacataacgaccgcgagcatgacgacgacgcggacatgcacgacgatcctgatatgcgagcggatggcaacggctcgcccgactatctggcgacaccaaaaagagggaagggggttcgccgcctgaacaacaaaccgttgttcgttgtcggtggcgtgatcctgctcgctgtggcgggcgtcagctacacgtttttccagcggcaggcggcgcaggttgccccaaaggccgaaggcgacgggccaccagtggcaacggtagcggctccccctgtgcggccggacggcaacgactacgtgcccccggcaggtcagccgcagatgcctacggacacggcgcagccggtcgaaaccggcggccagccgaccgaagcccagcagagggcggccccggccgcgccctctgaggccatgcaacgccggttgcggcagattcagcaggccgaagacaagcgactggccaagtgggacgaagccctgaacggtgacgcctcggtgcagggcttcacgaccaagggcggccagaacggcggcacccagcaggtggccatgcagcaggcgggcgggaaccgcgtcaacgcggacgagttgatgaaccgctacttggccgcgaacggtcaggccgcaggcatgggcggcatgggcggcggtatgccgggcatgggcggcggtggtatgggtggcaacagcatggcggccgagaaccagcaggatcgcaaacaagcgttcctcgcaggcacgccagaagctgaggtctatctggctcgccagcgcaagggggccgtcgctccgtcgcaggaaatcaaagccggttgggttatccccggcgtgatgatttccggtatcaactccgatttgccgggccaaatcatcgggcaggtgcgcgaagcggtgtacgacagcgcgaccagcacgcaatgcctgattccgccgggttcgcgtctggttggcacctacgacagcggcgtaacgctcggtcagcagcgggcgctcgcggtctggcggcgcatcatctacccggacggttcctctatctcgattgacaacatgccgggcgctgatgtgggcggctatgctgggttcaacgacaaggtgaacaaccactatctgcgcatcttcggcagcggcttgctgctttcggtcttctccgcaggcatccagctttcgcagccgcaggccagcaacggcgagaactacagcagctcgcaaatcatcgccgggtcgctgggtcagcagatggggcagattggtatgcagatggcccaacgcaacatgaacattcagccgacgctcgaaatccgtccgggctacgagttcaacatcatggtgacgaaggacattatcctgccgacgtgggaaggccacccgatggccggaagcaccggcaagggctgcaattga

SEQ ID NO: 165322 - DNA, 459 bp, Enterobacter cloacae
atggcacgatttcacctgctcgcgccgctcgcggcggcgcttctcctgagcgcctgcgcaacgtcgcggcctaccatgtcttacgtggaaccgaccgtgacggccagcgatgcgcagacgctcgcaggcgatacggtcgcctatctggccgatccgcttcctccggcgcggacgaccattgtgctcgatcctccggccgcgaaggatcacgacgcactgacggcggccatgctgcccgcgctccgtgcgcggggttatggcgtgacgttggttgatccgcagaccggcaaggccggtggtgcgggtgtgcctctgcgctacatcgcatcgccgctcgatagcggcgtgctgctgcgtctgcaatatcagggcatcgaggccagccggtactacccgcgcggctctaatggccagctcctgccgggtgccccgttcacggttcgagggggtgcgcaatga

SEQ ID NO: 165323 - DNA, 939 bp, Enterobacter cloacae
atgatgactggtgaatatatgaaaaagactcaatggatggcgggccttttcgttgccgcaattgctgcccccacgttcgcgcaagacgttccggcgctcgctgctggccaaggtgaagttctgccgccggtcaatctggtgtcgcccgatcaggtgcggctcgatggtaaggaggcctacggcatccgcttggccaatcaatggaagtcacaccctgaccgcccgcgtcgtggcgcagacggcagcgtgaaatacctttttggtgccaccctgccgacgttggtttgcacacccttgcaggtctgcaatatcgagctgcaaccgggcgaagttgtgaacgacgttcacgcgggcgacaacgcacgttggaaaatcaccccggccacgatgggcagcggggcgaacgctacgaccgtgattgtggtcaagcctaccgacgccggactggtcactaacctgagcgtggccactgaccgccgcctgtactcgatcaagctggccagcacgcaacgcgagtggattccggtgctgtcgttcgactaccccgacgacgtagaacgccagtgggccgcctaccgcgagcagcacgccaagcaggtctacaacaacaccatgccgaccgggcagaatctggccaacctcgatttcggtttccgcatcggtggcgatagcccgagctggaagccggttcgcgtctacacggatggcaccaagacctacattcagttcccgtcggccagcttcggcggcgaggccccggcactggtcgccaagggcaatgacggcggcctgttctcgaaggctaccgagaagctcgtcaactaccgtccgatcggcgatcgctacgtggtcgataaggtgcttgaccgggcgtctctgattgtcggcgtcggccgcaatcaaaccgaagtcaccattacgcgcacggggggcaaataa

SEQ ID NO: 165324 - DNA, 699 bp, Enterobacter cloacae
atgcaacccaatagcaagaaaaagggtcagcgggcaccgaaagccccgcccggcacgccttacctcgcagcccgccgcgagtggaacgagcgttatggcagtcatatcatcgacgcccgcaactggcggacggccgcgtttgtcgttggtgtcgcgctgattctctcggcggccgggaacgtcattcaggcctccaaagagaaaatcgcggtctactacgtcaacaccgacgccaacggcaaaagccgcgaaatctggcgggccgatcaggccacgccggggccgaagaccgaacaaatccgcgccgcgctgcaagattgggttcttggtgctcgcacggtgtacgcggacaaccgggcaaccaagcgcgtcgtcgatgcgacctatgcgatgacgctgcccgacagtgccgcgtatcagacgctggccacgtatcaccgggaacacaacccgtatcagcgggccgccaatgaaaccgtcgaggtggccatgcaaacgcctgtccagctctcgaaagacacttggcaagtcgagtggacggaaacggtgaaaaaccgcacttccggcaagctgatcggcacccaaagctatcagctcacggccaacgtcctgatcgctgcgccgaaggatgaagcccagcttatggccaacccggttggcctctacgtccgccaattctcttggcccgttcgcaactaa

SEQ ID NO: 165325 - DNA, 306 bp, Enterobacter cloacae
atgatcgccgaactcgccttgttcttcctgcccttgctggccatgtttttgataggccttggactatgggcgttagggcaatggttgcgccgtaaaggctacagtgaccagctcgacaaaatcgacgcgaaagtgtccaccgcccagcgaaaaacgcgctggctgttccgccctctgagcggcgcaatggtcagtgtagggcgcggactgagcagggttcccctgttcggcaaccgtcgcagccgcgacatgtgggacgacctcgaagaactgtcgaagcatcaacgcaacaatcgccgggactaa

SEQ ID NO: 165326 - DNA, 1719 bp, Enterobacter cloacae
atggcacggcgcgagcaacatcagttcttgttgtgggtcgtgctgctgctgctcgcgtcgttcgcctttgcgagtaatgcgtcagcggctgacctgcacgaccccagcggctcatttaccggccttctcgatctggtgaaaaacagtgcggcgcagtgggatggcaagctgcgtggctatgccaaaacgctgttctggctgctggcctccatccagttcgtatggacgttcatgcctttggtgttccgacaggccgatttcggcgagattgtcggcgagctgatccgtttcattttggtgattggcttcttctacgcgctgctgctgttctcggcagagtgggccgacaaggtggtggacagcttccgaacggcgggcgcgtcggcggccgggctgggtacgtcccaaatccggccgggcgacattttcggtacgtctatcgagctggccaacactatcggcgacgtggaaacgtggaacccgctaacggccactatggtcgcgctggccgggcttctggtgctgttgtgcttcgccttcattgcggcgttcatgggcctgaccatcatcgaatcctatgtggtcatcaatgcgtcggtgctgtttatgggcttcggtgcttcgcaatggacacgcgaatatgcgttggccatcgtgcgttacgccgtttccgttggtgccaagctgttcgtcctgaccttgatcgtcggcttgattgtggactcggccaagacgtggcaggcggcctacaaccacgacgacgcgagcatgtggacgatggtggggctggctctggtctgcgcctatctggccaagactatccccgagctggtcgcgggcatgattagcggcacctcgatgggcggcggttcggccatcggtggcatggcagcggcaggtgcagccggtgcagcggcagctattgcaaccatcgccacggccggggcggccgctccggcggcggccggtgctcttggcgcggcaggtagtggcggtgcagccggtgcaggtgcagcgggtgccggtggtcttggtggtggcggtctggctgctgcgatcaattccagctttgccggtggcagtgcgcccgcagcggccgctactggcggcggcggggcagcttccggcctcggtgcaagcacaggcggccaagcggcggccaagggcgcgtcgtcggcaggtgcccgagtgggcggcagcgccgcgccacaatcgccggggccagcgccgcagcagcctagcagcggtgtgcagcaggccgccaagcaggccgggaaggccgcgcagggtggtgacgacgacaagggccagcaaacggcggcaggggcgcaaacgcctccggccggtaatgcggacgcctccgcgtccagctcggcccctagcgcctctgcgcagtcgccagcggcccaagctggcgaagggcagggcgaagccaagagcggcgtttctggccatcaaatcgcgtcgggtattacccgtggtgcgggcatcctctccgcgattgccgttcccggtatggaaggcgcggcaggcctgtcgctgggtgccggtgcgccgcagccggtgcccggctccggtgctgatgctgatggctcgatggctcccagctcggcaccggccagcgcagaaccgcagaacgtcattcgcccggcagaaccgtcgccagcatcgccaagcgatgcaggcccggccaagcctgacaccaaagggggggagtaa

SEQ ID NO: 165327 - DNA, 204 bp, Enterobacter cloacae
atgctcaatctcaaactgtcggtgttcgtagcctccctgatcgccgccgcagtcgtcggcggcgtcggttcgagcatcgttctcaacgtgttttcccctgagccgaagccggtcgcttgcgaaccggcaccggcaccggctccgggcaaaaacaccctacgccatgttgatccggtcaacactggccgcgataaggggtactga

SEQ ID NO: 165328 - DNA, 789 bp, Enterobacter cloacae
atgaacagtatctttcgcgcaaagctgcgtaatggcgttctttcggcggccgtgacggccagcgttgcccttggtgccgggttctttgcagctccgacaccggcttacgctatctactgctccaactgctcgacgttctatcagcagatgttcgagtacgccgaagcggttaacaccaccctgaacaccgcgcagcagctacagacgcagattcagcagtatcaaaacatggtcacgcagggcctgagcctgcccaattccatgttcggcagcatcgcggccgacctgcaaagcgttgccagcatctacacgaagtcgcaggccttgggccgccaaatccagaacatggattcgcagttcaacatgcagtttcccggctttcagtcgtacctgaattcggccgcggcctcggccaaggctccggcatcgagcacgatgcccgaccgttacgaaaagtggtcggaacagggccgcgacaacgtgaaagcggcgatggaggcggcgaacctcaataccagcactttcgagtctgaggacgcccagctttcccgcatggtggcccgctcgcagtcggccgctggccggatgcaggcgattcaggcgggcaatgaaattgcctcgcagaacgtgcagcaactgcaaaagctgcgcgacctgatcgccacgcaaatcaacatgcagggcaactacatggcgcaagaacaggatcgcatccagctcgatgacgctctgcgtcagcagcgccgtagcggcaccatcacacaaaccggcagcaacaaggggtattaa

SEQ ID NO: 165329 - DNA, 1200 bp, Enterobacter cloacae
atgcacacggtaacgaccggcgcaacgccgttccgtctcaatctgcacgtcggcgacgttggccataccctgattttcggcccgaccggggccggtaaatcgaccttgctggccaccctgcaagcgcagttccggcgctatcggagccgtcgccgccgcgatggcagcacggcaccggccacggtgacggcgttcgacaaggggcgctcgctgtatgcgctgtgcaaggcgaccggcggcgttcactacgacattggcaacgatgaggccgacaccccggcgctgacgccgttggtggacattgatagcgagtcagaagccctgtgggctgaggagtggattgcgacctgctacgagttgcaggccaaaaagccgccgacgccgcagcaaaaagccgagattcaccgggctatgaacctgctgcgcgaggcaccccgcgagttccgttcgctgaccgattacgtcacgacggtacaggatgccgaagtgcgggacgcgctgacgcactacaccatttccgggtcgatgggccacctgctcgacggcaaggaagacgggttgaagatcagcaactacacggtgttcgagattgacgacctcatgaaaatgggcgacgcgaacgccattcccgtgctgctgtacctgttccgccggttcgagcgttcgctgaatggccagcccgccatgctgtcgctcgatgaggcttgggtgatgctgggtcatccggtgttccgcgagaagctgcgcgaatggctcaaagagctgcgtaagaaaaactgcctcgtcatcatggccacgcaaagcctgtcggatgcggtcaagtccgggctgctcgatgtgctgctggaacagtgcccgacgaagatcctcttgccgaacaaggaagccgacctgcatggcaccaaagagacacccggcccggccgacctctacgccatgtttggcctgaacagcaaggaaatcggcatcctgaaaaacggccagtacaagcggcagtattactacaagtcgccgctcggtcgccgtgtgttcgagctgggcttggggcctcttaccaaggcctttgtagcggtatccgacaaggaggacttggcggaggtgcggaacctgatcgccgatcatggcgatgactggccgcttttttggttgcaacacaaaggagttgattatgaacagtatctttcgcgcaaagctgcgtaa

SEQ ID NO: 165330 - DNA, 474 bp, Enterobacter cloacae; identical to SEQ ID NO: 123664

SEQ ID NO: 165331 - DNA, 345 bp, Enterobacter cloacae
atgtttggtctactctattccgaagatactgttgagtatcttgatggccgtccggacagcactgataaagattacgaagcaacaattgtctggtcgctgacgcctgaatggtggctccggactggctatcgtcatttagaaaatcatgacggtgacggacttaagcttcgagatgcgacctttgaagttcagtacaaagccaccgcaaaaagctcagtttatgcctcgtattcctggcgcaatggtgaagccggcaccaacagggttactggcgacaacgtttcttttggtggtagcgacccggcagatgactatttccacctcggattacgctatgaattttaa

SEQ ID NO: 165332 - DNA, 1659 bp, Enterobacter cloacae
atgctactcgaacgtgtggagattgtcgggtttcgcgggattaaccgcctgtcgctgcaactggaacagaacaacgtcctgataggcgaaaatgcctggggtaaatccagcctgctggatgccctgacgctgctgctttcgcccgaagagaacttgtaccacttcgttcatgatgacttctggtttccgccaggggatgtcaacggacgcgagaaacacctgcatatcattctgaccttccgcgaatccgagcccggtcgccatcgcgtgcgtcgttttcgccctatgtcgccctgctgggtgccctgtgaagatggtttccagcgtattttctatcgccttgagggcgaaatggcgcaaaacgacggggtgttaaccctgcgtgaatttcttgatgagaagggaaatccgatcccgctcgataatattgacgagcttgcccgccatcttatccgcctctcccccgtgctgcgcttacgagacgcgcgctttatgcggcggatccgtaacggcaccgtgccgaatatgcccgaggtggaggtgaccgcccgcgaactggatttcctcgcccgtgaactggtctcacggccgcagaacctcaccgacggccagatccgtcagggcctgtctgccatggtgcaactgctggagcactatttctccgagcagggaacggggcaggcgcgccaccgtctgatgcgtcgccgctcgcacgatgaacaacgaagctggcgctatctcgatattatcaaccgcatgatcgaccgccccggcgggcgcacgcatcgggtgatcctgctgggattattctccacgcttttacaggcgaaagggacggtgcgcctggatcgggacgcgcgcccgctgctgctggtggaagatccggaaacgcggctgcacccgattatgctttccgtggcgtggcatcttcttaatttgctgccgttgcagcgagtcaccaccacgaattccggagagctgctctctctgacgccggtggagtatgtctgccacctggtgcgtgaatcctcgcgggtcaccgcttaccggctcgggcccggcgggttaaatgccgaagatggccgacgaattgcgtttcatatccgttttaaccgtgcctcttccctgtttgcccgctgctggttgctggtggaaggggaaacggaaacctgggtgataaacgagctggctcgccagtgcggacaccactttgacgccgaagggatcaaagtgatcgaatttgctcagtctggcttaaaaccgctgatcaaatttgcgcgccggatggggatagagtggcacgtactggtggatggcgatgaggcgggtaaaaaatatgcggcgaccgtgcgcagcctgctcaataacgatcgtgaagaggagcgggaacatctgaccgcgctgcctgcgatggacatggagcactttatgtaccgccagggatttgacgacgtctttcaccgcgtggcgatgatcccggtagatgtgcccatgaatatgcgccgggtgattgccaaagctatccatcggtcgtcaaaaccggatttggccattgaagttgcgacggaagcgggcaggcgaggcgtggagtcggtgcccacgctgctgcgtaaaatgttctcccgcgtcctctggctggctcgcgggagggccgattaa

SEQ ID NO: 165333 - DNA, 957 bp, Enterobacter cloacae
atgtcttccatcgtcgatacaccttattcaacgctgccccagcctaaatcgggctggcaactgtttaaaagcctggcatcgggttccctcacgccggggctggcgtggcaaaatccggcctatcgacgtaagtttatgttgcgctcgctggcaacgccgttcaccactgcgcgcctgctcgaaaaccttgcaaaacagccccgtctgatgcagatcctgcgcgtgcagcccggcctgccgtgccgcctgcaccggccgtggctgaccgtcaatatgggccgtcagactacgctggacgcattgaacgatcactatgagatgatgagccgccatcttccggcgtcgctgctgaatggctacctctccagccagggcgttatgctggtgacgttaacgggcaaagaggagcagcagtttagcgttcgcctgagcgcggatgcgtttctggacaaagaaggggaagcgaccctcactttttgcgaccaccagaacacggtgctggccgagctgacctttacgctgtgcacataccagggcaagccaacgctcttcatcggcggaatgcagggggcgaaagcgcatgtcccgcacgagcacattcagctggcgaccaaagcctgtcacggactgttcccaaaacgtctgctggttgaagcggtcatgacgctggcaggcgccttcccggtcgagcagatcctcgcggtgagtaacgccacccacatctaccgcagctggcgctatcgcaagaaaaaagagggaaaattgctggctgactatgacaacttctggcgctcccttggcggacagcagcaggataacggcaactttgccctgccgctgaccatgccacgcaaaccgatggaagagattgcgagtaaaaaacggtccgaataccgccgccgctatgccctgcttgatagcctgatccaacaggtttcgcaggcgactgcccgttaa

SEQ ID NO: 165334 - DNA, 1116 bp, Enterobacter cloacae
atgaacctgaagggaaaacgcagaaagctgtttctgctgctggcggtagtggtgttagcgggcggattctggttatggaaggtactgaacgcgccggtaccacagtatcaaacgctgattgttcgtccgggcgagctgcaacaaaacgtgctggcgacggggaaactggatgccctgcgtaaggttgacgtgggcgcgcaggtcagcggtcagcttaaaaccctgtcagttgagattggcgataaggttaaaaaaggccagctgctgggcgtgatcgatcctgagcaggcgcaaaaccaaatccgcgaagtggaagcgacgctgatggagctgcgcgcgcagcgcgcgcaggctcaggcggagcgtaatctcgctcaggtcaccctgacgcgccagcgggcgctggcgaaaacgcaggctatctcgaaacaggatctggacacagccgccacggagctggcggtgaagcaggcgcagattggcaccatcgatgcgcaaatcaaacggaatcaggcctcgctggatacggcgaaaaccaacctcgattacacgcaaatcgttgcgccaatggccggggaagtgacgcagataaccaccctgcaaggccagacggtcatcgccgcgcagcaggcgccgaacatcctgaccctggcggatatgagcaccatgctggtgaaagcccaggtatccgaagcggacgtcattcaccttaagccggggcagaaagcctggtttacggtgctgggcgatccgcaaacccgctatgaaggggtgctgaaagatatcctgccgacgccggagaaggtcaacgacgccatcttctactatgcgcgttttgaggtgccaaacccgcagggcgtgctgcggctggagatgaccgcccaggtgcatatccagctgaccggcgtgaaaaacgtgctgacggttccgctctccgcgctgggtgaatccgccggggacaatcgctacaaggtgaaagtgctgcgcaacggcgaaacccgcgagcgggaagtggtgattggcgcgcgtaacgacaccgatgtggtggtggtaaaagggctggaagagggtgaggaagtggtcaccagcgaaaccctgcccggagccgcgcaatga

SEQ ID NO: 165335 - DNA, 1941 bp, Enterobacter cloacae
atgacggcgctgcttgagctgaatgacattcgtcgcagctatccgtccggcgacgggccggtggaggtgctgaagggcatctccctgcgcgttgaagccggtgaaatggtggcgattgtcggggcgtcgggctcgggtaaatcaacgctgatgaacattcttggctgtctggataagcccaccagcggcacctatcgcgtggccgggacggatgtttccaccctggacggcgacgcgctggcgaagctgcgtcgcgagcattttggctttatttttcagcgttaccatctgctttcacacctgagcgcggcgcagaacgtggaggtgccggcggtgtatgcgggcgtcgagcgcaaaaaacgccttgaacgcgcgaaggcgctgttaacgcgtcttgggctggcggagcgtgttgattatcagccttcgcagctttccggcggtcagcagcagcgcgtgagtattgcccgtgcgctgatgaacggcggacaggtgatccttgccgatgagccaaccggtgcgcttgacagccattccggtgaagaggtgatggcgatcctgcatcagctgcgcgatcaggggcatacggtgattatcgtcacccatgatccgcaggtcgcagcgcaggcggaacgcatcattgagatccacgacggcgagctggtcagcaacccgccgccacgtcagtccagagcggcggcaccgaaagaagccttacctgcgtccaccggctggggacagttctccagcggctttcgtgaagcgctgaccatggcctggctggcgatggcggccaacaaaatgcgcaccctgctgaccatgctcggcatcattatcggtattgcctcggtggtgtcgattgtggtggtgggcgatgcggcgaaacagctggtgctggcggatattcgcgccatcgggactaacaccatcgacgtttaccccggcaaagattttggcgacgacgagccgcagtatcagcaggcgctgaaatacgacgatctggcggctattcagaagcagccgtgggtgaactccgccacgcctgccgtgtcgcaaaaccttcgtctgcgctacggcaacatcgacgtggcggccagcgctaacggcgtcagcggagattacttcaacgtctacggcatgaccttcagcgaaggggcgaccttcaacgcggaacagctggcgggcagggcgcaggtggtggtgttagacgctaactcgcgcagacagcttttccccaataaaacccgtgtggtgggggaagtgatcctggtgggtaacatgcccgccacggtgattggtgtggcggaagagaaacagtccatgtttggcagcagcaagatcctgcgcgtctggctgccgtacagcaccatttccgggcgcattatgggacagtcctggctcaactccattaccgtgcgagtgaaagagggctacgacagcgcgctggcggaacagcagctcgagcggctgttaacgttgcgccacgggaaaaaggatttcttcacctggaacatggacggcctcttgaaaacggccgaaaagaccacacgtactcttcagctgttcctgacgctggtggcggtgatttcgctggtcgtcggcgggataggggtgatgaacattatgctggtgtcggtgaccgaacgtacgcgggagatcggcattcgcatggcggtcggggccagagccagcgatgtgctccagcaatttttgattgaagcggtgctggtgtgtctggtgggaggcgcaatggggattgcgctctcgatgatgatcgccttcgcgctccagctctttttaccggggtgggagattggcttctcaccgatggcgatcctcaccgcgtttttgtgctccacctttaccggcattttgtttggctggctgccggcacgaaacgcggcgcggctggatccggtggatgcgctggcgcgggaataa

SEQ ID NO: 165336 - DNA, 222 bp, Enterobacter cloacae; identical to SEQ ID NO: 116161

SEQ ID NO: 165337 - DNA, 321 bp, Enterobacter cloacae; identical to SEQ ID NO: 116160

SEQ ID NO: 165338 - DNA, 2280 bp, Enterobacter cloacae
atgctcaatcaagaactggaactcagtttaaacatggctttcgccagagcgcgtgagcaccgacatgagtttatgaccgtcgagcacctgctgctcgcactgcttagcaacccatctgcccgcgaagcgctggaagcctgctccgtggatctggtggcgctacgtcaggaactcgaagccttcatcgaacaaactacaccggtgctgccagccagtgaagaagagcgcgacacgcagccgacgctcagcttccagcgcgtgttgcagcgcgcggttttccacgtccagtcttccggacgtagcgaagtgactggcgccaatgtcctggtcgccatcttcagcgagcaggagtcccaggcggcctacctgctacgtaaacacgaagtcagccggctcgacgtggtcaacttcatctctcacggaacgcgaaaagacgagcctaaccaggcatcggatcccagcggacagatcaacagcaatgaagagcaagcaggcggggaggatcgtatggaaaacttcaccaccaaccttaaccagcttgctcgcgttggcggtatcgacccgctgattggtcgcgacaaagagctggagcgtgccatccaggtgctgtgccgccgccgtaagaacaacccgctgctggtgggggaatctggcgtgggtaaaaccgcgattgccgaagggctggcctggcgcattgtgcagggcgacgtgccggaagtgattgccgactgcaccatctactcgctggatattggctcgctgctggcgggcaccaaataccgcggtgatttcgaaaaacgtttcaaagcgctgttaaaacagctggagcaggacaccaacagcatcctgtttatcgatgagatccacaccatcatcggcgcaggtgcggcctccggtggccaggtggatgccgctaacctgatcaaaccgctgctctccagcggcaagatccgcgtgatgggctccacgacgtaccaggagttcagcaacatctttgagaaggatcgtgcgctggcgcgtcgtttccagaaaatcgacgtgaccgagccgtcggttgacgaaacggtgcagatcatcaatggcctgaaaaccaagtacgaagcacaccacgacgtgcgttacaccgcgaaagcggtccgtgcggcggtggaactggcggtgaaatacatcaacgatcgtcatctgccggataaagcgatcgacgtgattgatgaggcgggtgcgcgtgcacgcctgatgccagccagcaagcgtaagaaaactgtgaacgtggcggatatcgagtccgtggtggcccgcatcgcgcgtattcctgagaagagcgtttctcagagcgaccgtgatacgctgcgcaccctcggcaatcgcctgaaaatgctggtctttggtcaggataaagccattgaggccttaaccgaagcgatcaagatggcccgtgctggcctggggcatgaccacaagcctgtcggttccttcctgttcgccggcccgaccggggtgggtaaaaccgaggtgacggttcagctctccaaagcgctgggcattgagctgctgcgctttgatatgtccgagtatatggagcgtcataccgtcagccgtttgattggtgcgcctccgggatacgtgggctttgaccagggcggcctgcttacggacgcggttatcaagcacccgcacgcggtactgctgctcgatgaaatcgagaaagcgcacccggacgtattcaacatcctgttgcaggtgatggacaacgggacgctgaccgataacaacgggcgcaaggccgatttccgcaacgtggtgctggtgatgaccaccaacgccggggtgcgggaaaccgagcgtaaatccatcggcctgatccaccaggataacagcaccgatgcgatggaagagatcaagaagatcttcacgccggagttccgtaaccgtctggacaacattatctggttcgatcatctgtctaccgaggtgattcatcaggtggtggacaagttcatcgtcgagttgcaggttcagctggatcagaaaggcgtgtcgctggaagtgagccaggaggcccgcaactggctggctgagaaaggctacgaccgtgcgatgggcgcccgtccgatggcgcgcgtgattcaggacaacctgaagaaaccgctggcaaacgagctgctgtttggctcgctggtggacggcggccaggtaacggtggggctggatcaggcgaagaacgaactgacgtacgatttccagagtgcggcgaagcacaagccggaagcggctcactga

SEQ ID NO: 165339 - DNA, 219 bp, Enterobacter cloacae
atggccaaagaagacaatattgaaatgcagggtaccgtacttgatacgttgcctaataccatgtttcgcgtagaactggaaaacggtcacgtggtaactgcgcacatctccggtaaaatgcgcaaaaactatatccgcattttgacgggcgacaaagtgactgttgagctgaccccgtacgacctgagcaaaggccgcattgtcttccgtagtcgctaa

SEQ ID NO: 165340 - DNA, 705 bp, Enterobacter cloacae
atgcgcctggtgcagctttctcgccataatattgcgttcccttctccggagggggcgctgcgtgaacctaacggcttgctggctctgggcggcgatctcagcccggcacggctcttaatggcttaccagcgcggcatctttccgtggttttctcctggcgacccgatcttatggtggtctcccgacccgcgagccgtgctgtggcctgggcagtttcacctgagtcgcagcatgaagcgttttcatgcaaaatcaccctttcgcgtcacgcttaatcacgccttcggccaggttatcgaaggctgcgctgaagatcgtcacgaaggcacctggataacccgcgatatcattatcgcctatcaccagcttcatgagctgggttacgcgcattcgatcgaagtgtggagcggggacgacctcgtcgggggcatgtacggcgtggcgcagggtacgctgttctgcggcgagtcgatgttctcccgcgccacgaatgcgtcgaaaaccgcgctgctggtttttagccaggaatttgcccgacgtggaggacagttaatggattgtcaggtgctgaatgagcataccgcctcgctcggcgccgttgaaatctcccgccgacactatatcgaacacctggaacagtgccgaaaggagaccctaccacgcgatttttgggttcccagaacgctctttatacccaatgcctaa

SEQ ID NO: 165341 - DNA, 1722 bp, Enterobacter cloacae
atgcgcgccctgcttccgtatcttgcactgtataaacgccacaaatggatgctgacgctcgggatcgtgctggcgatcgttactctgctggccagcatcggtctgcttacgctttccggctggttcctctccgcgtctgcggccgcaggctttgccgggctgtacagctttaactacatgctgcctgccgccggggtgcgcggcacggcgattacgcgaactgccgggcgctactttgaacgtctggtcagccacgacgcgaccttccgcgtgctgcaacacctgcgtatttacaccttcagcaaactgctgcccctctcccctgccgggctggcacgttttcgacagggcgaattactcaaccgcgtggtcgcagatgtggatacgctggatcacctctatctgcgcgtcatttcacctatggtgggcgcgtttgtagtgattgtcgtggtcacgctggggttgagtttcctggatgttcccatcgcactgacgctcggcggcatcatgctgatgacgctgattattctgccgcccctgttttatcgtgcaggtaaaaccaccggggaaaacctgacgcgcctgcgtggagaatatcgccagcagctcaccgcctggttgcagggacaggccgagctcaccctttttggtgccagcaagcgctaccgcgcccgcatggaaaatacggagctgaactggcatgaagcccagcgtcgccagtctgaactgaccgcgttctcccaggcgctgatgatgttaattggtgggattgccgttatcgccatgctctggatggcctccggtggcgtgggcggtaacgcgcagcctggcccgctgattgcgctgtttgttttctgtgccctggcagcctttgaagccttagccccggtcacgggcgcctttcagcatctcggccaggtgattgcctctgcgctgcgcattacggatattgccgagcaggagccggaagtgaagttcagcgcgggtcaaaccgctgtgccagagcaggtcgcgctgacgctcagcaatgtcactttcgcctacgacaagcaggcgcaaaacgcgctggaagacatcaccctttctgttgatgccgggcagcgcattgcgatccttggccgtacgggatgtgggaaatcgacacttctgcaacttctcacgcgcgcgtgggacccacagcagggcgagattcggtttaacgacgttccgctgtctggttttagcgaagcggccttgcgtaaaacggtcagcgtcgtgccccagcgggtgcatctgttcagcgctacgctgcgcgataatcttcttctggcggcaccagacgcctccgacgatacgctgcgggcaatgctggagcaggttgggctgcacaagctgcttgaagacgacgggttgaacagctggctgggtgaagggggtcgacagctttccggcggcgaactgcgtcgtctggccattgcgcgtgcgctgctgcacgatgcgccgctgatgctgctggatgaaccgacagaaggactggatgccaccacagagagccaaatccttgatttactggcgaatgtgatgaaaggtaaaaccgtgctgatggtcacgcaccgtctgcgcgggctggtgaatttcgatcagataattgtgatggacaacggacacataattgagcaaggtagtcacgcagagctgctggcaaaacaaggtcgctactaccagtttaaacagcgcctgtag

SEQ ID NO: 165342 - DNA, 1767 bp, Enterobacter cloacae; identical to SEQ ID NO: 116155

SEQ ID NO: 165343 - DNA, 969 bp, Enterobacter cloacae
atgggcacgaccaaacacagtaagctgctaatccttggttctggacctgcgggatataccgcagcggtctatgctgcacgcgctaacctgcaaccggtactgatcaccgggatggaaaaaggcggtcagctgaccaccaccacggaagtggaaaactggcctggcgacccgaacgacctgaccgggccgctgctgatggagcgcatgcacgagcatgccgccaaattcgaaaccgaaatcctgttcgaccacatcaataaagtggatttgcagaaccgtccgttccgcctgacgggtgacagcggcgaatacacctgcgatgcgctgataatcgccaccggcgcctctgcccgctatctcggcctgccgtctgaagaagcgttcaaaggccgcggcgtgtcagcctgcgcgacctgcgacggtttcttctatcgcaaccagaaagttgcggttatcggcggcggcaacaccgctgtggaagaagcgctgtatctggcaaatattgcctcagaagtacacctgattcaccgtcgcgacaccttccgcgcggagaagatcctgattaaacgcctgatggacaaagtggcgagcggcaacattgtgctgcataccaaccgtacgctggaagaagtgactggcgatcagatgggcgtggcgggactgcgtatccgtgatacccagaacaccgataacgtcgaaacgctggaagtggcaggcctgtttgtggcaatcggtcacagcccgaacacggctatctttgaaggccagctggagctggagaacggctacatcaaagtgcagtctggcattcacggcaacgccacccagaccagcgttccgggtgtcttcgcagctggcgacgtgatggaccatatttatcgtcaggcgatcacctctgcgggcaccggttgtatggccgcgctggacgcagaacgctacctggacgggctggctgaacaaggcaaataa

SEQ ID NO: 165344 - DNA, 495 bp, Enterobacter cloacae; identical to SEQ ID NO: 116153

SEQ ID NO: 165345 - DNA, 3669 bp, Enterobacter cloacae
ttgagccaggaatacactgaagacaaagaagtcacattatctaagctaagcagcggacgtcgtctccttgaggcgttactgattgttattgccctttttgccgtctggctgatggctgccttactcagtttcaacccctcagaccccagctggtcgcaaaccgcatggcatgagcctatccataatttaggtggcgttcccggtgcctggcttgcggacacactcttcttcattttcggtgtgatggcctatacccttcccgtcatcattattggcggatgctggtttgcctggcgtcatcgacagaacgacgactacatcgattattttgccgtttcgctgcgcctgattggcgccctggcgctgatcctcacctcctgcggactggcggcgatcaacgccgatgacatctggtacttcgcctccggcggggtgattggcagcctgttgagctccgcgctgcaaccgatgcttcacagcagcggcggcacgctggcgctgctttgtatctgggcagcgggcctgacgctgtttaccggctggtcctgggtgagcattgccgaaaaaatcggcagctttattctgactctgctgacgtttgccagcaatcgcacccgtcgtgatgacacgtgggtcgatgaagacgaatatgaagatgagtacgaagaggaagacgaggcacccgtgcagcgtcgtgaatcccgccgtgcccgtattctgcgcggtgctctggcacgccgccagcgcgttgctgaaaaatttgctaacccgttaggccgtaaaacggatgccgcgcttttctccggcaaacgtatggatgaagaggagcagattgagtatcgcggcgcggccgtcgatcctgatgatgtgttgttctctggtcatcgagctacgccgggtgagtatgatgaatacgatccgctgttgcatggtcattccgtgactgaaccggtagccgctgctgctgccgcaacgacggctgcgcaggcccatgttgcgcctgttgaagccgtgatgccgtcctcgcctgttccggcaccggagtccgcgatccagcaaccgcaggtggactggcagactgcgccaggcgtccatacgcctgaaccgaccattgcgccggagcctgaaagctatattcctgtgcagcaggaacagtggcagcaaccgtatcagccgcctgagcctgccagcgagccgcaacagccgtatcaggcctatacgcccgaacctgctgagcctgaacagccatacgttgcgccggtgtctgaacccgaaatggtggaggaagcgaagccatcccgtccgccattgtactattttgaagaggtggaagagcgccgtgcccgagagcgcgagcagcttgccgcctggtatcagcccgtgcctgagccggtgcaggagcctgttgtaaaagcgccttctgcgagcgttgcacctgtagacccagcgccagccgttgcgtcgagagcggaaaccgtgaagcaggcaacggcagccgctgccgcgtccgctccgctattcagcccggcaaccgatggtgcgccacgtcctcaggtaaaagagggcattggtccacaattgccgcgtcctaatcgcgtgcgcgtaccgacgcgccgggagctggcctcctatggcattaaactgccttcccagcgtatggcggaagagaaagcccgtgagtccgactacgaagatgatgccgacgaactgcatcaggatgagctggcgcgtcagtttgccgcccagcagactcaacgctacgggaatgagtaccaacacgatgttcattctcagcaggatgaagatgatgctgccgaagcggaattagcgcgtcagtttgcggccacgcaacagcaacgttattccggtgagcagccttcaggggcaaacccgttctcgctctcggattttgaattttcaccgatgaaagatctggtggatgacggtccgagcgaaccgctgttcacgccgagcgtgatgccagaagcggaaccggtgcgtcaggcgccagcgccgcaggttaatgcgcagccacaacagccagcgccgcaggcttatgcgcagccgcatacaccgtcggcccaaccgccgcagccgcagttccagcagccagcaccacagccgcaggaaagcctgattcacccgctgctgatgcgtaacggagacagccgtccgctgcaacgaccaagtacgccgttgccgtcgctggatctgttaacgccgccgccagcggaagtcgaaccggtggatacttttgctcttgagcagatggcccgtctggtggaagcgcgtctggctgacttccgtattaaagcggacgtggtgaactactcacctggcccggtgatcacccgtttcgaactgaatctggcgccaggcgtaaaagcggcgcgtatttctaacctctcccgtgacctggcgcgttctctgtcgaccgtggcggtacgcgtggtggaagtgatcccaggtaagccttacgttggccttgagctgccaaacaagaaacgccagaccgtttatctgcgtgaagttctggataacaccaaattccgcgacaatccgtccccgctgaccgtggtgctgggtaaagatatcgctggcgatccggtggttgccgatctcgcgaagatgccgcacctgctggttgcgggtaccaccggctccggtaaatcggtcggggtgaacgctatgatcctcagtatgctctacaaagcgcagcctgaagatgtgcgtttcatcatgatcgacccgaaaatgcttgaactgtccgtctacgaaggcattccgcacctgttaacggaagtagtgaccgacatgaaggacgccgccaacgcattgcgctggagcgtcaatgaaatggagcgtcgctacaagctgatgtctgcgctgggcgtgcgtaacctggccggttataacgagaaaatcgctgaggcggcacgtatgggccgtccgattccggacccatactggaagccgggggacagcatggatacccagcatccggtgctggaaaaactgccttacatcgtggtgctggtggatgagttcgccgacctgatgatgaccgttggcaagaaggtggaagagctgattgcgcgtctggcgcagaaagcgcgtgcggcgggcatccacctggtgctggcgacgcagcgtccgtccgtagacgttatcaccggtcttattaaggcaaacatcccgacccgtatcgcgtttaccgtgtcgagtaaaattgactcgcgtactatccttgaccagggcggtgcagagtcgctgctgggtatgggtgatatgctctattccggcccgaactccacctcgccggtgcgcgtacacggtgcgtttgttcgcgaccaggaagtgcatgcggtggtgcaggactggaaagcgcgcggtcggccgcaatacgttgacggcatcacctccgacagtgaaagcgaaggtggcggcggtggttttgacggcggcgaagagctggatccgttatttgaccaggcggttaatttcgttaccgaaaaacgtaaggcgtccatctccggcgtccagcgccagttccgtattggctacaaccgcgcggcgcgtattatcgagcagatggaagcccagggtattgtgagcgaacaggggcataacggtaaccgtgaggtgctggcgccaccgccgtttgattaa

SEQ ID NO: 165346 - DNA, 615 bp, Enterobacter cloacae
atgaaaaaaatcgccatcgcctgtgcattactctccagttttgttgccagcagcgtctgggctgatgcagccagcgaccttaaaagccgactggataaagtgagcagcttccacgccagcttcacgcaaaaagtgactgacggcagtggcaacgcggtgcaggaaggtcagggggatttgtgggtgaaacgcccgaatctcttcaactggcacatgacccagccggatgaaagcgtgctggtgtccgacgggaaaaccttatggttctacaacccgtttgttgagcaggcgaccgccacctggctgaaagacgcgaccagcaatacgccgtttatgctcattgcccgtaaccagtccagcgactggcagcagtacaacattaaacaaaacggtgatgagttcgtcctgacgccaaaaggcagcaacggtaacctgaagcagttcaccattaacgtgagcagcaacggtaccattaatcagttcggtgcggttgagcaggacgatcagcgcagtagctatcagcttaagtctcagcaaaacggcgctgtagatgcttcgaaattcacctttaccccgccgcagggcgtaacggtggacgaccaacgtaataagtaa

SEQ ID NO: 165347 - DNA, 1344 bp, Enterobacter cloacae
gtgagcaacctgtcgctcgatttttcagataatgcgtttcaacctctggccgcccgtatgcggccagaaaatttagcgcagtacatcggccagcaacacctgctggctgcggggaaacccttgccgcgcgccatagaggccgggcatctgcactccatgatcctctgggggccacccggcaccggcaaaacaaccctcgctgaagtgatcgcccgctatgctaacgcggacgttgagcgtatctcggcggttacctccggcgtgaaggaaattcgtgaggcgatcgagcgcgcgcggcaaaaccgtaatgccgggcgccgcaccattctttttgttgatgaagtccaccgcttcaacaagagccaacaggatgcgtttctgccgcacattgaagacggcacgattttcttcatcggcgcaaccacggaaaacccgtcgtttgaactcaactccgcgctgctttcccgcgcccgcgtttacctgcttaaatccctgaccacagaggatatcgaaaaggttctgacccaggcgatggaggacaaagcgcggggttacggcggacaggatatcgttctgccggacgacacgcgtcgtgcgatcgctgaactggtcaacggcgatgcgcgtcgggcgctgaatacgttggaaatgatggccgatatggccgaagtggatgatgccggaaagcgggtgctaaagcaggagctgctgaccgaaatagccggtgagcgcagcgcacgcttcgataataaaggcgatcgtttttacgacctgatctctgcattacataagtccgtgcgcggcagcgccccggatgcggcgctctactggtacgcgcgtattattaccgccggtggcgatccgttatatgtcgcgcgtcgctgcctggccatcgcgtcagaagatgtcggtaatgccgatccacgcgccatgcaggtcgctatttccgcctgggactgctttacccgcgtcggacccgcggaaggtgagcgtgccattgcgcaggcaattgtctatctggcctgcgcgccgaaaagtaacgcggtgtataccgccttcaaagcggcgatgtcagatgcacgtgaacgtccggactacgatgtgccggttcatctgcgcaatgcgccaaccaaattgatgaaagagatgggttacgggcaggagtatcgctacgcccatgatgaacccaatgcctacgccgccggcgaggagtatttcccgcaggagatggcacaaacccgctattatcaccccacaaacagaggtcttgagggtaagattggcgaaaagctcgcctggcttgccggacaggatcaaaatagccctataaaacgctaccgttag

SEQ ID NO: 165348 - DNA, 1293 bp, Enterobacter cloacae
atgctcgatcccaatctgctgcgtaatgagccagacgcagtcgctgaaaaactggcacgccggggctttaagctggatgtagataagctgcgcgctcttgaagagcgtcgtaaagttttgcaggtacaaactgaaaatctgcaagcagagcgtaattctcgatcgaaatccattggccaggcgaaagcgcgcggggaagatattgagccattacgcctggaagtgaacaaactgggtgaagagctggatcaggcgaaagctgaactggatgttcttcaggctgaaattcgtgatattgctctggcgatcccgaacattcctgacgacagcgtgcctgtcggcaaagacgaaaacgacaacgttgaagtgaaacgctggggcacgcctcgcgagtttgactttgaggtgcgcgatcacgtcacgctgggcgaaatgcacgcgggcctggactttgcggctgcggttaagctgacgggttctcgctttgtggtcatgaaaggtcaaattgcccatctgcatcgcgctctggcgcagttcatgctggatctgcacaccgagcagcacggctacagcgaaacctacgttccgtatctggttaaccacgatacgctgtacggtaccggccagttaccgaaatttgccggcgatctgttccacacccgtccgctggacgaggaagcagacagcagcaactacgcgttgatcccaaccgcggaagtgccgctgaccaacctcgtgcgtgatgagatcatcgacgaagacgatctgccaatcaaactgaccgcgcactctccatgtttccgttctgaagccggttcttacggtcgcgatacgcgcggtctgatccgtatgcaccagttcgataaagttgagatggtgcagatcgttcgtccggaagagtctatggacgcgctggaagagatgaccggtcatgctgagaaagtgctggagctgctgggcctgccgtaccgccgtatggcgctgtgcaccggcgacatgggcttcggtgcctgcaaaaccttcgaccttgaagtctgggtgcctgcgcagaacacctaccgtgaaatctcctcctgctccaacgtctgggatttccaggcgcgtcgtatgcaggcgcgttgccgcagcaaatctgacaagaaaacccgtctggttcataccctgaacggttccggtctggcagtaggccgtacgctggttgctgtgctggaaaactaccagcaggctgacggacgcattgagatcccggaagtgctgcgcccttacatgaaaggccagcagttcatcggctaa

SEQ ID NO: 165349 - DNA, 2445 bp, Enterobacter cloacae
atgaaaatcaaagcgcctgaagcgttaatggctgccgaggtcactcgccgtgggttgatgaaaaccacggcaataggcggtctggcggttgccagcagcgcctttacgctcccttttacccgtctggcgtcggcggcggaggctctgtctcccgcttcagccccggaaaaagtggtgtggagtgcctgtaccgttaactgtggtagccgttgtcctctgcgtatgcatgttgtggacggtgaaatcaaatatgtcgaaacagaccataccggcgatgataactacgaagggttacatcaggttcgtgcctgtctgcgtggccgttcaatgcgccgtcgcgtttataacccggatcgtctgaaatacccaatgaagcgcgtcggtaagcgtggggaagggaagttcgagcgtattagctgggacgaagcctacgatattatcgcgactaacatgcagcgcctgatcaaagagtatggcaacgaatccatctacctcaactacggcaccgggacgctgggcggtaccatgacccgctcctggccgccgggtaaaacgctggtggcgcgcctgatgaactgctgcggcggctatctcaatcattacggcgactactcttccgcacagattgctgcgggtctgaactacacctacggcggctgggcagacggtaacagcccgtcggatatcgaaaacagtaaactggtggtgttgttcggtaacaacccaggcgaaacccggatgagcggcggtggggtaacctattatcttgagcaggcgcgcgccaaatccaacgcacgtatgatcatcgtcgatccgcgctataccgataccggcgcgggacgtgaagacgagtggatccctattcgccctggtaccgatgcggcgctggtcaatgcgctggcgtatgtgatgatcactgaaaacctcgtcgatcagccgttccttgataaatactgcgttggttatgacgagaagaccctgccagccagcgcaccggctaacgggcattacaaagcgtacattcttggtcagggcagcgacggggtagcgaaaacccctgagtgggcatccaccattaccggcattccagtcgaacgtattgttcagctggcccgtgaaattggttcagcaaaaccggcttatatcagccagggatggggaccacagcgtcacgcgaacggcgaaattgccacccgcgctatttctatgctctcgattctgactggcaacgttggtattcacggcggtaatagcggggcgcgtgaaggctcgtatgaagtcccgtttgaacgtatgccaacgctggataatccggttcagaccagcatctccatgtttatgtggacggacgcgatcgagcgcggcccggaaatgaccgcgctgcgtgacggtgttcggggcaaagataagctggacgtgccgatcaaaatgatctggaactacgccggtaactgcctgatcaaccagcactctgaaatcaaccgcacccatgaaattttgcaggacgacaagaagtgcgaaatgattgtggtgatcgactgccacatgacctcatcggcgaagtatgccgatattctgctcccagactgcaccgcgtctgagcagatggatttcgcgctggatgcctcctgcggcaacatgtcctatgtgatcttcactgaccaggccatcaaaccgcgcttcgagtgcaaaaccatctatgagatgacttctgagctggcgaaacgtcttggcgttgagcagcagttcactgaaggacgtactcaggaagggtggatgcgccatctgcacgagctctcacgcaaagccattcctgacctgccggacttcgataccttccgcaagcagggcatgtacaagcagcgcgatcccgaagggcatcacgtggcgtataaagccttccgcgacgatccgcaggccaatccgctgaccacgccgtcgggcaaaatcgagatctactccgaagagctggcaaaaattgccgcaacgtgggaattgccggaaggggacgtaatcgatccgctgccgatttatacgccaggcttcgaaaactacaacgatccgctgacggcgaaattcccgcttcagttgaccggtttccactacaaagcgcgtgttcactccacctacggcaacgttgacgtactgaaagcggcctgccgacaggagatgtggatcaacccgatggatgcgaaagcgcgcggcatcagtaatggcgatcgcgtacgtatcttcaacggacgtggcgaagtgcatatcgaagctaaagtgactccgcgtatgatgcctggcgttgtcgcgctgggggaaggggcctggtataacccggatgcgaaccgtatcgatcaggcgggctgcatcaacgttctcactacgcagcgtccgtcgccgctggcgaagggcaacccatcccacacaaacctcgttcaggttgaaaaggcgtaa

SEQ ID NO: 165350 - DNA, 618 bp, Enterobacter cloacae
atgacaacccagtatggattttttattgattccagccgctgcaccgggtgcaaaacctgcgagctggcctgtaaggattacaaagatctgaccccggacgtcagcttccggcgtatctatgaatacgcgggcggcgactggcaggaggacaacggcgtctggcatcagaatgtcttcgcctattacctgtcgattgcctgcaaccactgcgaagatccggcctgcaccaaggtctgcccgagcggggcaatgcacaagcgcgacgacggttttgtggtggtggacgaggatgtctgcatcggctgtcgctactgccacatggcctgcccgtacggcgcgccgcagtacaatgccgccaaaggccacatgaccaagtgcgacggctgccacacccgcgtggcggacggcaaaaagcccatctgcgtcgagtcctgcccgctgcgcgcgctggactttggcccgattgaagagctgcgcaaaaaacacggtcagcttgctgccgtcgcgccgctgccgtctgcgcacttcacgaagccgagtattgtgattaaacctaacgccaacagccgtccgacgggtgacaccaccggctacctggcaaacccgaaggaggtgtga

SEQ ID NO: 165351 - DNA, 864 bp, Enterobacter cloacae
atgggaagtggatggcatgaatggccgctgatgatcttcacggtctttgggcagtgcgtggcgggcgggtttatcgtccttgcgctggcgctgttaaaagggaacctcaatgctgaacagcagcagcgtttggtgttaagcatgtttggcctgtgggtgttgatgggcattgggtttatcgcctctacgctgcacctgggctcaccgatgcgcgcgttcaactccctgaaccgcgtaggtgcctcttcgctgagtaacgagattgccagcggcgcaatcttctttgccgttggcgggctggggtggttactggcagcggtgaaaaagctgccgtcagggttacgcgcgttgtggctcatcgtcaccatggtactgggcgttgtcttcgtctggatgatggtccgggtgtacaacaccatcgataccgttccgacctggtacagcgtctggacgccgatgagcttcttcctgaccatgtttattggcgggccgctgctgggttatctgctgctgcgtgtggctggcattaatggttgggcgatgcgcctactgcccgcggtctcgctgctggcgctggtaatcagtaccgttgtcgcgctcatgcagggagcggagctggcgaccattcacagctctatccagcaggcttcggcgctggtgccggattacggttcgctgatggcctggcgtgtggtgctgctgacggcggcgctggtgtgctggattgcccctcagcttaaaggttactcgcctgcgctgccgttactgtccctggcctttgtgctggtgctggcaggggagttaattggtcgcggcgtattttacggtctgcatatgacggtcggtatggctatcgccagctaa

SEQ ID NO: 165352 - DNA, 1149 bp, Enterobacter cloacae
atgaccacctatacccgcccggtgcttttgttgctctgtggcctgcttttgctgaccctggcgatcgcggtgttaaacacactcgtcccactatggctcgcccatgaaaacttaccgacctggcaggtgggtatggttagctcgtccttttttacgggcaatctgctgggcaccttattaacgggcagccttattaagcgctttggttttaaccgcagttattatctggcgtcgctgatctttgccgtcggctgcgccggtttaggcctcatggtcggcttctggagctggatggtctggcgctttattgcgggcgtcggctgcgccatgatctgggtggtggttgaaagtgcgctaatgtgcagcggaacgtcccgtaatcgcgggcgtctgctggcggcctatatgatggtttactacgtcggtaccgttctgggacagctgatggtcagcaaactgccaaccgacctgatgagcgtgctgccgtgggtgacgggcatggttctggcggcgatcctgccgctgctctttacccgcattgtgaatcaaaacagcgagcatcaggaagctacccacgtctggccgatgctgagactgcgccaggcgcgtctgggggttaacggctgcattatttccgggattgtgctgggctcgctctatggcctgatgccgctctatcttaaccatcagggcgtcagtgattccgggatcggtttctggatggcggtgatggtcagcgcggggattgtcggccagtggccgattggccgcctggcggaccgctttggtcgtctgctggtgctgcgcgttcaggtcttcgtggtcatcatgggctgtctcgccatgctcagcaacgccgcgatggcgcctgcgctgttcattctgggggctgcgggctttaccctctatccggtcgcgatggcctgggcctgtgagaaagttgagcatcaccagctggttgcaatgaaccaggctttgttgctgagttacaccatcggcagtttactggggccgacttttaccgctatgctcatgcaaaattattctgacaatctgctgtttattatgatcgccagcgtgtcgtttatttatctgttaatgctgctgcgcaaagtgggcgaacatccaacgccagtggcccatgcatga

SEQ ID NO: 165353 - DNA, 522 bp, Enterobacter cloacae
atgtctactcgtcgtttttccactatcgcacttgccgtagtgttggctttaacgtttgcaacggctccggccatggctaatcctggaaacgggaatggtggtggtcacggaaacggtggcggacaaggtaatagcggcaatcatggtaacgggaacgctggtaaccatggtaataaacacaataacggtcaggataaccctgggaaatcggataagagctttaaaaacagcaaagatgtcggtaatgatgtggatgctcgcgtgagcttcgatcatgcccgccatctggcactgaattacggcttaacgggctacgactctctgcctccgggaattgcgaaaaacctggcgcgcggtaagccactgcctccgggcattgcgaagaaaaccgtgccagccgatatgctgggtcagcttccttcctatccgggctatgaatggcgcgtggtaggtgacgacttggtcttaattgcgctaagtacggcgattgtgacttccgttattaacggcgtctttaaatag

SEQ ID NO: 165354 - DNA, 741 bp, Enterobacter cloacae
atgtcaattattggtcgcattcactcctttgaatcctgtggcaccgtcgatggcccggggatccgctttatcactttcttccagggctgcctgatgcgctgcctgtactgccataaccgtgacacctgggacacccatggcggtaaagaagtcaccgttgaagatctgatgaaagaggtggtgacctatcgccacttcatgaacgcgtccggcggtggcgtgacggcatccggcggtgaagccattcttcaggctgagtttgtgcgcgactggttccgcgcctgccacaaagaaggcattcatacctgcctcgacaccaacggctttgtgcgccgttacgatccggttattgatgaactgcttgaagtgaccgatctggtgatgctcgatctcaagcagatgaacgatgagatccaccagaatctggttggcgtttcaaaccaccgtacgctggaatttgccaaatacattgccaataaaggcgtcaagacctggatccgctacgtggtggtgccgggctggtcagatgatgatgactctgcacatcgtctgggtgaatttacccgggatatgggtaacgtggagaaaattgaactcctgccctatcacgaactgggtaaacataaatgggtggcgatgggtgaagagtacaaactcgatggcgtgaagccgccgaaaaaagagacgatggagcgcgtcaaaggtattcttgagcagtatggccacaaggtcatgtattaa

SEQ ID NO: 165355 - DNA, 2283 bp, Enterobacter cloacae
atgtccgagcttaatgaaaagttagccacagcctgggaaggttttacgaaaggtgactggcagaatgaagtcaacgtccgtgacttcattcagaaaaactataccccgtatgaaggtgacgaatccttcctggctggtgcgactgacgcaaccaccaagctgtgggacagcgtaatggaaggcgttaaactggaaaaccgcactcacgcgccagttgattttgacacctccgttgcttctaccatcacttctcacgatgctggctacatcaacaaagcccttgagaaaatcgttggtctgcaaactgaagcaccactgaaacgcgcaatcatcccgttcggtggtatcaaaatggttgaaggttcctgcaaagcgtataaccgcgagctggacccaatgctgaaaaaaatcttcaccgaataccgtaaaacccataaccagggcgtattcgatgtttacaccaaagacattctgaactgccgtaaatctggcgttctgaccggtctgccagatgcctatggccgtggccgtatcatcggtgactaccgtcgcgttgcgctgtacggtatcgacttcctgatgaaagacaaatacgcacagttcgtctctctccagtctgacctggaaaacggcgtaaacctggaagcgactatccgtctgcgtgaagagattgctgaacagcaccgtgcgctgggtcagatcaaagagatggcggctaaatacggctgcgatatctctggtcctgcaaccaacgctcaggaagctatccagtggacctacttcggctacctggccgctgttaagtctcagaacggtgcagcaatgtccttcggccgcgtatccaccttcctggatgcgtacatcgaacgtgacctgaaagcaggcaaaatcaccgaacaagacgctcaggaaatgattgaccacctggtcatgaaactgcgtatggttcgcttcctgcgtaccccagaatatgatgagctgttctctggtgacccaatctgggcaaccgaatctatcggcggtatgggcgtagacggccgtactctggtaaccaaaaacagcttccgcttcctgaacaccctgtacaccatgggtccttctccggagccgaacatcaccgttctgtggtctgaaaaactgcctctgaacttcaagaaattcgccgctaaagtgtccatcgacacctcttctctgcaatacgagaacgatgacctgatgcgtcctgacttcaacaacgatgactacgctatcgcttgctgcgtaagtccaatggttgttggtaagcaaatgcagttcttcggtgcccgtgcaaacctggcgaaaaccatgctttacgcaatcaacggcggcgttgatgaaaaactgaaaatgcaggttggtcctaagtctgaaccgatcaaaggcgacgtgctgaactatgacgaagtcatggagcgcatggaccacttcatggactggctggctaaacagtacgtgaccgcgctgaacgttatccactacatgcacgacaagtacagctacgaagcctctctgatggcgctgcacgaccgtgacgtcgttcgcaccatggcgtgtggtatcgcaggtctgtccgttgctgctgactccctgtctgcaatcaaatatgcgaaagttaaaccaattcgtgacgaagatggtctggctatcgacttcgaaatcgaaggcgaatatccgcagtttggtaacaacgacgctcgcgttgatgacatggcggttgacctggtagaacgtttcatgaagaaaattcagaaactcactacctatcgtaacgctatcccgactcagtctgttctgaccatcacctctaacgttgtgtatggtaagaaaaccggtaacaccccagacggtcgtcgtgctggcgcgccattcggcccaggtgctaacccaatgcacggtcgtgaccagaaaggtgcggttgcctctctgacctccgttgctaaactgccgtttgcttacgcgaaagatggtatctcttacaccttctctatcgtgccaaacgcgctgggtaaagacgacgaagtgcgtaaaactaacctggcgggtctgatggatggttacttccaccacgaagcgtccatcgaaggtggtcagcacctgaacgtgaacgtgatgaaccgtgaaatgctgctcgacgcgatggaacaccctgagaaatatcctcagctgaccatccgcgtatctggctacgcagtacgttttaactccctgacgaaagaacagcagcaggacgttattacccgtactttcactcagtccatgtaa

SEQ ID NO: 165356 - DNA, 858 bp, Enterobacter cloacae
gtgaaagctgacaacccttttgatctattactccccgctgcgatggcgaaagttgccgaagaagcgggtgtctacaaagccacgaaacatccgatgacgacgttctttctggccattacggctggggtgttcatctccatcgctttcgtcttctatatcacagccaccaccggcactgccgggatgcctttcggcatagcgaaattgattggtggtatttgcttctcactgggcctgattctctgcgtcatctgcggcgccgacctcttcacctcaacggtgctgattgtggtggcaaaagccagcggaagaattacctggggtcaactggggcgcaactggctcaacgtttacgttggcaacctgattggctgtctgctctttgttctgttgatgtggctctctggcgagtatatgaccgccaacggcggctgggggcttaacgtcctgcaaaccgccgaccacaaaatgcaccatacatttatcgaagctgttgctctcggcatcctcgcaaacctgatggtctgcctggcggtctggatgagctactctggtcgtagcctgatggataaagccatgattatggttctgccggttgcgatgtttgttgccagcggctttgagcacagtattgcgaatatgttcatgatcccgatggggattgttatccgcaactttgcaagcccggagttctggactgctgtaggttcaaccccggaaagtttttcacacctgactattatgaacttcattactgataacctgatccccgtcactatcgggaacattatcggtgggggtctgttagttgggttgacatactgggtcatttacctgcgtggcggcgatcatcattaa

SEQ ID NO: 165357 - DNA, 1761 bp, Enterobacter cloacae
atgactcaaacgtttatccccggcaaagacgccgctctggaagattccatcgctcgcttccagcagaaactgaccgacctgggctttaatatcgaagaagcctcctggctgaatccggtgcctcacgtctggtccgtgcatattcgcgacaaagactgtgcgctgtgctttaccaacggtaaaggcgcgaccaaaaaagcggcgctggcctctgcactgggtgagtattttgagcgtctgtccaccaactacttcttcgccgacttctggctgggcgaaactattgccaacggtccgttcgttcactatccgaacgaaaaatggttcccgctgaccgaaaacgatgaactgccggaaggcattctcgatgcccgcctgcgcgcgttctacgatccggaaaacgaactgaccggcagcatgttgatcgacctgcaatccggcaatgaggatcgtgggatctgcgccctgccgttcacccgtcagtctgacgagcagaccgtttatatcccgatgaacatcgtcggcaacctgtatgtgtctaacggcatgtctgccggtaatacccgcaacgaagcgcgcgtgcagggattgtctgaagttttcgagcgtcatatcaaaaaccgcattattgctgaatccatcagcctgccggagatcccggctgacgtgctggcgcgctacccgggcgtggtggaatccatcgccaaactggaagcagaaggtttcccaatctttgcttatgacggctctctgggcggcaaatatccggttatctgcgtggtactgttcaacccggcaaatggcacctgtttcgcctccttcggcgcgcacccggacttcggcgtggcgttggagcgtaccgtaaccgaactgctgcaaggtcgtagcctgaaagatctcgatgtctttactccgccaacctttgatgacgaagaagtcgccgagcacaccaacctcgaaactcacttcatcgactccagcggtttgatctcctgggatatgttcaaacaggacgcggactatccgttcgtggactggagctttgccggtacgacggaagaagaattcgccaccctgatggcgatcttcaacgcggaagatcaggaagtttacattgccgactatgaacacctcggtgtttacgcgtgccgtattattgtgccaggtatgtcggacatttatccggcagaagatctgtggctggcgaacaacagcatgggcgcacatctgcgtgaaaccctgctggccctgccaggcagcgagtgggataaagaagattatctgaacctgatcgcccagctggacgaagaaggacacgatgatttcacccgcgtgcgcgaactgctgggtctggcgaccggaaaagataacggctggtacaccctgcgcatcggcgagctgaaagcgatgctggcgctggcgggcggcgatctggatcaggctttggcctggaccgagtggacgatggagtttaaccagtccgtcttctccgccgagcgcactaactattaccgttgcctgcaaacgctgctcctgctttctcaggaagacgaccgcgagccattgcagtatctgaacgcctttgtacgtatgtacggtgcggatgccgttgaagctgccagcgcggcgttgagcggtgaagaaccattctacggcctgcaagcggttgacaacgatctgaaagccttcccggcgcatcagtcactgctgaatgcgtatgaaaaattgcagaaggcaaaagccgcttactggtcaaaataa

SEQ ID NO: 165358 - DNA, 693 bp, Enterobacter cloacae
atgaaagctttcgatctccagcggatggcgtttgataaagtccctcctgagtttttaggcgaagtagcgctgcgcagcctgtacacctttgtactcgttttcctgtttctgaaaatcaccggacgtcgcggcgtgcggcagatgtcgctgtttgaagtgctgatcatcctgacgctggggtcggcggcaggggacgttgccttttatgacgatgtgccgatggtgccggtctttatcgtcttcgtgacgcttgcactgctgtaccggctggtcatgtggctgatgtcgaaaagtgagaaactggaagatctgctcgaagggaagccggtggtgattgtcgaagatggtcaactggcctgggagaatgtgcaaagcgccaatatgacggagtttgagttctttatggaactccgtttgagcagcgttgagcaactggggcaggtgcgtctggcgattatggaaacgaatggtcaaatcagcgtctattactattccgacgatgaggtgaagcccggcctgtgcatcctgccggatatgctcatcgagcgatacaaaactgtacctgaagcgggcgagtacgcctgcataaaatgtagtcatgtcgtggttatgcaggcgggcgaacatcaattatgcccccgctgtacgaatccagaatggacgaaggttagccgggctaaacgtaacacctga

SEQ ID NO: 165359 - DNA, 1089 bp, Enterobacter cloacae; identical to SEQ ID NO: 115018

SEQ ID NO: 165360 - DNA, 1284 bp, Enterobacter cloacae
atggaatccctgacgttacaacctatcgcgcgggtagatggcaccattaatctgcctggttcaaaaagtgtctcgaaccgcgctctgctgctggcagctctggcaaacggcaccaccgtcctcactaatctgctggacagcgatgacgtgcgccatatgctcaatgcactgaaagcgttgggcgttcagtacgcgctgtctgacgatcgtacccgttgtgaagtcaccggtaacggcggcgcgttacattctgctgaagcgctggagcttttcctgggtaacgccggtaccgcgatgcgtcctctggccgctgcgctgtgtctggggagtaacgatattgtgctgaccggtgagccgcgaatgaaagagcgtccgatcggccatctggtggatgccctgcgtcagggcggcgcgcagattgattatcttgagcaggaaaattacccgcccctgcgtctgcgcgggggattcactggcggtaatgttgaggttgacggtagcgtttccagccagttcctgactgcgctgctgatgaccgcaccgctggcaccacaggacaccgtcatcagcattaaaggcgacctggtttctaagccgtacattgatatcaccctgcacctgatgaacacctttggtgttgaggtggaaaaccagtcttatcagcgtttcgtggtgcgcggagcgcagcagtatcagtccccgggccactacctggttgaaggcgatgcttcatccgcctcctatttccttgccgcaggcgcgattaaaggcggtacggttaaagtgacgggcattggccgcaacagcgtgcagggcgatatccgttttgctgacgtgctggaaaaaatgggcgcggtggtgacctggggcgatgacttcatctcctgcacccacggtgagctgaacgccatcgatatggatatgaaccatattccggatgcggcgatgaccattgccaccgctgcgctgtttgcgaaaggcaccaccacgctgcgaaacatttacaactggcgtgtgaaagagacggaccgcctgttcgcgatggcaaccgagctgcgtaaagtgggggccgaggtagaagagggcgaagactacattcgcgtcacgccgccggcaaaactgcaatttgcagaaattggcacctacaacgatcaccgcatggcgatgtgtttctcgctggtggcgttgtcagatacgccagtcactatccttgatccgaagtgtacggcaaaaacgttcccggactacttcgaacagctggcgcgcattagcaccctggcctga

SEQ ID NO: 165361 - DNA, 684 bp, Enterobacter cloacae
atgacggcaattgccccggtaatcaccattgatgggccaagtggcgcagggaaaggtactctgtgcaaagcgatggcggaagcattgcaatggcatcttttagattcgggagcaatctatcgcgtgctggcgctggctgcgctgcatcatcatgtggatgttgcgtctgaagaagctctggtaccgctggctgcgcatctggatgtgcgctttgtctcgaccgatggcaaccttgaagtgatccttgaaggggaagatgtcagcggtgaaatccgtacgcaagaagtggccaatgcggcctctcaggtggcggctttcccacgcgttcgtgaagcgctgttacgtcgccagcgcggtttccgtgaagcgccggggctgatcgccgacggccgcgacatgggaaccgtggtattccccgatgcgccagtgaaaattttccttgacgcctcttcagaagaacgtgctcaacgccgcatgcttcagttgcaggaaaaggggtttagtgttaactttgatcgccttttatccgagataaaagagcgcgatgaccgcgatcgtaaccgcgccgtcgcaccacttgttcccgcgcaagacgcattagtgctggattcaaccagtttaactattgagcaagtgattgaaaaagcgctacaatatgcgcgccaaaaactggcactcgcgtaa

SEQ ID NO: 165362 - DNA, 1674 bp, Enterobacter cloacae; identical to SEQ ID NO: 115015

SEQ ID NO: 165363 - DNA, 288 bp, Enterobacter cloacae
atgaccaagtcagaattgattgaaagacttgccagtcagcaaccgcatatccctgccaaggctgtggaagatgccgttaaagagatgctggagcatatggctaccactcttgcccagggcgagcgcattgaaatccgcggtttcggtagtttttctctgcactatcgtgcaccacgtaccgggcgtaacccgaagactggcgataaagtggagctggaaggaaagtatgttccgcactttaagccgggtaaagaactgcgtgatcgcgccaatatttacggtaactga

SEQ ID NO: 165364 - DNA, 129 bp, Enterobacter cloacae; identical to SEQ ID NO: 127220

SEQ ID NO: 165365 - DNA, 1806 bp, Enterobacter cloacae
atgtgctgggggatcctggccgctcaggaaagcgtgtggcagatgaactatttaacgcaagcaccgcagcaggccgaggtggtcattaccgcaacggacggcgcaacgatgcatcagggaaggattgtcagactcaatggaaaacgcgtgtgggctgccatgggcgtggcgctgtatggcaactatctgccgcaaaacgtctgcgtgggtcaacgctgggcaatgaccctgcggctcagggcggtacacggagaactcaacgatggcggctatgattcacagaaaaatgcctttgcccgacaccagacgctgagtggacggtttacccatgcggcgctcgttgacgaaggctgtagtctgcgtgcgcaatacctgacatcactacagaatactctttcagcatatcagtggggacccgtgatcctggggctggggatgggggagcggctgtcggtctcgcgggagataaaaaacctgatgcgtgataccggaacgatgcatctgatggcaatctcgggattacatattgcgctggccgcttctgtcatctggtttctggcgcggggcattcagttcttcctgccgggccgctggattatctgccaaatccccttgctggcagggctgatttttgccgcgttttacgcatggctaacgggcttgcagccgcccgcgctgcgcacggttatcgcgcttgtggtactggctgcattaaaaatgagcggtcgccagtggtcgccctggcaggtatggcttacctgcgtggcagcgatcctgattttcgacccactggcgatactgtcacaaagcctggcgttgtcagcgtttgcggtcgccgcgcttattttttggtatcagtggttgcctctcccgcactggcaacgtggccggtgcctgcggccgctggttacgctagtgtatttgcaggtcggaatgttgctgcttctgttgccgcttcaggtcctgattttccatggtttcagcctctcctcgctggtggcgaacctgtttgccgttcccctggtcacgtttatctcagttccgctgatcctgctcggcatgtttctgcatctgtttccggtcgctgtgctggaaagtatcgtctggctggctactgataaatctctggcagggcttttctggctattgatgcgtttaccgaatggctggcaggacgttgatgaacgctggcaatacctgacgttactgccgtggctgctggtcattggctggcgattcagggccttcagcgcagcacccgcagtctgtctggcaggcagcgtggtgctggcctttcccctctggcacagggttaaaacagacagctggtccctgcatatgctggatgtagggcaggggctggcgatggtcattgagcgtcacggcaaggccattctgtatgacaccgggctggcatggcccggtggggacagtgcgcagcagctgattatcccctggctacgctggcatcatctgaaaccggaaggggcgatcctgagccatgaacatctcgaccacgcggggggactggcatcgctaaaagctgcctggcccgcaatgtggatcaggagccccttatcctggtccggacatcttccgtgctttcgaggacagcgatggcagtggcagggtttaacgttctccgtacactggccacccgaaaacacctcggcgaaaggtaacaaccgctcctgtgtggtaaaaatcgatgacggcgaacagagcgttttactgaccggagacattgaagcgcaggcagaactggcaatgctaagccatcgcggcgtcagcttgcgtctacactga

SEQ ID NO: 165366 - DNA, 1749 bp, Enterobacter cloacae
atgcataacgacaaagatctctccacgtggcaaacgttccgccggctctggccgatgattgctcctttcaaagcaggcttgatcgtggcgggcgtagcgttaatcctcaacgcagccagcgatacgtttatgttatcgcttctcaaaccgttactggatgacggtttcggtaaaacggatcgttcagtgctgctatggatgccgctggtggttattgggctgatgatcttacgcggaatctccagctatgtatccagctactgcatctcctgggtatccggtaaagtggtgatgaccatgcgccgccggctgttcagccatatgatggggatgccggtctcattctttgacaaacagtcaaccggcaccctgctgtcgcgtattacctacgattcagagcaggtggcgtcgtcctcttccagcgcactgattaccgttgtgcgtgaaggcgcatccatcatcggcctgttcgcgatgatgttctattacagctggcaactgtcgctgatccttattgtgctggcgccgattgtctccatcgcgatccgcgtggtatcaaagcgttttcgcaacatcagtaaaaatatgcagaatacgatggggcaggtgactaccagcgccgagcagatgctgaaaggccataaggaagtgttgattttcggcggtcaggaagtcgaaaccaaacgctttgacaaggtcagcaacagaatgcgcctgcaaggaatgaaaatggtatcggcctcgtcgatttccgatccgatcattcagctgattgcctctctggccctggccttcgtcttgtatgccgccagtttcccgagcgtcatggaaaccctgactgcgggtaccattacggtggtgttctcatccatgattgcgctgatgcgtccgctgaaatcgctgactaacgtcaacgcccagttccagcgcgggatggcagcctgtcagacgctgttcagcatcctcgattccgaacaggaaaaagatgaaggtacacgcgtgatcgagcgcgctaaaggcgacctggaattccgtaacgtcacctttacctatccaggccgtgaagtgccggcgctgcgtgatatcagcctgtccatcccggcgggtaaaaccgttgcgctggtcggtcgttccggttcgggcaagtcgaccattgccagcctgattacccgtttctacgatatcgaccagggcgagatcctgcttgatggtcacgacctgcgggaatataccctccagtcgctgcgtaaccaggtcgcgctggtctcgcagaacgtgcatctgttcaacgatacggtggcgaacaacattgcgtatgcccgtaccgaagagtacagccgtgaagagattgagaatgcggcgcgtatggcctatgcgatggacttcattaacaaaatggataacggtctggatacgatcattggcgaaaacggggtgctgctttccggtggtcagcgtcagcgtatcgcgattgcccgtgcgctgctgcgcaacagcccgattctgatcctcgatgaagcaacgtccgcactggatacggaatctgaacgcgctatccagtctgctctggatgaattacagaaaaaccgtacctcgctggttattgcgcaccgtctgtcgaccatcgaacaggctgacgaaatcgtggtggtggaagatggtgtgatcgttgaacgcggcagccatgcggacctgctggaacagcgtggtgtttacgcgcagcttcataaaatgcagttcggtcaatga

SEQ ID NO: 165367 - DNA, 978 bp, Enterobacter cloacae
atgattgcacgcatctggtcgggtgaatcccctctgtgggtgctgcttctcccgctctcctggctgtatggcctggtgagcggtgctattcgtctgctttaccgcctcgggatcaagcgcgcctggcgcgcaccggtaccggtggtggtggtcggcaacctgacggcgggtggaaacggcaaaaccccggtggtgatctggctggtagaacagctccagaggcgcggtatccgcccgggagttgtctcacgcggttacggtggtaaagcggcgcagtatccactggtgctgagcccagctacgacaaccgctgaagccggtgatgagccggtactgatttaccagcgtaccggcgcgccggttgcggtatcgccggtgcgcagtgatgccgtgaaggcactgcttgcggagcatgacgtacaaatcgttattaccgatgatggtttgcagcattacgcgctggcgcgtgacaaagagatcgtggtcattgacggcgtgcggcgttttggcaacggctggtggctgccagccggtccaatgcgtgagcgtgcgtcgcgcctgaagagcgtcgatgctgtgattgtaaacggtggtgaagccagagcgggcgaaatcccgatgcatcttcgtcccggacaggccgtgaatatgttgaccggcgtgcgtaaagacgtcgcgcaactggaacatctggttgcgatggccggtataggtcatccgccgcgtttcttcgcaacgctggagcagtgcggcgcaaagcttgataaacgggtgccgctcgccgatcaccaggcgttagttgccgaagaggttgaaaggctggcagcgccgggacagacgctgatcatgacggaaaaagacgcggtaaaatgccgggcctttgcgaaagaaaactggtggtatctgccggttgacgctgaactcagcggcgaacagccggaacatttgctcaaggaactgctcgcgttagtgcagtaa

SEQ ID NO: 165368 - DNA, 1230 bp, Enterobacter cloacae; identical to SEQ ID NO: 127221

SEQ ID NO: 165369 - DNA, 183 bp, Enterobacter cloacae; identical to SEQ ID NO: 115009

SEQ ID NO: 165370 - DNA, 747 bp, Enterobacter cloacae
atgagttttgttgtcattatccctgcgcgttatgcttcaacgcgcctgccaggtaaaccgctggtggatatcaatggcaaaccgatgattgtgcatgtccttgaacgggcacgcgaatcgggcgccggacgcgtcatcgtcgccaccgatcacccggatgttgcgcgcgcggttgaggccgcgggtggggaagtgtgcatgacccgtgccgatcatcagtcaggcaccgagcgcctggcggaagtcgtcgaaaaatgcggtttcagcgacgagacggtgattgtgaacgtgcagggcgatgagccgatgatcccggcggcgattatccgtcaggtggccgacaacctggcacagcgtcaggtcgggatggcgaccctcgcggtgccgattcaccacgctgaagaggcgttcaatccgaatgcggtgaaagtggtcatggacgcaaagggctacgcgctctatttctcccgcgccaccattccgtgggatcgcgatcgtttcgcgcaatcgaaagagacaatcggcgaaaccttcctgcgccacatcggtatttacggctaccgcgccggctttattcgtcgctacgtcgcctgggcaccaagcccgctggagcatattgaaatgctcgaacagcttcgcgtgctgtggtacggcgagaaaattcacgttgcggttgcccaggaaatcccaggcaccggcgtggatacccctgaagatctcgagcgcgtacgcgtcgaaatgcgttaa

SEQ ID NO: 165371 - DNA, 894 bp, Enterobacter cloacae
atggaacagctgcgtgctgaactcagccatctccttggcgaaaagctaagccgggtggaatgcgtgaatgaaaaggccgataccgcactctggtcgttgtacgacagtcagggaaaccccatgccgctgatggccagaagttttacctcgccgggcgtcgccagacagctggcctggaaaatgtcgatgctggcgcgggaagggactgtccgcatgccgacggtctacggcgtgatgacccatgaggagcatcccggcccggatgttctgcttatcgagcgtttacgcggggtttctgttgaagccccgacgcgtacaccggagcgctgggaacagctgaaagatcagattgtcgaggctctgcttgcctggcatcggcaggacagccggggccttgttggcgcggtggacagcacgcaggaaaacctgtggccgctgtggtatcgccagcgtgttgaagtgctgtggggcacgctgaaccagttcaacaacaccggtttaacgatgcaggacaaacgtattttattccgcacccgggaatgtctgccgacgctgtttgagggttttaacgacaactgcgtgctggttcacggcaatttcacgctgcgcagtatgcttaaagactcgcgcagcgaccagctgctggcgatggtcgggccggggatcatgctctgggcgccgcgcgagtacgaactgttcaggctgagcgagggcggggcggcggaagatttgctctggcactatcttcagcgcgcccccgttgcggaggcctttctctggcgacgctggctctatcttctctgggatgaggtggcgcagctggtcaacaccgggcgctttaatcgcgccagtttcgatctggccgcaaaatcactcctgccctggcttgcctga

SEQ ID NO: 165372 - DNA, 780 bp, Enterobacter cloacae
atgctttttaccctaaaaaaatatatcggaggcatgatgcttccccttcccctgctgttgcttctcatcgcgctggggctggcattaatatggtttagccgctttcagaaaagcggtaaatccctcgttaccgtgggctggctggcgctgctgttactcagcctgcaaccggtcgctgacggtttattacgtccgattgaaaacacctacccgacatggcagggaaatcagaaggtgggctatatcgtggtgctgggcggcggatatacctgggatccgaactgggcgcccagctcgaacctgatcaacaacagcctgccgcgcctgaacgaggggatccgcctgtggctggccaatcctggatcgaagatgatcttcacgggcgctgcggcaaaaaccaacccggtcagtaccgctgaagcaggagcaagagtggctgaatcgcttggcgtaccacgttccgccatcatcacgctggatagcccaaaagataccgaagaagaggcggcggcggtgaaacaggccatcggtgatgtaccgttcctgctggtgacctctgcttcacacctgccgcgcgcaatgattttctttgagaagcagggcctgcatccgcttcctgctccggcaaaccagatggctattgacgccccgctcaatccgtgggaacggataatcccgtccccggtatggctgatgcacagcgatcgcgtcggctacgagacgcttggccgcctctggcagtggctcaaaggttcgtcaggcaagccagggcaggagtga

SEQ ID NO: 165373 - DNA, 780 bp, Enterobacter cloacae
atgcgggatcgcaattttgatgacatcgcggaaaagttttcgcgcaacatttatggcaccaccaaaggtcagctgcgtcagacgatcctctggcaggatctggacaagctgctggctgaattcggtgaccgaccgttgcgcgtgctggatgccggcggtggggaaggtcagactgcaattctgatggcgcagcggggacatcacgtcacgctttgcgatctttctgccgagatggttgcgcgcgcagggcgagcggcagaagagaaaggtgtgagcgacaacatgcattttatacattgcgccgctcaggacattccgcagcatttggaaacgcaggttgatctgatattgtttcatgctgtgctcgaatggatcgccgaaccacaagcgatgttaaaaacgctgtggtcgatgttgcgcccgggcggtgcgttatcgctgatgttttacaatgccaacggcctgctaatgcgaaacgtgctggtcggcaattttggctatgtacagcagggcatgtataaaaagaaacgacgcacgctttcaccggatttcccccgtgaaccgcagcaggtctatggctggctggaggagatcggttgggaaattaccggcaaaaccggcgtgagggtgtttcatgattatctgcgtgataaacaaaaacaggatgactgtttagacgccttaacagaaatagagacgcggtactgccgccaggagccttatctgagccttggccgctatatacacgtcaccgcgcgcaagccgcagatgcaaggataa

SEQ ID NO: 165374 - DNA, 1323 bp, Enterobacter cloacae
atgagtgaattttcccagacagtccccgaactggttgcctgggccaggaaaaacgatttctccatctcgctgccggtagacagactctcattcctgctggcggttgcgacgctaaacggcgaacgcctggatggcgaaatgagtgaaggcgaactggtggatgcgttccgccacgtcagtgatgcgtttgagcaaaccagcgaaaccattagcgtgcgtgccaacaacgcaatcaatgatatggtgcgtcaacgtctgctgaaccgctttaccagcgagcaggcggaaggaaacgccatctatcgtcttacgccactgggcattggcattaccgactattacatccgccagcgcgaattttccacgctgcgtctctccatgcagctatctattgttgcaggcgagctgaagcgtgccgccgacgcggctgatgaaaacggtgatgaattccactggcatcgcaacgtttacgcgccgctgaaatattcggttgccgagattttcgacagtatcgatctgactcaacgtctgatggacgaacagcagcagcaggtgaaagacgatatcgctcaactgcttaataaagactggcgtgcggccatctccagctgtgaacttttgctgtcagaaacgtcgggtacgctgcgtgagttgcaggatacgctggaggcggcgggagataagctacaggccaatctgctacgcattcaggacgcgacgatggcgcacgacgatctgcattttatcgaccgtctggtgtttgatttgcagagcaagcttgaccgcattatcagctggggccagcagtcgatcgacctgtggatcggttacgaccgccacgtgcataaatttatccgtaccgccatcgatatggataagaatcgcgtctttgctcaacgtctgcgccagtcggtacagacctacttcgatgcgccgtgggcgctgacctacgccaacgccgatcgtctgctggatatgcgcgacgaagagatggcgctgcgtgatgaagaggtcaccggtgaactgccaccggatctggaatacgaagaatttaacgaaattcgcgagcagcttgcggcgatgatcgaagaacagctcgctgtctacaaaaccagacaagcaccgctggatcttggcctcgtggtacgcgactatctggcgcagtatccgcgcgcgcgccacttcgatgttgcccgcattgttgtagaccaggcggtgcgcctgggcatcgcacaagccgatttcaccggactgccgccgaagtggcagccgattaacgattacggagccaaggtacaggcgcatgtcattgacaaatattga

SEQ ID NO: 165375 - DNA, 705 bp, Enterobacter cloacae
atgtcattgacaaatattgaacacgtgatgccagttaagctggcacaggcgctggcgaatccgttgtttccggcgctggatagccagctgcgtgccggtcgtcacattggccttgacgagctggataatcacgcctttttgatggactttcaggagtacctggaagagttttacgctcgctataacgttgagctgatccgcgcgccggaagggtttttctacctgcgtccgcgctctaccacgcttattccgcgctcggtgctttccgaactggatatgatggtcggcaaaattctctgctacctctatctcagcccggaacgtctggcgaatgaagggatcttcacccagcaggagctttacgatgagctgctgtcgctggcggatgaaagcaagctgctcaagctggtcaataaccgctcaacggggtccgatctggaccgtcagaaattacaggaaaaagttcgctcttccctgaaccgtctgcgccgtctgggaatggtctggttcatgggtcacgacagcagcaagttccgtattaccgaatcggtcttccgttttggcgccgacgtgcgtgcgggtgacgatgcgcgtgaagcgcagctgcgcatgatccgcgacggtgaagcgatgccggtggaaaaccatttgcagctcaatgacgagcacgaagagaatcagccggatagcggggaggaagagtaa

SEQ ID NO: 165376 - DNA, 4449 bp, Enterobacter cloacae
atgattgaacgcggtaaatttcgctcactaacgctgattaactggaacggcttctttgcccgaaccttcgatctggatgagctggtgacaacgctctccggcggtaacggggcgggtaaatccaccaccatggcggccttcgtgacggcgcttatccctgacctgaccctgctgcacttccgtaacaccactgaagcgggcgccacgagcggctctcgtgataaaggtctgcacggtaagctgaaagcgggcgtctgttattcagtgctggacgtgatcaactcccgtcatcagcgcgtggttgtaggcgtgcgcctgcaacaggttgctggccgcgaccgtaaagtagatatcaaaccgtttgcgatccagggactaccaacctccgtacagccgaccgcgctgctgacggaaaccctgaatgaacgtcaggcgcgcgtcctcacgctccaggagctgaaagacaagctggaagctatcgaaggcgtgcagtttaagcagtttaactccattaccgactaccactctctgatgttcgatctcggtgtggtagcccgtcgtctgcgcagcgcgtcagatcgtagtaaatactaccgtctgattgaagcctccctgtacggcggtatctccagcgccattactcgctccctgcgcgactacctgctgccggaaaacagcggcgtgcgtaaggccttccaggatatggaagccgcgctgcgtgaaaaccgcatgacgctggaagcgattcgcgtcacacagtctgaccgcgacctgtttaagcacctgatcagcgaagccaccaactacgtggcggcggactatatgcgccacgccaacgagcgccgtattcatctcgatcaggcgctggaataccgccgcgagctgtttacctcccgcaaacagctggtggctgagcagtataagcatgtcgaaatggcgcgcgaactgggcgagcacaacggtgcggaaggggatctggaagccgattaccaggcggccagcgatcacctgaacctggtgcagaccgcgctgcgtcagcaggaaaaaatcgagcgctatgaagccgatctggatgagctgcaaattcgtcttgaagagcaaaatgaagtggtggccgaagccgccgatttgcaggaagagaacgaagcccgcgcggaagccgccgagctggaagtggatgaactgaaaagccagcttgctgattaccagcaggcgctggatgtgcagcagacgcgtgcgattcagtacaaccaggcattgcaggcgttgcagcgtgccaaagagctgtgccatctgccggacctgaccccggaaagcgctgacgaatggctggataccttccaggccaaagagcaggaagccactgagaaactgctttctctcgatcagaaaatgagcgtggcgcaaacggcgcatagccagtttgagcaggcgtaccagctggtggtggcgatcaacggtccgctggcgcgtaacgaagcgtgggacgttgcccgtgagctgctgcgcgacggcgtcaatcaacgccatctggccgaacaggtgcagccgctgcgcatgcgcctgaacgagctggaacagcgtctgcgtgaacagcaggaagccgagcgtctgctggcggaattctgcaagcgtcagggtaaaaattacgatttcgacgagcttgaggccctgcaccaggagctggaagcgcgtattgcggccctgtcggataccgtatcgaacgccagcgaacagcgcatgacgctgcgtcaggagctggaacagcttcagtcgcgttcgaagacgctcttacagcgtgcgccgatctggctggctgcacaaagcagcctgaaccagctcagcgaacagtgtggccaggagtttgcctccagccaggacgtcaccgaatacatgcaacagctgctggagcgcgagcgtgaagcgattgttgagcgtgacgaagtgggtgcgcgcaagcgtgacgtcgatgaagagatcgagcgtttaagccagcctggcggctcagaagatccgcgcctgaatgccttagccgagcgtttcggcggcgtgctgctgtctgaaatttacgacgatgtcggcctggacgatgcgccgtacttctccgcgctgtacggtccatcccgtaacgcgattgtggtgccggatctgtcgctgatttcggaccagcttgcagggctggaagactgcccggaagatctctacctcatcgaaggggatccgcagtcgtttgatgacagcgtattcagcgtcgacgagctggaaaaagcggtggtggtgaaaatcgccgatcgccagtggcgctattcgcgcttcccggaactgccgctgtttggccgcgccgcgcgtgaaaaccgtattgaaagcctgcacgctgagcgcgaaacgctttctgagcgttttgcaaccctgtcgtttgatgttcaaaaaacgcagcgtctgcatcaggcgttcagccgctttatcggcagccacctgggcgttgcctttgagcccgatccggaagctgaaattcgcaagctcaacacccgtcgtggagaactggagcgtgcgcttgccagccatgaaaatgacaaccagcaaagccgcgtgcagttcgagcaggcgaaagagggcgttgcggcccttaaccgcatcctgccgcgcctgaacctgctggcggacgatacgctcgccgaccgcgtggacgaaattcaggaacgtctggacgaagcgcaggaagcggcgcgctttgtgcagcagcacggcaatcagctggcaaaactggagccgatggtttccgttctccagagcgacccggaacagtttgagcagttaaaagaggattatgcctggtcacagcaggtgcagcgcgaagcgcgtcagcaggcgtttgccctgacggaagtggtgcaacgtcgcgcacacttcggctactccgattcagcagaaatgctgagcgggaacagcgatcttaatgaaaagctgcgccagcgtcttgagcaggccgaagcagagcgtacgcgcgcccgtgaagcgatgcgtactcacgccgcacagctgagccagtacagccaggtcatggcctcgctgaaaagctccttcgacaccaagaaagagctgttaaacgatctgcataaagagttgcaggacatcggcgttcgcgccgacagcggtgcagaagagcgggcgcgtattcgccgcgatgagctgcatgctcagctcagtaacaaccgcgcgcgtcgtaatcagctggaaaaagcgctgaccttctgtgaagcagagatggacaacctgacgcgacgcctgcgcaagctggagcgtgactatcatgagatgcgtgaacaggttgtgaccgcgaaggcggggtggtgcgcggtgatgcgcatggtgaaagataacaacgtggagcgtcgtctgcatcgtcgcgagctggcgtacctgtcagccgatgaactgcgctctatgtcggataaggcgctgggcgcgctgcgtctggcggtggcggataacgaacatctgcgcgacgtgctgcgtatgtccgaagatccgaagcgtcctgagcgcaaaattcagttcttcgtggcggtttatcagcacttacgcgagcgtattcgtcaggatatcatccgtaccgacgatccggtggaagcgatcgaacagatggagatcgagctgggccgactgacggaggagctgacctcccgcgagcagaagctggcaatcagctcccgcagcgtggcgaatattattcgtaaaaccattcagcgcgagcagaaccgtatccgtcagctgaaccagggcctgcaaagcgtgtcgtttggccaggtcaacagcgtgcggctgaacgtgaacgtgcgtgaggcgcactccacgctgctggacgtgttgtctgaacagcacgaacagcatcaggatctgttcaacagtaaccgcctgaccttctccgaagcgctggcgaagctatatcagcgtctgaatccgcagattgacatgggccagcgtacgccgcaaaccatcggcgaggagctgctggactaccgcaactatctggaaatggaagttgaggttaaccgtggctcagacggctggctgcgcgcggaatccggtgcgctctctaccggtgaagccatcggtaccggtatgtcgattctggtaatggtggtgcagagctgggaagatgaagcgcgtcgtctgcgcggcaaagacatctcgccatgccgtctgctgttcctcgatgaagccgcgcgtctcgacgcccgctccatcgccacgctgtttgagctttgcgagcgactcgatatgcagctcatcatcgcggcgccggaaaacatcagtccggaaaaagggacaacctacaagctggtgcgtaaggtgtttcagaacagtgaacacgtacacgtcgtgggcctgcgtggtttcgccccgcagccaccggagtcattaccgggcacggctgacgcctcttaa

SEQ ID NO: 165377 - DNA, 1890 bp, Enterobacter cloacae
atgcctttctatactgaaggaaagctccagaataatgggcatgtcgtgaaaaacagggggcaagggatgttgcttaagaaaaatcgtggtcgtcagctgtctgcgctgagtttgtgcctgacagtgatgtttgctccactgtttaccgctcaggccgatgagcctgaaattgtaccgactgacagctccgcgacgatgggcgcgcagccgacgtcgctgtcacaaccgctggatcagtctccggcgacggccatcatggccggcattaaaccgctgccggaaggcatcgatactgaatcattacgccagcagcttatgaccggcctgccctcgggctatactcccgcttatattaaccagctcacgctgctttacgctgcgcgcgatatgaaaccgatgtgggaaaatcgcgaggcggtacgagccttccagcagcagctggctgaagtggcgattgcaggctttcagccgcagttcacgacctgggttgagctcctgaccgaccctgccgtttccggacaggcgcgtgacgtggtgctgtctgatgccatgatgggctacttacagtttgtggcggggatttcggtgaacggcaaccgctggttatacagcagtaaaccgtacaagctggcgacgcctgcgctgtccgtcattaatcagtggcagctgtcgctggataacggcgaactgccgcgctttatcgcaagccttgcgcctgcccatccgcaatatgccacgatgcatcagtcgcttcttgagctggttgcggattcccgcccgtggcctcaactgcgtggcaccacaacgctgcgtccggggcagtggagcagcgatgtgcctgcgatccgcgaaattatgaaacgctccggcattcttgacagcggccctaaaattgcgctgcccggtgacgagacgcaaaatgcggtcgtcagcccgtcggcgccggtaaaagagaaaacggccgttgcgttgagcaataagcccgccgcttacgatcgcgagctggtcgccgcagtgaagcagttccaggctgggcaggggcttggcgctgacggcgtgattggtccatctactcgcgactggctgaacgtctctccggcccagcgggcaggggtgctggcgttgaatatccagcgcttgcgcttgctgccgggcacgttatccaccggcattatggtcaacattccggcgtactccctggtctactatcaggacggtagcgaagtgctggcgtcccgcgtgattgtcggccgacctgaccgtaaaacgccaatgatgagcagcgcgctgaataacgtggtggttaacccgccgtggaacgtgccgccgacgctggcgcgcaaagatatcctgcctaaggtatggaatgacccgggttatctggagcgacataactatacggtgatgcggggctggaacagcaaagaagcgattgatccctggatggtcgactggtcaacgattacgccttcgaacctgccgttccgtttccagcaggcaccgggcgcccataactcgctgggacgttacaaattcaatatgccaagttcggacgctatctacctgcatgataccccgaaccataatctgttccagaaagatgcacgcgcgctcagctcgggctgtgttcgcgtgaacaaggcctccgagctggcgaatatgctgttgcaggatgcaggctggaacgatgcgcggatatcagatgccctgaagcagggggatacgcgttacgtcaatattcgccacaatattccggtcaatctttactatctgacggcgtttgtaggcgcggacggacgcacccagtatcgtacagatatttacaattatgatctgacagcgcgatccggcgcacaaattttgccaaaagcggaacaattaatcaggtaa

SEQ ID NO: 165378 - DNA, 552 bp, Enterobacter cloacae
atggacaaatttgacgctaatcgccgcaaattgctggcgttaggtggcgttgcgctgggcgcagcagccatccttccgacgccagcatttgccaccctctcgacacctcgtccgcgtattttaacgctcaacaatctgcatactggtgagacgcttaaagcggaatttttcgatggcagaggctatattcaggatgaattagcaagactcaaccattttttccgtgatttccgcgcgaataaaatcaaagccatcgaccctggattattcgatcagctttaccgcttgcagggactgctggggaccaaaaggccggtgcaactcatttctggctatcgctctctggataccaacaatgaattgcgcgcccacagccgtggggtagcgaaaaaaagctatcacactaaagggcaggcgatggatttccatattgaaggcgtttcgttagccaatattcgcaaagcggcgttatctatgcgcgcaggtggtgtaggatactacccacgtagcaactttgtgcatattgataccgggccggttcggcactggtaa

SEQ ID NO: 165379 - DNA, 648 bp, Enterobacter cloacae
atgaactatcgtattattccggttaccgcgttctcacagaactgttcattgatctggtgtgaacaaactaaactggccgcgcttgttgatcccggtggcgacgctgagacaatcaagcaggaagtcgctgccagcggtgtaacgctgatgcagattttactcacccatggtcatctcgaccatgtgggtgcagcggctgaactggctgaacactacggtgtgccgattatcggcccggaaaaagaagatgagttctggcttcaggggctgcctgcccaaagccgcatgtttggtctggatgagtgtcagccactgacaccggaccgctggctgaacgaaggcgatcgcgttaacgtagggaatgtaactttacaggtgttgcattgcccagggcatacgcccggccatatcgtcttctttgatgacgtgtcgcgcctgctgatttccggtgacgtgattttcaaagggggcgtaggacgcagcgatttcccacgcggcgatcacggtcagctgattcagtcgattaaacagaagttattaccgttaggtgatgatgtgacgtttatccctggacacggaccgatgtcgacgctgggcgatgagcggttgcataacccgttccttcaggatgaaatgcctgtctggtaa

SEQ ID NO: 165380 - DNA, 1191 bp, Enterobacter cloacae
atgtttgagaacattactgccgctcctgccgacccaattctgggcctggccgatctgtttcgtgccgacgaccgccctggcaaaatcaacctgggtattggtgtatataaagatgaaaccggcaaaactccggtactgaccagcgtcaaaaaagctgagcagtatctgctggaaaacgaaaccaccaaaaactacctcggtattgatggtatccctgaatttggtcgctgcacccaggagctgctgttcggcaaaggcagcaccattgtgagcgaaaaacgcgcccgcacggcgcagaccccaggcggtaccggcgcactgcgcgtggcggcagatttcctggcgaaaaacacctctgtgaagcgtgtgtgggtaagcaatccaagctggccgaaccacaagagcgtttttaattctgcgggtctggaagtgcgtgaatacgcctactacgacgcggcaaaccacgcgctggatttcgacggtctgctggccagcctgagcgaagcccaggcgggcgatgtggtgctgttccacggctgctgccataacccaaccggtatcgatcctacgcttgagcagtgggaacagctggctaagctgtccgttgaaaaaggctggctgccgctgttcgacttcgcttaccagggctttgcccgtggtctggaagaagatgcagaaggtctgcgcgcattcgccgccgtccatcaggagctgattgtcgcaagctcctattccaagaactttggtctgtataacgagcgtgtcggcgcctgtacgctggtggctgctgacgaagcaaccgtcgatcgcgcattcagccagatgaagtccgtgatccgcgctaactactctaacccaccggcacacggtgcgtctgtggtcgcgacgatcctgagcaacgatgcgctgcgcgcaatctgggaacaagagctgaacgatatgcgtcagcgcattcagcgcatgcgtctgctgtttgtgaacacgctggctgagaaaggcgctgaccgtgacttcagcttcatcatcaagcagaacggcatgttctccttcagcggcctgaccaaagagcaggtgctgcgcctgcgtgaagagtttggcgtgtatgccgttgcctctggccgcgtgaacgttgcaggtatgacgcctgacaacatggcgccgctgtgcgaagccattgtcgcggtgctgtaa

SEQ ID NO: 165381 - DNA, 1059 bp, Enterobacter cloacae
atgatgaagcgcaatatcctggcagtggtagtccctgccctgctggtagccggtgcagcaaacgctgctgaaatctataacaaagacggcaacaaattagatctttacgggaaagcagttggcctgcattacttctctgattacgcgggcaacgatggcgacaacacttacgcgcgtctgggcttcaaaggtgaaactcagatcaacgatcagctgactggctacggtcagtgggaatacaacttccagggtaacaactctgaaggtggcgatgcacagaacggcaacaaaacccgtctggcattcgcaggtctgaaatttggtgacgcaggctccttcgactacggtcgtaactacggtctggtctatgacgcaatcggcatcaccgatatgctgcctgagttcggcggcgacaccggcgcgagcgataacttcttcgcaggccgtacgggtggtctggcgacttaccgtaacagcaacttcttcggcctggttgacggtctgaactttggtgttcagtacctgggcaaaaatgaacgtgatgacgcagtacgttccaacggtgacggctgggcaacctctctgagctatgatttcgacggtttcggcattgtgggtgcttatggtgcagctgaccgtaccaacaaccagcagacgctggattggggtaaaggcgacaaagctgagcagtgggcaaccggcctgaaatatgacgcgaacaacatctacctggcagctatttatggcgaaatgcgtaacgcagcgcgtctgggcagccgtggtttcgctaacaagtctcaggacttctctgtcgtcgctcagtaccagttcgatttcggtctgcgtccatccatcgcttactacaaatctaaagcgaaagacgtagaaggtatcggtgacgaagactacatcaactacatcgacgttggtgcgacatactacttcaacaaaaacatgtctacctatgttgactatcagatcaaccagctgaaagatgacaacaagctgggcatcaacaacgacgacatcgtggctctgggtctggtttaccagttctaa

SEQ ID NO: 165382 - DNA, 1401 bp, Enterobacter cloacae
atgagcgttgtgcctgtagccgacgtactccagggccgtgtcgccgttgaccaggaggtcaccgtgcgcggatgggtgcgtactcgccgagattctaaagctggcatctccttcctcgccgtctatgacggttcctgctttgatcctgtacaggccgtcattaataattctctgcccaattacaatgatgacgttctgcacctgacaaccggctgttccgtgatcgtcaccggtgttgtggtggcctctccgggccagggtcagagctacgaaattcaggcgacctcggtggaagtgaccggctgggttgaagatcctgacacctacccgatggctgcaaagcgtcacagcatcgaatatctgcgtgaagtcgcgcacctgcgtccgcgcaccaacctgattggtgcggttgcccgcgtgcgtcatacgctggcgcaggcgctgcatcgcttctttgacgagcagggttacttctgggtttctactccgctgatcacggcttccgataccgaaggcgcaggtgaaatgttccgcgtttcaacgctggatatggaaaacctgccgcgtacgccggaaggtaaagtcgattacgacaaagacttctttggtaaagaagccttcctgacggtttccggccagctcaacggtgaaacctacgcctgtgcgctgtctaagatctataccttcggcccaaccttccgtgcggaaaactccaacaccagccgtcacctggcggaattctggatgctggagccggaagtggcctttgccgatctgaatgacgcggcagccctggcagaagcgatgctgaaatacgtgtttaaagccgttctcgaagagcgcgcagacgacatgaaattcttcgctgagcgtgtcgataacgacgccatcgcccgtcttgagcgcttcgtctccgcagacttcgcgcaggtcgattacaccgacgcggtcgcaatcctggaaaaatgcggtgagaaattcgaaaacccggtttactggggcgtggatctctcctccgagcacgaacgttatctggcagagaagcactttaaagcaccggttgtggtgaaaaactatccgaaagacattaaggcgttctatatgcgccttaacgaagacggtaaaaccgttgccgcgatggatgtcctcgcgccgggcatcggtgagatcatcggtggctcccagcgtgaagagcgcctggatgtgctggacgcgcgtatgcaggagatgggcctgaacccggcggactacagctggtatcgcgatctccgtcgctacggcaccgttccacactccggctttggcctgggcttcgaacgtctgattgcttacgtaacaggtgttcagaacgtacgtgatgtgattccattcccacgcacaccgcgtaacgcaagtttctaa

SEQ ID NO: 165383 - DNA, 1203 bp, Enterobacter cloacae
atgactcaattcgcttctccggttctgcatacgttgctggataccgacgcgtacaagctgcatatgcagcaagccgtgtttcaccactatcatgatgtccatgttgcggcggaatttcgctgccggggtgacgacttgctgggtatctacgcagattccattcgtgaacaggtcgaggccatgcagcatctggcgctcaccgatgacgaatatcagtggctttcaggcctgcctttctttaaagcggattatctgaactggctgcgtgagttccgctataacccggaacaggtcaccgtcaccaatgataacggcaagctggacattcgtctgaccggcccgtggcgcgaggtgatcatgtgggaagtgccgcttctggccgtgatcagcgagctggcccaccgctatcgctcccctgaaaccggtgtgacgcaggcggttgccgctctggagaataaactcgttgagttttccacactgaccgaagggctggatatgtcccgcttccgtctgatggactttggcacgcgccgccgcttctctcgcgaggttcaggaagccattgtcagacgtctgcaacaggagccgtggttcgttggcaccagtaactacgatctggcacgtcgccttgatttaacgccgatgggcacccaggcgcacgaatggttccaggcgcaccagcagatcagccctgaccttgccaacagccagcgcgccgccctcgccgcgtggttagaggaatacccggatcggctgggtattgcccttaccgactgcattaccatggacgcgttcctgcgcgactttggccctgagtttgccgaacgctaccagggtttgcgccatgattccggggacccggttgaatggggtgagaaagccatcgcccattacgaaaaactgggcatcgaccccatgagtaaggtgctggtcttctccgataaccttgacctggcgaaagccgtcgacctttatcgccatttctcatcgcgggtgaacctgagtttcgggattggtacgcggttaacctgtgatattcctcaggtgaaaccgctgaacatcgtcataaaactggtggaatgtaacggtaagccggtcgcgaagctctccgacagtccgggcaaaaccatctgccatgacaaagcgtttgtccgcgcattacgtaaagccttcgatctgcctcaggttaaaaaagccagctaa

SEQ ID NO: 165384 - DNA, 2613 bp, Enterobacter cloacae
atgacacaacagccacaagctaaataccgccacgactatcgtgcgccggaatacctgataagcgatatcgatctgactttcgacctggatgccacaaaaaccgtggtgacggcggtaagccaggtgacgcgccagagcgcgacagccgtgccgctgcgtctggatggtgaagacctgacgctggtttccctgcatattaacgatgaagcctggtcagactataaagaagaaggcaaccagctggtcatcgacaacctgccggaacgctttaccctgcgcatcgtgaatgaaattagccctgccgccaataccgcgctggaaggactttaccagtcaggcgtagccctgtgtacccagtgtgaagccgaaggtttccgccacattacctggtatctggatcgcccggacgtcctggcgcgctttaccaccaaaattattgccgacaaaacgctgtacccgtacctgctttccaacggcaaccggattggtgaaggggaactggagaatggccgtcactgggtacagtggcaggatccgttcccgaaaccctgctatctgtttgcgctggtggcgggagatttcgatgtcctgcgcgacacctttaaaacgcgctctggccgtgaagtcgcgctggagctgttcgtggaccgtggcaaccttgaccgcgcaccgtgggcaatgacctccctcatcaactccatgaagtgggatgaaacgcgctttggcctcgaatatgacctcgacatctatatgatcgttgcggtcgatttcttcaacatgggcgcgatggagaataaaggtcttaacatctttaactctaaatacgtgctggcgcgtaccgataccgccacggataaagattacctcgatatcgaacgcgttatcggccacgaatatttccataactggaccgggaaccgcgtcacctgtcgcgactggttccagctgagcctgaaagagggcttaaccgtcttccgcgatcaggagttcagctccgatctgggatcgcgggcggtgaaccgcatcaacaacgtgcgcaccatgcgtggtctgcaatttgcagaagatgccagcccgatggcccatccgatccgcccggataaagtcattgagatgaataacttctacaccctgacggtgtatgaaaaaggcgctgaaattatccgtatgatccacaccctgctgggtgaagagaatttccagaaagggatgcagctctacttcgaacgccacgacggcagtgcggccacctgcgacgatttcgtccaggcgatggaggacgcctctaacgtcgatttgtctcatttccgccgctggtacagccaggccggtacgccgattgtgacggtcaaagacgactacaacccggaaaccgagcagtacacgctgaccatcagccagcgcacgccgccaacggccgagcaggaagagaaacatccgctgcacattccattcagcgttgagctgtacgacaacgaaggcaacgtgatcccgttacagaagggcggccacccggtgcataacgtgctgaacgtgacccaggcagagcagacctttatcttcgataacgtctatttccagcccgttcctgccctgctgtgcgaattctccgcgccggtgaaactcgaatataagtggagcgatcagcagctgacgttcctgatgcgtcacgcgcgcaacgatttctcgcgctgggatgcggcacaaagcctgctggcgacctacatcaagctgaacgtcaaccgttaccagcagggccagccgctgacgctgccggttcatgtggcagacgcgttccgtgccatcctgctggatgagaacattgacccggcgctggcggctgaaattttaacgctgccgtctgcgactgaaatcgccgagctgtttgacatcatcgacccgattgccatcgtcgccgtgcgtgaagcgctgacccgcacgctggcgaccgaactggcagatgagttcctcgccatttacaacgccaacaagctggacgcgtatcgggtggaacatgcggatatcggtaaacgttccctgcgcaatacctgcctgcgctatctggcgtttggtgaggcagagctggcgaacacgctggtcagcaagcagtaccacgaagccgataacatgacggatgccctggccgcgctggccgcaagcgttgccgccgagctaccgtgccgcgatgcgctgatgcaggagtacgacgacaagtggcatcaggatggtctggtgatggacaagtggttcatccttcaggccaccagcccggcagccgatgtactcagcaaagtacgcagcctgctgaagcaccgttcgttcaccatgagcaacccgaaccgcgtccgctctctgattggtgccttcgccagcagcaacccggccgcgttccatgccgaagacggcagcggttatcagttcatggttgaaatgctgaccgagctgaacagccgtaacccgcaggtggcgtctcgtctgattgagccgctgatccgcctgaaacgttacgatgcgcagcgtcaggcgaaaatgcgcgccgcgcttgagcagctgaaagggctggaaaatctgtctggcgatctgtacgagaagattgctaaggcgctggcctga

SEQ ID NO: 165385 - DNA, 771 bp, Enterobacter cloacae
atgaatactgcacgactgaaccagggaacaccgttactgctgaacggcgtgaccaaacgctacggcgacaacaccattctgaatgcactggatctgcatattcctgccggacagtttgtggctgttgtcggccgcagcggtggcggcaagagtaccctgctgcgtcttttagccgggctggaagcgccaaacagcggtgacattctggcaggcactacgccgctggccacgattcaggatgatacgcgcatgatgtttcaggacgcgcgtctgctgccgtggaaaacggtgatggataacgtcgggctgggcctgaagggcagctggcgggaggacgcccggcaggcactcgctgcggtagggctggagaatcgcgcgggagagtggcctgcggccctgtcgggtggacaaaagcagcgcgtagcgctggcacgcgcgctgattcaccgtcccggcctgttgctgcttgatgaaccgctcggcgcgcttgatgccctgacgcggatcgagatgcaggatctgattgaaaccctctggcagacgcacggctttacggtgctgctggtgacgcatgatgtcagtgaagccgtggcaatggcagacagggtgctgttaatagaagaaggtaaaattggtctggatctgacggtagatattccacgtcctcgccgcgtgggatcggccagactggcggaactggaagccgaagtactggatcgggtgatgaaacgtggggaagcggagattcagcggataaaggctaatgcctga

SEQ ID NO: 165386 - DNA, 792 bp, Enterobacter cloacae; identical to SEQ ID NO: 157772

SEQ ID NO: 165387 - DNA, 1146 bp, Enterobacter cloacae
atgagtctgaatcttttctggtttttacccacccacggtgatggacactatcttggcacagaagaaggtgcccgcccggtcgatcacggctatctacagcagatcgcccaggcggcagaccgcatcggttttaccggggtactgatcccgacgggccgctcgtgtgaggatgcgtggctggttgccgcgtcaatgatccccgtcacccagcgtctgaaattcctggtagccttgcgcccgagcgtggtgtcgcccaccgtcgcggcgcgtcaggcggcaacgctggacaggctttccaatggccgtgcgctgttcaacctggtgacgggcagcgatccgcaggagctggcgggcgatggcgtctttctcgatcataccgagcgctatgaagcctccgcagagttcacccgcgtctggcgacgtctgctggaaggggaaaccgtcaccttcgaagggaaacatatccacgttcgcgatgcacagctctacttcccgccggtacagcagccgcgccctcccctctatttcggcggatcgtcggacgtggcgcaggagctggcggctgagcaggtcgatctctatctgacctggggcgagccaccggagctggtgaaagagaaaattgctcaggtacgcgctaaagccgcagaacatggccgtacggtacgctttggtattcgcctgcacgtgatcgtacgtgaaaccaacgacgaggcctggcaagccgccgaccgtctgatcgctcatctggacgacgacactatcgctaaagcacaggcggcgtttgccaaaaccgactccgtgggccagcatcggatggcttccctgcacaacggcaagcgtgaaaatcttgagatcagcccgaacctgtgggccggggtaggtctggtgcgcggcggtgccggcacggcactggtcggcgacggtccaaccgtagcggcacgcattaatgaatacgcggcgctggggatcgacagctttatcctgtctggctacccacatctggaggaggcgtacaaggtgggtgaactgctgttcccgcatctggatgtcgctatcccggaaattccgcagccacgtcagcttcagttgcagggcgaagccgtggcgaacgcgtttatcccgagaaaagtcgcgcaaagctaa

SEQ ID NO: 165388 - DNA, 963 bp, Enterobacter cloacae
atgtttaaaacagttacccgtatcgggctggcaggtctgctggcagtggcgtcgctggctcaggcggcggagaaagcgccggagagcctgcgtatcggttatcagaaaggcagcgtcagcatggtgctggcgaaaagccatgcgttgcttgagaagcgtttcccggagaccaaattctcatgggtcgagttccctgccggaccacagatgctggaggcgctgaacgtcgggagtattgatttaggcagcaccggcgatatcccgccaatctttgcgcaggctgccggggcggatctggtttacgttggcgttgagcccgccaagccgaaggcagaggttattttggtgccggaaaacagcgagatcaaaagcgtcgccgacctcaaaggccataaggttgctttccagaaaggttcaagctcgcacaacctgctgctgcgcgcgttgcaggaggccggccttaaattcaccgatatccagcccgtttacctgacgcctgccgatgcgcgcgcggcgtttcagcaaaaaaatgttgatgcctgggctatctgggatccgtactactccgccgcactgttgcagggcggtgtgcgggtgctgaaagacggcaccaccctgaagcagaccggttcgttctacctggcggcacgtccttacgctgagaaaaatggcgcatttattcagcaggtgctggataccttctctcaggccgatgcgctgacccaaagccagcgtcagcagagcatcacgctgctggcaaaaaccatgggcctgcctgaaccggtgatcgccacctatcttgaccaccgtcctcccaccaccatagcaccggttgacgcccacgttgccgctctccagcagcaaacggcagacctcttttatcaaaaccgcctggttccaaagcaggtgaatattcgcgaacgcatctggcaacccgctggcattgaaggaaaaaaatcatga

SEQ ID NO: 165389 - DNA, 576 bp, Enterobacter cloacae
atgcgcgtcattaccctggccggaagcccgcgcttcccctctcgctccagcgcactgctggaatacgctcgcgaaaagcttaatgctctggatgtcgaagtgtgtcactggaatttgcacaatttcgcgcctgaagatctgctctacgcccgtttcgacagcccggcgctgaaaaccctgatcgaacaacttaagagtgctgacgggctggtcgtcgcgacaccgatttataaagcctctttttccggcgcactgaaaacgctgctcgatctgctgcccgaacgcgcgctggacggtaaggtcgtcctgccgctggccacaggcggtacggtagctcatttactggcggtggattatgccctcaagccggttctgaacgcgctgaaagcgcaggagatcctgcatggcgtcttcgctgacgactcactggtaatcgactaccagcataaaccccatttcacgccgaatctgcaaacccgcctcgacagtgcgctcgaaaccttctggcacgccctgaaccgtcgggatcgccacgcggcagcatttcatcaatcacaaggagtggcgcatgtttaa

SEQ ID NO: 165390 - DNA, 1011 bp, Enterobacter cloacae
atgtactaccccttcgttcgtaaagcccttttccagctcgatcctgagcgcgctcatgaatttacatttcagcagttacgccgtattacaggaacgcctctggccgcgctggtgcgtcaaaacgtgccggaaaaaccagttcagtgcatgggcctgactttcaaaaatccactgggcctggcggccggtctggacaaaaatggcgaatgcattgatgcactcggtgcgatgggctttggctcgatcgaaatcgggacggtgacgccgcgtccgcagccgggaaatgacaagccacgtctgtttcgcctggttgaagccgaggggctgatcaaccgcatgggctttaataaccttggcgtcgatcatctggttgagaacgttaagaaagcccattttgatggcgtgctgggtattaatattggcaaaaataaagacacgccggtcgagcagggtaaagatgactatctgatttgtatgaaaaaagtctatgcctatgccggttatattgcggtgaatatatcttcgcctaacaccccagggctgcgttcattacaatatggcgaagcgctcgacgatcttcttagcgccattaaaaataaacaaacggcgctacaggcgatccaccataaatatgttccggtcgcggttaagatcgccccggatctttcggcagaagaattgatccaggttgccgacagtttagttcgccataatattgatggtgtgattgcaaccaatacaacactcgatcgctctctcgttcagggaatgaaaaactgtgacgaagcgggtggattaagtggccgtccggtacaattaaaaagcaccgaaattattcgcgcactctccgcagaattaaaaggtcagctgccgattattggcgtgggtggcattgactctgtcatcgctgcacgtgagaagatggcggcaggtgcatcgctggtgcaaatttattccggctttatttttaaagggccgccgctgattaaagaaatcgtcacgcatatctaa

SEQ ID NO: 165391 - DNA, 543 bp, Enterobacter cloacae
atgcgaattaaacctgacgataactggcgctggtatttttgtgacgagcatgaccgtatgatgctcgacttagccaatggcatgttgtttcgctctcgttttgcgcgccgaatgttaacgccagacgcgtttgctccctcaggcttttgcgttgacgacgctgcactctatttctcttttgaagaaaaatgccgcgagttcgatctctccaaagaacagcgcgctgaactggtactaaatgcgctggtggcgatccgtttcctgaaaccgcaaatgccgaaaagctggcattttctcgcccacggcatgtgctggaccccggctatcggcgatgcggcgagcgtcaatctgagcgataccgaagaagaggtgaatttgctggtggttgaacccggtgaaaacgctgcgctctgtttgctggcccaacccggcgtgaccattgccgggcgagttatgcagttaggtgatgccatcaaagtgatgaatgacaggctgaagccacagctgcgcgttgattccttcagccttgaacaggcagtttaa

SEQ ID NO: 165392 - DNA, 1110 bp, Enterobacter cloacae
gtggcgacgttatccaggctttttattcatccggtgaaatccatgcgcggcatcggcgtctctcacgcgctggccgatatgagcggattcgcctttgatcgtatttttatggtcaccgagcctgacggtacgtttatcaccgcacgtcagttcccgcagatggttcgctttaccccttccccgcttcatgacgggctgcatttgactgcgccggacggttcaagcgtcgtgatccgctttgctgattttgcgccgcttgatgcgccaacggaagtgtggggcaatcattttaccgcgcgtatcgcgccggataacattaaccagtggctgagcggctttttctcccgtgacgttcagctgcgctgggttgggcctgcgctgacccgtcgcgtgaagcgccacgatgcggttcctctctccttcgcggatggttttcccttccttctgaccagcgaggcctcgctgcgtgatttacaaaaccgttgcaaagccagcgtgcagatggagcaatttcgcccgaatctggtggtgaccggagcgaatgcctgggatgaagatacctggaaagtgatccgcatcggcagcgttatttttgatgtcgtgaagccgtgcagccgctgtatttttaccaccgtcagcccggagaaaggccagaaacacccttccggcgaaccgctgaaaaccttgcagtcatttcgtaccgcgcaggataacggcgatgtcgacttcggccagaacctgatcccccgctccagcggcgtgatccgcgtgggcgacgaggtcgaaattctcacccgcgggcctgccagggtgtacggcgcaggtcaggaagaagagatggttgacgttgtcaccaacgtcgcttccgcggtggatattcactgggaaggcaaagttatccgtggtaacaatcagcaggtgctactggaacagctggaacaggcaggtatccgcgtaccgtattcctgtcgcgcggggatttgcggatgctgtcgcattaaactggtcgatggtgaagtaagtgccctgaagaaatctgcgattggcagtgacggcacgatcctgtgctgtagctgtgtcccgaaaacatccgtacagctggaagcttaa

SEQ ID NO: 165393 - DNA, 2127 bp, Enterobacter cloacae
atgagtaaaagtgacgatatgaattctctgtttgccagtacggcccgtgggctggaagagctgttaaaaactgaactggaagccctgggcgcgaaagagtgccgggtggttcagggtggtgtccattttgagggcgacacgcggcttatttaccagagcctgatgtggagccgtctggcgtcgcgcatcatgctgccgatgaaagagtgcaaggtctacagcgatcttgatctctacaccggcgtacagatgatcgactggacagagatcttcaccccggacgctacctttgcggtgcatttcaacggcgtcaacgatgagatccgcaacagccagtatggtgccctgcgcgttaaggatgccattgtggactgcttcacgcgtcgcaataaagaacgtccgaacgttgaccgtgaaaacccggatctgcgtatcaacgtctggctgaacggcgatacggccagtatttccctggatctgagtggcgcaggcctgcatctgcgcggctatcgcgatcgcaccgggatggcgccgatcaaagaaacgctggctgccgctatcgtgatgcgctccggatggcagccaggtacgccgctgctcgatccgatgtgcggttccggtacgctgctgattgaagccgcgatgctggccaccgaccgtgcgccagggctgcaccgcggccactggggcttcaaaggctgggcgcagcacgatgaagccatctggaaagaggtcaaagacgatgcgcagacccgcgcccgtaaagggctggcggagtacacctctcacttttacggttcggacagcgacgcacgggtgattgaacgcgcgcgcagcaacgcccgtcgtgccggtatcggcgagctggtgaccttcgaggtgaaggacgtggcgaatctgaccaatcctctgccaaaaggcccgtacggtacggtgatcagcaacccgccgtatggtgagcgtctggacagcgagccggcgctgattgcactgcacagcctgctgggccgcaacatgaaagcgcatttcggcggctggaacctctccctgtttagcgcctcgccggagctgctgagctgcctgcaattgcgtgccgatcgccagttcaaagcgaaaaacggcccgctggactgcgtgcagaaaaactaccatctggcagaggtagcggcggatagcaaaccgtcaggcgtggcggaagattacgccaaccgcctgcgcaaaaacctgaagaaatttgagaagtgggcgaagcaagaaggcatcgaatgttatcgcctgtacgacgctgacctgcccgagtacaacgtggcggttgaccgctatgcggactgggtggtggttcaggaatacgccccgccgaaaactatcgatgcgcaaaaagcgcgtcagcgtatgctggatgtgattgcggccaccatcgccgtactcggcatttcgccaaacaagctggtgctgaaaacccgtgagcgtcagaaaggtaaaaatcagtatcagaagatgggcgagaaaggcgacttcctcgaagtgggcgaatataacgcgcggctgtgggttaacctgaccgactaccttgataccggcctgttcctcgatcaccgtatcgcccgccgcatgctgggccagatgagcaagggcaaagacttcctgaacctgttctcctataccggcagcgccagcgttcatgcggggcttggcggtgcgcgtagcaccaccacggtagatatgtcccggacttatctggagtgggcagagcgcaacctgcgtcttaacggcttaaccggccgtcagcatcgcctgttacaggccgacgtgctgggctggctgcgcgataccgacgagcagtttgacctgatctttatcgatccgccgaccttctctaactccaagcgtatggaggatagctttgatgttcaacgcgatcacctgcgcctgatgaccgacctgaagcgtctgctgcgtaaaggcggcaccattatgttctcaaataacaagcgcggattccgcatggatcacgacggcctggccgaactgggactgaaagcacaagaaatcagccaaaaaacgctgtctcaggactttgcccgtaaccgtcaaatccacaactgctggctgatctccgcggtctga

SEQ ID NO: 165394 - DNA, 1908 bp, Enterobacter cloacae
atgtctttaattagtatgcacggcgcgtggctctctttcagcgactcaccgcttctcgataatgcagagctgcatatcgaagataacgagcgcgtctgtctggtgggccgtaacggcgcaggtaaatcgacgctgatgaaaatcctcaaccgtgagcaggggctggatgacggccgtattgtttacgagcaggatctgatcgtctctcgtctgcaacaggatccgccgcgtaacgtcaccggcagcgtgtacgattttgtggccgaagggatttcagagcaggcggaatacctcaagcgttaccacgagatttcgcatctggtgatgacggacccgagcgacaagaatctcaacgagctggcaaaagtgcaggagatgctcgatcaccacggtctgtggcagctggaaaaccgcattaacgaagtgctggcccagcttggcctggaagcggatatggagctgtcggcgctctccggcggctggctgcgtaaagcggcgctgggtcgtgccctggtgagcgggcctaaggtgctgctgctggacgaaccgacgaaccacctggatatcgaagcgattgactggctggaagggttcctgaaaacctttaacggtaccattatcttcatctcccacgaccgttcgttcatccgcaacatggccacgcgcattgtcgatcttgatcgcggcaagctggtgacctatccgggcgattacgatacctatctgctggagaaagaagaaaacctgcgcgtggaagagctgcaaaacgccgagttcgaccgcaagctggcccaggaagaagtatggatccgtcagggcattaaagcgcgtcgtacccgtaacgaagggcgcgttcgcgccctgaaggcgatgcgccgcgaacgtagcgaacgccgcgaagtcatgggtagcgccaaaatgcaggtggaagaggcgtcccgctcgggcaagattgtcttcgaaatggagaacgtgaattattcggttgacggcaaagtgctggtgagcgatttctccgctcaggttcagcgcggcgacaaaattgcgctgatcggcccgaacgggtgcggtaaaaccacgctgctgaaactgatgctcggtcagctccaggccgacagcggtcgtatccactgcggtaccaaactggaagtggcgtacttcgaccagcaccgcgccgagctggatccagaccgtacggtgatggataacctcgccgagggtaaacaggaggtcatggttaatggcaagccgcgtcacgtgctgggctaccttcaggacttcctgttccacccgaaacgcgctatgacgccggtgcgcgcgctgtccgggggagaacgtaaccgtcttttgctggcgcgtctgttcctgaaacccagtaacttattgattctcgatgaaccgactaacgatctggatgtcgaaacgctggaactgctggaagagttgattgatggttatcagggaaccgtaatgctggtcagccacgatcgtcagtttgtcgataacaccgtgaccgagtgctggatcttcgaaggcaaagggcgcatcgggcaatatgtgggcggctatcatgacgcgcgtggacagcaatcgcagtcgctggcgcaaaaacaggcgaagaccaaaaatgtcgctgaacctgttgttgcaaaggcagaaactgtcaaaaagtctcctgctaaaatgagttataacttgcagcgcgagctggaagggctgccgcagcgtctggaagagctggaagctgcactggaagcactgcaaatccaggtcgctgatgcgtcattctttacgcagcctcacgactatactcagaaagtattggctgaactctcccaggctgaacaggcgctggaagaggcatttgagcgctgggagtaccttgagtctctgaaaaacggcgcataa

SEQ ID NO: 165395 - DNA, 1254 bp, Enterobacter cloacae
atgtgtgaccagcaccatgccgatcggcatatattatgctcgcaatgcgatatgctcgtggcgttgccagagcttggtcacggacataaggctgcctgcccgcgctgcggcgctacgctgacgaccgagtgggacgcgccaaggcagcgtcctacggcttatgcgctggcagccttattcatgttactgctctccaatctcttccctttcatctatatgaaagtgggcgggatgaccagccaggtggatttactggaaataccaggcgtgatgttctcggaagattacgccagccttggcaccttctttcttcttttcgtgcagatcgtcccggctttttgcctggtcgtcattctgctgctggtcaaccgcgtcaggatgcccactgtccttaaaatcaaactcgcgcggatcctgttccagttgaaaagctgggggatggcggaaatttttctcgcgggtatcctggtcagcttcgtgaagctgatggcctacggcgatgtggggattggcagcagctttattccgtggtgtctgtactgcgtgctacaactgcgcgcgttccagtgcgtggaccgacgctgggcctgggacgatattgccccggcgccgacgctctcgcagacggtaaaggtgggcgtaccgggtatccgtcaggggcttcgctcctgctcgtgctgcaccgccgtgctgcccgcggatgtcgaggtgtgcccgcgctgtgaaacaaaaggtcacgtccggcgtaaaaatagcctgcaatggaccatggcgctgctggtgacctctgtcatgctctatctgcccgccaatatcttgccgatcatgatcaccgatctgctcggcgacagaatgccctcgaccatactggccggggtgattttgctgtggagcgaggggtcataccctgtggcaggcgtcatattcctcgccagtattatggttccgaccttaaagatgattgccattgcctggctttgctgggatgcaaaagggcacggtaagcgagacagcgagcgtatgcatctgatttatgaagtcgtggaatttgttggccgctggtcgatgattgacgtgttcgtgattgcggttctctcagcgctggtgcgtatgggggggctgatgagtatttatcccgctatgggagcgctgatgtttgcgttggtcgtcattatgaccatgtttgcggccatgaccttcgaccctcgtttatcgtgggatcgtgagcccgattcaagccatgaggaagagtaa

SEQ ID NO: 165396 - DNA, 1641 bp, Enterobacter cloacae
atggaaaataagagtggagaggctaaagtgcagaaggtcagaaactggtcgccggtgtggattttccccatcgtgaccgcgctgatcggtgcatggatcctgttttatcattacagccatcagggaccggaagtcacgctaattaccaccaatgcagaggggattgagggcggaaaaaccaccatcaagagccgcagcgtggatgtgggtgtcgtggaaagcgcgaccctgacggatgatttaacccatgttgaaatcaaggcccgcctgaatgccggcatggaaaaactgctccatgaagattctgttttttgggtagtgaaaccgcaggtcgggagagaagggatcagcggcttaggaacgctattgtcaggggcctacatcgaactccagcccggcaacaaaggcgcccagccagcaaactatcagctgctggattcaccgccgcttgcgccaccggatgcaaaagggatccgcgttattctggacagcaaaaaagcgggccagctctcgccgggcgatccggtactgttccgtggatatcgcgtcggttcggttgaaacaagcaccttcgatccgcaaaaacggaccatcagctatcagctttttatcaatgcgcctaatgaccgcctggtgaccagcaacgttcgcttctggaaagacagcgggatcgcggtggatctgacctctgcggggatgcgcgttgagatgggttcactcaccacgctgtttggtgggggcgtcagttttgatgtgccggaaggtatcgatctgggacaaccggtggcggagaaaaccgccttcaggctgtttgacgatcaaaaaagcattcaggatgcgctctataccgatcacatcgactacctgatgttctttaaggactctgtacgcggcttgcagcctggggcgccagttgagttccggggtatccgtctggggaccgtgggacaagtgccttactttgttccgggactcaagcagatgcttgatgatgattatcgtattccggtgctgatccgcattgagcctgagcgtttgattaaccagataggcgaggaccaggatattggggagcatatcagcgatctgatgaatcgcggtctgcgtggctcgctgaaaactggcaacctggtcacaggggcgttatatgtcgatatggacttctatccaaaagcgccaccaatgacggggatccgtgaatttggcggctacaaaattattcctacggtcagcagtggcctggcgcagatccaacagcgcctgatggaaacgctggataagatcaacaatctgccgctgaatccaatgcttgaggccgcgacgggatcactgcatcagagccaggcgacgatgcaacgtctgcaaaccacgctggataatatcaacaagatcactgccaaccagtccatgcagcagctgccgcaggatatgcagaaaacgttgcgcgaactgaatcgcagtatgcagggcttccagccgggctcagcggcttacaacaagatggtggcggatatgcaacgtcttgatcaggttttacgcgagctacagcccgttctgaaaacgctcaatgaaaagagcaacgcgctggtgtttgaagcgaaagacaaaaaggatcctgagcctaagagggcgaaacaatga

SEQ ID NO: 165397 - DNA, 567 bp, Enterobacter cloacae
atgaaaaaatggctaatcatcgcaggcgcactggtattaacggcctgtagctctggaagcgataacaaaagctactaccagttgccgttaagcgcgcaatccggtgcgcagagtagcacctcgcagggcagccgtctgctgtgggttgaacaggttgccgtgccagattatctggcgggcaacggggtggtctaccagaccagcgatgtgcagtacgttatcgccaacaataacctgtgggccagcccgctggatcagcagctacgcaatacgctggtggcgaatctgagcagccagcttcctggttgggtagtcgcctcgcagcctctgggaagcgatcaggacactctgaatgttaacgtgacgggattccatggccgctatgatggtgcggttgttatcagcggggagtggctcttgaatcatcagggccagttgattaagcgtcctttccatctggaactgaagcagcagaaagatggctatgacgaaatggtgaaagtgcttgcgcaggggtgggcacaggagtcggctgctatcgcaagagagatttcccggctgccataa

SEQ ID NO: 165398 - DNA, 519 bp, Enterobacter cloacae
atggtagataaacgcgaatcctatactaaagaagaccttcttgcctctggtcgcggtgaactgtttggtgcgaaaggcccgcagttaccggccccaaatatgctgatgatggaccgtgtcgtgaaaatgaccgaaaccggcggcaactttgataagggttacgtagaagcagaactcgatatcaacccggacctgtggttctttggttgccactttattggcgatccggtaatgcctggctgcctgggcctcgatgccatgtggcagctggttggcttctatctgggctggcttggcggtgaaggcaaaggccgtgcgctgggcgtaggcgaagtgaaattcaccggtcaggttctgcctaccgcgaagaaagtcacctaccgtatccatttcaaacgcatcgttaaccgccgcctgattatgggcctggcggacggtgaagtgctggtagatggtcgtcttatctataccgcgaacgacctgaaagtgggtctgttccaggatacctccgctttctga

SEQ ID NO: 165399 - DNA, 1761 bp, Enterobacter cloacae
ttgaccattacgaaacttgcatggcgtgacctggttccggataccgagagctatcaggagctgtttgcacagccagacctcacaaaagaacacgaattcatacttagcgatacacaaccgcgtttgcattacgcgctggaacagatgtcatccccatgggctacatctcctttcatgctgctcaaagccccggaagaagccgagtatctgacgcttctcggtgatgccatgcgccagttgcatccaaaaacgaatgccgtttttggtggtcagtatcatattgccggacgtgacgtgaccttcgaacctgccacgcaggcagacggacaattcgctgcaaaaggcgaagtgatcaccgccaactgggtggaagcagaacagctgttcggctgccttcgtcagttcaatggcgatgtgtcactgcaacccggtctggtacaccgcgcgaacggtggtgtgttgctcatctcccttcgcaccctgctcgcacagcctctgctgtggatgcgcctgaaaacggtggtgatgcagcaacgttttgactggataggctacgacgattcacgtccgctgcctgtttccattccgtctatgccgctgtcgctgaccgtcgtgctgacgggtgaccgtgaatctctggctgatttccaggaaatggagccagaactcgcggagcaggcggtttacagtgaatttgaagacaatattcagatcgccgatgccgatgacatggcgcagtggtgtcagtgggttatggccgtggcggaacgtttcgcgctgccctcgcctgccgaggatgcgtggccgggcttaatccgcgaggccgtacgctacactggcgatcaggaaaccctgccgctctgcccgctctggatcggtaaacagctgcgtgaagtgggcgttatcagcggcaacggtccgtttactggtgagcagcttagccagatgctggcccagcgtgaatggcgtgaaggttatcttgctgaccgtatgcaggatgaaattctgctggaacagattctggtggagaccgaaggcgaacgtatcgggcaaatcaacgccttgtccgtcatcgagttccccggacacccgcgcgcctttggcgagccttcccgtatcagctgtgtcgtgcacattggtgacggcgaatttaccgatatcgaacgcaaggccgaactgggcggaaacattcatgccaaaggcatgatgatcatgcaggcattcctgatgtctgaacttcagctggagcagcagatccccttctctgcctcgttgacctttgagcagtcctacagtgaagtcgacggcgacagcgcctcgatggcagagctgtgcgccgtgatcagcgcgcttgcagacgtaccgattaatcagaatattgcgattaccggttccgtggatcagtttggtcgtgctcaaccggtgggtggactgaatgagaaaatcgaaggcttcttcgctatctgccagcagcgcggtttaaacggcaaacagggcgtgattattccggcgcctaacgctcgccatttgagcctgagccaggcgattctggatgcggtagagcaggaacaattcgccgtctgggccatcgaaggagttgaggatgcactacccttactgacaaacctggtctgggacggcgaaggccagacaaccctgatgcagaccattcaggaacgtatagctcaggcgacacagcaggatgctcgtcatcgttatccgtggccgttacgctggttaagttggtttagtgctaactga

SEQ ID NO: 165400 - DNA, 453 bp, Enterobacter cloacae
atgaaatatcaacaactggaaaacctcgaaagcggctggaaatggaagtacctggtcaaaaagcaccgtgaaggggagctgatcacctgctacatcgaagccagcgcggcacaagaagctgtggatatgttgctgaccctcgaaaacgaaccggtactggtaaacggctggattgagaaacacattaatccggccctgttaaaccggatgaagcaaactatccgtgctcgtcgtaaacggcatttcaatgccgagcatcagcacacccgtaagaaatccatcgacctggagttcatggtctggcagcgtctggccgggcttgcgcaacggcgcgggaaaaccctgtcggaaacggtggtgcagctgattgaagatgccgagcacaaagagaagtatgccagccagatgtcgacgctgaagaacgatctacaggcactgttaggtaaaaaataa

SEQ ID NO: 165401 - DNA, 1053 bp, Enterobacter cloacae
atgaaaaagacagctatcgcgattgcagtggcactggctggcttcgctaccgtagcgcaggccgctccgaaagataatacctggtatgcaggtggtaaactgggctggtctcagttccatgacaccggttggtacaacagcagcctgaacaacgatggccctactcacgagagccagctgggtgcaggtgcgttcggtggctatcaggttaacccgtatgttggctttgaaatgggttacgactggttaggtcgtatgccttacaaaggcgacaacgtaaatggcgctttcaaagctcaaggcgtacagctgaccgctaaactgggttacccagtgactgacgacctggacgtgtacacccgtctgggcggcatggtatggcgtgcagactccagcaacagcatcgctggtgacgaccacgacactggtgtttccccagtattcgctggtggcgttgagtgggcaatgacccgtgacatcgctacccgtctggaataccagtgggttaacaacatcggtgacggtgctaccgttggcgttcgtccagacaacggcatgctgagcgttggtgtttcttaccgtttcggtcagcaggaagatgcgccagtcgtagctccagctccggctccagctccagaagtacagaccaagcacttcactctgaagtctgacgttctgttcaacttcaacaaagctaccctgaaaccagaaggtcagcaggcacttgatcagctgtacacccagctgagcaacctggatcctaaagacggttctgtagtggttctgggcttcaccgaccgtatcggttctgacgcttacaaccagggtctgtctgagaaacgtgctcagtctgtagttgattacctggtatctaaaggtatcccagctaacaagatctccccacgtggtatgggcgaatctaacccagttaccggttctacctgtgacaacgtgaaaccacgcgctgcactgatcgactgcctggcaccagatcgtcgcgtagagatcgaagttaaaggtatcaaagacgttgtaactcagcctgcggcataa

SEQ ID NO: 165402 - DNA, 564 bp, Enterobacter cloacae
atgcacacaggggttactgtatatccatacagtaactacagggctggaatgaatatgtacacttcaggctatgcaaatcacttaacaccttccacttctgccgcaggcaatgctgcgcagaattctatcgggcgtgtatcgacagggcttatcagtgaagtggtttaccgtgaagaccagccgctgttaacacaactcttactcctgccgcttttgcagcagctcgggcaacagtctcgctggcagctctggctgacgccacagcaaaaattaagtcgtgaatgggttcagtcggctggcctgccgttagcgaaggtgatgcagattaatcaactctccccttgcgatacggtcgagtcgatggtccgggcattacgtaccgggaactatagcgtcgtgattgggtggttgcctgaggatctgtcgcaagaggaacatttgcgtctgactgaagcggctgaagaaggtaacgcgatgggtttcatcatgcggccggttcgtggagattcctatcgcagaggacaacatcccgggctaaaaattcactcaaatgtgtaccattga

SEQ ID NO: 165403 - DNA, 627 bp, Enterobacter cloacae
atgaaaaagatatcttatgatcggatttatcaatctcaggaatacctctctccgctgggcgaaattcatcatcgcgccctgtttggcggttataccctggccgtggatgaagcggtgttcgcgatggtgtctgacggcgagctgtaccttcgcgcctgtgagcaaagtgcaaaatactgtgtaaaaaacgcctcctcttttctgacactgatgaaacgaggacggccagtgctgcttaattactaccgtgtggatgaaggtctgtggcaaaacagggaaaagctgcttcagctctcctcgtttgcgctcgatgccgccaggaaagagcgctaccagcgccatcagcgtaaccggcttaaggatctgccgaacctgacctttcagattgaggtcctgcttatggaggcgggcattaccaatgaagagacgctacgacagttgggggcgaagacgagctggctgaaaatgcgctctaagaataaagcgctgagtatccgggtattgttcgcgcttgaaggcgccatcgaagggttacatgaagcggcactcccggcggatattcgccgggagcttatggagtggtttaatgcgctgcctgagtcgcagggccatcattccgccaggtag

SEQ ID NO: 165404 - DNA, 2163 bp, Enterobacter cloacae
atgctaagccccctgcttcgtcgctatacgtggaacagtaactggctgtataacgtcaggatctttatcgccctctgcggcaccgtcgctctgccgtggtggctaaatgacgtgaagctcaccatccccctcacgcttggggtggtggccggcgcgctggcggatctcgacgaccgcctggccggtcgtttgcgtaatctggtcattacgctggtctgcttctttattgcttccgcctccgttgagctgcttttcccctggccctggctgtttgccttagggctgacggtgtccaccagcggcttcattttgctcggcggcctcgggcaacgctacgccactatcgcgtttggcgccctgctgattgccatttacaccatgctgggcgtctctctttacgatcagtggtatcagcaaccggtcctgctgctgttgggcgctatctggtataacctgctgaccttaaccggacatcttatttttccggttcgtgccttacaggacaacattgcccgcagttacgaacagctggcccactatctggaactgaaatcccggctgtttgatccggatattgaagaggacagccaggcgcccctgtacgatctggcgctggcaaatggccagctggtcgccacgctgaatcagaccaaagcgtctctgctcacccgtctgcgcggcgatcgcggtcagcgcggtacccggcgcacactgcactactactttgttgcccaggatattcacgagcgcgccagctcctcgcatgtgcagtacgctaacctgcgcgagaaattccgctacagcgacgtgatgttccgtttccagcgcctgctgtcgatgcagtctcaggcctgccagcaacttgcgcgctcaatactgctgcgcacgccctatcagcacgatcctcgctttgaacgcgcattcagtcatctggatgcggccctcgatcgcgttcaggccagtgggacatcgccggaacagttcaaagccctgggattcttgctcaacaacctgagagccatcgatgctcagctcgccaccattgagtctgaacaggcgatggcaatgccgggcaatgacgccgacaaccagcttgccgacgacagtctcaacggtttcagcgatatgtggctgcgcctgagccgtcattttacgccggaatccgccctctttcgccatgcggtaaggatgtcgctggttctgtgcgtcggctacgcgtttatccagataacaggattgcaccacggttactggatcctgctgaccagcctgtttgtctgccagccgaactataacgctacccgccatcggctcgcgctgcgtattgtcgggacattagtcggggtcgccatcgggctgccggtgctctactttgtgccatccgtagaagggcaactgatcctgattgtgattaccggtgtactgtttttcgccttccgcaatgtgcagtacgcccacgccacgatgttcatcacgctgctggtgctgctctgcttcaatctgctgggtgaaggctttgaagtggcccttcctcgcgttatcgacacgctaatcggctgcgccattgcctgggcggcggtgagctttatctggccggactggcgttttcgtaacttaccgcgcgtgtccgacagagcgatgaacgctaactgccgctatctggatgctattcttgagcaataccatcagggtcgcgataaccgtctggcctatcggattgcccgtcgcgatgcgcataacacggacgcagagctggcttccgttgtctcgaatatgtcaactgagccgcgcgccacggcagaaatccgggagacagccttccgcctgctgtgtctgaaccacacgttcaccagctatatctctacccttggcgcccaccgtgagaaactgacaaatccgggcatcctggcgctgctggacgacgccgtttgctacgttgatgatgcgcttcatcatcaacctgcggatgagccacgggttcaccaggcactggatgaactggtgcaacgtatcgctcaccttgatcctggcaccgacaacaaagctccgctggtcctacagcaaattggcctgcttatcgctttgctgccggaaatttgtcggctgcgacagaagatcgctacctggcggaatgatggccctgcgactcaggcagcgcattaa

SEQ ID NO: 165405 - DNA, 447 bp, Enterobacter cloacae
atgcgtaccgttctgaatgtgttgaattttgtccttggcggttttgccaccaccctttcctggctttttgccaccctggtgagcatcgtgctcatcttcacccttccgctgacgcgctcctgctgggaaatcaccaaactctccctcgttccttatggaaatgaagccgtacacgtggatgagctggagccggaaagaaaaaatgccctgatgaataccggcggcacgctgctgaatattttatggctgatcttctttggctggtggttgtgtctgatgcatatcttcgccggtatcgcccagtgcatcacgattataggcattccggttggcatcgctaacttcaaaattgccaccatcgccctgtggccggtaggacgccgtgttgtcccggtcgaagtcgcgcaagccgcgcgtgaagccaacgcccgtcgccgttttcagtaa

SEQ ID NO: 165406 - DNA, 2055 bp, Enterobacter cloacae
atggaactgaaagcaacttcaatgggcaaacgcctggcgcagcacccttacgacaagattgtcctgctcaatgcaggagtgaaagtctccggggaacgccacgaataccttattccgtttaatcagctactggccattcattgtaaacgtgggctggtatggggggagctggagttcgtcctgccggcagataaagtggtgcgactccacgggaccgagtgggcggaaacccaacgcttccaccatcatctgaacacgcgctggcagcagtggagccaggagatgagcgtgattgccgcacaggttctgcaacaggtgctggacgatatcgcgctaagcaatacgcagcagaagtggctgacgcgccagcaaaccgccgggcttcagcaaaaaatcgcccaggcgctgacggcattgcctttaccggtggcgcggcttgaggaatttgataactgccgcgacgcgtggcggaagtgccaggcttggctgagcgatatcgagaaaagccgtctggcgcataaccaggcctggactgaggcgatgcttacgcaatatgccgacttcttcagtacggtggagtcatcgcccctcaatcctgcccaggcgcgcgccgtggtgaatggcgaacagtctttattggtgctggcaggtgccgggagcggcaaaacgtcggtgctggtggcgcgcgcgggctggcttctggcaacgggcgaggcggttgccgaccaaattttgctgctggcctttggtcgcaaggctgcgcaggagatggatgagcgcattcaggcgcgtttgcatacccaggatatctcggcacgcacgttccactccctcgctttacacatcattcaacagggcagcaaaaaagttcctgttgtcagcaagctggagaacgacgctcaggctcgccaggcgctgtttatcaaggcatggcgtcagcagtgcagtgaaaaaaaggcgcaggcgaaaggctggcgtcagtggcttgaagaggaactcaactgggaggtgccggagggcagcttctggcaggatgaaaagctggcgcgccggctgggctctcgtctcgaccggtgggtaagcctgatgcgcatgcacggcggctctcaggcggagatgatagaaagcgcaccggagtcgatccgcgctgtgttttctaaacgggttaagctgatggcgccgatgctgaaagcgtggaaaaccgcgctgaaagacgaaaacgcggtcgatttttcggggctgatccatcaggccatcatcattctggagaaagggcgcttcgtcagcccgtggaaacacattctggtggatgagtttcaggatatctcgccgcagcgcgctgcgctgctttcggcgctgcgggcgcagaataaacacacgtcgctgtttgccgtgggcgatgactggcaggctatctaccgtttcagcggggcgcaactatccctcacgacggccttccaccactattttggggaaggcgatcgcagcgatctggacaccacctaccgcttcaacgcgcggattggcgaaatagccaaccgttttattcagcagaacccgcaccagctgtcgaaaccgcttaacagcctgacgtcgggtgataaaaaggccgtcacgctgctggcggacgatcagctggaaccgctgctggataaactgagcggctatgcgaaaccggatgagcgcattctggtcctggcgcgttatcatcacctcaagccgacggcgctggaaaaagcggcgacgcgctggccaaaacttcagctcgattttatgaccattcacgccagtaaagggcagcaggccgactacgtgattgtggtggggctaaaagaggggagcgacggtttcccggcaccagcgcgggaatccgtgatggaagaggcgttattacctgttccggaagatttcccggatgcagaggagcggcgcttactgtacgtggcgataacccgcgcgcgccatcgcgtgtggctcttgttcaacaaagaggagccgtcggtgtttgtcgatattttgaagagtattgacgtgccggtggcgagaaagccgtaa

SEQ ID NO: 165407 - DNA, 459 bp, Enterobacter cloacae; identical to SEQ ID NO: 114970

SEQ ID NO: 165408 - DNA, 663 bp, Enterobacter cloacae
atgaaaaccggcattgcctgggctatggttgcgttaatcatgccggtttgtgttttcgcaaccaccctcagactctcaaccgacattgacctgctggtgctggacgggaaaaaagtctccagctccctgctgcggggtgcagacagtatcgagctggataacggcccgcaccaggtggtttttcgggtggaaaagaccattcgcctcgccgacaacgaacagcaggtgtacatttcgcctccgctggtggtcagctttaatacccagcgtatcagccaggtcaattttcgtctcccgcgccttgagacagaaaaggagtcactggcatttgatgcctcgccgcgcattgaactggtggacggggactccatgcccatcccggtaaaactggatattctggcgctgacaaaaaggccaaagggaacagactatgaagcggacaccgagacctacaacagggccagcgggcgcgcctcgctgccccagttcgccaccatgatggcggatgacagtaccctgctttcgggcgtatcggagctggatgtactcccccctcagtcgcagacccttactgagcaacgcctcaagttctggttccagaatgccgatccggacacgcgcgcccgttttctgcaatgggcgaagcaacaaccttcgtcgtaa

SEQ ID NO: 165409 - DNA, 414 bp, Enterobacter cloacae
atgaaagagaacgacattgtcgaaattctgacgtccacgcgcactattgcgctggtcggcgcgagcgataaaccggatcgcccaagctatcgggtcatgaaataccttctggatcagggttatcacgtgatcccggtctcgccgaaggtggcggggaaaacgctgctgggccagcagggctatgcgacgctcgcggacgtgccggaaaaggtggatatggtggacgtttttcgcaattcagaggcggcctggggcgtggcgcaggaggcgattgccatcggcgcgaaaacgctgtggatgcagctgggcgtgattaatgagcaggcggccgtgctggcgcgcgatgccgggctgaaggtggtgatggatcgctgtccggcaatcgatattccccgtctggggctggcaaaataa

SEQ ID NO: 165410 - DNA, 318 bp, Enterobacter cloacae; identical to SEQ ID NO: 114967

SEQ ID NO: 165411 - DNA, 1191 bp, Enterobacter cloacae
atgagtgtacgtttagtgttagccaaagggcgcgagaagtcattactgcgccgtcatccctgggtcttttccggcgcggttgcccgcatggaaggtaaagccagcctcggtgaaaccatcgatattgttgaccatcaggggaaatggttagcacgcggcgcatactcgccagcatctcagatccgcgcgcgcgtctggacgttcgataaagaagaaaccatcgatatcgacttctttgtccgtcgtttgcaacaggcgcagcagtggcgcgagtggctggcaaagcgtgacgggctggacagctatcgtctgattgccggagagtccgacgggctgccgggcgtgaccattgaccgcttcggcaatttcctggtgttgcagctgctgagcgccggggcggaataccagcgtgccgcgctgattagcgccttgcaaaccctgttcccggaatgtgccatttacgaccgcagcgacgtggcggtacgtaaaaaagagggcatggagctgacgcaaggcccggtcaccggcgaactgccgcctgccctgctgcctatcgaagagcatggcatgaagctgctggtggatatccagggcggccataagaccggttattacctcgaccagcgtgacagccgtctggcaacgcgccagtacgttgccgataaacgcgtgctgaactgcttctcttataccggcggctttgcggtctctgccctgatgggcggctgtgctcaggtggtgagcgtcgacacctcacaggaagcgctggacgtggcgaagcagaacgttgagctgaataagctggatctgagcaaagcggagtttgtgcgcgacgacgtattcaaactgctgcgtaaataccgcgaccagggcgagaaatttgacgtaatcgtgatggacccgccgaagtttgttgaaaacaaaagccagctgatgggcgcctgccgtggctataaagacatcaacatgctggcgatccagctgctgaacccgggcggcgtgctgctgacgttctcctgctctggcctgatgacgacagatttattccaaaaaatcatcgccgatgccgcaatagatgcgggtcgtgatgtacaatttatagagcagttccgtcaggccgccgatcacccggtgatcgctacctacccggaagggctgtatctgaaagggtttgcctgtcgcgtcatgtaa

SEQ ID NO: 165412 - DNA, 282 bp, Enterobacter cloacae
atgtcaaatgtttgcaccattgcctgggttcatggccttgtacagggcgtcggattccgctacagcacccagcgcgaagcccttcagctcgggctgacagggtatgcgcgtaacatggatgatggcagcgtggaggttgtggcctgcggtgaggcggatcgggttgagaagctggtggcgtggctgaaagcgggcggaccgcgcagcgcgcgggttgataaggtgctaacggaaccgcatcaacccgaccgggaatacgctaacttcagtattcgctattaa

SEQ ID NO: 165413 - DNA, 336 bp, Enterobacter cloacae
atgaatatgttgagttttgaaggcaaagagatcgaaaccgataacgacggttatctgaaagagagcagccagtggagcgaagcgctggcggagaaaattgcggaaaacgaaggaattatcctctccccggaacactgggaagtggtgcgcttcgtgcgagaattttaccttgaattcaacacctcgccggctatccgcatgctggtcaaagccatggcgaataaatttggcgaagagaaaggcaacagccgttatctgtatcgcctgtttccgaaaggcccggctaaacaggcgacaaaaatcgccggcctgccaaagccggtaaaatgcatttaa

SEQ ID NO: 165414 - DNA, 660 bp, Enterobacter cloacae
atggatcgtataattacttcttcacgcgaccgcacatcgctactcagcacccataaggtgctgcgcaatacctatttcatgctcagcctgacgctggcgttttcggcgattaccgcgacggccagcaccgtactgatgctgccttctccgggcctgatcctcacgctggtaggtatgtacggtctgatgttcctgacctacaaaaccgcggataaaccggtgggtattctctccgcgttcgcctttaccggcttcctgggctacattctggggccaatcctgaatgcctatctgtctgccggaatgggcgacgtgattggtatggcgctgggcggtaccgcgctggtgttcttctgctgctcggcctacgtgctgaccacccgtaaggacatgtccttccttggcggtatgctgatggcaggtatcgtgattgtgctggtcggtatgctggcgaacatcttcctgcaattgcctgcgctgcatctggcaatcagcgcggtgtttatcctgatttcatccggcgcaatcctgtatgaaaccagcaacatcattcacggcggtgagacgaactatatccgcgccaccgtgagcctgtatgtgtcgctgtacaacatttttgtcagcctgctgagcatcctgggcttcgccagccgcgattaa

SEQ ID NO: 165415 - DNA, 1629 bp, Enterobacter cloacae
atgaaaccacaaacacgcacgcactttacactctctttgttaaccgcagggatcctgtgcgccagcacggcaacctgggcggctaacgtgccggcaggaacccagctggcagataagcaggaactggtcaggaacaacggcagtgaacccgcctcgctcgacccgcataaagtcgaaagcgatgtcgaattcaatattatcagcgatttattcgacgggctggtcagcgtctctccggcaggtgaaatccagccgcgcctggcggagaaatgggaaaataaagacaacaccgtctggacgttccatctgcgtccgggcattacctggagcgatggaacccccatcaccgcggaagatattgtctggagctggcagcggctggtcgacccgaaaaccgcctctccgtatgccagctatcccggtagtatgcgtatcgtcaacggcactgatatcgcagaaggcaaaaaagcgcccgagtcgctgggggtgaaagccatcaatgacaccacgctggaagttacgctcacgcaacctaacgccgctttcctggcgatgctggctcacccgtctctggtgccaattgataaagtcctggtaggccgtttcggtgataagtggaccaaaccggagcacttcgtcagcagcggggcctataaactgtcacagtgggtggttaacgaacgcattgtggcggtgcgtaacccgaaatattgggataacgaacataccgtcatcaacaaggtgacctatctgcccatttcctctgaagctgctgacgtcaaccgctacaaagcgggcgaaatcgacattgtttacacggtgccgatcaaccagtttgctcagctgaagaaaacgctggggagcgagctggacgtttcaccgcagcttgccacctattattatcagttcaacaccacccggccgccgttcaacgacgcccgcgtgcgcaaggcgctgaacctggcgctggataaagacatcatcgccgggaaagtattagggcagggccagcgcccggcatggctgatcagccagccggatattggcggcgtcaagctccagaacccggattacgccagctggccgatggataaacgcattgccgaggcgaaaaagctgctggccgaagccggatttaacgacagccatccgctcagctttaatctcctctataacacctcggaatcgcaccagcgtattgccattgccgccagctcaatgtggaagaagaacctcggcgtggaggcgaagctgcaaaatcaggagtggaaaaccatgcttgataccatgcacacccataactttgacgcggtacgctacgcctggattgccgattacgacgatgcggcaaccttcctgaacaacttccgtaccggggacagccaaaacaccactcagtacagcaatccggactacgatcgggcactggtgaacgcggcgaaatcgaaaacggcggaggagcgcggtaaattctaccagcaggcagaagatctgctgggacgggatgtaccggcgatcccggtctatcattacgtgcgcacgcacctggtgaaaccgtgggtagggggcttcacgccagacaagctcgggtactactacaccaaagatatgtacatcaaaaagcactaa

SEQ ID NO: 165416 - DNA, 762 bp, Enterobacter cloacae
atgaatattaccgtggccgggttgaccgtaacccgacaagcgcagacggtgcttaaggatatcgatctcgacctgccatccgggcagattatcggcctgttagggccaaacggctcgggcaagtcgacgctgctgcgctgtctcgccgggctgtttccacgactcagcgaacgcgtggcgcttaatggcacaacgctcggcatgatgccgctgaaaaaacgcgcgcagcacatggcgtttgtcccgcaacatgctgaggtcgacggagaactgaccgttgaggacattgtcagactggggcgtacgccctaccggaaaacattccagaaaacctcgcgcgacaatgaggctgcggttgagcaggcgattggcctgatgcagttatgccgcttacgccagcggcgatggcactctttgtctggcggagagcgccagcgaagccagatagcccgcgcgctggcccagcagccgcaggtgctgttgctcgatgaaccgacaaaccacctggacattcagcaccagctggagctgatgcggctcgtttcacagctgccgcttacggtggtggttgcactgcacgatctcaatcttgcggccaattattgccagcgtctgatcctcctgaaggccgggcagatcgccgccacgggcgcgccagaaacggttctgacgccggcaaacatcgaggacacctggtgcgtaaaagctcaggtctgcaaggccgacgccgggatcacgataagctataacatggtggcatga

SEQ ID NO: 165417 - DNA, 1032 bp, Enterobacter cloacae
atgagtcatttcgcttttgaccgccgccagcagggtttactggcagcaggtgccatggcgctgccgctgatgctggtctttgccgccagtatcggtgatatgccggtgtcgtatgccagtaccgggaaagcgatcctcaacggactgggtttgacctcttatgcgttgccgcaaacggaggaaggtatcgtctggcaatatcgcatgagccgggcagtaatggccgcgtgcaacggcggcggcctggcgttgtgcgggctggtgttacagtcgatcctgcgtaaccctctggctgagccttatctgctggggatttccgcgggcgcatcgctgggggccgtctgcgtgatgcttctcggcatcggggggagcgtgattggcgtaagcagcggtgcgtttgtcggctcgtgcgccgcctttgcgctcatcatggtgattacgaacgggatgagtgaaagcccgtcgcgcattttgctggctggcattgcgggcacccagctcttcaacgccatgaccgcgtacgtcgtcagtacgtccgccaatgccgagcagtcccgtagcgtcatgttctggctgctgggaagtctgagcggcgtgcgctggcctgacgcgctgctggcgctggccgttacgcttgcgggtttactggtggtattgctcttttcacgggcgctggacaccttcaccttcggggatgaggtctccaccacgctggggatcccggttaccgccgtgcgtattgtcttattgctgacctgtgccattgttaccgcaacgctggtgagcgccacgggcgcagtggggtttgtcgggctggtcattccccatgtaacgcgcatgctatgtgggccgggccatcgtctatctatcccgctgacgtttcttatcggcgcccactttatgatcctcgccgatatcgtctcacgcacgctgattgtgcaccaggttctgcccatcggggtggtgactgcgctggtgggcgcccccgtctttgtggcgttgctttatcaaaaccgaaaggagcatccatga

SEQ ID NO: 165418 - DNA, 1008 bp, Enterobacter cloacae
atgttacttaaaaatgggttatttctggcttcactgctctccatggcgcctgccgctttcgccgcaaccacctggcccctcacgattgaaaattgcggcgttaagcagacctttacgcaggctcctcagcgcgtcgtgaccgtgggtcagcatgaaacagaattactgctcgcactggggctggagaaaacgatcgccgcgacgtcagtctggttcggcaagctcccggccccgctggaggatgccgggaaaaacctccccaggcttgcggataattccccctcctttgaggccgtggtagggcagaaacctgaactcgttctcgcacagtatcactggcacattggtccgcagggagaagtgggaacccgtgagcagtttgcgtcgctggggattaatacgtggatctcccctgccgactgcacggataaaacggtaacggaaacctcaaacgcagacggagcacgtagcgcgccgttttcactggcggaaattacacgggaagtgaaagatctggcgacgatttttgatgtttccgcgcgaggtgagcagctcaatcgtgcgctggcggagcgtattaaaaaggcccaggcgcgcgcctccgcgaaaccgcttagcgttgtattctggttctccagcagccgtctgaatggcgatccctgggtggccgggaattacggcgcgcctggctggatcagccgcacgctggggttgaagaacattattgactctcacgacgaatggcccgctgtaacatgggaacatatagcccgatcgcagccggacgtgattgttatcgccgggatgtcccgcaggctctaccctgccgatgacgttgaggtaaaaaaagcgttcttgcgcagtgacccggtgacaaagaacatgcctgcggtcaggaacaaccacatcatcgtggtgccagcgatgtcgttaaacccttcattgcgtaacgtcgatgcggttgagcttatcagcgatcggctggcttctttccaggatgaacaatga

SEQ ID NO: 165419 - DNA, 1614 bp, Enterobacter cloacae
atgaaaaagatcctgctcgcgtttgcgttctgttttgccgccctgagcggcttctcatcgtatgccgcagagccccgccaggcgcctacggagcaggagcgcgcccgtacggtctatatctttcatcagcccatcgtcatgctacaggcgaaatttggcctgaccacgccggaagagcgcgttttacgcatccgcaacaccctgcgcaattttaccgaggcggatgtgcgtgagccgctcagcatcgtccccgtgacccgctataaccagcagggacggctgatagtgatgaacggtaaacctgtgatgctgctgaccgaaggggatttggacgaaggggacgatcttaccctcgatcaggccgcacagcgcgtgctggcgcgcatggaagcgcagagaatggcgctgcgcgatcaatacgataccggctggctggcgctgtctacggtaaaaactgccgctggcctgctggggctgttgctgctctgctatggcgcgtggcgttcctggcgctggttccggcgcgtctaccgtcggcgtattgtggagaatcgcagccgggtgccgcaaagctggcggcggtacattggcgctattgagattcggctttacgccttgctgatgttcctgttggggtttatcggcttttacgtctggctgagctgggcattcagtctatttccgtggacgcgggtgtggggcacgtcgctgggagactggacgcttcgcgtggtgcagcaaatcgccctggcgattgtctcggccttgccggggctgacgattgtgctgatcattttcctcattaccgcttttattctgaagcttctcaggatggtgctcaatcaggtggaggctggtcgtctgcaacttcccggcgtacatccggaaaccgtgggggctacccgtaagctcatttccgttgccgtctggctatttgctctctccgccgcctggccgtttcttcccggtgcaaactcgctggcgtttaaaggtattagcgtcttctttggcctgatgttaacgctgggctcggcaggggtgatgaaccatgccatgagcggtctggtcctgatttactcccgcgctctgcgcaaaggcgatgtcattcgggtggcggataacgaaggcaaggtcagtgaaattggcatgctggcgaccaaaattattacccgggaaaattatgtcgttaccgtgcccaacgcggtggtggtgagcggtaagatcaccaatctgagcgcgctacagcccgatggcagcctcaatctgacggtcagcgtcacgatcggttatgacaccccatggcgtcaggtgcatgccatgctggagctggccgcgaaacgggcaaaagggattgacctttccgagccgccgctggtacgccagttagggttaatggactggtatatcgcttacgaattgcaggtccgtctgctgcccgaacagtcactcgcggttgcccgcaatgaactgcatagccagatacaggatgtgtttaacgaatttaacgtgcagatcatgtccccgaattttgttatgcagccagagggcagcgtaatggttgccaaagagaactggtataccgcgccagccaaaccccctcagggcgaaacgtga

SEQ ID NO: 165420 - DNA, 519 bp, Enterobacter cloacae
atgaattttttatttatcagtgataactattacctttgccatggtgtatcaagctccctgacatcaacccatttgattcgcgatgacgcggatattcacgatcttgatggggtcgatcaggcgatggattttatcattgcgattgaacaggataagttacgcaataaaaccattcggcaggtcaaaaaagttaagcgtgattacattgtcctgatgcatgagatagaagccaaccgcgcagtgagaatcgataatattatctattcgtcgatgcattttactgctcacccttttcagcagctgatgcgcttttaccgggcgctcagaacacactcctttacgcgacgcgaatatgacgtgctgaagctgtttcatttggaaaaccatgagatcgcgaaaaagctgcaattgtcacaaaaaacgaccagcacctaccgcgtgaggatcctcgagaaattaaatatgcgctcaaaaaacattctggcgatgacccgtgtaaaatcggcgatcgtcgattaa

SEQ ID NO: 165421 - DNA, 1002 bp, Enterobacter cloacae
atgtcttacgctattcacaaccaaaacctggcttttaatgacagcgccatcgcgcaatatatgaataccgattttatcgttatcgatatttcattatgcgtagctctggcacgcgagcagttctttgaaaaattaaaagatgatgatattccgtcgcatatttttatcgaagataacggtcgcctcgcgggtttaatcgccgtacgcaaattattgcaggccacggacaccgtgcagcctgttaaggggttgatgatatcggattttattcagctcaaaccggaagatgagcgggcggatgtcgccgggctgctggcgcacgcgggtgcggatgtagtgccggtggtgacccacggcaagctggtgggctgccttaccgagcgtgaaatcgcccatctgctggaagatgacgttactgaagatgcccagcttcagggggcgacgctgccgctggagaagccctatctggaaaccagcgccttcagcctgtggaagaaacgctccgtctggctgctgctgctgtttgttgcggaagcgtataccagttcggtgatccagcattttgaagaggcgctggaatctgccatcgcgctggcgttctttattccgctgctgattggcaccggcggaaacagcgggacgcagatcacctcgacgctggtgcgcgccatggcgctgggtgaagtccaccttcgcgatgtgggtcgcgtgctgcgcaaagagatcagcacctcgttaatgattgccgccacgctgggtctggcgggctgcgttcgcgcctggatgatgggtattgggatggaaatcacgctcatcgtcagcctgacgctggtctgcattacgctgtggagcgccatcgtctcgtcggtgatcccgatggtactgaaacgctgcaaaatcgatccggcggtggtctccgcaccgtttatcgccacgctaatcgacgggaccgggctgattatctacttcaaaatcgcgcagtatacgctggggctggaataa

SEQ ID NO: 165422 - DNA, 504 bp, Enterobacter cloacae
atgacatggtttgataacctgctgaatcattttgcgctgtatccggcacatctgtttgtgctgttattcgtgatggcgctgagcaaatcgacggtgctgatctcctccgtgctgccgcccgcgtcggtgatgctgctggcgggcattaccgtcagccaggggagcatgcatcctgcgctgacgtggctcgccgtggtgatgggggcaacggcgggttcggtgctgaattaccatatcggccaactgatggggcatacccggatggtcacgcgcttcacctcaaagcatgccaataagttcctgcgggtccagcatcagctgcaaaagaacggggtcatcgtgctttttacgtcgcgcttcctggctgtgttgcgttacatcgtcccgctggcggccgggatgctcaggctgaacgccgtcaaggtctacgccgtcagcctgctttccgcctgtgcgtgggcggcgctgtatgtcggcgcggtcaccggcatcagcgccttttga

SEQ ID NO: 165423 - DNA, 750 bp, Enterobacter cloacae
atgggtcgtttaaccgataagtatacgttgattaccggcggcaccagcggtatcggtctcgccaccgcgcaggcgtttatcgccgaaggggcgcgcgtcgccgtgaccggacgcaacccggataccctcgccgaagcagagcgcattctgggcgataaggcctgggtgatcccaaccgacgcaggcgatatttcgtcgcaaaaagcgctggcggagaccctcaccgcccgctggccacgcctggatgcggtctttctcaacgccggtgacgtaacgcacgcgccgctggaagtctggcaggaagaggcctgggaccgtctgatgaacatcaacctgaagggaccgttctttttaattcaggcgctgctgccgctgctgaataacccatcctcggtgatcctctgcggctccgtgagcgcgcgcatcggcctgcccaccagtagcgcgtatgccgcgagcaaggccgccgtgctgtcgctggcgcgtacactgtcggcggagctgctgccgcgcgggatccgcgtcaacggtctgagtcccggtccggtggaaaccccggcgtttacgaaaacgggcttaagcgacgaggcgcttaacgcgatgatggcagaggtcattaagctggtgccgctgggcagaatgggctcgacgaccgagctggcaaaagccgcactctatctggcctccgacgagtcgagctacacggtaggaacggaactgctggtggacggcggaatggggagcctgtaa

SEQ ID NO: 165424 - DNA, 360 bp, Enterobacter cloacae
atggcagagctgctggaagcgtgctgcgaaaaaaaatctgaggcgtatacctgcccgatgacgcagtttgtgaatctgatttccggtaagtgggcgatccccattctctatcgcctgattgtgttcaatacgcccgttcgctttggcgatctgctgcgggccgctgcccccatcacccagaaagagctgacgaagcagctgcgcctgtttgagcagcgcgggctggtgacgcgaacggtctacccggagatcccgccgcgcgtggagtatcagatcaccgagctggggctaacccttcaggacgcactctcgccgctggccgcctggatgagcgaatacggcgaccagcttcagcgttag

SEQ ID NO: 165425 - DNA, 165 bp, Enterobacter cloacae; identical to SEQ ID NO: 114952

SEQ ID NO: 165426 - DNA, 1242 bp, Enterobacter cloacae
atgagaaaagcactactcgcagttgccgtggcaggtaccctttccgtgacctttggcgcacaggcgcaggacacgccggacggctatcagctggaacaggtgctcatcatgagccgccacaacctgcgcgcgccgcttgccaataacggcagcgtgctggagcagtccacgccgaagcagtggccggagtgggacgtcccgggtggacagctcaccaccaaaggtggcgtactggaagtgtatatgggtcactatatgcgcgagtggctggcagagcaggggatggtgaagacgggtgaatgcccgccagcggatgccgtctatgcctacgccaacagcctccagcgcaccgtggcgaccgcgcagttctttatcaccggcgcgttcccggggtgcgatgttcctgtgcatcaccaggaaaaaatgggcaccatggaccccaccttcaatccggtcattaccgataactcccctgagtttcgtgagaaagcgctgaaagcgatggagacggaacggcagaaaatgcagctggatgaaagctacaaactgctggaacagctgacaaactacagcgactcgccgtcctgcaaggagaaaaaagtctgctccctgacggaggcgaaagatacgttcagcgccgattatgaaaaagagccgggcgtctccgggccgctgaaggtgggtaactcgctggtggatgcgttcacgcttcagtattacgaaggcttcccgacagtccaggtggcctggggggaaatcaaaaccgatcagcagtggcgcgtactgtcgaagctgaaaaacggctatcaggactcgctgtttacgtcgacggaggtggcgcagaacgtggctaaaccgctggtgaagtacattgataaagcgctggtgaccgaccaggcaaaagcgccaaaaatcaccctgctggtggggcacgactccaacatcgcctcgctgctgaccgcgctggacttcaggccttaccagttgcacgaccagcaggaacgcaccccgattggcggtaaaattgtcttccagcgctggcgtgacaaaaacactaatcaggaactgatgaaaattgagtatgtctaccagagttcagatcagctgcgtaacgccagcgtactgtcgctgcaatcccctgcgcagcgcgtgacgctggagctgaagggctgtccggtggatggcaacggcttctgtcctgtcgataaattcaatgcggtgatgaacaacgcggcgaaatag

SEQ ID NO: 165427 - DNA, 228 bp, Enterobacter cloacae
atgccaactcaagaatccaaagctcaccacgtgggcgaatgggcaagtttacgcaatacctctccggagattgccgaagccatctttgaagtcgccaattatgacgaaaagctggctgagcagatttgggaagaaggcaacgatgaagtgctggttcgcgccttcgaaaaaaccgacaaagactcgctgttctggggcgagcaaaccatcgaacgtaaaaacgtctga

SEQ ID NO: 165428 - DNA, 597 bp, Enterobacter cloacae
atggcaaaagttctggtgctctattattccatgtatggacacattgaaaccatggctcacgcagtagcagaaggcgcaaacagagtagacggcgttgaggtcgtggttaaacgcgtaccggaaaccatgcaggcggaagccttcgccaaagccggggggaaaacacaaaacgccccggtcgccaccccgcaggagctcgcggactatgatgccattatcttcggcaccccgacccgcttcggcaatatgtccggccagatgcgcaccttcctcgaccagacgggcgggctctgggcctccggcgcgttatacggcaagctggccagcgtgttcagctctaccggcacgggcggcggccaggagcagacgatcacctccacctggactacccttgcccatcatgggatggtgattgtgccgattggctacggcgcgcaggaactgttcgatgtttcccaggttcgtggcgggacaccgtatggcgcgacaaccattgccggtggggatggttctcgtcagccaagcaatgaagaactttcaatcgcccgctatcagggtgaatacgtcgcgggtcttgccaaaaaactgaacggctaa

SEQ ID NO: 165429 - DNA, 171 bp, Enterobacter cloacae
atggcaaaccatcgtggtggttcaggtaatttcgctgaagaccgtgaaagagcatcagaagcaggtcgtaaaggtggccagtctagcgggggcaacttcaaaaacgaccctcagcgcgcatcagaggctggtaaaaaagggggtaaaaatagccacggcagcaacaagtag

SEQ ID NO: 165430 - DNA, 921 bp, Enterobacter cloacae
atgtccgtttcccgttttaccttctccattaagcctcaggaagcgatcctgattttgatcaccatgttctggggcggaacctttcttgccgttcagtacgcggtcacgatgagcgatccgtttttctttgtagggctgcgctttgcaaccgcggcgattgccgtggcgcttatttcgctgaaaaccctgcgcgggttgaccctgagagagcttaaggcgggtgtcgccattggtgtggcgattgccatgggctacagcctgcaaacgtgggggctccagtctatctccagcagtaaatccgccttcatcaccgccatgtacgtaccgctggtgccgctgttgcagtggttgtgcctcggcagaatgccgggcttgatgtcgtgcattggcatcgtgctggcgttcatcggccttattttattagccgggccggaaaataatctgctggcgctggggccgggggagatcatcactctggtgggggccgtcgccattgcggcagaaattatcctgattagcgcctgggcaggaaaagtggacgtcaagcgggtgacggtggtgcagcttaccaccgcgtcgctggtggcgttcgcgacgatggtgccggcaggggagtccgtcccgccgatgtctaccgggcttatcgtcgtggcgctggggctgggcattttcagcgccattatccaggtcaccatgaactgggcgcagcgcagcgtatccccaactcgggcgacggtcatttataccggtgaaccggtatgggcgggtattttcgggcgactcgccggggaacgtctgcccctgctggcgctggtgggcgcggcgtttattatcgccggggtgctggtgagcgagttgaagttaaaaaaacgacgtaaggcgactgccggattgagcgctgaacaaggggcagatagctaa

SEQ ID NO: 165431 - DNA, 492 bp, Enterobacter cloacae
atgacaccggataaacaaacctttcgcgacgctatggcctgcgtcggcgcagcggtcaatatcattaccaccgacggcccggcaggcctggcgggcttcaccgccagcgcggtatgcagcgtcacggattccccgcctaccctgctggtgtgcctgaaccgcggcgcgtcggtctggccgattttcagcgagaaccgcaccctgtgcgttaacacgctgagtgccggacaggagcctttatccaacctgtttggcgggaaaacgccgatggcggaccgctttgccgctgcccgctggcagacaggcgacacgggctgcccgcgtctggaaaatgcgctggcctcgttcgactgccgcatcagccaggtggtgagcgttggcactcacgacattctgttttgcgacattgtatccatcgtacgccacccggcgccgcaagggctggtgtggtttgaccgcggctatcacgcacttatgcgacccgcctgttaa

SEQ ID NO: 165432 - DNA, 591 bp, Enterobacter cloacae
atgagcgaagccatcacgcccgccgcgctggaaacgctgtttaccggcgcacgtacccataacggctggctggatataccggtcagtgacgagacgctgcgcgagatttatgacctgatgaaatgggggccgacgtccgccaactgctccccggcgcgcattgtgtttgtgcgaagcccggaaggaaaagagaagctgcgcccggcgctctccagcggcaaccttgagaaaacgctcactgccccggtcacggcgattgtcgcctgggacagcgagttttatgagcgcctgcctgaactgttcccacacggcgatgccagaagctggtttacctccagccccgcgctggcggaagagaccgcctttcgcaacagctcaatgcaggccgcgtacctgattttcgcctgccgcgcgctcgggctggacaccgggccgatgtcgggttttgaccgggaaaaagtggacgcggcctttttcacgggcacgctactcaaaagcaatctgctgattaacatcggctatggcgatacgaccaaactttacggacgcctgccgcgtctggcctttgacgatgcctgcgggctggcgtaa

SEQ ID NO: 165433 - DNA, 801 bp, Enterobacter cloacae
atgaaactgtccatttcaccgcccccctttgcgggcgcgcccgtggtggtactgattgccgggctcggcggcagcggcagctactggctgccccagctcgccgtgctggggcaggagtatcaggtggtgtgctacgaccagcggggcacggggaataacccggataccctgccggaagactacaccctcgcacacatagccgacgagctcgcgctggcgttagccgaggccgggatcgcccgttactgcgtggtcggtcacgcgctgggggcgctggtcggcctgcggctggctatcgataagcccgacgccctcaccgcgctggtctgcgtcaacggctggctgaccctcaatgcccatacccgccgctgttttgacgttcgcgaacgcctgctgcatgcgggcggcgcgcaggcgtgggtagaagcacagccgctgttcctctacccggcagactggatggccgcccgcgccccgcggcttgaggccgaggaggcgctggcgctggcccattttcagggcaaagccaatctgctgcgcaggctgcatgccctgaagcaggccgattttagccgccacgctgcacgcgttcgctgccccgtgcagattatctgttccaccgacgatctgctggtgccgtccgtctgctccgctgaactgcacgccgccctcccgcacgcccgcaaaacggtcatgcgccagggcgggcatgcctgcaacgtgaccgcgccggacacctttaacactctgctgctgaacgggcttgccagcctgctgcacagcccagaacccgctttgtaa

SEQ ID NO: 165434 - DNA, 387 bp, Enterobacter cloacae
atgccgaaatccgtgattattccgccgggcaccagcaccccgattgccccgtttgtccccggcaccctcgccgacggcgtggtgtatgtctcgggcacgctgccgtttgataaagacaacaacgtggtgtttatcgatgacccaaaggcgcaaacccgccacgtgctggagacaatcaaaaccgtgatcgaaacggcgggtgggacgatggaggacgtgaccttcaacagcatctttatcaccgactggaaaaactacgccgcgattaacgagatttacgcggagtttttccccggcgataaaccggcgcggttttgcatccagtgcgggctggtaaagcccgaagcgctggttgaaattgccaccgttgcgcacatcgcgaagtga

SEQ ID NO: 165435 - DNA, 690 bp, Enterobacter cloacae
atgacgaccctcaacgctcgcccggaagccattaccttagacgcgcagcgcagcgcgctgatcgtggtggatatgcaaaacgcctatgccagtaaaggcgggtatctggatctggccgggtttgacgtctccaccacgcagccggtgattgagaacatcaaaaccgccgtgagcgccgcgcgtgctgcgggcatgctgatcgtctggttccagaacggctgggacgaccagtacgtcgaggctggcggtcccggctcacccaactttcacaaatccaacgccctgaaaaccatgcgccaacggcccgaactccagggcacgctgctggcgaaaggcggctgggattatcagctggtggatgagctggtaccggaacccggcgatatcgtgctgccgaaaccgcgctacagcggctttttcaataccccgctcgacagcctgctgcgcagccggggcattcgccatctggtctttacgggcattgccaccaacgtgtgcgtggagtcgaccctgcgcgacggctttttcctcgagtattttggggtggtgctggaggatgccacccatcaggccgggccggattttgcccagaaagccgccctgttcaatatcgaaaccttttttggctgggtcagtaacgtcaatgatttctgcgacgcgctggatcccccgctcgcccacatcgcctga

SEQ ID NO: 165436 - DNA, 1092 bp, Enterobacter cloacae
atgaaaattggcgtatttgtaccgatcggcaacaacggctggcttatctcgaccactgccccgcaatacatgccgacctttgagctgaataaagccatcgtgcagaaagcggagcactaccacttcgactttgcgctctcgatgatcaagctgcgcggtttcggcggtaagaccgaattctgggaccacaacctggagtctttcaccctgatggcgggcctggcggcggtaacctcgcgcatccagatttacgccaccgccgccacccttacccttcccccggcaatcgtggcgcggatggcctccaccatcgactccatctccggcgggcgctttggcgttaacctggtcaccggctggcaaaagccggagtacgagcagatggggatctggccgggggacgattacttctcccgtcgctacgactacctgactgaatatgtgcaggtgctgcgcgatctatggggcaccggcaaaagcgatttcaaaggcgacttcttcaccatgaacgactgccgcgtcagcccgcagccgtcggtgccgatgaaggtgatatgcgccggacagagcgacgcgggaatggaattctcggcgaaatacgccgacttcaacttctgcttcggcaaaggcgttaacaccccggccgccttcgcgcccaccgcggcacgcatgaaagcggccgccgacaaaaccgggcgcgacgtgggctcctacgtgctgtttatggtgattgccgacgaaaccgacgacgccgcgcgcgccaaatgggaacgatacaaggacggcgcggatgacgaagcgctgagctggcttaccgagcagagccagaaggatacccgctccggcgcggacaccaacgttcgccagatggccgacccgacgtctgccgtcaatatcaacatgggcactctggttggctcgtatgccagcgtggccagaatgctcgacgaagtggctgccgtgcccggcgccgaaggcgtgctgctgaccttcgatgattttctcaccggcgtggaaactttcggcgagcgcattcagccgctgatgcagtgccgcgcccacatccctgccgtgacgaaggaggtggcgtaa

SEQ ID NO: 165437 - DNA, 477 bp, Enterobacter cloacae
atgcgtactcataaacagaataagcctcgtaaactgtattgcagcgtcaacacgactacgcggcaccattctaataatccaggtgctgaatattgctgggaacgtaatcgtaaaagagtcggggatgaactactggccaagcgcgagtcaatacatggcggacagaagcatggccgagactacacatcattgttttattttctgatcaaaaagattggcaaatcgtggaatgaaatattcagcgaagtaagtggacgtcttgataccaccgagcctgtattctggttggtcgcgctacatgagcatcagcgaagggatttattctgcattggcgaaagcagtttttatccgggtctgtttgttgatgagaatggaattctgcaagaagtaaatacttcaatcacgataaaggatgttaaggtgacttgccgctgctgcacacacacacttatattggagaatctgtaccctggatag

SEQ ID NO: 165438 - DNA, 1008 bp, Enterobacter cloacae
atgtataaatgcctcaggttgccttttgacaaagtaaaaatcgacagaatgtgtgatgagaaaggtaacaatgcctcatacgtaagaatcacctacaatgagttctactattatttaagttactacgatctgagaccagtcacaccaaattttaattccattgaatgcatttccaaaaacagcgatctttatatcattgtatataaaatatcacctaatagctataggatatgctggctaggagattgcgattgcatcgagttcagaatgatggacactgaaagaaatcgtggtaaatctgcatctttagctgtattgcttggtctgattttatgtacactttctataggtgcgtattactcatctagcactgatatatttgtatgttatgtcccatttttattactaagtttgtttggttttatcctgacactccttaatttttgtcatacatactcagatgaattcattcaatttcgagatttgatgcgaaaaaaccttatgcaagaaaaagatttattttcctctgtgacaaacttatcaaaaagttgccagcataaacaagattacgagctaaacctaagattacctaaggaactcaaccgaagaatagttacaatagactctgtataccgggagagaagaaaagtaactgtatacgagcccaatactggttcagatttgtcttatagtacaagttatacaaaatgcatggtgaatatggtttgtgatggagaaaaatttacatttgagtataaggaggcttctggtgatccagctccatttattgcaaagggcgataaagccaaactatattggtatggaccggaacacgaagtaattcctagtgatcgcgaagatattacctatggaacacgacttatctgtttacataatataacaacggataacttttatgaaagtcgcatgtgtaatgaaccgggtaatgttttcaaactatcgcagaagggaggacgggatatttataaccactactcgcaatgttga

SEQ ID NO: 165439 - DNA, 138 bp, Enterobacter cloacae; identical to SEQ ID NO: 127222

SEQ ID NO: 165440 - DNA, 639 bp, Enterobacter cloacae
atgacacaaggcgcagtgaaaacacccggtaaacgttcgcaggcggtgagcgccaagaaacaggcgatcctcagcgctgcgctggagacattttcgcagtttggtattcacggcacgcgccttgagcaggtggccgagcaggccggggtgtccaaaaccaatctgctctactactacccgtcaaaagaggcgctctatatcgcggtgatgcagcagatcctcgatatctggctggcacctctcaaggcatttcgcgaagagctggccccgctggtggcgatagaggagtacatacgcctgaagctggaggtatcgcgtgattacccgcaggcatcaaggctgttctgcctggagatgttgcagggcgcgccgctgttgcaggcggagctgaccggcgatttaaagcagctggtggacgataaatcggccattattgccggatgggtcgccagcggaaaactggcgcccgtcgatccgcatcatctgatcttcatgatttgggcctcaacccagcactacgctgacttcgcggcccaggtcgaggcggtgaccggtaaaacgctccaggacgaggcgtttttccagagcaccctggaaaacgtacagcggatgattatcgaagggatccgcgtgcgctag

SEQ ID NO: 165441 - DNA, 396 bp, Enterobacter cloacae
atgaaaagagtatttctcgcaggtgcagccctgctcatgagcgccagcgcgctggccgacgagtgcgataacgcgaccacccagcttgaactgaacacctgtagcgcgcagcagtaccaggccgccgataaaaagctcaacgagacgtatcaggccgccatcaaacgtgcggcagcgcctcagcgcgatctcttgaaaaaggcgcagcaggcgtggattagcctgcgcgacgcggactgtgcgtttatcggttcgggtacggaaggcgggagcgttcagccaatgattgttaaccagtgtctggcggagaaaaccgcggagcgcgaagcgtttctggccacgctgatgcagtgtgaagagggcgacttaagctgtcctcttccgccgggaaactag

SEQ ID NO: 165442 - DNA, 3963 bp, Enterobacter cloacae
atggggatgaccaccatgggggttaagctggatgacgctacccgcgaacggattaaaaccgctgcgacccgcatcgaccgcacaccgcactggttaatcaagcaggcgatttttaactatctggaaagactggagagtgaagaaggtctgccggagctgcctgccctgctggcgggtgcagcgaacgaaagcgaagaggccgcgacggccgttgaagagaaccaccagccgttcctggaatttgccgagcagatcctgccgcagtccgtcagccgcgccgccattaccggcgcctaccgccgtgccgaaaccgacgccgtgccgatgctcctggagcaggcgcgcctgccggaagccgttgccgctcaggcgcacagcctcgcgtatcagctcgccgacaagctgcgtaaccagaaaaccgccagcggacgcgccggtatggtgcagggtctgttgcaggagttctccctctcctcgcaggaaggcgtggcgctgatgtgtctggcggaagcgctgctgcgtattccggataaagccacccgcgatgccctgatccgcgacaaaatcagtaacggcaactggcactcccacattggccgcagtccgtccctgttcgttaacgccgccacctggggcttgctgtttaccggcaagctggtctccacccataacgaagccaacctgtcgcgctctctgaaccgcatcatcggcaagagcggcgagccgctgatccgcaagggcgtggacatggcgatgcgcctgatgggcgagcagttcgtcaccggggaaaccattgccgaagcgctggcgaacgcccgcaagctggaagacaaaggcttccgctactcctacgacatgctgggtgaagcggctctgaccgccgccgacgcgcaggcctacatggtctcttaccagcaggcgatccacgccatcggtaaagcgtccaacggtcgcggtatttatgaaggtccgggcatctctatcaagctttccgccctgcacccgcgctacagccgtgcgcagtacgaccgggtgatggaagaactctacccgcgcctgaagtccctgaccctgctggcgcgccagtatgacatcggcatcaacatcgacgccgaagaggcggaccgtctggagatctccctcgacctgctggaaaaactgtgcttcgagccggagctggcgggctggaacgggattggtttcgttatccaggcctaccagaaacgctgtccgttcgtcattgactacctgattgacctggccagccgcagccgtcgccgcctgatgatccgtctggtgaagggcgcctactgggacagcgaaatcaaacgcgcccagatggaaggtctggaaggttatccggtctatacccgcaaggtctataccgacgtctcttacctcgcctgcgcgaaaaaactgctcggcgtgccgaacctgatttatccgcagttcgccacccacaacgcccacaccctggcggcgatctacagcctcgcgggtcagaactactatccgggccagtacgagttccagtgcctgcacggcatgggtgaaccgctgtacgagcaagtgaccggtaaagtggccgacggcaagctgaaccgtccgtgccgaatctatgccccggtaggtacccacgaaaccctgctggcctacctggtgcgtcgtctgctggagaacggggcgaacacctccttcgttaaccgcatcgccgataccaccctgccgctggacgaactggtggccgatccggtacaggccgttgagaagatggcggcgcaggaaggccaaattggtctgccgcatccgaagattgccctgccgcgcgagctgtatggtgcaggtcgcgtcaactcggcgggtctggatctcgccaacgaacaccgtctggcgtcgctctcttccgccctgcttaacagcgcattgcagaagtggcaggccaggccgatccttgagcagtccgttgaggacggtgaaatgcagccggtgatcaacccggcagagccgaaggatatcgtcggctacgtgcgcgaagccacggaagcggaagtggagcaggccctggagagcgcggtgaacaacgcgccaatctggtttgccaccccgccgcaggagcgtgccgccattctggaacgcgcggcggtgctgatggaagatcagatgcagcagcttatcggcattctggtgcgtgaagcgggtaaaaccttcagcaacgccatcgccgaagtgcgcgaggcggtcgacttcctgcactactacgccggtcaggtgcgcgatgatttcgacaacgaaacccaccgtccgctcggcccggtggtgtgtatcagcccgtggaacttcccgctggcgatcttcaccggccagattgccgcggcgctggccgcaggcaacagcgtgctggcgaaaccggcagagcagaccccgctgattgccgcccagggcattagcattctgctggaagcgggcgtaccggcgggcgtggtgcagctgctgccagggcgcggtgaaacggtcggggccaaactgacctccgataaccgcgtacgcggcgtgatgtttaccggttctaccgaagtggcctccctgctacaacgcaacatcgccacccgtctggatgcgcagggccgtcctaccccgctgatcgctgaaaccggcggcatgaacgccatgatcgtggactcctccgcgctcaccgagcaggtcgtcgttgacgtgctggcctctgccttcgacagcgcgggccaacgctgttccgctctacgcgtactgtgcttacaggatgacgtggctgaccacacgctgaagatgctgcgcggtgcgatggcggaatgccgcatgggcaacccgggccgtctcaccaccgacatcgggccggtgatcgacgcggaagccaaagccaacattgaaaatcacattcagaccatgcgtgccaaaggccgtccggtgttccaggcggtgcgcgagaacagcgaagatgcccgcgagtggcagaccggcaccttcgtgccgccaacactgattgagctggcaagcttcgacgagctgaaaaaagaggtcttcggcccggtactgcacgtggtgcgctacaaccgtaacaacctcaacgagctgatcgatcagatcaacgcctcgggttacggcctgacgcttggcgtgcatacccgtatcgacgaaaccattgcccaggtgaccggcaatgctaaagtcggcaacctgtacgtcaaccgcaacatggttggcgcggtcgtgggcgtgcagccgttcggcggtgaaggtctctccggcaccggcccgaaagcgggcggtccgctctatctgtaccgcctgctggcaaaccgtccggaaaatgcgctgggcgtgacgctggcgcgtcaggacgcggaatatccggtggatgcgcaggtgaaagccgtgctgacccagccgctggacgcgctgattaagtgggctgaaaatcgtcccgagctgcatgcgattgcacagcagtacggcgagctggcgcaggcgggaacacagcgtctgctgccgggtccaaccggtgagcgcaacacctggacgctgatgccgcgcgagcgtgtgctgtgcgtggcggataacgaggaggatgcgctggtgcagctggcagccgcaacggcaacgggctgtgaggtgctgtggccggaagatgccctgcatcgagacctcgccaaacagttgccaaaagcggtctcggcccgcattcgctttgcgaaggccgatgccctgctgacccagccgtttgacgcggtgatctaccacggtgattccgaccagttgcgcgaactgtgcgagcaggtggcggcccgcagcggcgcgattgtctcggtgcagggcttcgcccgcggggagaccaacctgctgctggagcgcctgtacgttgagcgctcgctcagcgtcaacaccgcggcggcgggcggtaacgccagcctgatgacaatcggttaa

SEQ ID NO: 165443 - DNA, 1509 bp, Enterobacter cloacae
atggctattagcacaccgatgctggtgacatttctcgtttatatttttggcatgatcctgatagggtttttggcatggcgttccactaaaaactttgacgactacatcctcggcgggcgcagcttaggcccgatggtcaccgcactctctgcgggcgcttccgacatgagcggctggctgctgatggggctgccgggcgcgattttcatctccggtatctccgaaagctggatcgccatcggcctgaccgttggcgcgtggatcaactggaagctggtggcaggccgtctgcgcgtgcacaccgaagccaacaacaacgccctgacgctgccggactacttcaccggacgctttgaagataacagccgtatcctgcgcattatctccgcggtggtgatcctgctgttcttcaccatctactgtgcctccggcatcgtggcgggcgcgcgcctgttcgaaagcaccttcggcatgagctatgaaaccgccctgtgggccggcgccgcagcaaccatcctctataccttcgtgggcggattcctggcggtaagctggaccgataccgtgcaggcgagcctgatgatcttcgccctgatcctgactccggtgattgtcattttcaccgtcggcggctttggcgaatcgctggaagtgatcaagcagaagagcatcgaaaacgtcgatatgctgaaagggttgaacttcgtcgccatcgtctctctgatgggctggggcctgggctacttcggccagccgcacattctggcgcgcttcatggcggcggattctcaccacaccatcgttcacgcgcgtcgcatcagcatgacgtggatgatcctgtgtctggcgggggcgtgtgcggtcggcttcttcggtatcgcgtacttcaacaacaacccggcgcaggcgggcgcggtgaaccagaacgccgagcgcgtgttcatcgagctggcgcagatcctgttcaacccgtggattgccggtattctgctctccgcgatcctcgcggcggtgatgtccaccctgagctgtcagctgctggtgtgctccagcgccatcaccgaagacctctacaaagcgttcctgcgtaagggcgcgagccagaaagagctggtgtgggtagggcgctttatggtgctggtggttgcgctggtggcgattgcgctggcggcaaacccggaaaaccgcgtcctggggctggtgagctacgcctgggcgggcttcggtgcggcatttggtccggtggtgctgttctctgtactgtggtcacgcatgacccgcaacggcgcgctggcggggatgattatcggtgcggtaaccgttatcgtctggaaacagttcgcgtggctgggcctgtacgaaatcattccgggcttcatcttcggcagcctcggtatcgtggtgtttagcctgctgggtaaagcgccgtctgcgtctatgcagaaacgctttgcggaggcggacgcgcactatcactcagcgccgccgtctaagctccaggctgagtaa

SEQ ID NO: 165444 - DNA, 420 bp, Enterobacter cloacae
atgagaattaaaacagggttaatggtggcagcattcgtgatgctgtcgggctgtagcgcacccgcacagcacgcggcggtggaaacctgcaaagcagaaaatcagatgcagcagaccacgctttatttcggcttaaaccgtcctgccggggcgcaaatcacaggcaacgaatggcagcagtttgtcgaccaggacgtgacgccacgctttcgcgatggtttaacggtatttgatgcgcgcggtcagtggctggggaatgatggaaaagtggcgcgcgagccgagcaaggcattgatgctgatccacgctaaagacgcgcagagtgagaagaatatcgaagcgttgcgcgggatctataagtcacgcttcgcgcaggagtcggtgatgcgggtcgaccagccggtgtgcgtgcagttttaa

SEQ ID NO: 165445 - DNA, 1185 bp, Enterobacter cloacae
atgtttaaaattgtccatttcctgctggcgctggtgattattcttgcgctcgcctggctggtgagtttcgaccgccgaaaaattcgtattcgtttcattttacagctgatcgtgatcgaaatcgcgctggcgttctttttcctccacgcagaaagcggcctgtttattattaaatacgtttccggtttctttgagtcgctgcttaaattcgctgccgaagggacgaattttgtctttggcgggatgggtgaaaaagggctggcgttcattttccttggcgtgctctgccccattatttttatctcggcgctgattggtattcttcagcactggcgtattctgccgatctttattcgggtgatcgggacgctgctgtcaaaactgaacggcatgggcaagctggaatcctttaacgtggtgagttcgctgatcctcggtcagtcggaaaacttcattgcctacaaaggcgtgctgggcgatctctcctcgcgtcgtctgtttacgatggctgccacggccatgtcgacggtttcgctgtcgattgtcggggcctatatgactatgctcgacgccaggtttgtcgtcgcggcgctgatcctgaacatgttcagcacctttattattctttcggtcattaacccggcccgcccggaagcggagccggatatcaggctggaaaaactgcacgaatcccagagcttctttgaaatgctgggcgagtatattctggccggttttaaggtggcgatgattattctggcgatgctgattggctttatcgcccttattagcgccattaacgccctcttctccggcatatttggcatgagcttccagcagattctgggttatgtgttttatccgctggcgtggcttattggtattccgctgagcgatgccttaagcgcggggagcattatggcaactaaactggtggcgaatgaatttgtggcgatgatcgagctgcaaaaaatagcccatcaaatgtcaccgcgcgggctggggattttgtccgtgttcctggtatcgttcgctaacttcgcttccatcggcattgtggcgggggcaataaaaggtctgaatgagcaacagggtaacgtggtgtcgcggtttggtttacgccttgtatacggggcaacgctggtaagcctgctgtcggcaagctttgcggggttggtgctgtaa

SEQ ID NO: 165446 - DNA, 834 bp, Enterobacter cloacae; identical to SEQ ID NO: 147120

SEQ ID NO: 165447 - DNA, 1128 bp, Enterobacter cloacae
atggccattcagttccgtcgtagtgcgttatgcgcaggcattgccgcgctgttcgtgtctgccttcaccgctcaggcggcagatattccgcaggtaaaagtcaccgtcaacgataaacagtgcgagccgatgaccatcacggttaacagcggtaaaacgcagtttattattcagaaccacagccagaaggcgctggagtgggaaatcctgaaaggcgtgatggtggtggaagagcgcgagaatatcgcgccgggcttcagccagaagatgaccgcaaatcttcagcccggggaatatgacatgacctgcggcctgctgactaacccgaaaggtaagctgatcgtcaaaggcgcagcgacggcggacgcggccaaaggcacggcgctgctgagcctcggcgacgccattaccgcctataaagcctacgtcaccaaagagacagcggacctggtggcaggcaccaaagcctttaccgacgcggtgaaagcgggcgacatcgaaaaagcgaaatccctgtatgcgcctacccgtcagcactacgagcgcattgagccgattgccgaactgttctctgacctcgatggcagcattgacgcccgtgaagacgactacgagcagaaggccgccgatccgaaattcaccggcttccaccgtctggaaaaagccctgtttggcgataactccaccagtgggatggagaaatacgccgagcagctcaacagcgacgtgctggagctgcaaaaacgcatcagcgagctggcattcccaccgtcgaaagtggtgggtggcgcagcgggcctgattgaagaagtggccgccagcaaaatcagcggtgaagaagatcgttacagccacaccgacctgtgggacttccaggcgaacgtcgacggcgcacagaaaattgtcgatctgctgaggcctcagctgcaaaaagagaacggcgagctgctggcgaaagtggatgccaactttaagaaagttgacgctatcctggcgaaataccgcaccaaagacgggttcgaaacctacgacaagctgaccgatgctgaccgtaacgcgctgaaaggcccgataaccaccctggcggaagatctctccctgctgcgtggcgtactgggtctggattaa

SEQ ID NO: 165448 - DNA, 1284 bp, Enterobacter cloacae
atgaacaagcatgacgaatacgacgtggcggaaccttcccgacgtcggttgttaaaaggggtaggggcgctgggcggcgcgtttgccctggcgggaggctgtccggtggcgcatgcggcaaaaccgcaaagcgcccctggcacgctctccccggatgcgcgtatggaaacgcagccgttttatggtgagcaccaggcggggatcctgacgccgcagcaggcctcgatgatgctggtggctttcgattcgctggcgagtgataaagccgaccttgagcgtctgttcaggctgttgaccacgcgtattgccttcctcaccgccggcggtcccgcaccggaaacaccgaatccgcgcctgccgccgatggattccggcatcctcggcgcgtttatcgctcccgataatctgaccatcaccgtgtcggtgggggaatcgctgtttgatgatcgctacggactggcgaagcagaagccgaaagcgctgcaaaaaatgacgcgattcccgaatgattctctcgacgcggcgctgtgccacggcgatctgctgttgcagatctgcgctaatacccaggatacggtgatccatgccctgcgcgatattatcaagcacaccccggatctgctgagcgtgcgctggaagcgggaaggttttatctctgaccacgccgcgcgcagtaaagggaaagagacgccggtcaacctgctgggcttcaaagacggcaccgccaacccggacagcagcaataccgcgttgatgaagaacgtggtatgggtgacggcggatcagggcgaaccggcctgggcggtcggaggcacctatcaggcggtgcgtatcattcagttccacgtggagttctgggaccgcacgccgctgaaagagcagcaaactatcttcggtcgcgataagcaaaccggcgcaccgctcggcatgaagcacgagcacgatgaacccgactacgcccgcgatccgaacggggacgtcatcgcgctggacagccatattcgcctcgccaatcctcgcaccaaagagacgcaatccagcctgatgatgcgcaggggctacagctactcgctgggggtgaccaactccggtcagcttgatatgggactgctgtttgtctgctatcagcacgatctggagaagggattcctcaccgtgcagaagcggctcaacggcgaagcgctggaggaatatattaagcccatcggcggcggctatttctttgccctgcccggcgcgcgtgacgcgaacgcctggctcgctcagggtctgatagaagcctga

SEQ ID NO: 165449 - DNA, 792 bp, Enterobacter cloacae
atgggaagacagaaagcagtgatcaaagctcgtcgtgaagcaaaacgtgtgctgagacgggattcacgtagccataagcagcgtgaagaagaatcggtcacctcgcttgtgcagatgagcggcgtagaatccattggtatggcgcgggacagccgcgatgcatcgccaattgtggcgcggaatgaagctcaggcgcactacctgaatgctatcgagagtaaacagctcatctttgcaaccggggaagccggatgcgggaaaacctggatcagcgccgccaaagcggcggaggcgctgattcataaggacgtggaaaggatcatcgttacccgtccggtactgcaagcggatgaagatctgggcttcctgcccggcgatatttccgagaagtttgccccgtacttcaggcccgtctatgacgtgctggtgaagcggttgggcgcttcctttatgcagtactgcctgcgaccagagattggcaaggtggaaatcgcgccgttcgcctatatgcgcggacgtacatttgaaaatgcggtcgttattcttgacgaggctcagaatgtgaccgctgcgcaaatgaagatgtttttaacgcgcctcggggagaacgtgacggttatcgtcaacggcgatattacccagtgtgacctgccgtcgggcgtgaagtccggcctgagcgatgccatgtcacgttttgaggaagatgagatgataggggtggtccgcttcacaaaagaggactgcgtccgctcagcgctgtgccaacgaacgctggaagtgtactccgactaa

SEQ ID NO: 165450 - DNA, 1506 bp, Enterobacter cloacae
atgaacgaactggttagtgcaattaatggtgttatctggagcccggcgttaatatttttatgtctgggtgtcggcctctatttctcgctgcgtagtcgctttctgcaattacggcatataaaacttatgattaccctgatgtttcaggggcgtcctaccgaggcaggcgtgtcgtcgtttcaggcgctgacgatgacgctggcgggccgcgtggggacagggaatattgccggtgtagcgaccgccattacctttggtggacccggtgcgcttttctggatgtggatcgtggcatttttgggggcaagctctgcttttgtcgaatccacgttaggtcaggtttataaagagaaaattaacggcgaatatcgtggtggtcctgccttttatattgagaaagggttaggcgtgaagtggtacgcatggttatttgccatcgtaacgattttctcctgcggattattactgccaggtgtgcaggcaaactccattggtgcgagcctggatattgcctttggtctgagccaaaatgtcacggcggcgttacttgctgtgctgttgagttttattatttttggtggcgtaaaaaggattgccagctttagcagcatggtggttccgtttatggcgctcggctatattattgtggcgtgcgtgattatcgctatcaatattgatcagcttccttcagttatattgctgatctggaaaagtgcttttggccttgaagctgggtttggcgctattctgggccaggccatcatgtggggcgtgaagcgtggcgtctattccaacgaggcggcgcagggtaccgggccacatgcctcctcggcggcggccgtaagccatccggtgaaacaggggctggttcaggcgttctccgtgtacatcgacacgctgtttgtctgctccgcgaccgggtttatgctgttgatcaccgggctgtataacgtgcagggcgtcgacggcgcagcgctctataccggaatagcgggcgtggccgcaggaccgggatatgtccagacggcaatggaaagtatgatgccgggcttcggtaattactttgttgccatcgcgctgttcttctttgccttcaccacgatcattgcttactactacatcgctgaaacgaatatcgcctacatcaaccgtaagattcatcgcccgtggctgacgttcctgctcaagctgtgtctgatggcttcgacggtatatggcacggtacgcaccgcggatctggcctggggattaggggatatcggcgtagggctgatggcatggctcaacattattgccatcgttctgttgcataaaaaagcgtttgccagcctgaaggattatgaaatccagaatgcacaggggttggatccacactttgacccggttcggctggggattaaaaatgcggattactggctggaggagcgtaaggatgaagcgggtgctcagcctgagcaggtttcatctcctgaaggaaaggagtcggtagggaagttgaatagctga

SEQ ID NO: 165451 - DNA, 939 bp, Enterobacter cloacae
atggatattatcttctatcaccccacttttgatacggcttactggattaacgcgctcacggcggcactgcctggcgcacgcgttcgcgaatggaaacagggcgataatgaacatgccgactacgcgctggtctggcatcccccggtcgaaatgcttcagggacgccgtttgaaggcggtgtttgctcttggtgcgggtgtggattccattctcagtaagctgaaggcacaccctgaaatgctgccggaggatattcccctgtttcgtctggaagataccggtatggggcaacagatgcaggaatatgccgtgagccaggtgctgcactggttccgacgtttcgacgattatcaggcgttcaaacagcaatcccactgggaaccgcttccggattatcagcatgaagatttcaccatcggcatcctcggcgcgggtgtactgggttcgaaagtcgccgaagcgctcgcgccgtggggcttcccactgcgctgctggagccggagccgtaaggattatccaggcgtcgagagctttgccggaacggacgaactcccggcgttcctgaaagggactcgcgtccttattaacctgctgccgaatacggcggaaacggtcggcattatcaatggcacgctcctcaaccagttggcagaagacagctacttaatgaacctggcgcgcggggtacacgttgtggaagacgatctgctgaaagcgctggatagcggtaaactgaaaggcgcaatgctggatgtctatagccgcgaaccgctgccgacagacagcccgctctgggcacatccgcgcgtggcgatgacgcctcatattgcggccgtgacgcgaccggcggaggccgtggcgtacatctcgcataccatcagcgaaatagagaagggcaacgcggtgaccggacaggtcgacagacagcgaggctactga

SEQ ID NO: 165452 - DNA, 738 bp, Enterobacter cloacae
atgtatcccgttgacctgcatatgcacaccgtcgccagtacccacgcttacagtaacctccatgattatatcgctcaggcgaagctgaaaggcattaaactgtttgcgataaccgatcacggtccggatatggcggatgcgccgcactactggcattttgtgaatatgcgtatctggccacgcctggtggacggtatcgggatactgcgcggcatcgaagcgaacatcaaaaatactgacggtgagattgactgcaccggcccgatgctgacctcgttagatctgatcctcgccggcttccacgagccggtctttgcgccccaggataaagagaccaacaccgcagcgatgattgccactattgccagcggcaacgtgcacattatcagccacccgggaaatccgaaatacccgattgatattcaggccgtggcgcaggcggcagcgaagcaccgcgtggcgctggagattaacaactcctcctttgttcactcgcgtaagggcagtgaagccaactgccgcgaagtggcggcggccgtgcgcgacgcgggcggcgtggtggcgctgggctctgattcacacacggccttcacgctgggtgatttcagcgagtgcctgaaaatattgcgggacgtgaatttcccggaagaacagatcctgaacgtcacgccgcgtcgtatgctcgacttccttgagtcgcgcggcatggcgccgattgatgaatttgccgatctttaa

SEQ ID NO: 165453 - DNA, 555 bp, Enterobacter cloacae
atgaatgagttttccatcctttgccgcgtgctgggcaccttatattaccgccagccgcaggatccgctgctggttccgctgtttaccctgattcgtgaaggtaaactggcgcagagctggccgctggaacaggatgagttgctggaacgcttgcaaaaaagctgcgatatgcagcagatttcaacggattacaacgcgctgtttgtgggagaagagtgtcgcgtgtcgccgtatcgttctgcctggcaggaaggtgcgaccgaagcggaggttcgggcatttctttcagaacgcggcatgccgctgacggatatgcctgccgatcatatcggtaccctgctgctggcggcctcctggattgaagataatgcaggtgatgatgagaacgaggcgattgaaaccctgttcgaaacgtatttgcttccgtgggttggcaccttcctgggtaaagttgaagcccatgccacctcgccgttctggagaacgctggctccgctgacgcgtgacgccatcgctgccatgtgggacgagctggaagaagagaacgaagagtga

SEQ ID NO: 165454 - DNA, 492 bp, Enterobacter cloacae
atgcgcaccatgaacatactactttgtattgcaatcacgactggcatcctctccggcctctggggttgggtggctgtctctctcggcttgttgagctgggctggttttcttggctgcacggcctatttcgcctgcccgcagggtggtctcaaagggctcttcatctccggctgtactctgatgagcggtgtgatttgggcgctggtcattatgaaaggcagcgcgctggcgccgcatgtggaaatcctggggtacgccatcaccggcattgtggccttcctgatgtgcgttcaggcaaaacatctgctgttgtcctttgtacccggcacgttcatgggtgcctgcgcgacctttgcggggcagggggactggaagctggtggtcccttcgctcatgctgggattactgtttggctacgccatgaagaacagcggcctctggcttgcggcccgacgcgagaagagccagagcgttcctgcggtaagtaaataa

SEQ ID NO: 165455 - DNA, 834 bp, Enterobacter cloacae
atgcagcgcttttttattttagttgcagtgtgcttattaagcggttgtttaactgccccgccaaaagaagccgctaaacccaccctaatgcctcgtgcccagagctaccgggatctgacacatctgccggtccctaccgggaagatattcgtctcggtctataacattcaggatgagacgggccagttcaaaccgtatccggccagtaacttctcgacggccgtaccgcagagcgccaccgcgatgctggtcaccgccctgaaagattctcgctggtttatcccgctggaacgtcaggggctgcaaaacctgcttaacgaacgaaaaatcattcgtgccgcgcaggagaatggtaccgttggcgtcaataaccgcatgccgctacagtctctcaccgcagccaatatcatggtggaaggctcgattatcggctacgaaagtaacgtgaaatcgggcggcgcgggtgcgcgttactttggcatcggggccgacacgcagtatcagctggatcagattgccgtcaacctgcgcgtggttaacgtgagcacgggtgagatattatcctccgtgaccaccagcaaaacgattctctcttatgaagtgcaggccggggtgttccgctttatcgattaccagcgtctgctggagggtgaaattggctatacctctaacgagccggtcatgctgtgtctgatgtcggccatcgaaaccggcgtgattttcctgattaatgacggtatcgatcgcggcttgtgggatcttcagaataaaagtgacgtgagtaatgcggtgctggtgaaataccgagagatgtcggtgccgccagagtcataa

SEQ ID NO: 165456 - DNA, 417 bp, Enterobacter cloacae; identical to SEQ ID NO: 114920

SEQ ID NO: 165457 - DNA, 390 bp, Enterobacter cloacae
atgaaacgcaccctaagttggattgccgccgcaggcattatgcttgctgccggaaaccttcaggctgttgaggtggaagttcccggactgttgaccgaccacaccgtcacctctgtcggacacaatttttatcgtgccttcagcgataagtgggaaagcgattatccgggtaacttaaccatcaacgaacggcccagtgcgcggtggggaagctggatcacaataaccgctaatcaggacgttatttaccagacttttttattcccaacgaaaagagacttcgatcagaacgtcgctttcgcgctggcacaaacagaagaagctattaaccgcctacagttagacaaagcccttttgagcacaggcgatttagcaaaagatgagttctag

SEQ ID NO: 165458 - DNA, 651 bp, Enterobacter cloacae
atgtttaatgaagtccatagcttacccggtcatacattattgttgatcacaaaaccttccctacaagcgacagcgttattgcagcatttaaaacaatgcctctcgcttaacgggaaactgcataatattcaacgttcttttgatgatatcgctcctggcagcatcattcttctcgatatgatggaagcggataaaaaactggtccattactggcaggataatttaagcaggaaaaacaataatatccgcgtattgttattaaatacgcctgatgagtatcctttccgcgatattgagagctggccgcatattaacggcgtgttttacgtcactgaagaagaaaaccgtgtcgtggagggtttgcagggcatattgcggggggagtgttatttctcgcaaaaactggccagctacctcattacccactccggaaattatcgctataacagttcagaatctgcacttctgacgcaccgtgagaaagagatcctgaacaaactgcgtattggtgcttcaaatattgaaatcgcccgttcgttatttatcagcgaaaatacggttaagacgcatctttataatcttttcaaaaagatagctgttaaaaatcgcacgcaggcggtgtcgtgggcaaacgataacctcaggcgttaa

SEQ ID NO: 165459 - DNA, 456 bp, Enterobacter cloacae
atgaaaaacaaaatgttgtttatgatgtttacattactgggtgcgcctgggtttgtaatcgcaggtgattcagatttagccagttctgaatataattttgcgataaatgaattaagtaaagcttcatacaatcaggcagccattattggtcaacagggctcaggtaataatgctgatgtacgccagggcggttctaaattgctgtccattatttcccaggagggcgggaataaccgcgcgcatgttgatcagtcagggacgtataaccttgcttatatcgatcagaccggtaacggcaacgatgcgagtattaagcagggcgcttttggcaacaccgccatgattatccagaaaggctcgggtaacagggcgaatataacgcagtatggtacgcagaaaacagcagttgtagtacagagacagtcgcaaatggctattcgcgttattcaacgctag

SEQ ID NO: 165460 - DNA, 456 bp, Enterobacter cloacae; identical to SEQ ID NO: 114916

SEQ ID NO: 165461 - DNA, 333 bp, Enterobacter cloacae
atgagcaccttcattctccttgctgcgcttgccagccagataacgttcagcacctcacagcaggcaaatatgacaaccattattcctcaggtcacgctggcagacgcctgcgaatgtcaggttgaggtgttatctgtccgacaggggcaagcgggacaaagtacatcgcggcagaaaaatactctttttatacccgctaatcagccgattgatttaagccgaatcagtttaaatattcgttcaggggatgcggtaaaaataatcgtcaccgtttccgatggaaaatcgcttcatttatcacagcagtggaacgcaccggtaagtacgctttaa

SEQ ID NO: 165462 - DNA, 321 bp, Enterobacter cloacae
atgttcaaatccgcagcgtgtattatttctggtctgggactgatcctgtcctcttttttatctccggcttattcagcaactatagaaaatggtggggtgattcattttcgtggcgcggtggtcgctgacccgtgcgaagtcacgccccggcatcagcagtttgcgatctcctgtccggaaaataaccgtatgaaaacgcataccatcagttatgacgaggcgctccggggccatcatcctcattcagctctggccgctgtcagcatgaaatacctgaatgaacagaaaacgcttgcggtcgttcaggtggattaccgctaa

SEQ ID NO: 165463 - DNA, 537 bp, Enterobacter cloacae
atgagaccgcaaatcgatgttattcatggcgatatcacgacggtacacgttgacgtgatcgtcaacgcagccaattcctccctgatgggtgggggcggggtggacggtgccattcaccgggccgcaggccctcaactccttgaagcatgcaaaaccgtgcgtcagcagcagggagagtgcccgccggggcatgctgttattacgcttgcaggcgatctcccggccaaagcggtgatccataccgttggacccgtctggcacggtggcgaccgccatgaggctgagattctggagcaggcgtatcggaactgcctgcggcttgcggcggataacgggtataagaccatggcgttccccgccattagcaccggcgtgtacggttatccaaaggaagcggcagctacaatcgccgtgaataccgtttatcactacctttccctcaaacccatgccggaaaaagtcatttttgtctgtttcgatgagcacaccgccgacctgtatcagcggattttgaccgcgcgcagccaggcattttga

SEQ ID NO: 165464 - DNA, 1140 bp, Enterobacter cloacae
atgagcacaacccctgtacaacgtgaatatttcctcgactcgatccgcgcatggctcatgctattggggatcccttttcatatttcactgatctattccagccacacctggcacgtgaacagccagatgccctcctggtggctgacgctgtttaatgattttatccatgccttccgcatgcaggtgttttttgtcatttccggttatttctcttacatgctcttcttgcgctatcccctcaaacgatggtggaaagtgcgcgtggagcgcgtgggcataccgatgttgacggccattccgctgctgacgctgccgcagttcatcatgttgcagcatgttaaaggcaaggcggaaaactggccgaatctctccttctatgagaaatacaacaccctggtctgggagctgatttcccacctctggttcctgctggtactggtggtgctaaccacggtgagtttgttgatcttcagccagctgcgccagcgtgcgagcaccgcatcctcgaccttcttcgccaacatcaccctgggcaagctgtctctgctgtttcttgcgctgggggtcgcgtatgccgccgtcaggcgtaccctgctcattgtctaccctcccattctgagcgatgggctgtttaatttcgtggtgatgcagaccctgttttacattcccttcttcctgattggggcgctggcatttattcatcctcggcttaaagcgctgtttaccaccccctccccctggtgtgcggtgggtgctgcgctggcctttgccgcctatcttctcaatcagcgctatggcagcggggacgcgtggatgtatgagacagagagcgtgataacgatgctgatgggcctgtggatggttaacgtggtgttcgcccttggccatcgtctgctgaattttaaatccagtcgcgtcacctatttcgttaatgcttcgctgtttatctacctggttcaccatccgctgacgctgtttttcggggcgtacataacgccgcatatcgcctcgaatgcgctgggcttcttcaccggcctggtctttgtggttggcattgccatcgtgttgtatgaaatccatctgcggatcccgcttttgcgtttcctgttctcaggcaaacctcaggttaaagcgggataa

SEQ ID NO: 165465 - DNA, 1602 bp, Enterobacter cloacae
atggatcggatcgatataagcacacaaagggggaagtgcttacttattatgaaacataaaccacaaatgatgaaaatgcgttggttgggtgtagcagtgctgttgtcactgtatacctcatctgcactggcctttaacatcgatgatgtcgcaaaacaggctaaatcgatggcgggcaagagctacgaagcgccaaaaagtaacctgccctccgttttccgcgacatgaaatacgcggactatcagcagatccagttcaatcacgataaagcgtactggaacaatattaaaaccccgttcaagcttgaattttaccaccagggtatgtacttcgacacgccggttgccatcaacgaagtgacggcgaccgcggtacgcaaaatcaagtacagcccggattatttcaattttggcgatgtgcaacacgataaagacacggtaaaagacctcggcttcgcaggcttcaaggtgctttatccgattaacagcaaagataaaaacgacgaaatcgtcagcatgcttggcgccagctacttccgcgtgattggcgcggggcaggtgtacgggctttctgcgcgcggtctggcaattgataccgcgctgccatcaggtgaagaatttccacgttttcgcgagttctggatcgaacgtccaaaaccaaccgacaaacgtctgacaatttatgcgctgctggactcccctcgtgcgacaggcgcttatcgcttcgtgatcatgccagggcgtgacacggtggttgacgtacagtctaaagtttacctgcgcgataaagtgggcaaactgggcgtcgcgccgctgaccagcatgttcctgttcgggccgaaccagccctctccggcgaccaatttccgtcctgcactgcatgattccaatggcctctccattcatgcgggtaacggcgagtggatctggcgtccgctgaacaacccgaaacacctcgccgtcagcagctttgcgatggaaaacccgcagggctttggtctgctgcaacgtggccgtcagttctcccgctttgaagatctggatgaccgctacgatctgcgtccaagcgcctgggttacgccgaaaggcgactggggtaaaggcaaggttgagctggttgaaattccaactaacgatgaaaccaacgataacattgtggcgtactggacaccggatcagctgccggaagccggtaaagagatgaacttcaagtatgcgatcaccttcagccgtgacgaagacaaactgcacgcaccggataacgcgtatgtaatgcagacgcgtcgttcgacgggtgacgtgaagcagtccaacctgattcgtcagccggatggcacgctggcatttatcgtggacttcaccgggcaggatatgaaaaaactggccccggatactgccgtgacggcacaggccagcattggcgataacggtgaaatcgttgagaacgccgtgcgttacaacccggtcaccaaagggtggcgtttgaccctgcgcgtgaaggtgaaagatccgaaacagaccactgaaatgcgcgccgcgctggtcagtaacgataagccgctgagtgaaacctggagctatcagctacctgccaatgaataa

SEQ ID NO: 165466 - DNA, 2529 bp, Enterobacter cloacae; identical to SEQ ID NO: 114910

SEQ ID NO: 165467 - DNA, 228 bp, Enterobacter cloacae
atgaaagtaatcattgtcgtcatgatggcatgcctgctcagcggttgcggcagcattatcagccgcaccatccccgggcagggccacgggaatcagtactaccccggcctacagtgggatgtccgtgattccgcatggcgctatctcaccgtgctcgatctgccgttttctctgattttcgacacgctactgctgcccatcgatgccagccacggcccctacgagtag

SEQ ID NO: 165468 - DNA, 375 bp, Enterobacter cloacae
atgaccatgtacgccacgctggaagaagcaattgatgccgctcgcgaagagttcctcgccgataatcccggcgttgaggaagaagatgctgacgtgcaacaactcaatatccaaaaatacgtcctacaggacggcgatattatgtggcaggccgaattctttgctgatgaaggtgaagatggtgaatgtctgccgatactcagtggtgaaggtgcgcaggcggtattcgacggcgactatgacgaaattgagttacgtcaggagtggctggaagaaaatacgctgcacgaatgggacgaaggtgagtttcagctcgaaccgccgctggataccgaagagggtcaggccgcagcggacgaatgggacgagcgataa

SEQ ID NO: 165469 - DNA, 1236 bp, Enterobacter cloacae
atgtcccccacagatgctcccataaactggaaacgtaacctgacggttgcgtggctgggttgttttcttactggcgccgcctttagcctggtgatgcccttcctgcccctctacgttgaacagctcggcgtcaccggacatagcgccctgaatatgtggtccggcctggtgttcagcattacgttcctgttctccgccattgcgtcgcctttctggggtgggctggcggatcgcaaaggccgcaaaattatgctgctgcgctccgcgctcggcatggcgatcattatgctgctgatgggggtggcgcagaatgtctggcagttcctgatactacgcgcgcttctgggcctgctcgggggatttatccctaacgccaacgccctgatcgccacccaaatcccgcgccagaaaagcggctgggcgttgggcacgctatccactggcggcgtaagcggcgcactgctgggcccactggcgggcgggctgctggccgaccactacggactgcggccggtattcttcattaccgccagcgtgctgttcctctgcttcctggtgacgcttatctgtatccgcgagaatttcacgcccgtggccaaaaaagagatgctgcacgcccgggatgtgctggcctcgctgaaaaacccaaagctggtgctgagcctgtttgtaaccaccatgattatccaggtggccaccggttcaatcgcgcctatactgacgctctacgtacgcgacctggcgggaaacgtcagcaatatcgcctttatcagcggcctaatcgcctctgttcccggcgtggcggcgctactgagcgcgccgcggctcggcaagctgggagaccgtatcggcccggaaaagatcctgatctgcgccctgatcgtctccgtcctgctgctgatccccatggcgttggtgcagtctccgtggcagctcggcgtcctgcgcttcctgctgggggctgcggatggtgcgctactcccggctgtacagacgctgctggtctataactccaccaaccagatagccggtcgtattttcagctataaccagtcgtttcgcgatctgggtaacgtcaccggaccgctggttggcgcggggatttcggccagcttcggtttccgggcggtctttatcgtgacggcaggcgtcgtgctgttcaacgccgtttattcgtggctcagcttatcccgggcgctacgcccggcgcgaataagaccacatcgtgacggctaa

SEQ ID NO: 165470 - DNA, 927 bp, Enterobacter cloacae; identical to SEQ ID NO: 114906

SEQ ID NO: 165471 - DNA, 1050 bp, Enterobacter cloacae; identical to SEQ ID NO: 114905

SEQ ID NO: 165472 - DNA, 579 bp, Enterobacter cloacae; identical to SEQ ID NO: 114904

SEQ ID NO: 165473 - DNA, 567 bp, Enterobacter cloacae; identical to SEQ ID NO: 114903

SEQ ID NO: 165474 - DNA, 1119 bp, Enterobacter cloacae
atgaaatacgatttaatcattatcggaagcggctccgtaggatctgccgccggttattacgccacgcaggcgggtctgaaagtgctgatgattgacgcccaccttcccccccactctgaaggaagccatcacggcgatacccgtctgatccgtcacgcttacggcgaaggtgaacgttatgtaccgctggtgcttcgggctcagacgctgtgggatgagctggccacactcaccgaagatcgcatttttgagcgcaccggggtcgttaacctggggccagccagctccacgtttctggcgaccgtcgaggagagcgcgaaagcctaccgcctggacgtcgagcgtctggatgcaaacggcatcatggcgcgctggccggaaatttctgtccctgacgactacattgggttgtttgaagccaactctggcgtgctgcacagcgaaacggccattaagacctggattgatctcgccgccaaagcgggctgcgcacagttgttcaactgtccggtcacgggcatcacccaccatgcagagggttcaaccgtcaccacctctgaaggtgaatataccgccacgcgtctgctggtgagtgcgggaacgtgggtgacgaaactgctgccggacctacccatccagccggtgcgaaaagtcttctcctggttccagtctgacgggcgttacagcagccagaacaaattcccggcgtttacaggcgagttacccaatggcgaccagttctacggtttcccttcggaaaaagacgcgctcaagattggcaaacataacggcggacaggtaatttcctctacggaagaacgcaagccttacggtgcttatccgcaggatggttccgaagccttcacgttcctgcgtaatatcctgccgggcataggcgggttgctttacggcgcagcgtgcacctacgacaacaccccggatgaagattttatcatcgacacccttccgggacacgataacaccctgctcgtaaccggactcagcggtcacgggtttaaatttgcctctgtgttaggtgaaatcgccgcccagtttgcgcaggggatcgcgccttcgtttgatctcaagcccttcgcgctctcgcgctttgatcgataa

SEQ ID NO: 165475 - DNA, 255 bp, Enterobacter cloacae
atggaaaagaatagtgaagtcatccagacccatccgcttgttggctgggatatcagcaccgtagacagctacgatgcgctgatgctgcgtttgcactaccagaccccaaatcagcaaaaccgtgatgaagcggaagttggacagacgctgtggcttacaacagacgtcgcccgtcagtttatctctattttagaagcaggcatcgcaaaaatagaatctggcgactatcaggaaaatgagtataaacggcattga

SEQ ID NO: 165476 - DNA, 246 bp, Enterobacter cloacae
atgcgtatcgaagtcaccattgccaaatccaccgtcctgcctgctggcgcactcgacgctctggcgggtgaactatcccgacgtattagcagcacttttcctgaaaacgatggcgccgtaacggtacgttatgcgacagcaaaccatctttccgtcatcggcggcgcgaaggaagacaaagaacgcatcagcgaaattttgcaggaaacatgggaaagcgccgacgactggttcatcactgattaa

SEQ ID NO: 165477 - DNA, 1047 bp, Enterobacter cloacae
atgactgtacaatcccaggttctcaaaatccgccgcccagacgactggcatatccatcttcgtgatggcgacatgctgaaaaccgtcgtgccgtataccagcgaaatttatggccgtgcgattgttatgcctaacctggttccgccagtcactaccgtcgaggccgcgattgcctatcgccagcgtatccttgacgccgttccggccggacacgattttaccccattgatgacctgctacctgacggactcgctggatccgaatgaagttgagcgcgggtttaacgaaggtgtattcaccgccgcgaagctctacccggcgaatgccaccaccaactccagccatggggtgaccagtattgatgccatcatgcctgttctggagcgtatgcaaaaactgggcatgccgctgctggtgcacggggaagtgacccacgctgacattgatattttcgatcgcgaagcacgttttatcgaaacggtcatggagccgctgcgccagcgtcttccggggctgaaagtggtgtttgaacacattacgactaaagatgccgcagagtatgtccgggatggaaacgagctgattgccgccaccatcaccccgcagcacctgatgtttaaccgtaaccacatgctggtgggcggcgttcgcccacatctgtattgtctgccaatcctcaagcgcaacatccaccagcaggcgctacgtgagctggtcgccagcggcttcccgcgcgcgttcctcggcacggattccgccccgcatgcccgtcaccgtaaagaggcgagctgcggctgtgcaggctgctttaacgccccgaccgccctggcaagttacgcaaccgtgtttgaagagatgaatgcgttagaccatttcgaagccttctgctcccttaacggcccgcgtttctacggtctgccggttaatgacacgttcattgagctggagcgcaaagaaagccaggttgaagcgtcgattgcgctcaccgacgatacgctgatccccttcctggccggtgaaaccgtaaactggacggtaaaacgctaa

SEQ ID NO: 165478 - DNA, 561 bp, Enterobacter cloacae
atgaaaaagatcgttattgccgctgcgttaattgtcagtggtctgctggtgggatgtaaccagcttacgcagtacaccgtcagtgagcaggaaattaatcaggcgctggaaaaacataataacttttcaaaagatatcggcgtgcccggccttgcggatgcgcatatcgtcctgacgaatctcgccagccagattgggcgcgaggagcctaacaaagtcaccctttccggcgatgccagcctcgatatgacctcgctcttcggcaatcagaaagcggatatcaagctgaagctcaaggcgctgccggtctttaataaagagaaaggggccattttcctgcaagagatggaaatcgtcgatgcagttgtgacgccggaaaaaatgaaaccggtgctgcaaacgctgatgccgtatctcaaccagtcgttgcagaactactttaaccaacagcctgcctatgttctgagcgaagacaagagcaaaggcgaatccctggcgaaaaaatatgccaaagggatagaggtgaaaccgggtgaaatcatcatccctttcaccgactaa

SEQ ID NO: 165479 - DNA, 1209 bp, Enterobacter cloacae
atgtcccgcgtatcacaggccaggagccttggtaaatatttcctgctcgtcgataacatgctggtcgtgctcggcttttttgtcgtttttccgcttatatcgattcgttttgtcgatcaaatgggctgggcggcattgatggtcgggatcgcgctgggtctacgccagtttgtacaacagggtctgggcgtgtttggcggcgcaatagccgaccgcttcggcgcgaaaccgatgatcgtcaccggcatgctgttacgtgcggcgggattcgccaccatggcaatcgctcatgaaccctggctgctgtggttctcctgtttcctttccgggattggcggcacccttttcgacccaccgcgtaccgcgctggtggttaagcttatccgtccgcaacaccgggggcgcttcttctccattttgatgatgcaggacagcgctggcgcggtggtgggcgccctgctgggaagctggctgctgcaatacgatttccgcctggtctgcgccaccggcgcggtgttgtttattctctgcgcgctgtttaacggtctgtttctgcccgcgtggaagctgtcgacggtgaaggcgcctgtgcgggaagggcttgaccgcgtgctgagcgataaacgcttcgtcacctatgtgttaaccctgactggctactacatgctcgccgtgcaggtcatgctgatgctgcccattatggttaacgatattgccggcacgccggcagcggtgaaatggatgtatgccattgaggcctgcctctctctgacgctgctctatccgattgcccgctggagcgagcgccgtttccgacttgagcaccgtctgatggccgggctgttgctgatgacgctgagcatgatgcccatcggcctggtgagttcgcttcagcaactgtttatgctcatctgcaccttctatattggctcaatcattgccgagccagcccgtgaaacgctgagcgcgtcacttgccgacgcccgggcccgaggcagctacatgggcttcagccgtctcgggctggcgcttggcggcgcactgggttacaccggtggtggctggctgtttgatgccggaaaagcgctccatcagccggagctgccgtgggtcatgctcggcatggtcggctttatgacgctgattgccctctggtggcagttcagtgataaacgcagcacccgcgggatgctggagcctggcgcctga

SEQ ID NO: 165480 - DNA, 585 bp, Enterobacter cloacae
atgtttggctatcgcagtaatgtgccaaaagtgcgtctgacgacggacaggctggtcgttcgtctggtgcatgagcgtgatgcctggcgtctggcggattattacgccgagaatcgccagtttttaaaaccctgggaacccgttcgggacgagagccactgctacccctctggctggcaggcgcgcctcagtatgattgcagaatttcataaacagggaagtgcgttttatttcgcgcttctcgatccggaagagaaagagatcgttggcattgccaatttttcaaacgtggtacgcgggtcgtttcacgcctgttacctcgggtattccatcggtcagaaatggcaggggcaggggctcatgtttgaggcgctgacggcggcgattcgctacatgcagcgcacgcaacatatccatcgcattatggccaactacatgccgcacaataagcgcagcggcgatctgctggcccgcctggggtttgagaaagagggctatgccaaagattatctgctgattgacggcgagtggcgggaccatgtgctcaccgcgctcaccacccaggagtggaccgcgggtcgttaa

SEQ ID NO: 165481 - DNA, 651 bp, Enterobacter cloacae
atgaaatatcagttaaatggcgccgaagcgcgcgtggtcggctgccttctggaaaagcaggtcaccacgccggaacagtatcctctgtccgtgaattccgtcacgatggcctgcaaccagaagacgaaccgtgagccggtgatgaaccttggcgagcacgaggtgcaggatatccttgatgagctggtgaagcgccactacctgcgcaccgtcagcggcttcggtaatcgcgtcactaaatatgaacagcgcttttgtaattccgaatttggcgatttaaaactcagtgccgcggaagtggcagtgatcaccacgctgctgctgcgcggggcgcagacgccgggtgaactgcgcacgcgcgcctcccgcatgcatgagtttcaggatatgcaggacgttgaacagacgctggagcgattagcctcacgcgaggacggtccttacgtggtgcgtctgccacgcgagccgggcaagcgtgaaagccgctacatgcacctttttagcggcgacgttgagccctctgcgctggccgtagaatccgacacgccagcatcaaacgacagcctgaacgcgcgcgtggcggccctggaagacgaggttgccgggctgaagcagcgtctggatgcgttactcgcacatctgggagattaa

SEQ ID NO: 165482 - DNA, 924 bp, Enterobacter cloacae
gtgacaacattacgcattggtgttgtggggctgggagggatcgcgcaaaaagcctggctgcccgttttaggcgccgcgtccgactggacgctgcaaggggcgtggtcgcccacccgcgagaaagcagagcgcatctgcaaaacctggcgcatcccttatgccggttcgctacaggatttagcccgtgaatgtgatgcggtatttgtgcatacctcaaccgcgacgcactaccaggtggtgagcgagttgcttaacgcaggcgttcacgtctgcgtggataaacccctggcggaaaatgtacaggatgctgagcgactgattgagctggccgcgcgtaaaaagctgacgctgatggtcggcttcaaccgccgttttgcgccgctctatcagcagcttaaagcgcagtccggctcgttcgcctccctgcgtatggataagcaccgtaccgacagcgtggggccgaacgatctgcacttcacgctgctggatgattatctccacgtcgtggatacggccctttggctgagtaacggaaaagcccagctgcaaagcggcacgctgctgactaacgagcagggtgagatggtttacgccgaacatcattttgccgttgagcatttgcaggtgacgaccagcatgcatcgtcgggcgggcagccagcgcgagtccgtgcaggccgttacggatggcgcgctgtatgacgtcaccgatatgcgagagtggcgggaagagaagggcaatggcgtggtcgcgttaccggttcccggctggcaaagcaccctggagcagcgtggctttgtgggctgcgcgcgtcacttcatcacctgcgtgcagaatcagacggttcctgaaacgtccggggagcaggctattctggcgcagcgcattgtggaacgactctggcgcgaagccatgtcggaataa

SEQ ID NO: 165483 - DNA, 1536 bp, Enterobacter cloacae
atgaacttattaaaatcgctggcggccgtcagctcgatgaccatgttttcccgcgtgcttggctttgcgcgcgatgccattgtggcaagggtttttggcgccgggatggcgactgacgcctttttcgtcgcctttaagctgccaaacctgctgcgccgtatttttgccgaaggggccttttcacaggcatttgttccgatcctcgcagaatataaaagcaaacagggcgaagatgccacccgcgtctttgtggcctacgtttccgggttactgacgctggcgctggcgatcgtgaccgtcctggggatgctggcagcgccctgggtgatcatggtgacggcgccgggttttgctgacacagcggataaatttaccctgaccacccaactgctgcgtataaccttcccctatattctgctgatttcgctggcgtcgctggtgggtgccatactgaatacctggaaccgcttctccgttccggcctttgcccccacgttcctcaacgtcagcatgattggctttgcgctgttcgccgcgccgcattttaacccaccggtgctggcgctggcctgggccgtgaccgtcggcggcgtgttacagcttgcttaccagcttccgcacctgaaaaaaatcggcatgctggttctgccgcgcattaatttcaaagatgcgggcgcaatgcgcgttatcaaacagatgggaccggcgatactcggtgtgtccgttagccagatctcgctgatcatcaataccatcttcgcctctttcctggtgtcgggctcggtgtcctggatgtactacgccgatcgtttgatggagtttccatccggggtgctgggcgtggcgctggggactattctgctgccgtcgctgtcgaaaagtttcgccagcggcaaccacgatgaatactgccgcctgatggactggggcctgcgtctctgttttctgctggcgctgccaagcgcggtggcgctggggatcctggcgaaaccgctgacggtgtcgttgttccagtatggaaagttcaccgcctttgatgccgccatgacccagcgtgcgctcgtagcctactcggtggggctgatggggctgattgtcgtgaaggtgcttgcgcccggtttctattcacgtcaggacatcaaaacgccggttaagattgccattgtgacgctgatcatgacgcagctgatgaacctggcgtttattggaccgctgaaacacgcggggctgtcactgtcgattggtctggcggcctgtctgaacgccgggctgctgtactggcagctgcgcaagcaggatatcttcacaccgcagccgggctgggcaagcttcctgctgcgtctggcgattgcggtagtggtgatggcggccgcgctggttggcatgttgtatgtcatgcctgagtgggcgcagggcaccatgccttaccgcctgatgcgtctgatggccgtggtggtggtcggtgtggtggcgtactttgccacgctggcggtgcttggcttcaaagtgaaagagttcacccgccgcacggtataa

SEQ ID NO: 165484 - DNA, 426 bp, Enterobacter cloacae; identical to SEQ ID NO: 114892

SEQ ID NO: 165485 - DNA, 294 bp, Enterobacter cloacae
atgagcattgatcgtacatcagccctgaagccggttagcactgtacaacctcgcgaaacgaatgaggctgccccgcataaaacgcgtctggaaaaaacgtcgacggctaacagcaccagcgtcacgctgagcgatgcgcagtcgaagctgatgcagccaggcagcagcgatatcaacatggaacgtgttgaagcgctgaaaacggctatccgtaacggcgaactgaaaatggataccagcaaaatcgctgatgcgctgattcaggacgcacagagtttcctccagagtaactaa

SEQ ID NO: 165486 - DNA, 660 bp, Enterobacter cloacae
atgcggacttttaaacgtggcctggcggcgaccctactgcttttaagccctctggtgcaggctgaggggttagaggaccagctcaatgcattctttgcgcagaagctggccggtttcagcgatgacgtacgcgtgaccgtgcgcaccccgcctaacctttatccttcctgcgaagccccgtcatttagcgtgaccggcagcacccgcttatggggcaacgtgaacgtgctggcgcgttgcgccaatgaaaaacgctacttacaggttgcggttcaggcgacgggcaattatgttgtcgccgccgttcccattccccggggcagcctgctgcaacctgacagcgtaacgctgaagcgaggccgtctggatcagcttccaccgcggacgatgctggatatcaaccaggctcaggaggcggtcagcctgcgcgatgtcgctcctggacaggcgatacagctatccatgctgcgccaggcgtggcgggtgaaagcaggacaacaggtgatggtggtcgccaatggcgaaggctttagtatcaacagtgaaggaaaagcgctgaataatgccgcagtggcgcaaaatgcccgggtcagaatgtcctcaggccaggtggtcagcggcacggtcggtcctgatgggaatattctgattaacctgtaa

SEQ ID NO: 165487 - DNA, 417 bp, Enterobacter cloacae; identical to SEQ ID NO: 114889

SEQ ID NO: 165488 - DNA, 405 bp, Enterobacter cloacae
atggccttgctgaatatttttgatatcgccggttcggcattaacggcgcagtccaaacggctgaacgtggccgccagtaacctggccaacgccgacagcgtgaccggccctgacgggcaaccgtatcgcgctaaacaggttgtcttccaggttgatgctgcaccgggtgcggcaacgggcggcgtaaaagtggcggacgtggttgagagccaggcacccgacaagctggtttacgagcctggcaacccgctcgcggatgccagcggctacgtgaaaatgccgaacgtggatgtggtcggggagatggtgaactccatgtccgcgtcgcgtagctaccaggcaaacgtcgaagtgcttaataccgtgaagagcatgatgctcaaaacactcactctcggccagtaa

SEQ ID NO: 165489 - DNA, 711 bp, Enterobacter cloacae
atgtccatcgccgtaaacgtgaatgacccgacaaataccggcgtcaacagcaccagcagtgcgaccggttccagctctctcaccgggagcaatgcctccgatttacagagcagctttctgaccctgctggtggcgcagctgaaaaatcaggacccgaccaatccgatgcagaacaacgaactgaccacgcagcttgcgcagatcagtaccgtcagcggcattgagaaactgaacaccacgctcggctcggtctccggtcaaatcgataacagccagtccttgcaggccgccaacctgatcggtcacggggtgatgatcccggggaccacgattctggcgggcaccagcactaccgatggcacgtccaccaccaccacgacgccgtttggcgttgagttgcagcagccggccgacaaagtcaccgccacaatcaaagacgccagcggcaacgtggtgcgcacgattgagattggcgagcttaaagcgggcgttcatacctttacctgggatggcagcctgaccgacggcactaaagcgcctaacggctcgtatcaggttgcgattagcgccagcaacggcaccactcagctggtggctcagccgctacagtttgccctggttcagggcgtcatcaagggtagcgatggcaacaaactggatttgggtacctccggtaccaccacactcgacgaagttcggcagattatctaa

SEQ ID NO: 165490 - DNA, 1209 bp, Enterobacter cloacae
atggccttttctcaagcggtcagcggcctgaatgctgcggccaccaacctggacgtcattggcaacaacatcgccaactccgcgacctatggttttaaatccggttctgcgtcttttgcagatatgtttgcaggctctaaagtgggtctgggcgtgaaggttgcgggtatcacccaggacttcaccgacgggacgaccaccaacaccggtcgcggtctggacgtcgccatcagccagaacggtttcttccgtatggtggatgccaacggttccgtgttctacagccgcaacggccagttcaagctggatgaaaaccgtaacctggtgaacatgcaggggcttcagttaaccggttatccggttgccggcacgccgcctacggtgcaaaccggtgcgaatccgcaggcgatctccatcccaacgacgctgatggcggcgaagtccaccaccactgcctctcagcagatcaacctgaactccaccgataccgcgccaaccgtcgccttcgatccgtccaaccctgactcttacaacaagaaaggcaccgtgacggtgtttgacagccagggtaatgcgcacaacatgaacctgttttatgtcaaaaacgagacgccagctaactcctggaaggtgtattcgcaggacggcagcgtagcgggagatgcagcgaaactggcaaccacgctgacctttaacgagagtggtgtgctgacgggtggcgatgatatcaagatcacaacgggcaccgttccgggcgcgacgccagccacgtttgacatgagtttcgccaactccatgcagcaaaacaccggtgcgaacaacatcgtggcgacgagccagaacggctataagccgggcgatctggtgagctaccagatcaacgatgacggtaccgttgtcggtaactattcgaacgaacagacccaggtgctgggccagatcgtgctggcaaacttcgccaacaacgaaggcctgaaatccgaaggggataacgtctggtctgccacgcagtcttccggggttgccctgctgggaaccgcgggttccggtaacttcggcacgctgactaacggcgcgctggaagcctccaacgtcgatctgagtaaagagctggtgaacatgatcgtcgcgcaacgtaactaccagtccaacgcgcagaccatcaaaacccaggatcagatcctcaacacgctggttaacctgcgttaa

SEQ ID NO: 165491 - DNA, 756 bp, Enterobacter cloacae
atggatcacgcaatatatacagcgatgggcgcagcaagccagacgctcaatcagcaagctgttaccgccagcaaccttgcgaacgcttccacgccaggttttcgtgcgcagctcaacgcgctgcgtgcggtgccggtagaagggctgtcattgcccacgcgtacgctggtcaccgcctccacgccgggcgccgacatgacgccaggtcagatggattacaccgcgcgtccgctggacgttgcccttcagcaggacggctggctggcggtgcaaacggctgacggcggggaagggtatacccgcaacggtaatatccaggtgagcgccaccgggcagctgacgattcaggggcatccggttatgggcgaagccggtccgttgacggtgccggaagggtcagagctgaccattgcggcagacgggacgatctcggcgttaaacccgggcgacccggcgaacaccgttgcgcctgtcggtcgtctgaagctggtgaaagcggaaggcaacgaagtgcagcgtggcgatgacgggatgttccgtctgacccaggcggcgcaggccacgcgtggcgccacgttacaggccgacccgaccatccgcgtgatgtccggcgtgctggaaggcagtaacgtcaaaccggtggaagccatgaccgacatgatcgccagcgcccgccgcttcgaaatgcagatgaaaatcatcagcagcgtcgatgaaaacgcaggcaaggctaaccaacttctggctatgagttaa

SEQ ID NO: 165492 - DNA, 783 bp, Enterobacter cloacae
atgatcagttctttatggatcgcgaaaaccggtctggacgcacagcaaaccaatatggatgtgattgccaacaacctggcaaacgtcagcaccaatggtttcaagcgccagcgtgcggttttcgaagatttgctttatcaaacgattcgtcagccaggggcgcagtcttctgagcaaaccacgctgccgtccggtctgcaaattggtaccggcgtgcgcccggtcgccaccgagcgtctgcacagccagggcaacctgtcgcagaccaacaacagtaaagacgttgccattaaaggtcagggtttcttccaggtgcagctgcctgacgggacctccgcctatacccgcgatggttcgttccaggtggatcagaacggccagctggtgacggcgggcggtttccaggttcagcctgcgatcaccatcccggcgaacgcgctgagtatcaccattggtcgtgacggcatcgtcagcgtcactcagcaaggtcaggccgcgccggtccaggttggacagctcaacctgaccaccttcatgaacgataccggactggaaagcatcggcgagaacctctacaccgaaacgcagtcttccggcacgccaaatgaaagtaccccgggcctgaacggggcggggctgctgtatcaggggtatgtggaaacctcgaacgttaacgtggcggaagagctggtgaatatgatccaggtccagcgcgcctatgaaattaacagtaaagcagtgtcgacgaccgaccagatgctgcaaaaactgacgcaactctaa

SEQ ID NO: 165493 - DNA, 699 bp, Enterobacter cloacae
atgcaaaaaaacgcggcgtttcgttatccgatcctgactgttctggccgtcaccctcagcgggtgtgcctggatcccgtctaaaccattggtacagggtgcgactaccgcccaacccgttcccggccccgcgccggtggtgaacggctctattttccagaccgcgcagccgattaactacggttatcagccgctgtttgaagaccgtcgtccgcgtaacgttggcgatacgctgaccattgtgttgcaggaaaacgtcagtgcgagtaagagctcgtcggcgaacgccagccgcgatggcaaaaccaattttggcttcgacaccgtgccgcgctatctgcaagggctgttcggcaacgcccgtgcggatgtggaagcctccggcggcaacacctttaacggtaaaggtggtgcgaacgccagcaacaccttcagcggaacgctgacggttacggttgatcaggttctggtgaacggcaacctgcacgtggtgggcgaaaaacagatcgccattaaccagggtacggaattcattcgcttctccggtgtggttaaccctcgcactatcagcggcaccaacaccgtaccgtccacccaggtggcggatgcgcgcattgagtacgtcggcaacggctacatcaacgaagcgcaaaatatgggctggctgcaacgcttcttccttaacttatcgccgatgtaa

SEQ ID NO: 165494 - DNA, 1098 bp, Enterobacter cloacae
atgtataaatttctcttcgccgtggcgctgtcgctggtcgctaccgttgcgcaggccgatcgcatacgcgatctcaccagcgtgcagggcgtgcgcgaaaactcgctgattggctacggcctggtggtggggctggatgggacgggtgaccagacgacccagacgccgttcaccacccagagcctgaacaacatgctctcgcagctcggtattaccgtaccggccgggaccaacatgcagctgaaaaacgtggcggccgtgatggtgaccgcgtcttatccggcctttgcgcgtcaggggcagaccatcgacgtggttgtctcgtcgatgggtaacgccaaaagcctgcgcggcggtacgttgctgatgacgccgctgaaaggcgtcgacagccaggtgtatgctctggcgcagggcaacattctggttggcggagcaggcgcgtcggcgggcggcagcagcgtgcaggtgaaccagctgaacgggggacgtattaccaacggcgcgatcatcgaacgtgagctgccgacccagttcggcaccggcaacaccattaacctgcaactgaataacgaagactttacgatggcgcagcagatcgctgacaccatcaaccgcagccggggctacggcagcgccaccgcgctggatgcccgtaccgtgcagatccgcacgtcaaccggcagcagcaaccaggtgcggttgctggccgatatccagaatatggaagtgaacgtgccggtgcaggatgcgaaagtcattatcaactcccgtaccggctcggtggtgatgaaccgcgaagtgacgctggacagctgcgccgtggcgcagggcaatctctccgtcacggttaaccgctcggccaacgtcagccagccggataccccgtttggtggcggtcagacggtagtgaccccgcaaacgcagattgatttacgacagagcggcggttcgttgcagagcgtgcgctccagcgccaacctgaacagcgtggtgcgtgctctgaatgcgctgggtgcaacgccaatggatctgatgtccattctgcaatccatgcaaagtgcaggctgcctgcgcgccagactggaaatcatctaa

SEQ ID NO: 165495 - DNA, 1641 bp, Enterobacter cloacae
atgtccagtttgattaacagcgccatgagtggcctcagtgctgcgcagtcggcactcaataccgtcagtaataatatttcaagctacaacgtggcaggttatacccgccagaccaccattctgggggcatcaaacagcaccctgaccggcggtggctgggtgggtaacggggtctatgtctccggggttcagcgtgaatatgatgcgtttatcaccaaccagctgcgcgcggcgcagaaccagagcagtgggctgaccacgcgctaccagcagatgtcaaaaattgacgacgtgctttctgataccacgaactcgctttctgccaacctccaggatttctttaaaagcctgcaaacgctggtgagtaacgcagaagatccggctgcacgccagacggtactcgggaaggcggatggtctggtaaaccagtttaaaaccaacgatcaatacctccgcgatcaggatgcgcaggtcaatacggcgatttctaccagcgtcgatcagatcaataactacgcgaaacagattgccaatcttaacgatcagatctcccggctgactggcgtcggtgcgggcgcatccccgaatgaactgctcgatcagcgcgatcagctggtgagtgaactgaacaagattgtcggtgtggatgtcaccgtacaggacagcggcacctacaacatctctatcgccaacggttacaccctggtacagggcagcaacgccagccagctggcggcggtgaaatccagtgcggacccagcgcgtacaacaattgcgtatgtggatgccgcagcgggcaacgtggagatctcagaaaaacagatcaccacggggtcgcttggcgggctgttaacgttccgttctcaggatctggatcaggcgcgaaacacccttaaccagatggcgctggcgtttgccgatgccatgaatacccagcaccaggcaggctttgatgccaacggggatccaggcggtaagctgtttgattttggctccccggcagtgctgagtaacggtaaaaacaccggaagcgcgtccgttacggccacgatgacggacagtacaaaggtccaggcgacaaactataaagttgaatacaacggtacagactggacaattacgcgtctgtcggacaacaccagcttcacggccaagcctgacgccagcggtaatctgtcgtttgatggtctcaacgttaagattagcggttcggccaataataaagacagctttatcgtgaagccggtgaatgacgtcatcgtgaatatggacgttgcgatcagcgacgaatccaaactggcgatggcctccgcgaaaggaagcggcgaaagcgacaataccaatggccagaagctgctggatttacagagcgccaaattggtgggagggaacaaaacctttaacgatgcttatgccgcgctggtcagtacggtgggcagcaccacggcgtcgctgaaaaccagcagcgaaaccaaagttaacgtggtgacgcagctgaccaaacaacagcagtcaatctccggggttaacctggatgaagagtatggcaacctgcaacgctatcagcagtactatctggcgaatgcgcaggtgctgcaaacggcgagcacgctgtttgatgcattgatcaatatccgctaa

SEQ ID NO: 165496 - DNA, 954 bp, Enterobacter cloacae
atgcgtattagtactcaaatgatgtatgagcaaagcatgcgcggtgtgacgaactcccaaagtctctggctcagctacggcgagcagatgtctacggggaagcgtatcaaccgtccgtctgacgatccgattgccgcctcgcaggccgttgtgctctctcaggctcaaacgcaaaacagccagtatgcgctggcacgctccttcgctacgacgaaagtctcgctggaagagaacgtgttatcgcaagtgacaaccgccatccaggctgctcaggaaaagattgtcaatgcgggcaacggtacgttaagtgacgatgaccgcgcttcgctggccacgaacctgcaaggtattcgcgatcagctcatgaacctggctaacagcacggacggtaacggtcgctatattttttccggttacaagaccgaagcggcggctttcgaccaggcgacgggtgattataagggcggcggaacgccaatcagccagcaggttgactccgcgcgcacgatgcaaattagccatacgggcactgaagttttcgatagcttcaccagcaatgccaagccagagccagatggtagtgcgccggaaacgaatttgttcaagatcctcgactccgcaattgaagcgctgaatacgccgattggggaggacgaaacgaaagccgaggcgtttacggcggctattgataaagccaaccgtggcctgagcaactccctcaacaacgtgctgaccgtgcgcgccgacctcggcatcaagctggatgagctgggcaagctggacgctctgggtgaagaccgcgcgctgggtcagacgcagcagatgagtaacctggttgacgtggactggaactcggtgatttcgtcctacaccatgcagcaggcggcgttgcaggcctcgtataaagcctttagcgatatgcagggtatgtctttgttccagatgaacaaataa

SEQ ID NO: 165497 - DNA, 1212 bp, Enterobacter cloacae
atgaacacaaccaccacccgggccgtaagccgctgggtaatcttaatgctggcgctcggtgcgggctttagcgtggcatccatctattatgcccagcctctgctgccgctgatgggctcagacctgcatctgagcatcgaaggcatgggcatggtcccgacgctcacccaggcgggttatgccctgggcatcctgtttctgctcccgctcggcgatcgtcatgaccgcagaacgctgatcctgataaaaagtgcggctctggcgctgttcctgctgggttgtagcctgaccggacaactgcactccctgctgctcaccagcctgctgattggcatggccgccaccatggcgcaggatattgtcccggccgcagcgatcctcgcgccggaaggtaaacagggaaaaacggtcggcacggtgatgaccggcctgctgctggggattttgctctccagaaccgtgagcggcgtggtgggtgaggcctttggctggcgggtgatgtatcagcttgccgccacaagtattgcctttattggcgtggtgatgtgggccgtgcttccccgcttcgccgttcactccacgctgagctacccggcgctgatgcgctccatggaacacctctggcgccgctatccggcgctgcgtcgggccgcgctggcccagggttttctgtcgattgcctttagcgcattctggtcaacgctggcggtcatgctgctggaacggtatcaccttggcagtgccgtagcgggtggatttggtattgccggagccgctggcgcgctggccgcaccgctggcgggtggtcttgccgataagctgggcgcaggtaaagtgacccagctgggtgccgcgctggtgaccctctcgtttgccctgatgttcatgatgccggcactgggtgtacacggtcagttgatcctgattgccctctccgcggtcggtttcgatctcggcttgcagtccagcctcgtggcccaccagaacctggtctacagccttgagccgcaggcccgcggacgcctgaacgccctgctgtttaccgtcattttcatcggaatggcgctgggttcggcattaggcagcaatatctatacgctggcaggctggtctggcgtggtggctctggcaaccctgtgtggtgccattgcgctggctatcagagtgattgaaagcgcccgggtgctgtccgcacaggcagaaagtgtgtaa

SEQ ID NO: 165498 - DNA, 1029 bp, Enterobacter cloacae
gtgtgcggctattttttatcagtacgccttgcgacggtagcgggcgcggtggtaaaacgcttatacgtgtggcgtatgggtaaaaatggtatgaaaaggtctgagcgtatagatcgggtagaactgatgcgaacgtttgttcgcattgtggaggcggggtctctttctgcggcggcacgtcagctggcaacaacccaggccacggtgagccgacggttgcagtcgcttgagaccatgctgggagtacgcctgatgctgcgcacaacccatacgacccggctgaccgatgacggcgaacgctgctatcagcatgcccgacgggtgattgacagctggctggcgctggaagacgaggtagggcagacggaagatgaaccggttggggtgctgagggtgcgcgccccgcacgcgtttggccaggatcagcttctgaaaccgttaaccgaatttttacagcgctatccccagctttctgttgagtggatgctcaacgatcgctcggttgatttcctcggcgacaaccttgactgtgctattagggtgggtgtggaagtcgatccggcaaccgtgtccgtgctgctggctgaagtgccgcgctcggtggtggcgtcaccggaattactggcccgttatcccgctgttaaaacgccggaagatttgcaacagcttccctggattgccatcagctctttttatcaacgccatgtggagcttttccacgacacatcatccgccccggcgcgggttaccattacgccacgcctgagtaccgacagcctgtatgtggcgcgcaatacggcactcaccgggcttggcgtagcggtggtatccagctggacggtacaggatgatattcgggaaggaagactggtgcatctactgccagagtggcagccggcagcgttaccggtacatctggtttacccctggtctcgttattatccggcgcgtttgcggcgttttctggagctgatgcggcagataatgccggaggtcaccgggatgagaaagcccctgcaacagccataa

SEQ ID NO: 165499 - DNA, 3117 bp, Enterobacter cloacae
atgaaaagaatgttaatcaacgcaactcagcaagaagagttgcgtgtcgcccttgtggatgggcagcgcctgtacgatctggatatcgaaagtcctggacacgaacagaaaaaagcgaacatttacaaaggcaaaatcacccgcattgaaccaagccttgaagctgcatttgtcgattacggtgctgagcgtcacggtttccttcctctcaaagaaatcgcccgcgaatattttcctgcaaactacaactcccatggccgtccgaacattaaagatgttctgcgtgaaggtcaggaagttatcgtccagatcgataaagaagagcgtggcaacaaaggtgccgcactgaccacctttatcagcctggcaggaagctatctggtattgatgccaaacaacccgcgtgcgggtggcatctctcgccgtatcgaaggcgatgaccgtaccgagctgaaagaagcgctggcaagtctcgagctgccagacggcatgggccttatcgtgcgcaccgcaggcgtcggcaaatctgccgaagcgttgcagtgggacctgagcttccgtctgaagcactgggaagccatcaagaaagcggctgagagccgtcctgctccgttcctgatccaccaggaaagcaacgttattgtgcgtgccttccgtgattatctacgtcaggacatcggtgaaattctgattgataacccgaaagtgcttgagctggctcgccagcacatcgccgcgctgggtcgcccggatttcaccagcaaaattaaactgtacaccggtgaaatcccgctgttcagccactatcagattgaatcccagatcgagtctgccttccagcgtgaagtgcgtctgccgtccggcggttctatcgtaattgataccaccgaagcgctgaccgctatcgacatcaactccgcgcgtgcaacccgtggcggcgacatcgaagagaccgccttcaacaccaaccttgaagccgctgatgaaatcgcccgccagctccgcctgcgcgacctgggtggtctgattgttatcgacttcatcgacatgaccccggttcgccaccagcgtgcggttgaaaaccgtttgcgtgaagcggtgcgccaggatcgcgcacgtatccagattagccatatctcgcgcttcggcctgctggaaatgtcccgtcagcgtctgagcccgtcactcggcgagtccagccatcacgtctgcccgcgctgttccggtacgggtaccgtgcgtgacaatgaatcgctctccctctctattctgcgtctgattgaagaagaagcgctgaaagagaacaccaaagaggttcacgccatcgttccggtgccgattgcctcctacctgctgaacgaaaaacgtgcagcggtaagcgcaatcgaagcgcgtcagggcggtgttcgctgcatcatcgtgccaaacgacgagatgcaaaccccgcactatcacgtgctgcgcgtgcgtaaaggcgaagagacaagcaccctcagctacctgctaccgaagctgcatgaagaagaaatggcgctgccatcggatgaagagcctgccgagcgtaaactgcctgagcagcctgcattagcaaccttcatcatgccggaagccccgccggaagcgacgctggaaaaaccagcggcaaaacctgccgtgcaaaaggcggcccctgccgcgccaaaagcgcagcctgagcagccgggtctcctgagccgcatcttcggcgcgttgaaaaaaatgtttgctggcgaagaagttcagcctgagcagccgaaagaagcgccaaaagaagcgaaacctgagcgtcagcaggaccgtcgtaagcgtcagaacaatcgtcgcgatcgtaatgaccgcaacgaccgtagcgatcgtaacgagcgccgtgataatcgttccgagaacaacgaaggtcgtgaacaacgcgaggacaaccgtcgcaaccgtcgcgagaagcaacagcagaacgttgaagatcgtgagattcgccagcaggcgggcgatgagtccgagaagagcaaacagcgtgacgagcagcagcctcgccgcgagcgtaaccgtcgtcgtaacgacgagaaacgccaggcccagcaggaagtcaaaaacctgaaccgcgaagcgcctgttgaacagcaggacacggagcaggaagagcgtactcaggttatgccgcgtcgtaagcagcgtcagctgacccagaaagtacgtgtgggtgctgttcaggcggaagaaaacgacgttatcgcggttgaagcagcagaaagcacaacgggtacccaggttgcgaaagttgacctgccagccgtcgtggaaaatcaggttgagcaggacgaaagcagcgaaaaccgtgacaacgcaggtatgccgcgtcgctcccgtcgttctccgcgtcatctgcgcgtgagcggtcagcgtcgtcgtcgttaccgtgacgagcgttacccgactcagtcgccaatgccgctgaccgtggcgtgcgcgtcacctgagatggcatccggcaaagtctggatccgttatccggttgctcgcccggagcaagctgttgaagaacaggctgtgaccgaagaggtgattgcaccggtagcagcggtggaagacgtcgtgactgaagcggcaaccgtggttgaaccgcaggttgttgacacggcggcaccgcaggctgtggaagtggaaacgacccatcctgaagtgattgctgcgccggttgatgccgctccgcagatcattgccgaagaagataccgtggtggctgaagaagtcgcggaagaagctgaaccaatctccgcagcagaagaacccgcagacgttgccgtcgagacggtgacggaagaggttgttcaggacgtcgagattcaggttgaacctgttgtcgaagaggtcaaagcgcctgaagtgaaatccgagccggttgaggtcgttgccgctccagcgcctgctcacgtagctaccgcgccgatgactcgcgccccggcacctgagtatgtacctgaagcgccacgccatagcgactgggttcgtccggcattcaacttcgaaggcaaaggtgctgccggtggtcacagtgcgacgcacatggctactgcgccagctacccgtcctcagcctgttgaataa

SEQ ID NO: 165500 - DNA, 921 bp, Enterobacter cloacae
atggttgccatcgccgacgacgaggcggggcaacgtatcgataattttttgcgcacccagttgaagggcgtgccaaaaagtatgatttatcgcatcttgcgtaagggcgaggtgcgggtgaacaaaaaacgcgtgaagccagagtataagctcgaggcgggcgatgaagtccggattccaccggtacgtgttgcagagcgtgaagaagaggtcgtttctccgaagctgcaaaaagtcgcggccctgagcgacgttatcctttatgaggacgaccacattctggtgctgaataaaccgtccggaacggcggtacacggggggagcggtctgagcttcggcgtgattgaagggttacgcgcgctgcgcccggaagcgcgtttcctcgaactggttcaccgtcttgaccgcgatacctctggcgtgctgctggtggcgaaaaaacgttctgcgctgcgttctttgcacgagcaacttcgtgaaaaagggatgcagaaagattacctggcgctggttcgcggccagtggcagtcccacgtgaaagtggtgcaggcgccgctgctgaaaaatattttgcaaagcggcgagcgcattgttcgcgttaatcaggaagggaaaccgtctgagacgcgctttaaagtcgaagagcgctacgaattcgccacgctggtgcgctgtagtccggtgacggggcgtacccaccagattcgcgtccatacccagtttgcgggccatccgattgcgtttgatgaccgctatggcgatcgcgaatttgataagcagctggcggggaccgggctgtcgcgtctgttcctgcatgcggcagcgctgaagtttacccatccgaataccggtgaaattattcgtattgaagcgccgctggatgagcagctcaaacgctgtctgaaagttctgcgcggctga

SEQ ID NO: 165501 - DNA, 543 bp, Enterobacter cloacae
atgctgctggaaaagctcggaatcccgtttgaatgcgctgcgccggaggtggatgaaacgccacagccgggcgagtcaccgcgtcatctggtgacccgtctcgcgaaagagaaagcacagtcgctggccgtacgttaccccgcacatctgattataggctccgatcaggtttgtgtgctggacggcgaaatcaccggcaaaccgcatacggaagaaaacgcctgccagcagctgttgcgtgcgcgaggcggtatcgtgaccttttataccggcctggcgctttataattcggcttccggtcatctgcaaaccgagtgcgagccgtttgatgtgcacttccgtcatcttagcgagcaggagattatggattatgtgcgtcgggaacgtccgctaaactgtgcagggagctttaaaagtgaaggactagggattgcgttgttcgacaagctggatggtcgcgatcccaacacgctggtggggttgccgctgattgcgctgtgccagatgttaaggcgagaagagtgtaatccactgacggcgtga

SEQ ID NO: 165502 - DNA, 522 bp, Enterobacter cloacae
atgcaaaaggtaaaattacccctgactcttgatccggttcgtacggctcaaaaacgcctcgattacgaaggaatctattcttccgatcaggctgagcgtattgccgaatctgtagtcagtgtggacagtgatgtaaaatgctccatgtcgttcgctatcgacaaccagcgtctcgccgtgttaaccggtgatgcaaaggtgacggtaacgctcgaatgtcagcgttgcgggaaaccgtttgtacagcatgttcacacaacgtattgttttagtccggttcgttctgacgaacaggctgaagcactcccggaagcgtatgagccgattgaggttaacgaattcggtgaaatcgatcttctggcgctggttgaagatgaagtcatcctctccctgccagtcgttccggtgcatgattctgaacactgtgaagtgtccgaggcggacatggtctttggggaactgcctgatgaagcgcaaaaaccaaacccatttgccgtattagccagcttaaagcgtaagtaa

SEQ ID NO: 165503 - DNA, 174 bp, Enterobacter cloacae; identical to SEQ ID NO: 114872

SEQ ID NO: 165504 - DNA, 777 bp, Enterobacter cloacae
atgcgaatggcgctggagctggtgaaagaagggcgagcgcaggcttgcgtcagcgcgggaaatactggcgcgctgatggggctgtcgaaattattgctcaagccgattgagggcattgagcgtccggcgctggtgacggtgttaccgcatcagcagaagggcaaaacggtggtgctggatctgggcgctaacgtggattgtgatagtacaatgctggctcagtttgccgttatggggtcggtgctggctgaagacgtggtcgggattaacaatccccgcgttgctttactgaatattggtgaagaagagactaaaggcctggacagtatccgcgacgctgcggaaatactcaaacaggtcccctccatcaactatattggttatctcgaagccaatgagttgctgacgggcaaaacggatgtattagtgtgtgatggcttcaccggaaacgtgacgttgaagaccatggaaggggtcgtacgaatgttcctttctctgctgaaatcgcagggagaaggtaaaaaaaggtcctggtggctgattttattaaagcgttggttacaaaaaagcctgacgcggcgattcagtcacctcaaccccgaccagtataatggcgcctgtctgttaggattgcgcggcatcgtgattaagagtcatggcgccgccaatcagcgagcatttaccgtcgcgattgaacaggcagtgcaggcggtgcagcgacaagtccctcagaggattgccgctcgcctgggatctgtattagctaaaagtgactga

SEQ ID NO: 165505 - DNA, 954 bp, Enterobacter cloacae
atgtatacgaagattttaggtaccggcagctacctgccaaaacaagtgcgtaccaacgccgatcttgaaaaaatggtagatacgtctgacgagtggattgtcacgcgcacaggtatccgtgaacgtcgtatcgccgcgccagacgaaactgtgtccaccatgggctacgaagccgctcagcgagcgcttgagatggctggcattgataaagaacagatcgggcttattgtggtggcgacaacctctgccacgcatgccttcccaagcgcagcgtgccaggtgcagaacatgctcggcatcaaaggctgcccggcatttgatgttgcagcagcgtgcgcgggtttcacctatgcgctgagcatcgccgatcagtatgtaaaatcgggcgccgtaaaatatgcgctggtgatcggcgctgatgtgctggcgcgtacctgcgatccaaccgatcgcggcacgatcattatttttggcgatggcgcgggcgcggtgctgctggggcagtccgaagagccgggcatcatctccacgcacctgcatgccgatggccgctacggcgagctgttaacgctgcctaacgccgatcgcgttaatcctgataactccatttatctcaccatggcaggtaatgaagtattcaaggtggcggtgactgagcttgcgcatattgtcgatgagacgctggaagccaataaccttgaacgcaccgcactcgactggctggtgccgcatcaggcgaacctgcgtatcatcagcgcgacggcgaagaagctgggcatgtctatggataacgttgtggtgacgcttgatcgccacggcaacacctctgcggcatcggtaccgtgcgcatttgacgaagcggtacgcgatggacgaattaaacggggccaactggtcttgcttgaagcctttggtggcgggttcacctggggttccgcgctggttcgtttctag

SEQ ID NO: 165506 - DNA, 930 bp, Enterobacter cloacae
atgacgcaatttgcttttgtgttcccgggacagggctcgcaaactgttgggatgttgtctgaaatggcagcaaactatccggttattgaagagactttccgtgaagcctctgacgcgctgggttatgatctgtgggcgctgacccaacagggccccgctgaagagctgaacaaaacctggcagactcaaccggcactgctggcagcctccgtcgcattgtggcgcgtatggcagcagcagggcggcaaagcgccgacgctgatggcgggtcatagcctgggtgaatactctgcgctggtctgcgcaggggtgattgccttcgctgacgcggtacgcctggttgaattgcgtggtaaattcatgcaggaagcggtgccagagggcacgggcggcatgtctgccatcatcggtctggatgatgcgtctatcgctaaagcctgtgaagaatctgctgaaggtcaggtcgtttctccggtaaactttaactcgccaggccaggtggttatcgcgggtcataaagaagcggttgagcgtgcaggtgctgcctgtaaagctgcgggcgcaaaacgtgcactgcccctgccggtgagcgtaccgtctcactgcgcgctgatgaagcccgctgccgataagctggcggttgagctggaaaaaatgacctttaacgcaccgacgatttccgttgtgaataacgtcgatgtgcagtgcgaaaccgcgccggaggctatccgtaacgcgctggttcgccagctctacagcccggttcagtggactaaaaccgttgaatttatggcgtctcagggcgttgaacatctgtatgaagttggtccaggtaaggtacttaccggtctgacaaaacgtattgtagacaccctgactgcctcggcgattaacgagccggaagccatgaaagcggcactctcgcaataa

SEQ ID NO: 165507 - DNA, 735 bp, Enterobacter cloacae; identical to SEQ ID NO: 114868

SEQ ID NO: 165508 - DNA, 237 bp, Enterobacter cloacae; identical to SEQ ID NO: 114867

SEQ ID NO: 165509 - DNA, 1242 bp, Enterobacter cloacae
gtgtctaagcgtcgtgtagttgtgaccggacttggcatgttgtctcctgtcggcaataccgtagagtccacctggaaagctctccttgccggtcagagcggcatcagcctaatcgaccatttcgatactagcgcctatgcaacgaaatttgctggcttagtaaaggattttaactgtgaagagatcatctcgcgcaaagaacagcgcaagatggatgccttcattcaatatggaattgtcgctggcgttcaggccatgcaggattctggccttgagattacggaagagaacgcgacccgtatcggcgccgctatcggctccgggattggcggtcttggtctgattgaagaaaaccatacatctctgatgaatggcggcccgcgtaaaatcagcccgttcttcgttccgtctacgattgtcaacatggtggcaggtcacctgaccattatgttcggcctgcgtggcccaagcatctcaatcgcgacagcctgtacgtctggcgtgcataacatcggccaggccgcgcgtatcattgcgtacggcgatgcagatgctatggttgcgggcggcgctgaaaaagccagtaccccgctgggcgtcggtggcttcggtgcagcgcgtgcgctctctacccgaaacgataatccgcaggcggcgagccgtccgtgggataaagaccgtgacggtttcgtgctgggtgacggtgcaggcatgatcgtactggaagagtacgaacacgcgaaaaaacgtggcgcgaaaatttatgctgaagttgttggctttggcatgagcagcgatgcttatcacatgacgtctcctccagagaacggcgcaggcgctgcgctggcgatggaaaacgccatccgcgatgcgggcattacgccggcacagattggctacgttaacgcccatgggacgtctacccctgcgggcgataaagcagaagcgcaggctgttaagtctatcttcggcgaatctgccggccgcgtaatggtaagctccacgaaatccatgaccggtcacctgctgggtgctgcgggggcggtagagtcgatctactcaattctcgcgctgcgcgatcaggctgtaccgccaaccatcaacctggataatccggatgaaggttgcgatctggacttcgttcctcacgaagcacgccaggttagcggtatggagtataccctgtgtaactccttcggcttcggtgggactaacggctctctgatcttcaaaaaggtctga

SEQ ID NO: 165510 - DNA, 810 bp, Enterobacter cloacae
atgtttttaattaatggccttgagcaagaaacgctgccggcaagcgacagggcgacccagtttggcgatggctgtttcacgactgcgcgtattctcgacggtggcgtgtgtctgctcggggcccatatccttcgtttacaaaaagcctgcgaagcactactgatccctttctcgcagtgggacattcttgaaagtgaaatgcgtcggctggcgtcagataaagcaagcggcgtcctgaaagtcattatcagccgcgggagcggtggccggggctatagcggttctgcctgtctgcatcctacgcgggtcctttccgtttcagattatccttcccattatgcgcactggcgtgaagagggcgtagccctggcgttaagtccggtacgtctggggcgaaacccgatgctcgctggcataaaacatctcaaccgccttgaacaggtgcttattcgtactcatcttgagcagacggaggccggggaggcgctggttcttgacagcgaagggtacattacggaatgctgtgcggctaatttactctggcggaagggctgtgatgtgttcacgccttcgctggagcaggccggcgtcaacggcattatgcggcagttttgtatgcaccagctggcacgtgcaggctttcgcgttgtcgaagtcaacgctaaggaagaggcgctgctgtctgccgatgaagttgttatctgcaatgcgctgatgcccgttgtccccgttcgcgcttatggccgcaaatgctggtcatcccgcgagctgttccagtttctggccccgttatgtgagcaaaccaggtag

SEQ ID NO: 165511 - DNA, 1023 bp, Enterobacter cloacae
atgaagaaaatgttacgctttgtcctccttcttatcgttgcgttcggtatcgctggcggagcgggagtgtggaaagtccgtcagctggcggagagtcagatcctgattaaagacgagacgatttttaccctgaaagcgggtaccgggcggcaggcgcttggtcagcagctgtatgacgacaaaattatcaatcgcccacgcgtattccagtggctgctgcgtattgaaccggacctgtcccatttcaaggccggcacctatcgctttacccctggcatgaccgtgcgcgagatgctgcaactgctggagagtggtaaagaagcccagttcccgctgcgttttgtggaaggtatgcgtctgagcgattacctcaggcagctgcgggacgcgccatacattaagcatacgctgaaagatgaccgctaccagaccgtggcagacgccttaaaattcgaacatcccgagtgggtggaaggctggttctggcccgatacgtggatgtatacggcaggcacgacggatgtggccattctgaagcgcgcgcacaacaaaatggtcgcggcggtagacgctgcctggaaagggcgagcagagggcctgccttataaagatcaaaaccagttcatgacgatggcctcgatcatcgagaaagagacggccgttgctgccgaacgtgaccaggttgcctcggtgtttattaaccgtctgcgcatcggcatgcgtttgcaaaccgatcctaccgtcatctacggcatgggcgaaaactacaacggcaggatttccagaaaagatctggagacgccaacggcgtataatacctacgtgattagcggcctgccgcctggaccgatcgcgacgccgagtgaagcatcgttgaaggccgccgcgcacccggccaaaacgccgtatctctattttgtggctgacggaaaaggggggcatacgtttaataccaacctggccagccacaatcgctccgttcaggactatctgaaggcacttaaggaaaaaaatgcgcagtaa

SEQ ID NO: 165512 - DNA, 642 bp, Enterobacter cloacae
atgcgcagtaaatacattgtcattgagggactcgaaggggcgggcaaaaccaccgcccgtaacgtggtggtggatacgcttacgtcgcttggcgttgtcgacatggtctttacccgcgagccgggcggtacgcagctggcggaaaaactgcgcagcctggttctggatatcaaatccgttggcgatgaagttattaccgacaaagcggaagtgctgatgttctatgctgcgcgcgttcagctggtggagacggtgatcaaacccgctctggcagaagggaaatgggtgattggcgatcgccacgatctctcaacccaggcgtatcagggcgggggccggggtatcgatcaggccatgctggctacgcttcgcgacgcggttctgggcgatttccgtcctgacctgacgctgtatctggacgtaactcctgaggtgggcctgaagcgcgcccgtgcccgcggcgaactggaccgcattgaacaggagtcttttgatttctttaaccgcacccgtgcgcgttatctggaactggccgggcaggacaagaccattcgtaccatcgatgcgacgcaatcccttgaagacgttacgcgtgatattcagcagaccgttacgcagtggctacaggagcagcaggcatga

SEQ ID NO: 165513 - DNA, 1005 bp, Enterobacter cloacae
atgaaatggtatccatggttgcgcccacactttgaacagctgatcggcagctatcaggttggtcgggggcatcatgcgttactgatccaggcgctgccgggaatgggtgatgatgcgttgatttacgccatcacccgctttctgatgtgccaacagccggaaggacataaaagctgcggtaaatgccggggttgccagctcatgcaggcgggcacgcatcctgactattacaccctcgaacccgagaagggcaaaaatacgctcggtatcgacgcggtgcgtgaggtcagtgagaaactgtacgaatatgcgcgtctggggggggcgaaagtggtgtggctgaatgacgccgcgctactcacggaagccgcagccaacgccctgttaaaaaccctggaagagccgccagagaatacctggtttttcctctcctgccgcgagccggaacgcttgctggcgacgctgcgcagtcgctgccttcttcaccacctcgctgtccctcaggaatcctgggcgctcgcctggcttgagcgagaagtgacggtgtcacaagatgcggcgcgctcggcgttgcgcctgtgcagcggtgcgcctgcggctgcgctggccttattgcagccggaggtgtggtcccagcgtgaaacgctatgtcgtgcggttgaatcagccctcgacagccatgactggctgagcgtgctgccagcgctgaacagcgatcaggcaccggaacggctgcactggctggccgcgctgctgctggatgcgctcaaaatccagcagggggcgacgcttctgactaaccctgacgtgtgggcgctggtcaccacgctggcgaatcgcctgtcagggcagtcgctgcacgctatccttcatgatatctgccagagtcgtgaacaacttttgacggtaaccggtctcaatcgcgagcttttactgaccgaccagttactgcgtatcgaacactacctgcaaccaggcgtcataccgccggtttcccacctctga

SEQ ID NO: 165514 - DNA, 795 bp, Enterobacter cloacae
atgtttttagtcgactcacactgccatctcgatggcctggattatcagtccctgcataaaaatgtggacgacgtgctggcgaaagccgccgcgcgcgatgtgaaattttgcctggccgtggcgaccacgttgccgggttaccgcgccatgcgtgaactggtaggcgagcgcgataatgtcgtcttctcctgcggcgtgcatccgctgaatcaggatgaagcgtacgacgttgaggatttacgccgtcttgccgcagaagagggcgtagtggcgatgggcgagaccggtctcgactatttctacaccccggaaacgaaacctcgccagcaggaatccttccgcaaccacatccgtattggccgtgaactgaataagccggttatcgttcatacccgcgatgcgcgcgccgacacgctggcgatcctgcgggaagaaaaggtgacggattgcggtggcgtactacactgtttcactgaagacagagaaacggcgggtaagctgcttgatttaggcttttatatctcgttctcggggattgtaacgttccggaatgctgagcaactgcgtgatgcggcgcgatatgttccgctggatcgtattctggtggaaaccgattccccgtacctggcaccggtgcctcatcgcggcaaagaaaatcagccagcgatgacccgggatgtcgctgagtatatggccgttctgaaaggtgtcagtattgaagagctggctcgcgtgacaacggaaaacttcgccagtctgttccatatcgaccccgcccgcctgcaatctgtctga

SEQ ID NO: 165515 - DNA, 1434 bp, Enterobacter cloacae
atgtttaagaatgcatttgctaacctgcaaaaggtcggtaaatcgctgatgctgccagtatccgtactgcctatcgcaggtatcctgctgggtgtcggttctgcaaacttcagctggctgccagccgtagtttcccacgtgatggccgaagcaggcggttctgtttttgctaacatgccgctgatcttcgctatcggtgttgctctgggcttcaccaataacgacggtgtatccgcgctggcgtccgttgttgcttacggcatcatggtgaaaaccatggctgtggttgcgccgctggtactgcatttacctgctgaagagattgccgctaagcatctggcggacaccggtgttctcggtggtatcatctccggtgcgattgcagcgtatatgtttaaccgcttctatcgcatcaagctgcctgagtatctgggcttcttcgcgggtaaacgttttgtgccgatcatttctggtctggccgcgattttcaccggtgtggttctgtctttcatctggccaccaatcggtacggcaatccagaccttctctcagtgggcggcttaccagaacccggttgtggcgttcggtatctacggcttcattgagcgctgcctggtaccatttggtctgcaccacatctggaacgttccattccagatgcagattggtgaatacaccaacgcagcaggccaggtgttccacggcgacatcccacgctacatggcgggtgacccaacggcaggtaaactgtctggtggcttcctgttcaaaatgtacggtctgccggccgccgcaattgcgatctggcactctgctaaaccagagaaccgtgcaaaagtgggcggtatcatgatctccgcagcgctgacctcgttcctgaccggtatcaccgagccgatcgagttctccttcatgttcgttgcgccgatcctgtacatcatccacgcggtactggcaggtctggcattcccaatctgtatcctgctgggtatgcgtgacggtacgtccttctctcacggtctgatcgacttcatcgttctgtccggtaacagcagcaagctgtggctgttcccaattgtgggtgcgggctacgcagtggtgtactacaccgtcttccgtgtgctgatcaaagcactggacctgaaaacgccgggtcgtgaagatgcaacggaagacagcaaagccggtgcgaccagcgaaatggcgcctgctctggtagctgccttcggtggtaaagagaacatcactaacctggacgcgtgtatcactcgtctgcgtgtgagcgttgccgacgttgcgaaagtagaccagccgggtctgaaaaaactgggcgcagcgggcgtcgttgttgcaggttctggtgttcaggcaatcttcggtacgaaatccgataacctgaaaaccgaaatggatgagtacatccgcaacaactaa

SEQ ID NO: 165516 - DNA, 2193 bp, Enterobacter cloacae
atgatgtctttcattaatcacaccagggatgggcaacatcagcctgccgcaacaccttcgttgctggccgcctgcattgctatggcattgacgccaaccgccgctttcgctgcttcaaccaccgaagataccgtcgtcgtagacgggggttttgacaacacacaggatctttctgccagccaggatcaggattacagcgtaaaaaccaccaccaccggcaccaaactgttgctggttccccgcgacatcccacagtccgtcagcgttatcagccagcaacgtatggctgaccagaatctgcaatccatcggacaggtgctgacgaataccacgggcattacggcccaggtgcaggacagcgaccgtaccgtgttttactcacgcggctttttcgtcagcaactacgcctatgacgacctgccaacctccatcagtgaagtgtggaactttggtgataccgccgcggataccgcgatttatgaccgcatcgaagtggttcgcggcgccaccggcctgatgtccggcacgggcaacccggcggcgtacgttaatatggtgcgtaagcacgcggacagcccggaatttaaaggtaacgtctccgccagttacggcagctgggacaagcagcgctacgtgctggatctccaggcgccgctggtagagtcaggtaaggtacggggccgtctgattacgggttatcaggacaacgacagcttcgtggataactaccactaccggaagaaattcctctacggcgtgatggacgcggatgtcaccgacagcaccaccctctcggtagggtatgaatatcaggaaagccataccgccgacccgacctggggcgggctgccgacctggtacagtgacggaagtaagacccactacaatcgtagccagaccgtcgcacctgactgggcttattcagataaagacagcacccgcatcttcgctaacctgactcagcgtttcgataatggctgggaagcgcacatcaacggcatgcacgctgaaaccaacttcgactccaaactgatgtatatgtccggctatccggataaagagaccggtgcgggcctggtgggttacggcggctggaaccgtggggaacgtaaacaggatgcggttgacgccttcctgcgcggcggcttcgatctctttggccgtcagcacgaaatgatgttcggcggcagcttcagccgtcagcgtaaccattacgacaactccatgccggatgcggtatacggcatggttgatgtcggcaactttaagaactggaacgggaacatcgccgatccccagtggacgccgtggaaactctacagcaaggatgatattcgccagtcttcagcctattcgtcggctcgtttctcgctggccgatccgctgcacctgatcctgggcgcgcgctacacccaatataacattcgttataacccggcaggatcgccgaatacccgtctggaaagcaccaaagatgatgtcacgccgtacgccggcctggtgtatgacatcaatgaggactggtcgacctacgtcagctatacctctatcttccagccgcaggataagcgcgatgccagcggacgttatcttgaccctaccacgggtaaaagctacgaagccggggtgaaggcggactggtttaatacccgcctcaccacctcgctggcgattttccgcattgagcaggataacgtcgccagcaacacctatacctacatgccgagcggtgagtcgatctatgaatcgctggacggggtggtcagcaaaggggtcgagttcgagctcaatggtgccctgaccgataactggcagctgaccttcggcgcgacgcgttacatcgcagaagataagaatggcaacgccgtcagcgccgatcagccgcgcacaaccatgaagctcttcacccgctatcagttgccaatgctgccggaactgaccgtgggcggtggcgtaaactggcagaacaaagtgtggacggacgtggaaggcggcccggcaggacgttcccgcgcggagcaaggcagctatgggctggtgaacctgttcagccgttatcaggtcaccaaagattttgcggtgcaggctaacgtcaacaacctgttcgacaaagagtattacgattacgtcggctcttatgtagtgtatggcgcgccgctgaacgtctcggtgagcgcgagctacgatttctga

SEQ ID NO: 165517 - DNA, 360 bp, Enterobacter cloacae
atggctgaagaaacgattttcagtaaaattatccgccgcgaaattccgtcggatattgtctatcaggatgaactggtcacggctttccgcgacatttctccccaggcgccgacgcacatccttattattcccaatattctgatcccgaccgtcaatgatgttaaaaccgagcatgaagtggcgctgggccgtatgcttacggtagccgcgaaaatcgcagagcaggaagggattgctgaggacggataccgtctgatcatgaactgtaatcgccatggcggccaggaagtctatcatattcatatgcatctgctgggtggacgtccactgggaccgatgctggcacataaaggtctttaa

SEQ ID NO: 165518 - DNA, 375 bp, Enterobacter cloacae
atgttaactgggcgtattgcagcgctgatcgtgacgctggtaatggttgggtgcagcgcgcgtcccgccatcccggtcagtgaagaacagacgctggtgatggagtcctcagtgcttgctgcgggcatcacggcggagaaaccttcgctgaccataagcgaaatccagtcttcagcctcctctacgctctataacgaaaggcaagagccagtgacggtgcattatcgcttctactggtatgacgtgagaggtcttgagatgcacccgcttgaggcgccgcgcagcgtgaccatcccggcaagatcgtcagtcacgctctacggcagcgccagctatctgggtgcacataaggtgagactttatctttatttgtaa

SEQ ID NO: 165519 - DNA, 648 bp, Enterobacter cloacae
ttgattaaaacaatgagccgttatgcgctcctgagtgcttttgcactctttctggcgggttgtgtgacgcgaacggaagaaccagcaccggtagatcaggcgaagccgggaacggaacagccaacaacgccagcgcagcctgttccaaccgtgccgtctgtaccgaccattccggcgcagcctggcccgatcgaacatccggacgacaccgcacagcctgcgccgcgagtacgccactatgactggaacggcgcgatgcagccgatggtgggcaaaatgttgcaggcacagggcgttacgcccggcagcgtgctgctggtggacagcgtgaacaaccgtacaaacggttccctgaatgcgggagaagcgacggaaaccctgcgcaacgcgctggcaaacaacggtaaatttacgctggtctcagctcagcagctcgcagtcgccaagcagcagcttggtctgtcgcctcaggacagcctgggttcgcgcagtaaagcgatgggtattgcccgcaacgttggcgcgcagtatgtcctttattctaacgcgacaggcaacgtgaacacgccgtcgttgcagatgcagttaatgctggttcagaccggcgaaattatctggtcaggtaaaggtgccgttacgcaacaataa

SEQ ID NO: 165520 - DNA, 825 bp, Enterobacter cloacae
gtgccgttacgcaacaataagcgcacgcgtcatgacgtcctgacgcgttatttccctcagtaccgtgttatcgcgccgcaagcccccgccgggcttggcggcgcgagttgcattattgagcgtggcgaccatcggctggttttacgtcagcatcacgatgccgccgcgcctgcctcccattttcgtcgccagttccgcgccctgaagcgcctgcccgccgaccttgcgccacaacctcatctctttatcagagactggatggcggtggcgtttattgcgggtgagatcaaaagcgagcttcccgatacgcctgcgcttgcagccatgctgtatcatctgcatcgccagccgcgtctgggctggcgggtaacgttacttcctttgctggatcactactggcagcaggctgcgcctggacgacgcacgccctactggctggcgcagcttaagcggctacgcagagcgggagagccgcaggcgttacgtctggcgccgctgcatatggatgtccacgcgggtaatatcgttcataccacggcaggcgagaaacttatcgactgggaatatgccggagacggtgacgtggcgctcgaactcgctgcggtctggatgcctgatgaggcgtcacgcgagcagctgataaccgcctatgcccgaaacgccaacatcaatgcgctcacccttgcgcggcaggtcgcgcgctggcgtccgtgggtgttgatgctgatggcgggatggtttgaaatgcgccttcagcagacagatgacaaacaatttattgcgctggcaaatgatgcctggcgtcagttacaaacgaaaggataa

SEQ ID NO: 165521 - DNA, 1026 bp, Enterobacter cloacae
gtgggtccagtaatgttggatgtcgaagggtttgagctggatgcggaagagcgcgaaattctggcgcatccgctggtaggggggctgattcttttcacccgcaattatcatgatccggagcagttgcgtgagctggttcgccagatccgtgcggcgtcgcgcaatcacctggtggtggccgtagaccaggaaggtgggcgtgtgcagcgtttccgcgaagggtttacccgtttacccgccgcgcaatcttttgctgcgctgctggggatcgaagagggcggtcaactggcgcaggacgccggctggctgatggccagcgagatgatcgccatggatatcgacatcagcttcgccccggtgctggacgtaggacacattagcgcggcaattggtgagcgttcgtatcatgacgatccgcgtattgcgctggcaatggcgacgcgctttattgacggtatgcatgctgcgggcatgaaaaccaccggcaaacatttcccgggccacggggcggtgacggcggattcccataaagaaaccccgcgcgatccgcgcccggaagcagacattcgcgctaaagacatgtcggttttccgctcgctgatcgctgataacaagctggatgccatcatgcctgcgcacgtcatctacagtgaggtcgatccgcgtccggccagcggctctccacactggctgaaaaccgtactgcgtcaggaattaggcttcaatggcgtaattttctctgacgatttatccatggaaggggcggcgatcatgggaagctatgctgaacgtgggcaggcttcgctggatgcgggttgcgatatgatcctcgtctgcaataatcgtaaaggggcggtgagcgtgctggataacctgtcgccgatcaatgctgaacgtgttacacaattgtatcataaaggttcatttagtcgtcaggagctgatggactcggcgcgatggaaaacggtaaacgcgcggcttgaagccctgaacgagcgctggcaggcacataaagcagccctttaa

SEQ ID NO: 165522 - DNA, 543 bp, Enterobacter cloacae
atgatcatctatttacacggttttgactcaaacagtcctggtaatcatgagaaagtgctgcaattgcagtttatcgatccggatgtccggctgatcagttacagcacgcgtcatccgaagcatgacatgcagcatctgcttaaagaagtggataaaatgttgcagctcaatatcgacgatcgcccgctgatctgcggcgtggggttaggaggatactgggcagagcgcatcggttttttgtgcgatatccgtcaggtcatttttaatcctaacctctttccgaacgaaaacatggaaggcaaaatcgatcgcccggaggagtacgccgacatcgcaactaaatgcgtgagcaatttccgtgaaaagaaccgcgatcggtgtctggtgatcctctcccgcaacgatgaagcgctgaacagctcccgcgccgccgagcttctgcaccattactacgaaattgtctgggacgaagagcagacccacaagttcaaaaacatttccccgcacttgcagcgtattaaagcctttaaaacgctgggctga

SEQ ID NO: 165523 - DNA, 1305 bp, Enterobacter cloacae
ttgactacgccattgaaaaagatagtgattgtcggcggtggtgctggcggactggagctggcgacacagctgggtaagaagctgggtcgcggtaagaaagccaaaatcacgctggtggatcgtaaccacagtcatctgtggaagccgttactgcacgaagtggcgaccgggtcgctggatgagggcgtggatgcgctgagctatctggcgcatgcgcgtaaccaccatttccagttccagctgggttcggtggtggatatcaatcgtgaaaacaaaaccatcacgctggctgagctgcgtgatgataaaggcgagttgctggttcctgagcgcaagctggcctatgacacgctggtgatggccctgggcagtacctccaatgatttcaacaccccaggcgtaaaagagcactgcatcttcctggataacccgcatcaggcgcgtcgtttccatcaggagatgcttaacctgttcctgaagtacaccaataacatgggtgctaacggcaaggtcaacattgctatcgtgggcggcggcgcaacgggcgttgaattatcggcggagttgcacaatgcggtcaaacagctgcacagctacggctacaaagggctgactaacgaagcgctgaatgtgacgctggtggaagcaggtgaacgtattctgcctgcgctgccgccgcgtatttccggcgcggcgcacaacgagctgaccaaactgggcgtgcgcgtgctgacccagaccatggtgaccagcgcggatgagggcggcctgcataccaaagacggcgaatatatccaggccgacctgatggtttgggctgcggggatcaaagcgcctgatttcatgaaagatatcggtgggctggagacgaaccgcattaaccagctggtgacagagccgacgctgcaaaccacgcgcgatccggacatcttcgccattggcgactgtgcctcctgcgcacgtccggaaggcggatttgtaccgcctcgcgcccaggccgcgcaccagatggcaagcctcgtgctgcataacatcctggcgcagatgaaaggcaaaccgatgaaagcctatgtctacaaagaccacggctctctggtgtcgctctcaaacttctccaccgtgggcagcctgatgggtaacctgatgcgcggctccatgatggtggaagggcgcatcgcccgcttcgtgtacatttctctgtaccgtatgcaccagattgcgctgcacggctacttcaaaaccggcctgatgatgctggttggccgcatcaaccgcgtgatccgtccacgcctgaagctgcactaa

SEQ ID NO: 165524 - DNA, 540 bp, Enterobacter cloacae
gtgaataaatcaatgttggcgggtatagggattggcgtcgcagctgcgttaggtgtggctgccgttgccagtctgaacgtacttgatcgtggcccgcagtatgcgcaggtggtttccgctacaccgatcaaagagacggtcaagacgcctcgtcaggagtgccgtaatgtttctgtcacccaccgtcgtccggttcaggatgaaaaccgtatcgctggctccgtgctgggcgcggttgctggtggggtgattggtcatcagtttggtggcggccgtggtaaggatgtcgcgacggtggttggtgcgctgggtggcggttatgccggtaaccaggtacagggcgcgatgcaggaaaatgatacctacaccacaacgcagcagcgctgtaaaaccgtgtatgacaagtctgaaaaaatgttgggctacgacgtaacctacaaaattggcgatcagcagggcaaaatccgcatggataaagatcctggcacgcagatccctctcgacagcaacggtcagctgatactgaataacaaagtgtaa

SEQ ID NO: 165525 - DNA, 636 bp, Enterobacter cloacae
atgacaaccgatgtcacgcgttgcgcgaagaaaagccgtggccgaccaaaagtgttcgacagggatgcggcgctcgataaggccatgacgctcttctggcagcatgggtatgaagccacgtcgctttccgatctcgtggaagcaacgggcgcgaaagcccctaccctgtacgcagagttcaccaacaaagaaggcttattccgggccgttctggacagatacatcgcgcgcttcgcggcaaaacatgaagcccagctgttctgcgaagaaaaaacggttgagcaggcattgcaggattatttcacggcaatcgcgacctgctataccagcaaggacacgcctgcgggctgttttatgatcaacacctccgcgaccctcgcggcatcgtctaaagagattgccaacacggtcaaatcgcgacatgcgatgcaggaggagacgctcagcacgtttctggctcagcgtcagcagcgcggcgaaataccggcgcattgccctccgcaggagctttcccagtatctgagctgtattttacaggggatgtccatcagcgcccgtgaaggcgcgacgctggaaaaattgcaggggattacgcaaacaacgctgcgcctgtggcctgaacttcttaaactttga

SEQ ID NO: 165526 - DNA, 258 bp, Enterobacter cloacae
atgaaaaacgttaaaaccctcatcgctgccgccgttctgagctcactctctttcgcaagcttcgctgctgttgaagtgcaatccacgccagcagaccagcagaaagtcggtaccatctctgccactgccgggactaatctgggctctctggaagatcagctggcacaaaaagctgacgaaatgggtgcgaaatcattccgcatcacctctgtgaccggtcctaacaccctgcacggtaccgctgttatctacaaataa

SEQ ID NO: 165527 - DNA, 966 bp, Enterobacter cloacae
atgatgatttcttcgcgttttacccgctggttaactctgtttgcgctggccgcgacggttgccgtcgcgctccatgctcgcgccaatacctggcctcttccgcctgccggcagcaatgtcgtaggtgaaaaccgctttcacgtggttgaaaacgatggcggttcgctggaagcgattgccaaaaaatataacgtcgggttcctggcgctgttgcaggccaacccgggcgtagatccatacgtgccccgggcaggcagcgtactgacgattccgctgcaaaccatcctgccggacgcgccgcgtcagggcattgtgattaacctcgccgagctgcgtctgtattactacccgccgggcaagaacgaagtgaccgtctaccctatcggtattggtcagttggggggcgatacgctcacgcctaccatggtcaccaccgtctctgataagcgcgctaatccaacctggaccccgacggcaaacattcgcgcccgttataaagctcaaggtatcgacctgcctgccgtggtgcctgctggcccggataatccgatggggcaccatgcgattcgcctggcggcatacggtggggtttatcttctgcacggaacgaatgcggatttcgggatcgggatgcgcgtcagctccggctgcattcgcctgcgcgatgacgatatcaaaacgctctaccgcgtgatcgcccctggcacgaaagtgaatatcattaatacgccggttaaagtgtctgaagagccgggtggcgtccgtctggttgagatccaccagccgctatcgaaaaacatcaatgacgatccgcagacgctgccgattaatctgaatgcctcgatggtgagctttaaaacgaatgccaataccgatggcgcggtgatggagcgggcgatggaagcgcgctcggggatgccaaccgatgtcacgcggcatcatgaggttgctcagcaatcaatgtaa

SEQ ID NO: 165528 - DNA, 3447 bp, Enterobacter cloacae
atgcctgaacactatcgttactccttgcctgtcaaagcgggcgaccagcgccagctgggcgaactcacgggcgcggcctgcgccaccctggtggcggaaattgctgagcggcatcctgggccggtggtgctggttgccccggacatgcaaaacgctctgcgcctgcacgacgaaattcgtcagttcaccgatagcctggtgttcagcctggccgactgggaaacgcttccctacgacagtttttctccgcaccaggagatcatctcttcgcgcctgtcgacgctgtatcagcttcccaccatgcagcgcggcgtgctgattgtaccggtgaacaccctgatgcagcgcgtctgtccgcacagctatttgcacggccatgcgctggtgatgaaaaaaggccaacgcctgtcgcgcgatgccctgcgcgtgcagctggacggagccggctatcgacatgtcgaccaggtgatggagcacggcgaatatgcgacgcgcggtgcgctgctggatctctatccgatgggcagcgatcggccatatcgtctggatttctttgatgatgagatcgacagcctgcgcgtgttcgacgctgacacccagcgcacgctggaggaagtggactccattaacctactgcccgcccatgagttcccgacggataaaaccgccatcgagctgttccgcagccagtggcgcgacaggttcgacgtgaagcgcgatgccgaacatatctaccagcaagtcagcaagggcacccttccggccgggatcgagtactggcagcccctgttctttaacgaaccgctgccggcgctgttcagctacttcccggcgaatacgctgattgttaacaccggggatatcgacgccagtgccagccgctttgaaagcgaaacgcgcgcccgctttgaaaaccggggcgttgacccgatgcgtccgctgctgccgccggaaatgctgtggctacgtaccgacgagctcaacgccgagctgaaacgctggccgcgcatgcagctcaaaaccgacgcgcttgccgagaaggcggcgaacaccaatctcgcgttccggacgctgcctgatctggccgtccaggcgcagcagaaatccccccttgataatctgcgcaagtttcttgagtccttcaccgggccggtggtcttctccgttgaaagtgagggtcgccgtgaagcgctgggcgaactgctgggacggatcaaagttgcgccgatgcgcattcttcgcctgagcgaagcgaccggaaatggccgttacctgatgatcggcgccgccgagcacggattcattgatacgctcaataacctggcgttgatttgtgaaagcgacctgctgggcgagcgcgtcgcgcgccgtcgtcaggacagccgtcgcaccatcaacccggacaccctgatccgtaacctggccgaactgcaccccggtcagccgatcgttcaccttgaacacggggtgggtcgctatcaggggatgaccaccctcgaagcaggcggcatcaaaggtgaatacctgatgctgacctacgccaacgacgccaaactgtacgtgccggtgtcgtccctgcacctgatcagtcgctacgccgggggcgcggaagacaacgcgccgctgcataagctgggcggcgatgcctgggcgcgcgcgcgccagaaggcggcggaaaaagtgcgcgacgtggccgccgagctgctggatatttacgcccagcgtgcggccaaagagggctatgcgtttaagcatgataaagagcagtatcagctgttctgcgacagcttcccgtttgaaactacgccggatcaggcccaggccattaacgccgtgctgagcgacatgtgccagccgctggccatggaccgcttggtctgcggtgacgtgggcttcggcaaaaccgaagtggcgatgcgtgccgccttcctggcggtggaaaacaacaagcaggtggcggtgctggtgccgactaccctcctcgcccagcagcacttcgacaacttccgcgaccgcttcgccaactggccggtgcgcattgagatgctgtcgcgttttcgcagcgccaaagagcagacgcaaatcctggaacaggcaagcgaaggcaaaattgatattctgatcggcactcacaagctgctgcaaagcgacgtgaagtggaaagatctggggctgctgatcgtggatgaagagcaccgcttcggggtgcgccataaagagcgcatcaaagcgatgcgcgccgacgtcgacattctgaccctgaccgcaacgccgatcccgcgcaccctgaacatggcgatgagcggcatgcgcgatctgtcgataatcgccaccccaccggcgcgccgtctggcggtgaaaacctttgttcgcgagtacgacaatctggtggtgcgcgaggcgatcctgcgcgaagtgctgcgcggcggccaggtgtattacctgtataacgacgttgaaaatattcagaaagccgccgacaggctggcagaactggtaccggaagcgcgcatcgccattggtcacggccagatgcgcgagcgcgagctggagcgggtgatgaacgatttccaccatcagcgtttcaacgtgctggtgtgtaccaccatcattgagaccgggatcgacattccgacggcgaacaccatcatcatcgaacgtgcggatcacttcggcctggcccagctgcaccagctgcgcgggcgcgtcgggcgctcgcaccatcaggcctacgcctggctgctgacgccgcatccgaaggcgatgaccaccgacgcgcaaaagcgtctggaagctatcgcctcgctggaagatctgggtgctggctttgcgctggcgacccacgacctggagatccgcggcgccggtgagctgctgggtgaagaccagagcggctccatggaaaccatcggtttctcgctgtatatggagctgctggaaaatgccgtcgacgcgcttaaagcaggacgtgaaccgtctctggaagatctcaccagccagcagaccgaagtggaactgcgcatgccttctctgctgccggatgattttattcctgacgtgaatacccgtctgtcgttctacaaacgcattgccagcgcgaaaagcgaaggcgagctggaagagatcaaagtcgaactgattgaccgttttgggatattgcccgatgcggcgcgcaacctgctggatattgcccgcctgcgtcagcaggcgcagaaactgggcattcgcaagcttgaaggcaatgagaaaggcggcgtcattgagtttgccgagaagaaccacgtcgatccgatgtggctgattggcctcctgcaaaaacagccgcagcatttccgtcttgatggcccgacgcgtctgaaatttactcaggatctgacggaacgtaaaacccgcatggactgggtgcgtaactttatgcgtcagctggaagagaacgccatcgcataa

SEQ ID NO: 165529 - DNA, 1074 bp, Enterobacter cloacae
atgaaacaaaaagcattatggattaaccagataaaaggtctgtgcatctgcctggtggtgatttaccactcggtgatcaccttttatcctcacctggacgggctacagcatccgttatcgggcctgctcgccaaatgctgggtctactttaatctttaccttgccccgttccgtatgccggtgtttttctttatctccggctatttgatccgtcgatatattgacgaggtgaactggcgcaccagtctcgacaagcggatctggagcattgtctgggttttggccctgtggggcgtcctgcaatggcaggcgctgactcatctgaatgcctggctcgcccccgagcgagagctggcgacagcatccaatgcggcctacgccgattccgtttcagggtttgtacggggaatgctcacggccagcaccagcctatggtatttgtacgccttagtggtctactttacgctctgtaagctgctgagccgctggaaactgccgatgctggggcttctggcgctggcaagcatcgccatcaacttcatgccgttaccgtggtggggaatgaacagcgtggtgcgcaacatggtctactacagcctcggcgcatggtacggcgcgcagttgatggcgtggatgaaagggatgaatttgcgccgcagctggctgatcctcatcgcctctggtgcggtgtcggtggtgctgtggttcgctaatgtccctctgccgctctctctgctgtcaatcgtggttatcatgaagctcttttacagcttcgagcagcgttatgccgttcatcccaataatctgctgaacgtcatcggttcaaacaccatcgcgatatataccacccaccgcattttaatcgaggcatttagcctgctcctgatccgcgaaatgaatgcggcgtactggccgatctgggcggagttaacgctgattctggtctatccgtttatcagcctgctcgtctgcacgctggttgggctgggggcacgtaagctctcgaccgccctctttggcgatcttttcttctcccctcccgcgcggctttcgcccgtgcccacgacccgctaa

SEQ ID NO: 165530 - DNA, 1161 bp, Enterobacter cloacae
atgcgtgggcgcgccgcggaccgcttcggtcgctttgtctcctggctttcgactattggcattacgcttggcgtgatggcactggtgacggtgctttccgtcatgaacggcttcgagcgcgagctgcaaaacaatatcctggggctgatgccgcaggccgttctctcttccactcagggttccgttaatccgcaacagctgccggaaagcgcggtgaagttacagggtgtcacgcgcgttgcgccgctcacgacgggcgatgtggtgctgcaaagcgcccgtagcgtggcggtcggggtaatgctgggtatcgatccggcgcaaaaagatccgctgacgccgttcctggtcaatgtgaaacaaaccgacctggaagcgggtaaatacaacgtcatcctcggcgagcagcttgccgggcagctcggggtcaaccgtggcgatcagctgcgcgtgatggtgccgtcagccagtcagtttacgccgatggggcgtctgccaagccagcgcctgttcaacgtgattggcacgtttgcggcgaacagcgaagttgatggttaccagatgctggttaacattcaggacgcctcgcgtctgatgcgctacccggcgggaaatatcaccggctggcgtctgtggcttgatgcgccgctgaaggtggatacccttagccagcagacgctaccggaagggacgaaatggcaggactggcgcgaccggaagggcgaactgttccaggccgtgcgcatggagaaaaacatgatggggctgctgctgagcctgatcgtggccgttgccgcgtttaatatcatcacctcgctcgggctgatggtgatggagaagcaaggcgaagtcgccattctgcaaactcaggggctgactccgcgccagatcatggcggtatttatggtccagggcgccagcgctggcatcatcggcgcgctgctcggcgcggcgctgggggcgctgctcgccagccagctcaacaatctcatgccgattatcggcgcgctgcttgatggcgcggcgctgccggtggcaatcgagccgctccaggtggtcggtattgcgctggccgcgatggccattgcgctgctttctacgctttatccttcctggcgggctgccgccactcaacccgctgaggctttacgttatgaataa

SEQ ID NO: 165531 - DNA, 702 bp, Enterobacter cloacae
atgaataagatcctgttgcagtgcgacaacctgtccaaacgctatcaggaaggcactgtgcagaccgacgtgttgcacaatgtgagttttagcgtgggcgaaggcgagatgatggcgattgtcggtagctctggctccggtaaaagtacgttgctgcacctgcttggcgggctggacacgccaaccgaaggcgatgtgatcttctccgggcaaccgctgagtaaaatgtcgtctacggcgaaagccgagctgcgtaaccgcgagctgggctttatctatcagttccaccatctgctgccggactttacggcgctggaaaacgtcgcaatgccgctgctgattggtaaaaagaaacctgcggaaattaatgcccgcgccagcgacatgctaaaagcggtagggctgggtcatcgcggaaatcaccgtccgtctgagctttccggcggtgagcgtcagcgtgtggccatcgcccgtgcgctggtcaacaacccgcgcctggtgctggcggacgaaccgacaggtaacctcgatgcgcgtaacgcagacagcattttccagcttctcggcgaactgaacgccgcgcagggaaccgcgtttctggtggtcacccacgatttacaactggctaagcggatggggcgtcagctggaaatgcgcgacggtcgtctgaatgctgaactgacgctgatgggagcggagtaa

SEQ ID NO: 165532 - DNA, 1245 bp, Enterobacter cloacae
atggcttcaccgttatcgttactcatcgggttacgctttagccgcggtcgtcgccggagcgggatggtatcccttatctccgtgatctccaccatcggtatcgccctgggcgtggcggtgttgatcgtgggcttaagcgccatgaacggctttgagcgtgaactgaataaccgcattctggccgttgtcccccacggtgaaatcgagccggttaaccagccgtggtccagctggcgtgatgcccttaacaaagtggaaaaggtgcccggcattgcggcggctgcaccttacatcaactttaccgggctggtagagagcggggtaaacctgcgcgccattcaggtgaaaggggtaaatcctcgtcaggaagagcgtctgagcgcgctgccgcgctatgtgcaaaatggcgcatgggcaaactttaaggctggcgagcagcagatcatcatgggcaaaggcgttgccgatgcgctgaaggtgaagcagggcgactgggtctcgatcatgatcccgaacgccagcgctgatcacaaattgcagcagcctaagcgcgtacgtctgcacgtcaccggtattttgcagctgagcggccagctcgaccacagcttcgcgatggtgccgctggaagatgcgcgccagtatctggatatgagcgacagcgtgacgggcattgccattaaggttaacgacgtcttcaacgccaataaactggtgcgtgacgctggcagcgtgaccaataactatgtctacatcaaaagctggatcggcacttacgggtatatgtaccgtgatatccagatgatccgcgcgattatgtatctggcgatggtgctggtgatcggggtggcgtgttttaatatcgtctcgacgctggtcatggccgttaaggataagagcggcgacatcgccgtgctgcgtaccttaggggcgaaagacggtcttattcgcgccatcttcgtttggtacggtttgctggcggggctgtttggcagcctctgcggcgtggcgatcggcgtggtggtttcccttcagctgacgccgattatcaacggaattgaagcgcttattggccatcagttcctgtcaggcgatatctattttattgacttcctgccgtctgaactgcactggctggacgttatttatgtgctggttacagcacttttactgagtctgctggcaagctggtatccggcgcgtcgcgcaagccgaattgatccggcgagggtattaagtggccagtaa

SEQ ID NO: 165533 - DNA, 912 bp, Enterobacter cloacae
atgtattacggatttgatattggcggcaccaagattgcgctcggcgtgttcgataaagaccttaagctacaatgggaaacccgcgtacccacgccgcgcgaaagctacgatgaatttttaaccgccattgccgcgctggtggcgcaagcggatgaacgctttggcgtcataggcagcgtcggcattggtattccgggtatgcccgaaaccgacgatggcacgctgtatgccgccaacgttcctgccgccagcggcaaaccgctgcgtgccgatctctctgctctccttgagcgcgacgtgcgcttagacaacgatgccaactgttttgctctctcagaggcctgggacgacgagtttcgtcgctatccgctggtgatgggtttgattctcggaaccggtgtggggggagggatagtcattaacggtaagcccattaccgggcgcagctacattaccggcgaatttggtcatatccgtctgccggtggatgcgctggatgttgtcggacgtgatttcccgttgatccgctgcggttgtggtcagcacggctgtattgagagttacctttcaggccgtgggtttgcatggctttatgaacacttctatcatcagaaacatgacgccccccaaatcattaccctgtgggaacaaggggatgcgcaggcgcgagagcacgttgaacgctatctcgacctgctggccgtgtgcctggggaatatcctgaccatcgtcgacccggatctgctggtgatcgggggagggctgtcaaatttcactgcgattacggaacagttgtccgggcgtctgccccgacatttattgccggtcgcccgcgtgccgcgcattgaacgcgcgcgacacggggacgcaggaggcatgcgcggagccgcattccttcatctcaccgattag

SEQ ID NO: 165534 - DNA, 822 bp, Enterobacter cloacae
atgctgtcgcgtcgccagggtcgactcagccgttttcgcaaaaataaacgccgcttacgtgaacgcctgcgtcagcggatctttttcagagacaggatgatgccagaagcgatggataaacccagagtggtggtgttgaccggggcggggatctccgccgaatccggtattcagaccttccgcgcggcggacggactgtgggaagaacaccgagttgaagatgtggcgacgccggaaggtttcgcccgcgacccggcgctggtacaggcgttctacaacgcccgccgtcgccagcttcagcagccggagattgcgccgaatgcggcgcacctggcgctggcaaagctggaggaagcgctgggggatcgttttctgctggtcacgcagaacatcgacaatcttcacgaaagggccggaaaccacaacatcattcacatgcacggcgaactgctcaaggtgcggtgcgcatggagtggtcaggtgctggactggaaagaggacgtgctggacgaagaccgctgccactgctgtcagttcccttcgcgtctgcgtccgcatgtggtctggtttggcgaaatgccgctgggaatggatgagatctacagcgccctggctatggcggacgtctttatcgccattggtacctcaggacatgtctatccggcggcaggatttgttcacgaagcgcgactgcaaggtgcccatacggtggagcttaatctggagccaagccaggttgggagcgagtttgaagagaaacattacggtctggcgagcgaggtggtgccagcctttgtggataaactcctgaaggggctgtaa

SEQ ID NO: 165535 - DNA, 1035 bp, Enterobacter cloacae
atgaaaaaaatgcttgccgctgcggcactggtgctcggaatgggcgccgcgcatgctgatgacagcaaaacgctctatttctacaactggaccgagtatgtgccgccgggcctgctggagcagttcaccaaagagacgggcatcaaggtgatctattcgacctacgagtcgaatgaaaccatgtacgccaagctcaaaacctataaagatggcgcgtatgacctggtggtgccgtcgacctatttcgtcgacaagatgcgcaaagaaggcatgatccagaagatcgacaaaacgaagctaaccaatttttcaaacctcgatcctgagatgctaaacaagccgttcgacccgaacaacgactactccattccgtacatctggggcgcgacggcaattggcgtcaacagcgatgccattgatccaaaaacggtttcatcctgggctgacctgtggaagccggaatacaaaagcagcctgctgttaaccgacgatgcgcgcgaagtgttccaggttgcgctgcgtaaactcggctattccggtaacaccaccgatccgaaagagatcgaagcggcgtataacgaactgaaaaagctgatgccaaacgtggcgtcgttcaactcggataacccggctaacccgtatatggaaggtgaagtgaatctgggtatggtctggaacggctctgcgtttgtggcgcgtcaggccgggacgccgctggaggtggtctggccgaaggagggcggcatcttctggatggacagcctcgcgatcccggcgaatgcgaaaaacgtcgagggcgccctgaagctgatcaatttcctgctgcgcccggatgtggcaaaagaggtggcggaaaccatcggctacccgacgccaaacctggccgcgcggaagctgctcagccctgaagtggcaaatgataaatcgctttatccggacgctgaaaccatcagcaaaggggaatggcagaacgacgtcggtgacgcgagccgcctgtatgaagagtattatcagaagctaaaagcaggccgttaa

SEQ ID NO: 165536 - DNA, 792 bp, Enterobacter cloacae
atgatcggtcgactgcttcgcggcggttttatgaccgccatttatgcgtatctctatattccgataatcattttgatcgtgaactcttttaacagctcacgcttcgggatcaactggcaagggtttaccaccaaatggtatggcctgctgatgaacaatgacagcctgctacaggccgctcagcactcgctgacgatggcggtattctctgccaccttcgcgacgctgattggctcgctgaccgccgtggcgctgtaccgctaccgttttcgcggtaagccgttcgtcagtggcatgctgtttgtggtgatgatgtccccggatatcgtgatggccatttcactgctggtgctgtttatgctgctgggcgtccagctcggtttctggtcgctgctgttctcgcatatcaccttctgtctgccgtttgtggtggtaaccgtctacgcgcgtctgaaagggttcgacgtacgcatgctggaagcggcgaaagatctgggtgcgagcgagatgaccattctgcgcaaaatcattctgccgctggcgatgcccgccgtggcagcaggatggctgctcagctttaccctgtcgatggacgacgtggtcgtgtcctccttcgtcaccgggccgagctatgaaattctgccgttgaagatctactcaatggttaaagtcggtgtttcacccgaagtgaacgcgctggcgactattctgttggtgttatcgctggttctggtaattgccagccaggttattgctcgtgataaaacaaaatctcaggggacacagaaatga

SEQ ID NO: 165537 - DNA, 858 bp, Enterobacter cloacae
atgaagaacacaagtaagttccagaatgtggtgattgccacgatcgtcggttggcttgtgttgtttgtctttctacccaacctgatgatcatcgtaaccagcttcctgacccgcgacgacgcgaacttcgtcgcgatggtctttacgctggacaactacgcgcgcctgctcgatccgctctattttgacgtgctgctgcactcgctcaatatggcgctgattgctaccctcgcctgtctggtgctggggtatccattcgcctggttcctggcccgcctgccgcaaaaagtacggccgctgctgctgtttttactgattgtacccttctggaccaactcgttaatccgcatctacgggctgaaaatcttcctcagcaccaaaggttatctgaacgagtttctgctgtggctgggggtgatcgagacgccgatccgcatcatgttcaccccgggcgcggtgattgtcggcctggtctatatcctgctgccgtttatggtgatgccgctctactccagcattgaaaagctcgataaaccgctgctggaagcggcgaaagacctgggcgccagtaagttacaaacctttgtccgcatcattattccgctgaccatgccgggtattatcgccggctgtctgctggtcatgctgcctgcgatgggcctgttctacgtatcggacctgatgggcggggcgaaaaacctgctgatcggtaacgtgattaagagccagttcctgaatatccgcgactggccgttcggctcggccaccagcataacgctgacggtggtgatggggctgatgctgctggtttactggcgtgcatcacgcctgctgaataagaaggtggagctggaatga

SEQ ID NO: 165538 - DNA, 1119 bp, Enterobacter cloacae
ttgaatacacaaccccgttccctttcaccgctggtgcaactggaacgaattcgtaaaagtttcgatggcaaagatgtcatttccgaccttaatctgaccatcaatgacggtgagtttctcacgctgctcggcccctccggctgcggcaaaaccaccgtcctgcgccttatcgccgggctggaaagcgtcgataacggccatatccatcttgagaaccaggacataacccaggttccagccgaagatcgccacgtcaataccgtctttcagagctatgccctgttcccgcacatgaccgtgtttgagaacgtggcgtttggcctgcggatgcaaaaaacaccggccagcgagatcccacctcgggttaccgaagccctgcgcatggtacagctggaggcgttcgcccagcgcaagccgcatcaactttccggtggtcagcagcagcgtgtggccattgcccgcgccgtggtcaacaaacctcgcctgctcctgctggatgaatccctctccgcgctggactacaagctgcgcaagcagatgcagaacgagctgaaagcgcttcagcgtaagctcggcatcacgttcgtgtttgtcacgcacgatcaggaagaagccctgaccatgtcagaccgtatcgtggtgatgcgcgacggcaagattgagcaggatggcaccccgcgtgaaatttacgaagagccgaaaaacctgttcgtcgccagctttattggcgaaatcaatatctttaacgccacggtgatcgagcgtctggacgagcagcgcgttcgcgcgaacgtggaaggccgcgaatgcaatattaccgtcaactttgccgtcgagaaggggcaaaagctcaacgtcctgctgcgcccggaagatctccgcgttgatgagatccacgacacggctgacgtcgaaggtctgatcggttacgttcgcgaacgcaactacaaagggatgaccctcgaatccgttgtggaactggaaaacggcaaaatggtgatggtcagcgagttctttaacgaggacgatccggacttcgaccactcgctggatcagaaaatggtcatcaactgggtagaaagctgggaggttgtactggctgatgaagaacacaagtaa

SEQ ID NO: 165539 - DNA, 1224 bp, Enterobacter cloacae
atggataaactacttgagcgtttcttacattacgtttcgctggatacccaatctaagccgggggtccgacaggtgccaagcaccgaaggccagtggaagctgctaaatctgctgaaagagcagctggaggccatggggctggttgatgtcacgctcagcgaaaaagggaccgtgatgggaacgctgccggcgaatattgacggcgatatcccggcaattggctttatttctcatgtcgatacctcacctgattttagcggtaaacacgtaaacccgcagattgttgaaaactatcgcggcggtgatattgcgctgggcattggcgacgaagtgctgtcgccggtgatgttcccggtactgcatcagctgctggggcagacgttaatcaccactgacggcaaaaccttgctgggggccgatgacaaagcgggcatcgccgagatcatgacggcgctggcggtgctgaagggcaaaaatatcccacatggcgatatccgcgtggccttcacgccggatgaagaggttggaaaaggcgcaaaacactttgacgttgaggcgtttaacgcgcagtgggcctacaccgtcgacggtggcggcgtgggtgaactggagtatgaaaactttaacgcggcatcggtaacgatcaaaatcgtcgggaataacgtgcacccggggtctgcgaaaggggtgatggtgaatgcgctgtcgctggctgcgcgtattcatgcggaagtgcccgccgaagagagcccggagatgacggaagggtatgagggtttttatcatctgaccagcatcaaggggaccgtggacagcgcgcagatgcactatattgtccgcgatttcgaccgcaaagcctttgaagcacgcaaacgtaagatgatggagatcgcgaaaaaggtcggcaaggggctacatccggattgctatattgaactcatcatcgaagacagctattacaatatgcgcgataaggtgatggagcatccgcatattcttgatatcgcccagcaggcgatgcgcgattgtgacatcgagccggtgatgaaaccgatccgtggcggtaccgatggttcacagctgtcgtttatgggcctgccgtgcccgaacctgtttaccggtggatataactaccacggcaagcatgagttcgtgacgctggaagggatggagaaagcggtgcaggtgatcgtgcggatagcggagttaaccgcgaagcggtaa

SEQ ID NO: 165540 - DNA, 492 bp, Enterobacter cloacae
atgtcaaactaccgccgccacaacatccccggtgggacctggtttttcaccgtcaatctgcaaaaccgccagagcgatttacttactcgccacatcgacagcctgcgttccgctaccgccacggttaagcgtgcgaagccctttaccattaacgcctgggttatcctgcctgaacatatgcactgtatctggaccctgccggaaggagacagtgacttttcagcgcgctggcgcgacatcaaaaaaacgtttagccgcaacattgaaatgcgccacgtctggcaaccgcgtttctgggagcacactattcgcaatgagcaggattatcggcggcatatggattacatctacatcaatccgctgaagcatggctatgtcgggaaagtcgtcgactggccatattcaacatttcatcgggacgtgcgggaagggttatatccggcagactgggcgggtgagattgaggattttgcggcgggggagcggaagtaa

SEQ ID NO: 165541 - DNA, 1122 bp, Enterobacter cloacae
atggattatcaattaacgcttaactggcccgaatttattgaacgttactggcaaaaacgcccggtcgttcttaaacgcgggatcagcaattttatcgaccctatttctcctgacgaactcgctggtctggcgatggaaaacgaggtagacagccgtctggtgagccaccaggacgggaaatggcaggtcagccacggtccctttgaaagctacgatcacctgggcgaaaacaactggtctttactggtgcaggcggtcaacaactggcacgaacccaccgcagccttaatgcgtcccttccgcgccctgccagactggcgaatggacgatctgatgatctccttctccgttcccggtggcggcgtgggtccgcatctggatcagtacgacgtgtttatcattcagggtaccgggcgccgtcgctggcgcgtgggcgaaaaagtgccaatgaagcagcactgcccgcacccggatctgcttcaggttgatccgtttgaagggatcattgatgaagagctggagccaggtgacattctttatatcccaccgggcttcccgcatgaaggttattccctggaaaactcgctgaactattcggttggtttccgcgcgccaagcgggcgcgagatgatcagcggatttgctgactatgttttacagcgtgagctgggcagctaccgttacagcgatccggatgttccggcgcgtgagcacccggcggatattctgccagaggagctggataagctgcgcgggatgatgctggatctgatcaatgaaccggagcacttcagacagtggtttggcgagtttatcagccagtcgcgtcacgaactggacgtcgcaccgccagagccgccgtatcaggcagatgaaatttatgatgcgctccagcagggcgataagctggttcggctgggcggattacgcgtactgcgcattggcgaagaggtattcgtcaacggcgagcgcctggactctccgcatcgcccggcgctggaagcgattgccagccatatggtgctgactgcggatacctttggcgacgcactggacgatccctccttcctcgccatgctggccgcgctggtgaacagcgggtactggttttttgaggactga

SEQ ID NO: 165542 - DNA, 1464 bp, Enterobacter cloacae
atgaaagggatattgcgccacattttacccctttcgctgcgggttcgctttttgctggcaaccgccgccgtcgtgctggtgctgtcgctctcttacgggatggtggcgttggtcggttatagcgtgagcttcgataaaaccaccttccgcctgcttcgcggcgaaagtaacctgttttataccctggcgaagtgggagaacaaccgaatcaccgtcgagatgccggaaaacctgaatcagcagagcccgacgctggcgctgatctatgatgaaaaagggaaattgctgtgggcccagcgcgatgtcccgtggttgaaaaagcgcatccgtccggaatggctgaaaaccaacggttttcatgaaatagaagccgacctcaactccaccagcagcctgctgcgtgacgatcgcgccttacagatcaagcttaatgagatccgtgccgaagatgacgacacggagatgacccactctgtggccatcaacctttaccccgccaccctgaacatgccgcagttaaccattgtggtgatcgataccataccggttgagctgaaacgctcgtatatggtctggaactggtttgtgtatgttctggctgccaacctgctgctggtgatccctctcctgtgggttgctgcatggtggagcctccgcccgattgaatcccttgccaaagaggtgcgcgagctggaggaacatcaccgcgagaagctcaacccggagaccacccgtgagctgaccagcctggtgcgcaacctcaatcgactgctgaaaagcgaacgtgaacgctacgacaagtatcgcaccacgctcaccgaccttacgcacagcctgaaaaccccgctggccgtgatgcagagtaccctgcgttccatgcgcagttcgaaaatgagcgtggatgacgccgagccggtgatgctggaacaaatcagccgtatttcacagcagatcggctattacctgcaccgcgcgagcatgcgttccggaagcgccctgttgagccgtgaactgcacccggtagccccgctgctggataacctcacctctgcgctgaacaaggtgtaccagcgtaaaggggtcaacatcagtctggatatctcaccggaaatcagctttgtcggtgagaaaaatgactttatggaagtgatgggaaacctgctcgataacgcctgcaaatattgtctggagtttgtcgaggtatccgcgcgggtaacggataacgaactgcatattatcgttgaggatgatggtcctggtattccccgtaataaacgcgaagtggtgttcgatcgcggccagcgcgccgatacgctgcggccaggccagggcgtcggattatccgtcgccagggaaatcgtcgatcagtacgagggcaagattgaaaccggtgaaagtttgctgggcggtgcccgtatggaagtcatttttggccgccagcatcccgtatcgaacgatagttga

SEQ ID NO: 165543 - DNA, 675 bp, Enterobacter cloacae
atgatgcgcgtactggttgttgaggataacgcattgctacgtcatcacctgaaagttcaacttcaggagatgggtcatcaggtggacgatgctgaagacgcaaaagaggccgattattatctcaatgaacacctgccggacatcgccattgtcgatttagggctgccggatgaagacggattgtcccttatccgccgctggcgtagccatgatgtttccctgccggtgctggtgctgactgcccgcgaaggctggcaggacaaggttgaagtcctgagcgctggcgcggatgactacgtgaccaaacccttccatattgaagaagtcgctgcgcgtatgcaggcgctgctgcgccgcaacagcgggctggcgtcacaggttatctctctgccgccgttccaggtggacctctctcgccgcgaattttctattaatgatgaagtgatcaagctgaccgcattcgaatataccatcatggaaacgctgatccgtaacaacggtaaagtggtgagcaaagattcccttatgcttcagctctatccggatgccgagctgcgcgaaagccacaccattgacgtactgatgggtcgcctgcgtaaaaaaattcaggcgcagtacccgcatgacgtgatcaccaccgtgcgtggtcagggctatctgttcgaattacgctaa

SEQ ID NO: 165544 - DNA, 393 bp, Enterobacter cloacae
atggaatggaaggttgttgagactattgcgagcccggaaagcggaaccattttttgcaaagttgaaacacagtatggcctgaattatatcctgtggttaaagggagattattacgttcgtacaggtgaaatcatcaccacctcaaaccaggggatcctgattaacgatcggcgccgcagagtatggatagcgcaggcaatgccctttacatccataggctggatggggttcaaacagaaaaacgcgtgtccaggcaaccgacaggaaatggatcgcccgtgcacggctgaaaccccgtgccagttcaaactgtgcccgttcggcttaaaacggtatataccggaaagttattccacagcgaaaattaacaatcagcctgacggcaggctttaa

SEQ ID NO: 165545 - DNA, 1371 bp, Enterobacter cloacae
atggaattatcctcactgaccgccgtatcccctgtcgatggacgctacggcgataaagtcagcgcgctgcgcgggatcttcagcgaatatggcctgctgaagttccgtgttcaggttgaagtacgctggctgcaaaagctggccgcccagacagcaatcaaggaagttcctgcttttgacgcaaaggcaaacgattaccttgataaaatcgttgctgagttcagcgaagaagatgccgcgcgcattaaaaccatcgaacgcaccaccaaccacgacgtgaaagcggttgaatacttcctgaaagagaaagtggcaagcgtccctgccctgcacgcggtatctgaatttattcacttcgcctgtacgtctgaagatattaacaacctgtctcacgcgctgatgctctctaccgcgcggaaagaggtggtactcccttactggcgtaaaatcattgatgcggtgaaagcgctgtccgtggaataccgcgacattccgctgctgtcccgtactcacggccagccagcaaccccatccaccatgggtaaagagatggcgaacgtggcgtaccgcatggaacgccagtatcgtcagttggagcaggttgagatcctcggcaaaatcaacggcgcggtgggtaactataacgcccacatcgccgcgtacccggaagtggactggcaccagttcagcgaagagtttgtgacctctctggggatccagtggaacccgtacaccacccagattgagccgcacgactacatcgccgagctgtttgactgcattgcgcgcttcaacaccatcctgatcgacttcgatcgtgacgtatggggttacatcgccctgaaccacttcaagcagaagaccatcgccggggaaatcggttcgtccaccatgccgcacaaagtgaacccaatcgactttgaaaactccgaaggtaacctgggtctggcgaatgccgtgttgcagcatatggcgagcaagctgccggtatctcgctggcagcgtgatctgactgactccacggtgctgcgtaacctgggcgtaggtattggctacgcgctgatcgcctaccagtccaccctgaaaggtgtgagcaaactggaagttaaccgcgaccgtctgctggacgagctggatcacaactgggaagtgctggcggagccgattcagaccgtgatgcgtcgttacggcatcgaaaaaccgtacgagaaactcaaagagctgacccgcggtaaacgtgttgatgctgaaggtatgaaacagtttatcgacggtctggcgctgccagaagaagaaaaagcgcgcctgaaagagatgaccccggcaaactacattggccgcgccattactatggttgacgagctgaagtaa

SEQ ID NO: 165546 - DNA, 630 bp, Enterobacter cloacae
gtggcgaagaactattacgacatcaccctggcgctggcgggaatttgccagtcagcccgtctggtgcaacagctggcgcatcagggtcattgcgacgctgatgccctgcacgtttcactcaacagcgttatcgatcttaacccaggctccacgctgggcgtctttggcggcagtgaaaccaatcttcgtctcggtcttgaaactctgctcggcgtgctcaacgccagcaaccgtcaggggttgaacgcggaactgacccgctacaccttaagcctgatggtgctggaacgtaagcttaatgcggcaaaaggcgcaatgaataccctgggcgaccgcatcgccgggctacagcgccagctcgaccactttgacctccagtctgagaccctgctcagcgcgatggccggtatctacgttgacgtgattagcccgctcggcccgcgtattcaggtcaccggttcgcctgccgtattgcaaagcccacaggtacaggcgaaggtacgcgcttcgctgctggcaggcatccgtgccgccgtgctgtggcaacaggtcggcggtggccgccttcagttaatgttttctcgtcatcgcctgacgactcaggcaaaacaaattcttgctcattgttaa

SEQ ID NO: 165547 - DNA, 1170 bp, Enterobacter cloacae
atggtgggggggcgtgatagaatacgccgccttgaagttcaatgtcgtgagtattccatgtcagataacagccagaaaaaagtaatcgtcggcatgtccggcggtgtcgattcctccgtttccgcctacctgttgcagcaacagggctataaggtggagggcctgttcatgaagaactgggaggaagacgatggcgaggaatactgcactgccgctgcggatctcgccgatgcgcaggccgtgtgcgataagctcggcatcgaactgcacaccgttaactttgccgcagaatactgggacaacgtttttgaactcttcctcgaagagtacaaagcgggccgcacgccaaacccggatatcctgtgcaacaaagagatcaaattcaaagccttcctggaattcgccgcagaagacctgggcgcagactacattgcgaccggccactacgtgcgtcgcgcggatgtgaatggcaaaagccagctgctgcgcggcctggacggcaacaaagatcagagctacttcctctatacgctgagccacgaacagattgcccagagcctgttcccggtcggcgagctggaaaagccggaagtgcgtaagattgctgaagatctggatctgatcaccgcgaagaaaaaagactccaccggtatttgttttatcggcgagcgtaaattccgcgagttcctggggcgctacctgcctgcacagccgggcaaaatcgtcaccgttgacggtgacgagattggtcagcaccaggggctgatgtaccacactctcggccagcgtaaaggtctgggaatcggcggcaccaaagagggcagcgaagatccgtggtacgtggtcgacaaagacgtcgaaaacaatattctggttgtggctcagggtcacgaccacccgcgcctgatgtccgttggactgatcgcgcaacagctgcactgggtcgatcgcgagccgctgaaaggcacgctgcgctgcacagtgaaaacgcgctaccgccagacggacatcccttgcaccgtaaccgcactggatgacgatcgcattgacgtgcgtttcgacgagccggtttccgccgttacccctggccagtctgctgttttcttccgcggcgaaatttgcctcggcggtgggatcattgaacagcgcctgccgctgcctgctgtttaa

SEQ ID NO: 165548 - DNA, 474 bp, Enterobacter cloacae
atgtttaaacctcatgttacggtcgcctgcgtggtccatgcgcaggggaaattcctggtggtggaagagaccatcaacggcaaagcgctgtggaaccagcctgccgggcatcttgaagccaatgaaaccttacgccaggcggcagcccgtgagctgtgggaggagacgggtatccgcgccgaaccgcagcattttatccgtatgcatcagtggatagcgcctgaccagacgcctttcctgcgcttcttattcgccgttgaacttaacgaaacgtgcgccactgaaccgcacgacgacgatatcgatcgctgcctgtgggtgactgccgaggagatcctgaacgcgccaaacctgcgttcgccgctggtggcggaaagcatccgctgctggcagtctgcggcgcgcctgccgctggatgtcattgcagaatttaactggccgtttacagagggtgtcaatggtgggggggcgtga

SEQ ID NO: 165549 - DNA, 663 bp, Enterobacter cloacae
atgcggcaattgataacgcctgaaaataccatgacgaaaacttcttttagaaaacaccgggttgagcgattcagctcacgacaagccaccagaagaacgccagaaccccagccaacgcgggtcatactgttcaataaaccctacgatgtattgccacagtttaccgacgaggccgggcgcagcacgctgaaggactttattcccgttcagggagtgtacgcggcgggacgtctggatcgtgacagcgaagggttgctggtgctcaccaatgacggcgtgctccaggccaggctcactcagccgggcaagcgtaccgggaaaatttactttgtgcaggttgaaggcgagccggacgacgcgtcgctggcaaaactgcgtaacggcgtaacgctgaacgacggtcccaccctgccggctggtattgagcgcgtgaatgaacccgagtggctatggccgcgcaacccgccgattcgtgagcggaaatccattcccaccagctggcttaaaatcaccctttatgaaggccgcaaccgacaggtcaggcgcatgactgcgcatgtgggcttccctaccctgcgactcattcgctatgccatgggcagctacacgctggactcgctggcaaacggggaatggcgggatgttacccctaaggagaactga

SEQ ID NO: 165550 - DNA, 1251 bp, Enterobacter cloacae
atggaaagcaaagtagttgttccggcggaaggtaaaaagatcaccctgcaaaacggcaagattaacgttcctcacaacccgattatcccgttcattgaaggcgacggtatcggcgtagacgttaccccggcaatgctgaaagtggttgatgccgctgttgagaaagcctacaaaggcgagcgtaaaatttcctggatggaaatttacaccggtgaaaaatcgactcaagtttatggccaggacgtctggctgccagccgaaacgctggacctgatccgcgactatcgcgttgctatcaaaggccctctgaccacgccagttggcggcggcattcgctccctgaacgtggcgctgcgtcaggaactggatctatatgtgtgtctgcgtccggtgcgttactaccagggcaccccaagcccggttaagcacccggaactgaccgacatggttatcttccgtgaaaactcagaagacatctacgccggtatcgaatggaaagcggactctgctgatgcagaaaaagtgattaaattcctgcgcgaagagatgggagtgaagaaaattcgcttccctgagcattgcggcatcggcatcaagccatgctccgaagaagggaccaagcgtctggtgcgtgccgccatcgaatacgctatcaccaacgatcgtgactctgtgaccctggttcacaaaggcaacatcatgaagttcaccgaaggcgcgttcaaagactggggctaccagctggcgaccgaagagttcggcggtgaactgatcgacggcggcccatggcagaaaattaagaacccgaacaccggtaaagagatcatcattaaagatgtgattgccgatgcgttcctgcaacagatcctgctgcgacctgctgagtatgacgtgatcgcctgtatgaacctgaatggtgactacatctccgatgcgctggccgcgcaggtgggtggtatcggtatcgccccgggcgcgaacatcggtgacgagtgcgccttgttcgaagcaactcacggtactgcacctaaatacgcaggccaggacaaagtcaacccaggctctatcattctgtccgcagagatgatgctgcgtcatatggaatggttcgaagccgcagacctgatcgttaagggtatggaaggcgcgattaacgcgaaaaccgtcacctatgactttgaacgtctgatggaaggcgctaaactgctgaaatgctcagagtttggcgacgcgattatcgcgaacatgtaa

SEQ ID NO: 165551 - DNA, 246 bp, Enterobacter cloacae
atgacccatgatatcccgctcaagtattatgacatcgtcgacgagtatgcgactgaaacggcgaaaccggtagaagaggcagagcgtacgccgctggcacactatttccagctgctgctcactcgcttatacaacaatgaggaaatcagtgaagaggcgcagcgggagatggctgtccaggcggagatagacgaagcgcgcattgacgatattgcgaacttcctgaatcagtggggcaatgaataa

SEQ ID NO: 165552 - DNA, 1500 bp, Enterobacter cloacae
atgaagaaggccattgccgttgctatcatctcaacctttatggtcgtcctgtcgctgtatgcggttaacgccattatcgctgagcagcaaaagaaccggcagagggagatctcccacacgctcttaagctattctgaagagttaacgcaaaatatcgccagtacgcttaaaaatacctccgcgcagggatgcgatagcgccagtctgaacgtctaccgaaaattaaagatgcgaagtctctatttcgccgatgtggggtttattgaaaaggggaaaatcacctgcaccgcgttttggggcaagctggcaaatcccatcgcccttccctctgagctgcataatacccagaacggattcagcctggcgcagttttcgcagaaagatttctttgtcggcaatgcaacaatctataaccaccttattatcttcacctcccgttcagcctacgataaatttgcccccgttaccgccaactattcgcttcgttcttccactaaagatttcggccgcacctttttcaccgttacgccgccatcagaaaacttcagccgcttacagtctctgttatttacgctggctgtgacagagtgcagtacacgctgggatttgtgcgttaccgtcacacaccatgatgccggactggcttcgctctcccacgtagtgatggtgcttctgtgcttgtttttatactttatctgggtatccctgacgctgttttctcttcgactttatgaagaccgacgttctctggaacgaacgctggtcaaagcggtaaaaacgaataccatcagcgttcattttcagcctgttattcgggttgctgataagaaaatcgtcggggttgaagtgttatcaagatggcaggataacaatcacaaagaggtttctcctgagctgtttatcccgttaattaaaaaaattggcctgtataacgtttattatcagaacatgataaagaaatccctggcggaaattgccgcgctggccgctgaacatcagttaatgatttcactgaacgttggccggacggaaattgaagacggcaaattcctggcggtattacgttatgcatgctcagagaacgcgattcccttatcgttaatcaaagttgagttatctgagaatggcgtttccacctcggccatccttgaagtgttttgtgaggagcttaaatcggcaggcgtcaaaatttcaatagacgattttggtgtgcaaaactctaatctggccaggctctcaaatctcaaatatgacgaaatcaaggtggataagtcgttagtggacggcatcagcgagcactataaacaggatatcctggtgatcttcagcgacgcgctcgctaaactgcacaaaaccctggtttttgaaggggttgaaagcgaaacgcaatatcagttcatcgcgcagagataccccgatgccctcgtacaaggctggtacttttcaaagtcgctaacccggcacgacctcgccaggctgctggcagactcagcgcgatga

SEQ ID NO: 165553 - DNA, 249 bp, Enterobacter cloacae; identical to SEQ ID NO: 114821

SEQ ID NO: 165554 - DNA, 1029 bp, Enterobacter cloacae
atgtcagatatcattcttgcccgtgtttcagaaaccctctccactgagcaatctctcgacagtctggtgcgtcagctactggaaatgctggaaattgtgacggatatggaatcaacctacctgacgaaagtcgatatcaatgcgcgtttgcagcacattttatatgcccgtaacagcaagcaaatgcagatcccggaagggttcagcgtgccctgggacgaaacactgtgtaagcgcgccatcgacagcgacacgttgttcagtaacgaggtgcccgaccgctggccggagtgtgaagcggccaaagcactgggcattacaacctatatgagcgtgccggttcacctggctgacggttctctgtatggcacgctttgcgctgccagcaccgcacagaaacagttcagcgagcgtggcgagcaggtgatcagactctttgccggtttaattggtcagtacattcagaaagagtcgcttgtgcttcagcttcgcgaagcaaatgcggcgctcattgctcactcttacaccgacgccctcaccggcctgccgaatcgtcgcgccatttttgaaaaccttaccaccctgttctcactggcgcgccatcttaaccgcaacgtcatgatggcctttattgacctcgatgatttcacgcgaatcaatgaccagtacgggcatgaggcgggcgatcgcttcctcgtacaggtcggcaagcggctgactcacgagcaaacgcaggatgagattattggccggctcggcggcgatgaatttctggttgccagcctgagtcacagcgatgatggcgacgccagtacagaggtcaacgcaatcaaaacccgcctcaatggtcttattgcgggcgaatacgggttaggcaatgccactattctttatcccggcgcaagccttggcgtcgttattgttgatcctcacagcacggatgaagatagcgccctgcgcaccgcagacctcgcgatgtatcaggataaaaaaggaaaaagcaaaacaggctttgtcgcgttagattaa

SEQ ID NO: 165555 - DNA, 255 bp, Enterobacter cloacae
atgaaatatcttctcctggcgctggttttaccgctggccgcctgctcaacaaagacaacccctcctgatgcgcctcaaccgccgcacgctattggtatggcaaacccggcgtcagtgtactgtctggagaaagggggagagcaaatccctgttcaaagcccgcagggcgtacgtaccgagtgcaaattgccagacggggaagtgatcgatgaatgggatctctaccgccgcgatcacccgcaaccgaccagatga

SEQ ID NO: 165556 - DNA, 306 bp, Enterobacter cloacae; identical to SEQ ID NO: 114818

SEQ ID NO: 165557 - DNA, 345 bp, Enterobacter cloacae; identical to SEQ ID NO: 114817

SEQ ID NO: 165558 - DNA, 708 bp, Enterobacter cloacae
atggaactctccccggttaaaacgacgctgcgcattgcgctggttggtgattacaatcccgatgttattgcgcaccaggcgatcccgctggcgattgacgacgccgctgcggttctggagctcaccgctgattatgactggctcgccacgcctgagctgaccagccccgaagacctggtcgggtacgatgccatctggctggtaccggcaagcccgtataaaaacaccgaggcggcgtttattgcggcccgttacgcgcgtgagaacagcatcccctttctcggcacctgcggcgggttccagcatgcgctgattgagtatgcgcgtaatgtactgggctggcacgatgcaggccatgccgaaaccgacaccgagggaaggatggtaattgcgccgctgacctgctcgctggtggaaaaaaccgacgcgatcgagctgcggaataacacgctgattgctaaagcgtatggcaagccggaaattcaggaggggtatcactgcaattacggagtctcacctgagtttgccgaccagcttgagcggggcgacatgcgcgtaacgggctgggacgagcagggcgagatccgcgcggcagagctggtaacccatcctttctttgtcctcaccctgttccagcatgagcgggccgcgctgcaagggcgcccggtcgtgctggtacaggccatgctgcgggcggcgcagggataa

SEQ ID NO: 165559 - DNA, 1188 bp, Enterobacter cloacae
atgactactgctattcaaccttccgggaaacagggtgcgctgctgattgcaggcatcctgatgattgccacgacgctgcgcgtcacctttaccggtgtcgcccccctgctcgataccatccgacaggactatggcttaagcacggcgcaaaccggcctgctcacgacgctgcctctgctggccttcgcctttatctctccccttgccgcaggcgtcgcccggcgcctgggcatggagcgcagcctttttatcgctctgctgctgatttgcatcgggattggcgtacgttcgctgccgtcggcctcgctgctatttatcggtacggcgatcgtgggctgtgggattgcgctgggcaatgtcctgctacctggcttaatcaaacgtgattttccgggccaggtcgcaaaactgacgggggcttattcgctgacgatgggagccgctgctgccgcagggtcggcgctgatcgtcccgctgtcgctggggagtggtggctggcacggggcgctgttgatgctgatgttcttcccgctggtggcgctgctgctgtggttaccgcaatggcgccagaagccggccgccaccctgaccggagcgggcgcgctgcacaatcgggctatctggcgctcggcgctcgcctggcaggtgacgctttttctgggcattaactcgctgatttactacgtcattatcggctggttacccgcgattttgcttagccatggctacagcgaaacgcaggctggctccatgcacgggcttctccagctggcaaccgcggttcccggtctcgccattccgctgatcctgcaccgtcttaacgatcagcgtggcattgccgggctagtcgccctgatgtgcgccgtcagcgcggccgggttctggttcgcgccggggctggccgtcgtctggacgctggtgtttggctttggctccggcgccaccatgatcctcggcctgacgtttatcgggctgcgcgccagctcggcccatcaggccgcggcgctctccggcatggcacagtcgattggctatcttctggcggcctgtggcccaccgctgatggggaaaattcatgataccgccggagactggcgcattccgctgctcgcctgcgcgctggccgcggtggtgatggcgttatgcggtatgcttgccgggcgtgaccgggagatcacaccccgctga

SEQ ID NO: 165560 - DNA, 792 bp, Enterobacter cloacae
atgtacggactggggctcgatggctacgatcccgatagccagcacgacgcggcggtggcctttcgcatccgcgtggtggcacaggaacaatatattccgctgcatcagcaccgcaaagggcagctgattatggcgctgggtggcgcgatcacctgtgaagtggagaacgcgatgctgatggtgccgccccagtatgcggtgtggatcccgggacaaacgccgcacagcaacaaggcgacgcccggcgcgcagctctgtctgctgtttattgaacccggtgcgctcgaattgccgacgcgtacctgtacgctgaaaatatcgcccctggtgcgggagctggtgctggcgcttgcggacaggtcacgggaggaactgcctcttcccgctaccggaaggctggttgacgtcctgtttgatgaactgcccctgcaaccgcaggagcatctacagctgccggtatctccgcatccaaaaattcgcctgatgagtgagaccatggcaaacgaacctgccgcctggcagacgctggcgcagtgggccagccactttgccatgagcgaacgcaatctggcgcggctggtggtgaaagagactggcttgagctttcgccgctggcggcaccagctccagctgattgtcgcattgcagtttttgatcggcggaaagtcggttcagcaggcggcgcaggcgctggggtatgactccaccaccgccttcatcaccatgtttaagaaaggactgggacagacgcccgctcgctatatcgccagcctgactacgacttcccgataa

SEQ ID NO: 165561 - DNA, 447 bp, Enterobacter cloacae
atgttcgaccctactctgctcatacttctgaccctggctgctctgggttttgtcagccacaacaccaccgtcgcgatttccattctggtcctgatcattgttcgcgtcacaccgttgaataccttcttcccgtggatagaaaaacaggggcttaccatcgggatcattattttgaccatcggcgtgatggccccgattgccagcggaacgctaccggcctcaacgctgctgcactcctttgtaaactggaaatcgctggtggcgattgcggtgggcgtttttgtctcatggcttggcgggcgcggcgtgacgctgatgagcagccagccttcactggtggccgggctgctggtgggcaccgtgttaggcgtggcgctgtttcgtggcgtgccggttggcccgctgattgctgccggactggtttcgctgtttatcgggaagtcgtag

SEQ ID NO: 165562 - DNA, 2037 bp, Enterobacter cloacae
atgagtgagctgatccaacattccaacagtatcgaatggcgttttgaacgccagatcctgcgtattgaaccgtggggtgaaaacagcctgcgcgtcagggccacctgctccccgacttttgatgacgccttacaggcactgttgcccgccgccccttgccaggctgagattgtcgccgaagcggaaagcctgacgctgcgcaacggcaatattaccgcgacgctgaaccttaaaggtcagctggccttctacaatcagcgcggcgaactgctgctggaagagatgtggcgccagcgttcaacggtgggtatcggtgccagcgagaagagccaggataaatatgtcagcgccctgaagctggatggccgcgaatttaagccgctaatgggggggaaatatcagctcaccgtccggtttgaatcgcgtccggatgaacgcatctatggcatgggtcagtatcaacagccgtggctggatctgaaaggctgtacgctggaactggcacagcgcaactcccaggccagcgtgccctttatgcagtccagccttggctatggcctgctgtggaacaacccggcgattggtgaagccagctttgcaaaaaatcagacggaatggcgcgcccgcgtcacaggagaaatggactactggatcaccgccgccgacacggtggcggatatcacccgccagtatgtgaaagccaccggtactccgccctccgccccggcgtttatcagcgggctgtggcagtgcaaattacgctaccgcacccagcaggaggtgctggaggttgcgcgggagtatcgccgccgtaatctgccgctgtcggtgatggtcatcgactttttccactggccgaatcagggcacctggtgcttcgaccccgtagactggcccgatcctgaagggatggtcgacgagctgcgcgaaatgggtattgcgctgatggtgtcggtgtggccaacggtagaggcgcgcagccctctctacccgctgatgaaagccaaaggctggctggtcagcagtgaacgtggcgtgcaggtcaacctcgattttatgggcaataccaccttctttgatgcgacccatcctgaggcgcggaaattcgtctgggatacggtgaagaaaaattactacgacatgggcattaagctgttctggctggacgaagccgaaccggaataccgcgcctatgattttgacaactatcgctaccacgccggtccggtgctggaagtgggtaatcgctacccgcgtgactttgcgcagggcttttacgatgggctccaggcaaatggtgaaaccgacattgttaacctggtacgctgcgcctgggcaggcagccagcgcttcggcgtgctggcgtggtcgggtgatgtccactcctcgttccatgcttttcgcaatcaactcgccgcgggactgaatatggggctggcggggatcccatggtggacaaccgatatcggtggcttccagggagggaacgttaacgacccggcgttccacgaattgctgatccgttggttccagtgggcggtgtttacaccggttctgcgcatgcacggctatcgcgaaccgcagatccagcccccggagcgctaccgtgacggcattcctcagtgtaacagcggttcgcctaatgagctgtggagttacggagaagagaattacgccatcatgcagcactggcttaccgtccgcgaaaccctgcgcccgtatattgacgcgttgtaccagcaggctcatctgcacggagacccgctcatgcgtccgctgttctggcactatccgcaggataagcagagctgggcgtgtgaagatcagtatctgtttggcgaagatcttctggtggcgccggttatgcaggccggtcagcgtgagcgcgatgtctggttgccgacgggcaatagctgggtcgctctcaacggtgagcgctacgccggtggggagcatatccgggtgcctgcggcgctggaaaccatcccggtgtttatccgcgaagggagtccgcttatccagcagctggtggactga

SEQ ID NO: 165563 - DNA, 1332 bp, Enterobacter cloacae
atgaccgaaataattacccgtaaagaaaagatcagttatgggttaggcgatatggcgagccatattgggctggataacgtcattatttttctgacgttttactatacggacgtggtggggctacctgccgcattcgtgggcaccatgtttcttctggcgagaaccgccgatgccataatagacccggcgatgggctatatcgcagacaggacgcgcacgcgctggggcaaattccgcccctggatgctgtggctggcgctgccctttggcgcaagttgtctgctgacctacgccgttccggcgtcgctcgatctgcacggtaaaatgattttcgccaccgtcagctataccctgatgatgctgatgtataccgcaatcaatattccctattgctccatgggcgcggtgatcacgcccgacaacgatgcgcgaatttccctccagtcctatcgttttttcctggccacgctgggtggcgcgctgtcgacattctttatgatgccgctcgcagagtttttaggcggcgatgataaattactgggctaccgctgggcgatggccattatggcgaccatcgcggtcatcatgttctggatctgcttcgccaatacgcgcgagcgtattaaggctcccgccacccacaataattatcttgcggaactgcgggatttattacgaaacgaccaatggcgggttgtcgccgtcctggtattaaccaacattggttttggcgttattcgccttggcgcaatgatgtatttcgtcacttattatctcggtagcgcaagctattttatgtggatgctcggggcgcatattctcgggaaagccgcaggcagtgcgctggccaaacgtctgacgcagaacgtcagcaaagtgcagatgtttggatactgttccgtactggcgggggtactcagcatcgccctgttctttgcgcctaagtcagtgcttattctggtgcccatgacgtttatcgtctccaccctttaccaggccaccaccacgctgatgtgggtaatgatggcggacgtcgccgattacggcgaatgggaacagggcaaacgcatggacggcgtgatcttctccaccttcctcgccgtactcaagctgggaatggcgatcagcggcgcgattgttggctggacgctgggcttaagcggctatgtcgccaacgccccggaacagaccaccacggccatgtactgcatcatcgccctcttcaccgtcgtgcctggcgtcttgtcactctgcgcgtttgccacgctgcgctggtacaagctcgacgacagcacaatgcaatccatccatcttgccaaacaccctgtttag

SEQ ID NO: 165564 - DNA, 501 bp, Enterobacter cloacae
atgtctgatgacgtgatcgggacgacgacccatcagcggctaatcagcttattaaccgagcaggaggcgcgctttcgcgtggtggcgcatgaggccgttgggaaatgcgaagcggtcagtgaaattcgcgggaccgatctccgacagggtgcaaaagcactggtctgcaaggtaaaaggcaacggtgttaagaaacatattctggcaatcctcgccgccgatcggcaggccgatctgagcctgctggccagtcatttcggtgggctaaaggcctcgctcgccagtccggctgaagtggatacgcttaccggctgcgttttcggcgccattccccccttcagctttcatccggatctgacgctggtcgccgatccgctgctgtttgagcgcttcgatgagatcgcctttaacgccggcctgctggaaaagtcggtgattatggacacccaagactatctgcgtatcgcccgtcctgaactggtgacgttccgtaaacaataa

SEQ ID NO: 165565 - DNA, 1284 bp, Enterobacter cloacae
atgacctggtttattgaccggcgtcttaacggcaaaaacaagagcacggtgaatcgccagcgcttcttgcgccgttataaagcgcaaattaaacagtcgatctccgaggccatcaacaaacgctcggtgaccgacgtcgacagcggcgaatccgtctccatccctaacgatgacatcagcgaaccgatgtttcatcaggggcgtggcggccttcgccatcgcgtgcacccaggtaatgaccacttcgtccagaatgacagaatcgagcggccccaaggcggaggcggcggttctggcagcggtcaggggcaggccagccaggacggtgaaggccaggacgagttcgtctttcagatttcaaaagacgaatatctcgacctgctgtttgaggatctggccctgccgaatctgagaaagaatcagcaccgtcagctcaacgaatacaaaacccatcgcgcgggttataccgcaaacggggtgcccgccaacatcagcgtggtgcgttcactgcaaaactcactggcgcgacgcacggcgatgacggcaggcaaacggcgcgaactgcgcgagctggaaaccagcctgaaagtggtggaaaacacggagccggcacaactgctggaagaggagcgcctgcgaaaagagatcgccgaactgcgggcgaagatcgaccgggtgccgtttatcgacacgttcgacctgcgctacaagaactacgaaaaacggccggagccttccagccaggcggtgatgttctgcctgatggacgtatcaggttcaatggatcaggccaccaaggatatggctaagcgtttttatattctgctctatctgttcctgagcagaacgtataagaacgtggaggtggtctacatccgccatcacactcaggcgaaagaggtggatgaacatgagttcttttactcgcaggagaccggcggcaccatcgtgtcgagcgccctgaagctgatggacgaggtggtgaaggagcgctacgatccggcgcagtggaatatctacgccgcgcaggcatcggatggcgataactgggcggatgactcgccgctgtgtcatgaaattctggcgaagaagatcctgccggtggtgcgttactacagctatattgaaattacccgtcgcgcccaccagacgttgtggcgtgagtatgagcatctgcaagcgatgttcgataactttgcgatgcagcacattcgtgaccaggatgacatctacccggtcttccgggaactgttccagaaacagtcgtccaccagcaacgcatga

SEQ ID NO: 165566 - DNA, 1935 bp, Enterobacter cloacae
atgaatatattcgatcactatcgccagcgctacgaagctgccaaggacgaagagttcacactgcaggagtttcttaccatttgtcggcaagatcgcagtgcctatgccaatgcggcagaacggctattgatggctattggtgagccaaacatggttgatactgccctggagccacggctttcccgtctattttcgaatcgggtggtcgcccgatacccggcgtttgaagagttctatggcatggaagacgccattgagcagatcgtctcctacctgaagcatgccgctcaggggctggaagagaagaaacagatcctttacctgctgggtcctgtcggtgggggtaaatcctccctggctgaacggctgaaagcgctgatgcagcgcgtgccgatctatgtgctgagcgccaacggcgaacgcagcccggtcaatgaccatccgctgtgcctgtttaatccgcaagaggatgcgcaaattctggaaaaagagtttggcattccgcatcgctatctcggtacgatcatgtcgccgtgggcggcaaaacgtctgcacgagttcggcggggacatcaccaagttccgcgtcgtgaaagtgtggccgtctatcctcgagcagatcgccatcgctaaaactgaacccggtgacgagaacaaccaggatatctcggcgctggtgggtaaagtcgatatccgtaagctggagcatcacgcgcaaaacgacccggatgcctacggttattccggtgcgctgtgccgcgccaaccaggggattatggaatttgtcgagatgtttaaagcaccgatcaaagtgctgcatccgctactgaccgccacccaggaagggaactacaacgggacggaaggtatttccgccctgccgtttaacgggattatccttgcccactctaacgaatctgaatgggtgaccttccgtaacaacaaaaacaatgaggcgttccttgaccgcgtgtacatcgtcaaagtgccttattgcctgcggatctccgaggagatcaagatttacgaaaaactgctcaaccacagtgagctggttcatgccccttgcgcaccgggaacgctggaaacgctgtcgcgcttctcgatcctgtcgcgcctgaaagagccggaaaactccagcatctactcaaaaatgcgcgtgtatgacggcgaaagcctgaaggataccgacccgaaagcgaaatcgtaccaggaataccgcgattacgccggggtcgacgaagggatgaacggtctgtcgacgcgtttcgcgtttaagatcctctcccgcgtctttaacttcgaccacgcggaagtggccgccaacccggttcatctgttctacgtgctggaacagcaaattgaacgtgaacaattcccacaggagcaggctgaacgctacctggagttcctgaaaggctacctgatcccaaaatacgccgagtttatcggcaaagagatccagaccgcctacctggaatcctattctgaatacggccagaacatcttcgaccggtacgtcacctacgctgacttctggatccaggatcaggagtaccgcgacccggataccggccagttgtttgaccgtgaatccctgaacgcagagctggaaaaaattgagaagccagccgggatcagcaacccgaaagacttccgaaacgagattgtgaacttcgtgctgcgcgccagagcacataacaatggccgcaatccgaactggaccagctacgaaaaactgcgcacggttatagagaagaaaatgttctctaacacggaagagctgttgccggtcatctcgttcaacgccaaaacctcaaccgacgagcagaaaaagcacgacgattttgtcgaccgtatgatggagaaaggctatacccgcaaacaggtccgcctgctctgtgaatggtatctgcgcgtgcgtaaatcgtcttaa

SEQ ID NO: 165567 - DNA, 747 bp, Enterobacter cloacae; identical to SEQ ID NO: 114807

SEQ ID NO: 165568 - DNA, 885 bp, Enterobacter cloacae
atgattaataaaatttttgcacttccggtagtcgaacaacttacccctgtgatctcccgccgtcagatcgacggtgctgatatcatcgtcgttgatcatccgcgcgttaaagcctccgtagcgctcaatggcgcccacctgctctcctggaaaccagaaggtgaagaagaaggcctgtggctgagcgaggccacctcgttcaaaaaaggggcggcgatccgcggcggcgtaccgatctgctggccatggtttggcccgtcagcgcagcagggtttaccctcacacggtttcgcccgtaaccagcagtggacgctgaaagcccacaacgaagatgaaaacggtgcggtgttgacctttgaactccaggcgaatgatgaaacgcgtgccctgtggccacacgagttcaccctgtatgcccgcttcaagctgggtaaaacctgcgagattgaactggaagcgcacggcgaatttgaaacaacgtccgccctgcacacctatttcaacgtaggcgacattcaggccgttaaggtgagcggacttggcgatacctttatcgacaaagtggataacgcgaaagaaggcaagctggacgacggcgtgcagactttcccggatcgtaccgaccgcgtgtatctgcacccggaagcctgtagcgtcatccacgacagcgcgctgaaccgcggtattgatgtggttcatcaccaccacagcaacgtggtgggctggaacccgggccctgccctttccgtcagcatggcggatatcccggatgacggttacaagaccttcgtgtgcgtggaaaccgcgtgcgtgaccgcgccgcagaaaaccagcgaagaaaaaccgtcccgcttaggccagacgatcaagattgtgaagcgctaa

SEQ ID NO: 165569 - DNA, 996 bp, Enterobacter cloacae; identical to SEQ ID NO: 114805

SEQ ID NO: 165570 - DNA, 414 bp, Enterobacter cloacae; identical to SEQ ID NO: 114804

SEQ ID NO: 165571 - DNA, 273 bp, Enterobacter cloacae; identical to SEQ ID NO: 114803

SEQ ID NO: 165572 - DNA, 1254 bp, Enterobacter cloacae
atgaaacgtttgcccttgctggcagcattacccttgctttgcgcgtcactggcttccgccgcgcccctgatgtccgtgggttacttcaatggcggtggcgatgttaccgccggaccgggtggcgatattaataaactcgacgtccgccagatcacccacctcaactactcgtttggtctggtttataacaacgagaaaaacgaaaccaacgccgcgctgaaagatccggcaaaactgcatcaaatctggttatcatctaaggtggcatccgatctggcgttgcttcctcagcttcgtaaacaaaacccgaacctgaaagtcctgctttccgttggcggctggggggcgcgtggtttttctggcgcagcggcaaccaaagagagtcgcgcggtatttattcgctccgcacaggagatcgtcagtaaatacggcctggacgggatcgacctggactgggaatatccggtcaacggcgcgtggggactggtcgagagcacccctgccgaccgggataatttcaccgcgctgttaaaagagatgcgtgacgcgtttggtaagaaaaagctggtcacgattgcggtgggcgcgaatgcggaaagtccgaaaagctgggtggatgtgaaagccattgcccccctgctcgattacatcaacctgatgacctacgacatggcgtacggtactcagtattttaacgcgaatctgtatgactccagcgcctggccaacggtggctgccgcagacaagtacagcgtcgattttgtggtgaataactatctggccgccgggctgaagccgcagcagatgaacctcggaattggtttctatgggcgcgtgccgaagcgcgccgttgaaccgggtatcgactggagcaaatcggacgcgcagaacaatccggtgacgcagccctacttcgggccgcaggaactgggcctgttcaaatcgcttggctatgatctgaccaaagatacctatgtgaaatacaacgatatcgtccgcaagctgctgaacgatccgcagaaacgctttaccgagcactgggacgaacaggcgaaggtgccgtggctgtcggtgaaatccgccgacgggaaggcgctgtttgcgatttcctatgagaacccgcgctccgtggcgatcaaagcggattacattaaggagaaaggtctggctggcgccatgttctgggagtacggtgctgacgacgaaaaccagctcgcgaaacagctggcggagtcgcttgggatcccgcactaa

SEQ ID NO: 165573 - DNA, 642 bp, Enterobacter cloacae
atgaagcaacgcgccctgttactggtcgatttgcaaaatgatttctgtgcgggcggtgcgctggccgttgccgaaggcgacagcaccgtagacgtcgcgaattcgctgattgagtggtgtaaagctcgtggtgaagcggtggtggcgagtcaggactggcatccggcaaaccacggcagctttgccagccagcacaacgttgagccttacagccagggcgaactggacgggctggcgcaaaccttctggcccgatcactgcgtgcagcagacggaaggcgctgagctgcatccgctgctgaaccagaaggccatcgacgcggtgttccacaaaggtgaaaacccaaccatcgacagctacagcgcgttctttgataacggtcatcgtcagaagacggcgctggacgcgtggttgcgccaccatgagatcaccgagctgattgtgctgggcctggcgacggattactgcgtgaagttcaccgtgctggatgcgctccagttgggctataccgtgaatgtcatcaccgacggctgtcgcggggtgaatattcagccgcatgacagcgctcaggcgtttatggatatggccgcagaaggcgcaacgctgtatacgctggctgactggatggagacgcaggcgtaa

SEQ ID NO: 165574 - DNA, 1107 bp, Enterobacter cloacae
ttgcctgacctgtgcgaacgtgcgttaaaaaccgtcccctcttcccgtgaagaggggattttttcttttgaagaacaagaactcattaccatgcagaagaaatcaatttatgtcgcctataccggcggtaccatcggtatgcagcgctcagaaaatggctatatcccggtttccggccacttacagcgccagctggcgctgatgcctgaattccaccgtccggaaatgccggactttaccatccacgaatatgagccgctgatggactcctccgacatgacgccggaagactggcagcatattgcggacgatattaaagcccattacgaccagtacgacggcttcgtgatcctgcacggcaccgacaccatggcgttcaccgcctcggcgctctccttcatgctggagaacctgagcaagcccgtcatcgtgaccggctcgcagatcccgctggcggaactgcgttcagacgggcagatcaacctgcttaactccctgtacgtggccgctaattacccgatcaacgaggtaacgctgttcttcaacaaccggctgtaccgcgggaaccgtaccactaaagcgcacgccgatggctttgacgcttttgcctcacctaacctgcaaccgctgctggaagcggggatccatatccgtcgtctgggcacgccgcccgcgccaaataccgcaggcgaactgatcgttcacccgatcaccccgcagccgatcggcgtggtgacgatttatccgggtatttccgccgacgtggtgcgcaacttcctgcgccagccggtgaaggcgctgatcctgcgctcctatggtgtgggtaacgccccgcagaacggtgaattcctgaaagagcttcaggaggcgagcgatcgcgggattgtggtggtcaacctcacccagtgtatgtccggcaaagtcaatatgggcggctacgccaccggtaatgccctggcgcacgctggcgtgatcagtggtttcgatatgaccgttgaggcaacgctgactaaacttcactatttactgagtcaggatctggatattgattccattcgccgcgccatgatgcaaaacctgcgcggtgaactgacgccggacgaataa

SEQ ID NO: 165575 - DNA, 1857 bp, Enterobacter cloacae
atgcgaaccctttggcgaatctttgccggtttctttaaatggacgtggcgactgctcaacttcgtccgcaacctggtgatgaacatcttcttcatcttcctggtcctggtatgcgcaggtatctggatgcatatcagcaatgcaaaccagtcgcagcattcgacgcgcggcgcgctgttactcgatatcaccggggtgattgttgataagccatcgaccagcaaccgtctgggcgtgattggtcgccagctgttcggcgcaacgtcagaccgtcttcaggaaaactccctgtttaatatcgtcgacaccatccgtcaggctaaagacgatcgtaacattaccggtatcgtgctggacctgaaagattttgccggcgccgatcagccgtcaatgcagtacatcggtaaagcgctgcgcgaattccgcgacagcggtaaaccggttattgccattggcgacagctacacccagggacaatattatctggcgagctttgccaataagatctggctgtcgccacagggcacggtcgatctgcatggctttgccactaacggtctgtactacaaatcgctgctcgacaagctgaaggtcaccacccacgtcttccgcgtcgggacctataaatcagccgtggagccgtttatccgcgatgatatgtcccctgccgcccgtgaagcggacagccgctggattggcgagctgtggcagaactacctcggcaccattgccgctaaccgtcagattaccgctgagcaggtcttcccgggcgcgcgcggcgtgctggacggcctgcgcaaggtggacggcgatacagcgaaatacgcgcttgataacaaactggtcgatcagctgggttccagcgctgaaattgaaaaagcgctgaccaaacagttcggctggagtaaagaggataaaaactacagcgccatcagcatgtatgactacgccgcgaaaaagccggacgacagtggtgacagcatcgccgtggtgtttgctaacggggccattatggatggcgaagaaacgccggggaacgtcggcggggacaccaccgcgtcgcagatccgcgatgcgcgcctggatccgaaagtgaaggcgattgtcctgcgagtgaacagccctggcggcagcgtcagcgcctctgaagtgatacgtgctgaactggccgccgcgcgcgccgcgggcaagccggtagtggtatcgatgggcggcatggcggcttccggggggtactggatctcgacgccagccaactacattgtggctaacccaagcacgctgaccggctcgattggcatcttcggcgtgatcaacaccgtagagaacagcctggattatctcggcgtccacaccgacggcgtttccacctcgccgctggcggatgtgtccgtcaccaaatccctgccgcctgaggtgtctgagatgatgcagctcagcattgagagtggctataaacgtttcatcacgctggttgcggactcccgtaaaaagacgcccgatcagattgaccagatcgctcagggccacgtctggaccggccaggacgcgaagagcaacggcctggtagacagcctgggtgacttcgacgacgccgtgaagaaagcggcggagctggcgaagctcaagcagtggcacgtggactattatcaggacgaaccaacgttcttcgatatggtcatggacagcatgtccggctccgttcgtgccatgctgccggacgcgcttcaggcttatctgccggcgccggtggcgaccgcggcgaaagccatgagagcagagagcgacaagctcgcagcctttaatgatccacaaagccgctacgcgttttgcctgacctgtgcgaacgtgcgttaa

SEQ ID NO: 165576 - DNA, 552 bp, Enterobacter cloacae
atggacgcacttgaactgcttgttaaccgtcgtagcgcttcccgcctggccgaaccggcacccgtcggcgagcagctggaaaacattctgcgtgccggaatgcgtgcgccggaccatggcacattgcagccgtggcacttctttatcattgaaggcgaagggcgcgaccgcttcagccagctgctggagcagggggctgttgccgcaggccaggatgagaaggggattgataaagcccgcaacgcgccgttccgtgcgccgatgatcatcgcggtagtcgcaaaatgtcaggccgatcataaagtgccggtctgggagcaggagatgtctgccggttgcgcggtaatggcaatgcagatggccgccgtcgcgcagggctttaacggcatctggcgtaccgggccgctgaccgggagcaccgccgtgcgggaaggtttctcctgcggcgaacaggataaaattgtcggcttcctctatctcggcaccccgcagcttaaagcttccagcaccattagcgtgccggacaccacgcctttcgtcagccgtttttaa

SEQ ID NO: 165577 - DNA, 1044 bp, Enterobacter cloacae
atgagcgagcaaaccattcgtttaacgcaatacagccacggagccggttgcggttgtaaaatttccccgaaagtgctggagaccatcctgcacagtgagcaggcgaagtttgtcgacccgaacctgcttgtcggtaacgaaacgcgtgacgatgcagcggtttatgacctgggtaacggcaccagcattatcagcaccactgacttctttatgccgattgtcgacaacccgttcgacttcgggcgcattgcggccaccaacgccatcagcgatatctttgcgatgggcggtaaaccgattatggcgatcgccattctgggctggccgattaacaccctcccgccggagattgcccgcgacgtgatcgaaggcggacgctttgcctgccagcaggcgggtattgccctggccggtggtcactctatcgatgcgccggagccgatcttcggcctggccgtcaccggcgtggtgccgaccgagcgcgtgaagcgcaacagcaccgcgcaggcgggctgcaagctgttcctcactaagccgctgggcattggcgtactgaccactgccgagaagaaatccctgctgaagcccgagcatatcggtctggcaacggaagtgatgtgccagatgaacctcgccggtgcggcattcgccaatatcgacggcgtgaaggccatgaccgacgtgaccggttttggtctgctggggcacctctctgaagtctgtcagggcgcgggcgtgcaggcgcaggtctggtatcaggatgtgcctaagctgccgggcgtggaagagtacattgctcagggcgcagtgccgggcgggacgcagcgcaacttcgccagctacggccatttaatgggcgaaatgccggaagcgtggcgtaacctgctgtgcgatccgcaaacctccggcggcctgctgctggcggtgacgccggaagctgaagctgacgttcaggcgacggctgccgagtttggcatcacccttacggccattggtgagctggtgaccgcccgcggtggtcgaccgatgattgagatccgttaa

SEQ ID NO: 165578 - DNA, 1923 bp, Enterobacter cloacae
atgcggttgtttattgccgaaaagccgagtctggcgcgtgccatcgccgatgtgctgcccaggccgcatcgcaaaggcgacggctttatcgaatgcggtaacgggcaggtggtcacctggtgtatcggtcacctgcttgaacaggcgcagccggatgtctacgacagccgctacgcccgctggaatctcaacgatctgccgattgtgccggaaaagtggcgtctccaaccgcgtccttccgtcaccaaacagctcaacgtcattaagcgcttcctgcatgaggcgacggaagtggtccacgcgggtgacccggacagggaagggcaactgctggtcgatgaagtgctggactacctggagctggcgccggaaaagcgccagcaggtgcagcgctgcctgatcaacgacctcaaccctcaggcggtagagcgggccatttcacgcctgcgcgccaacagcgaatttattcccctgtgtgtctccgcgctggcgcgtgcccgtgcggactggctatacgggatcaacatgacccgcgcctacaccattctcgggcgcaacgcgggttatcagggcgtactctccgtcggtcgtgtccagacaccggtgctggggctggtggtgcgtcgcgacgaagagatcgaaaatttcgtcgccaaagacttcttcgaagtcaaagcgcatatcgtcacgccgaaagacgaacgctttaccgccgtctggcagccaagcgatgcctgtgagtcatatcaggacgaagagggacggctgctgcatcgcccgctggcggagcacgtggtcaaccgcattaccggccagcccgcaatcgtcaccagctataacgacaaacgggaaacggagcccgcaccgctgccgttctccctttcggcgttgcagattgaggcggctaagcgctttggtcttagcgcgcagaacgtgctcgatatctgccagaagctctacgaaacccacaagctgatcacctatccgcgttcggacagccgctatctgccggaagaacacttcgccggacgccactcggtgatgaatgccattggcgtccatgcgccggatctgttgccgcagccggcggtaaacccggatacccataaccgctgctgggacgataaaaaagtcgatgctcaccacgcgataatcccgacggcgcgcaccagcaacgtcaacctgaccgacaacgaagcaaaggtctataacctgatcgcacgtcagtatctgatgcagttctgcccggacgcggtgttccgcaagtgcgttattgaactggagattgccaaaggcaaatttatcgccaaagcgcgtttcctcgcggaagcgggctggcgcacgctgctcggcaacaaagagcgtgacgaagagaacgacggcacgccgctgccggtcgtggccaaaggcgacgaactgctgtgcgagaagggcgaagtggttgaacgacaaacccagccgccgcgccacttcaccgatgcgacgctgctgtcggccatgaccggcatcgcccgttttgtgcaggataaagatctgaagaagatcttgcgcgccaccgacggtctgggtacggaggcgacccgcgcgggaattatcgaattactgttcaagcgtggtttccttgagaagaaggggcgttacatccactcaacagagccgggacgggcgctcatccactccctccctgaactggcggccagaccggacatgaccgcgcactgggagtcggtgctgacgcagatcagcgaaaagcagtgccgttatcaggactttatgcagccgctggtagggacgctttatcagctgattgaccaggcgcgcagtacgccagtgaagcgattccggggaatggtcgccccgggcggcggggcgaagaaaccgttcaaaaagaagaaaagcgcagccaaaaatacaaacgcttaa

SEQ ID NO: 165579 - DNA, 1302 bp, Enterobacter cloacae
atgaaacgacatgctttttttgcctctttacttgctttatcggcttctgtttttgcgaacaactatccggttctgacgaatgcacaaccggaaagcgtgggctttaatatcgataaactgaaaaaactggatagctggattcaggatcagatcaacgccgggtatccgggtatgaacgtcgtcgtgataaaagacaatcatatcgtctttcaaaaagcttggggttatgcaaaaaaatacgacgactcccatttgatgggtaatccgctacgcgcgacaacagagacaatgtacgatctggcttccaacacaaaaatgtacgccacgaatttcgcgcttcagaagttggtttacgaaggcaaaattaatgtcaacgatcgggtcacgaaatacatacccggattcacagatcaactcacagagaagattaaaggaaaagatgccctgcgaattattgatattttgcatcataccgccggcttcccggccgatccgcaatatccaaacaagcgtgttgcaggcagcctctactctcaggataaacagaccacgctggagatgattaagcgaacgccgcttgattattcgccaggtacaaaacatgtctacagcgacgtcgattacatgatcctcggatttatcatcgagtccgttaccgcaatgccgcttgatgtgtatgttgagaaacatatttaccagccgctcggcctgaagcacacggtgtttaaccctctgttaaaaggctttaagcaacagcaaattgccgccaccgaacttaacggtaacacccgggatggtgtaatcagttttccgaatattcgtaccactaccctctggggccaggttcatgatgaaaaggcatggtattccatggagggcgtttcaggtcacgcaggtctgttctcaaatacacatgatattgccgtgctgatgcagaccatgcttaacggggggcattatggcaacgttacgttatttgatcagagtacagtagatgagtttacccgtagctcggcagcagatgtcacctttggactgggctggagggttaacggtaattcctctatgaccccaacctttggcgtactggcaagccctcaaacctatgggcatacgggctggacaggcacgctcaccgccattgatcccgtaaaacgtatggcgattgtcattctgggcaaccgaccacattcccccgtagctgatcctaaaatgaatccgaatgtttttgtcagcgggaccttacctgcggcaacatatggatggattgtcgatcagatctatggcgcactgaacgagtaa

SEQ ID NO: 165580 - DNA, 1422 bp, Enterobacter cloacae
atgtctaaacatattagcaccgatctactcgcgaaaattattgttctggcaggtggcaaaaacaacattctgcattgtggcaattgcatgacccgcttgcgtctgaaagtggcggatacaacgttaatagcacaccatgtgaaagaacaactctcagagagtatcagtggtgttgttataaacggcaacgaagtgcaggtcatttttggcgttggtaaagcgcagagagcggcagatagcatgaataatctgctagacaaaaaagatttgcatgcaatagccgatgaaaacaaaagtcagctcaagagtaagcagcaatcatctttgcaacaattcctggcaaactttgccactatctttactcccctgattccgggctttatcgcgtcaggtttgatgctcggtatcgccacgttgttagggacgttaatgcatattgcgccagaagctaaaggaacactccctgatgcgctaaatttcttgaaaatttttagtaaaggactcttcacctttcttgtgattttagtgggatacaatgcgcaaaaggcattcggcggtactggcgtaaacggtgcaatcatcgcggcactgtttattctgggttataacccgtcagccacagtaggctattattccggactacaggatttttttggtctcactatcgacccgcgcggaaatatcatcggcgtgctgctggcagcatgggccggagcgaagatcgagcgcgttataagaaacgttattcccgatgagctggacatgattttaacgtcgatgctgacactcattttcaccgctgtattgacatatattgtgatcatgcccattggtgtctggctgtttcaggggatgtcctggctgtttatacaccttaacagtaatccgttgggctgcgctgtactggcaggcgttttcctgattgctgtggtatttggcgttcatcagggatttattcctgtttatctcgcgttaatggactctcaggggtttaattctcttttccccatcctctcaatggctggagctggacaagtaggtgccgcgctggcgttatactggaaagcagacgtttcttccacgctgcgtacacaaattcggggagcaatcatccctggtatattgggtgtcggtgagccgcttatttatggcgttaccctaccacggatgaagccttttattacggcctgtataggcggcgcagcaggcgggttattcattggaactattgcatggttagggctcccggtcggcctgaacagcgcgttcgggccatctggcctggtagctttgccgcttatgacctcagcaaaaggtatatttccagctattgcagtttatggtgtaggtatagtgatttcctgggtatgcggttttattataacccttctttttggttgcaagaatgtggatttacattga

SEQ ID NO: 165581 - DNA, 912 bp, Enterobacter cloacae
atgaatttagatttgagcaagatggtgactgaaaacgctaatccagcatctatggaaattgaccgactaggcacagttgaaatgtgcagggtgatcaatgcggaggatcaaaaagtggccctcgcggtagaaaagtatttacctgatattgcagccgctgtggagttaatcgctaaagccgtcgcaaagggcggtcgcttaatctatgttggcgcaggcacctccggacgattagggatccttgatgccagtgaatgtccgccaacctatggcgtaaaaagcgaactggtgcagggaattattgccggtggtcatactgcaatcctgaaagccgtagagggggctgaagataaccgccaggcggcaattcacgacctgaccgctattgacctctctgtggctgatactgtcgtgggtattgctgcaagtggacgtacgccatatgtcgtgtccgcgctagcgcacgcacgcaatgtaataggttgcaatgttatttccatagcatgtaaccccggcagtgaaattgctgaatacgccagtgttgccataacgcctgttgtaggctcagaagtgataacgggatcctcgcgtatgaaagccgggaccgcgcaaaagctgatcctcaacatgctttcaacctgtttaatgataaaaatgggaaaagtgtatggcaatttgatggttgatgttgtcgcttctaaccgaaagctctttgaacggcaaattaagatcgttaccgatgctactgcctgctcacggcgcgatgcagaaaatgcgttgaagcaatcacaccgaaactgtaaatcagccattgtaatgattttgagtcagtgttccgccgatgacgcccaagcgttgctgttgaaaaacgggggttatatacgggcggccatttctaaggaagcgaaataa

SEQ ID NO: 165582 - DNA, 558 bp, Enterobacter cloacae
atgaaagcattactattattattttttatgtcgagctttgcatgcgccagagtcacacttgacttgggtgaaaacattgttgttctggccgctaaagattcgaagctatctctcttttcaaagagtctgactctaccagacggcgagcaaaagcttgttattaaattcgatagttccgtcaatccggaatccgtcaatcaaggtaaagggcgaatgacctcagcaccttatatatttacatttaactatagcggcagagaaaaactcatacttaccaccccgaaggtcatcgatgaaaaggaggttatagaccaggctcgcaatccacaatttatgctgaaggccaatgatactaccatcccctttaccatggaaaaagttttcccagagagcattaacattttttctgatttcaggtcattcctcgctgaggataaaaatcaaatcgacggtataaaacaagacagcacagataaccttgatcaggttaaatcggcctatcttggcttacctgataaacagaaactctcattcatgaaatggttgttaaataattaa

SEQ ID NO: 165583 - DNA, 345 bp, Enterobacter cloacae; identical to SEQ ID NO: 165331

SEQ ID NO: 165584 - DNA, 588 bp, Enterobacter cloacae
atgagaaatggactgaaacatttatcctggttattaattacacttgcttcttcaggccatgcagccgtcatttatcaggctaacgatggctctaacattgacctttacgggcgccttggttttaacgtatcagataaaaaaacaggtgacgtttcaggcgattttgatggtcgaattggtttctcggcacgccagatgattgatgacaaatttgccgtgattggttttacacaataccaggtgaatgcagccgaatacgcaaacaatatcaaagcggaggacccagacgatttgaccgcacgatatgtctgggcaggcgttgacttcgccgagtacggtaaaatcacagcaggacgcgtttcatccggcctgattatgtttacagacattggtgatgtatttgcctcgtcagacgttgctatggcccgccaggcaaattttatcgatcccaccgctgttcaggttttccgccaggatggcaccatacagtaccagaatacgttaggaaatcttgacgtatccagtgcgtggattattggcaataattcatctgaccttgattacggcataaatactgctctgcgttaa

SEQ ID NO: 165585 - DNA, 852 bp, Enterobacter cloacae
atgagttatttgaaaaaaataagaatggattataataattatactgatacagagaagaaaattgctctatacatcatcaatcatcttgatgctttcaaaggatgttcttcccactcaatcgcgctagcattgtgtgtcgcccaatcatctatttcaaagtttgccaaaaaactcggtgctcacggcttcgccgatctaaaattgatgctgatagaagaatacagcagagaaaaaagtgcaaaagctgattatagccttcacagtactattcatagttctgaccctttaaatgtaatagctgataagttaattgcagaaaaagttcatgcattaagagaaacgacagtaaatatggattttgtaaaactggaaaagataataggaataatagataaggcgaggcatatacaaattgttggtctcggaggctctgcgctggctgcaaaagatctcgcttttaaattattaaaaattggctatcgtgtaacatgtgagattgacacacatgtgcaaatatctgttgctcaggctttgaataaagatgatatacaaatttccttgtcttactcaggtaagaaaaaggagatattgatcgccgcagaagcggcaaaagagaaaggcgcgaagatcatagctataacatcactggcaaataatcctttgcgggagagggctgattatattctggagacggtatcgaacgaagacgaatggcgcagctcatcgatctcttcccgaactgcccaaaattgtataacagatttgttatttgtcggactgctacagcgcaatgacaggcactcactcaacatgatagagcgcagccgtgaacttattaaccggcttgagtaa

SEQ ID NO: 165586 - DNA, 273 bp, Enterobacter cloacae
atgaaccgttacgcaatggccgcgttatgtttgatggtgtccgccggggcacaggctgaccgcattcgcccggatgtcgaggtcaacgtgccgccagaggtttttagcgctggcggccagcgtgcgcagccatgtaatcagtgctgtatctatcaggatcaaaactattccgaaggcgcagtggtcagggcagatggcgtgctgttgcagtgccagcgtgatgaacgcaccctcagtacaaacccgctggtctggcgtcgcgtaaaagaataa

SEQ ID NO: 165587 - DNA, 417 bp, Enterobacter cloacae
atgctgaaaacactcgatgtggttgcggccatcctcgaaaaagagggcaagattttgctggcgcagcgtcccgaacatgccgatcagccaggaatgtgggaatttgcaggcgggaaggttgaagccggtgagacccagccggaagcgctgatccgcgaactgcgcgaagaactcggcattgaggccgtgcccgcgcggtatgtggcaagccaccagcgggaggtgtcgcagcggctgattcacctccacgcctggcatgtgcctgaatttagcggtcagctgaaggcgcattatcactcggcgctggtatggtgcacgccagaagacgcgttcacgtatgctttagccccggcggatataccgctgctggaagcgtttattcttttacgcgacgccagaccagcgggtttgtactga

SEQ ID NO: 165588 - DNA, 573 bp, Enterobacter cloacae
ttgaaagagacatccgcctgggttgcgcccatggaaacccttcccgtcagcctcagccccatcgccgccatgcagaaaaaacacttcggcgcggtgctgaaccccacgcgctggtgggggcgtatgccgcgtcttttctggctggtggcgctgtttgtcggctatctggagcggcgcaaggcgcgtttgacgccggttctgcgatcgctactaatgacgcggatctcgcagatctgccactgcgcattttgtattgatgccaacagcctgcgtctggccgagcggagcggggcgctggataaagtgcaggccgtcagcgactggcaaaattccaccctgttcagcgaagaggagcgcgcggcgctggcctatgcggaagcggtcaccgccacgccgcctcagatggatgaaaatatcaaaagtctgctgaagcgccactttacggaagagaccatcaccgaaatgacggctctgattgcctttcagaatctttccgcccgctttaacgccgcgctggatattccggctcaggggctgtgcgccacgtttaaaggtaaaccgcatgctggataa

SEQ ID NO: 165589 - DNA, 618 bp, Enterobacter cloacae
atgctggataaacatctgcacccccggctgaaacccgggttaaatcagctggccgccgcgctggataaaccgtttatcacgcctgatggcttaacgctcgccgggtttgcgattggcgtgctggcgttaccgtttctggcgctgggctggtatccggcggcgctgatcgccattgtgctgaaccggctgctggatggtctggacggcgcgctggcgcgtcgccgtggcctgacggacgcgggaggatttcttgatatcgccctcgacttcctgttttacgccctggtgccgtttggctttgcgctggccgctccggctgataacgcgatcgccgccgcctggctgctgttcgcttttatggggacgggcagcagttttctggcctttgccgcgctggcggggaagcatgatatcgacaaccccggctatgcgcacaagtcgctttattacattgggggtttaacggaaggaacggagaccatcgcgctgtttgcgctgtgctgcctgtttccggcgcatttcgcgctgtttgcctggacgtttggcgcgttgtgctggctgaccaccacaacgcgcatctggagcggttatatcacgctgaaatcacttccccgctag

SEQ ID NO: 165590 - DNA, 1308 bp, Enterobacter cloacae
atgaaacgtgtttctcaactgaccgcgctggccctgctctgcggcctcgcctcactctcctccacggcggctgatatgccccactccctcacgctggaccagctccaggcgcaaaacggcgcggtaattgatacgcgcgtcagtgcgttctataacggctggccgcagaccctgagcggaacgtccgggcatgaacccgccgcgcttaatctctctgccagctggcttggggcaatgagcgatgaacagctcagcggctgggcaaaacaacatcggcttacgccagacatgccagttgcgctctatggcaacgatgatgacaaccagaccgtcaaaacgcggctggagaaagcgggctttacccacgtctccaccctgagcgatgccctgcaacaatccgaccgtctgcaacgtctggcgcatttcgaacagctggtttatccgcagtggatccgccagttgcagcagggcaaacccgttaccgccgcaccagccggagagtggaaggtgatcgaggctggctggggtgcgccgaagctttatctcctgagccacattcccggtgcgggctatatcgacaccaatgaagtggaaagcgaaccgctgtggaataaggtctctgacgaaaagctgaaagcgatgctggcgaagcacgggatccgtcacgataccaccgtcattctgtacggtcgcgacgtgtatgccgccgcgcgcgtggcgcagatcatgctctacgcgggcgtgaaggatgtgcgaattctggatggcggctggaaggcgtggtccgacgccagcctgcccgttgagcgcggaacgcctgcaaaggtcaagccagcccctgattttggcgcgccgatcccgggccagccccggctgatggtggatatggagcaggcccggggaatgctgcaccgtcaggacgcctcgctggtgagcattcgttcctggccagagtttatcggtgaaaccagcggctacagctatatcaagccaaaaggtgagattgccggtgcgcgctggggccatgcgggcagcgacgcgacccacatggaagatttccacaatccggatggcaccatgcgcagcgccgatgatattgccgccatgtggaaaacgtggaatatcctgccggagcagcacgttgcgttttactgtggtaccggctggcgcgcgtctgaagcctttatgtacgcccgcgccatgggctggcagaacgttgccgtctacgacggcggctggtacgaatggagcagccatccgcagaacccggtctccaccggggagcgcggaccggaaagcgcacgctag

SEQ ID NO: 165591 - DNA, 621 bp, Enterobacter cloacae
atgctgaacgtgaaaaatctcaccattgcgccactcttccgtgaggtcaacttccgcgtcccggcgggggagattgtcacgctgatggggccctccgggagcgggaaatcgacccttttcgcctggatggtgggggcgttatccgctgattttaaggcgcacggcgagctatggctgaacgatcgccgctgcgatatgctccccgtggaaacgcgcgggatcggcattctgtttcaggatgccctgctgtttgacgccttcagcgtggggcaaaacctgatgctggcgctgccggcgcacatcgtcgggcgcgcccgccgcaacgcggtagaacaggccctggacactgccgggctggcaaaccactacgccagcgatccggcgaccctttccggcggcgagcgcgcccgggtcagcctgttgcgcgctcttctcgcccagccgcaggcattgctgctcgacgagccgttcagtcgactggataaaacgctgcgcgcctcattccgggcgtgggtattcgaggttactcgccagcgcaggatcccggtggtgctggtcacgcatgatgaggacgatattccgcccggcggcgaggtgattgagatttctcgctggcaataa

SEQ ID NO: 165592 - DNA, 1530 bp, Enterobacter cloacae
atggcttcgccgctacggaacccgctaagcgggctggtctgggcggcaatggcggtcatctatctgccactgcttcccgccagcggcatgctgctggccccggcgttttctcccggcaactgggcgacgctgtttgccgacccgcagctgccgcaggcgctggccgccacgctggtttccacgcttatcgcgacgctgggctcactgtttatcgccctgaccctgcttgcgcttctctggccgggtgaaggctggcagcgcctgagcacccgtctgccgtggctgttagccgtgccgcacgtcgccttcgccaccagcgcgctgctgctgtttgcggaaggggggcagttttaccggatctgtacggtctgttcgccgcagcttgaccgctacggtatcgggcttggcctgacgcttgcggtcaaagagagcgcgttcgttctgtgggcaatctacgccgcgctgcctgaaaagcgcctcgcacagcagaaaattgtcctgcataccttcggctacggacgaatgcaggcgctcaactggctcgtcctcccggcaatcgcccccgcgctgggcgcagtcatgctggcggtgctggcctggtcgctttccgtggtggatgtggcgatcgtgctcgggccaggcaacccgcctacgctggcggtactggcctggcagtggctcgcccagggcgatgcacaacagcaaacaaagggaacgctgctgtgtctggtgttgctcctgctgctggcggcgcttgccgcggtgggatacggcttctggacggcatggcggcgcgcccagcgtgacccctccggaattcgtcacgcttcgcatactgcgctgcccgcacggacgctgggcgggttactgccgctgtgcggcgtcctctgtgcgctggttctgctgatgctggcacgccgggacgacatcggccccgtcagcgacagcctttcactgggactgctgtccagcctgacagcgctggccatcctcatgctctggcttgagtggggaccccagcgcggcgcggtgtgggtctggctgccgctcgccctcccggcgctgcccctcgtgtccgggcaatatgccgtggcgctgtggctgggcatcgacggccagtacgctgcggtgctctggagccatatgctctgggttctcccgtggatgctcctggtgctgcaaccggcctggcgcaggctcgatccccggcttatcctcaccgccagaacgctgggctggcgacaggcgaaaattttctggttggtgaaatgccccctgatggttcgtccggccctgctggcctttgccaccggcttttccgtgagcatggcccagtacatgccgaccctctggctgggagcgggacgtttcaccaccctgacgacggaggcggtcgccctcagcagcggcggcagcattccgatcctcgccagccgggcgctgggtctgttgctgttgaccagcagcgtatttgcccttgccgcgctgctctcccggctcgtgggccgtcacagacaaggattacgttaa

SEQ ID NO: 165593 - DNA, 1170 bp, Enterobacter cloacae
atgcgccgggtgcgtttttgcgcgtttctgacgagtctgctgctggcaacctctgccttcgccgcagagagctggcaatccattcagcaacaggccaccgggcagaccgtctggtttaacgcctggggcggtgacgaggccgttaaccgctacctcgactgggtaagcggcgagatgaaaacgcactacgccatcaacctgaagatcgttcatctggccgatgccgccgacgcggtgaagcggatccagacggaacatgccgcaggacgcagcagtaacgggtcggtggatctgctctgggtaaacggggaaaacttccgcaacctgaaagcggcaaacctgctgctcaccggctgggcgaaaaccctgcccaactggcgctacgtcgatacccgtaaaccggtaacggaagattttgccatcccgaccgatggggcagaatccccgtggggcggcgcgcaattaacctttatcgcccgtaaagcgagtacgccgacaccaccggcagatccccacgcgctgctggtatacgcccgacagcaccctggcaaggtgagctatccgcgaccgccggattttaccggcacggcgtttcttgagcagctactgctggcgctgaccgcccatccggaggcgctaaaaaacgcgccggacagtacctttgcgcaggtcaccgcgccgctgtgggattaccttgatacgctgcaccccctgctgtggcgcgaagggaacgattttcctccgtcgcctgcgcgcatggatacgctgctggccagcggcagcctgaacctgtcgctcacctttaaccccgcccatgcgatgcaaaaggtggcgagcggtgaactgcctgccgacagctacagtttcggctttctcaaaggcatgatcggcaacgtccattttgtcgctatcccggcaaacgccagcgcgagcgcaggcgcgaaagtggtggcgaatttcctgctgtcaccgcaggcgcagatccgcaaagctaatcctgccgtctggggtgacccgagcgtgctggatggcgaaaaactgcctgcgaaagcggcaaaacagcttagcgcctttaccccctcaggcacgcctgatgtacttcccgaacctcacgccgcctgggttaacgccctggagcaggaatggcttcgccgctacggaacccgctaa

SEQ ID NO: 165594 - DNA, 606 bp, Enterobacter cloacae
atgctctccctcgacacgctaaaaatgcaccagcaaacgttgatcgatcgtgtggagcaggcgcctcttcagagcgcgctgatctattttgcgctttacgttctgctctccgcgctgtcgatccccggagccgcgcttctgacgctgctcggcggggcgcttttcagcctgtgggaggcgacgctgttggtgtcatttgcctcgacgctcggcgccacgcttgccatgctcgtcagccgttatctgctgcgcgactgggtgcaacggcgctttgccgcacagatgagcacgatagatgcggggatggatcgcgacggcgcacgctacctttttgccctgcgcctgatgccgttgttcccgttctttctggtcaatttgctgatggggctaacccgtctcagggtgcgtcactactggtgggtcagccagcttgcaatgctacctgccaccgtcatttatctgaacgccggacgcgagctggggaaactcacctcgctgcgcgatattctgtcgccgggactgctgttcgcctttacactattagggttattaccgctggtcactcgctggctgttttcccgttacatcccttcgattaaaaagtga

SEQ ID NO: 165595 - DNA, 807 bp, Enterobacter cloacae; identical to SEQ ID NO: 114784

SEQ ID NO: 165596 - DNA, 1221 bp, Enterobacter cloacae
atgtctctgtcagttacgcgtgaaaatttcgatgaatggatgatgccggtatacgctccggcggcttttattccggtacgtggggaaggctctcgcctgtgggatcagcagggcaaagagtatatcgactttgcgggtgggattgcggtgaatgcgctggggcatgcaaacccggcgctgcggcaggcgctgaatgaccaggcagcgaaattctggcataccggcaacggttataccaacgaaccggcattgcgtctggcgaagaagctgatcgacgccactttcgcagacaaagtctttttctgtaactccggcgcggaagcgaacgaagcggcgctaaagctggcgcgaaaatatgcgcacgataaattcggcgcgcacaagagcggcatcgtagcctttaaaaatgccttccatggccgcacgctgtttaccgtcagcgcgggtggtcagccctcatattctcgggattttgcgccgctgccgccggatatccggcatgcggcgtataacgatttacactctgccagcgagctgattgacgacaccacctgtgcggtgattgtcgagcccatgcagggggaaggcggcgtcatgcccgcccagaaagcgttcctgcaagggctgcgcgagctgtgcgatcggcataacgcggtcctgatttttgacgaagtccagaccggcgtgggccgcacgggtgagctgtacgcctacatgcactatggcgtgaccccggatgtgctctcaacagccaaagcgctcggcggcggtttcccggtgggggcgatgctgaccaccgataaattcgccagcgtgatgaccgtgggcacccatggcaccacatacggcggcaacccgctggcaaccgctgtcgccggacaggtgctggatatcatcaacacccctgaggtgctgaacggcgtgaagcagcgtcaccagtggtttgttgagcgccttactgccatcaataaccagaccggcttgttcaaagagatccgcggtctggggctgttaataggctgtgagcttgcccctgagtttgccggcaaagcgaagctgatttcacaggaagcggcaaagcagggcgtaatggtgctgattgccggtgctaacgtggtgcggtttgcccctgcgctgatcgtcagcgaggaagaggtcagaaccgggttagatcgttttgcgctggcctgcgaacaggtgaagtccggggtgtcatcatga

SEQ ID NO: 165597 - DNA, 1035 bp, Enterobacter cloacae
atgatggtcatccgtcccgttgcgcacggcgatctcgccgggcttatgcagcttgccggtaagacagggggcgggctaacctcgctgcctgccgatgaaaaaacgctgtcggcgcgcattgagcgctccctgcaaacctggcaggggacgttgccaaaaagcgaacagggctatgtgttcgtgctggaagataacggcacgggaaccgtggcggggatttgcgccatcgaggtggccgtcgggcttaacgatccgtggtacaactaccgggtcggcacgatggtccacgcctcgaaagagctgaacgtttacaacgcgctgccgacgctcttcctctgtaatgaccataccggcgccagcgaactctgcaccctgtttctcgatccggactggcgcaaagagggcaacggttatctgctctccaaatcgcgctttatgtttatggccgcctttcgcgaccgcttcaacgaaaaagtggtcgcggagatgcgcggcgtaattgatgagacgggctactcgccgttctgggagagtctgggcgaacgcttcttctccatggaatttagccgggcggattacctgtgcggtaccggtcagaaggcgtttatcgccgagctgatgccgaagcatcctatttatacccatttcttaacgcctgaagcgcaggcggtgatcggcgaagttcacccgcaaaccgccccggcccgcgcagtgctagagaaagagggatttcgctaccgtaactacgtcgacatcttcgacggcggcccgacgctggaatgcgacattgaccgcgttcgcgccatccgtaaaagccgcctggttgaggtctcggaggggcagcccgcgccgggcgagtggccagcctgcctggtctctaacgagaattacaccaacttccgcgccatgctggtgcgaaccaacccgtcatgcgagcgtctggtactgacggctgcgcaactggatgccctgaaatgtaacgctggcgacacggttcgcctggtgcgactctgccctgaggagaaaacagcatga

SEQ ID NO: 165598 - DNA, 1488 bp, Enterobacter cloacae
atgactctatggattaacggtgactgggtaacgggcgaaggtgacgcgcggacaaaaactaacccggtcggcctggaggtgctctggtcggggaacgacgccagcgccgggcaggttgagcaggcctgccaggctgcacggcgcgcgtttccggcatgggcgaaacggccattctccgagcgccaggcgctggttgagaaatttgctgcgctgctggaggccaataaagccgagctgacccgcatcattgcctgcgaaaccagtaagccgcgctgggaggcaacaaccgaagtcacggcaatgatcaacaaaatcgcgatatcggtgaaggcgtaccatacccgcaccggcgagcagcataccgagatgccagacggtgccgccacgctgcgccaccgtccgcacggggtgctggcgatgtttggcccgtataacttccccggacatctgccgaacgggcacattgtgcctgcgttgctggcggggaataccgtcatcttcaagccgagtgagttaacccccttaaccggagaagcagtcataaaactctgggagcaggcggggctgccgccgggggtggtgaatctggtgcagggcgggcgtgaaacaggtcaggcgctgagtgcgctgagcgacattgacggtctgctgttcaccggcagtgccggaacgggctatcagctgcatcgtcagctggcggggcagccggaaaaaattctggcgctggagatgggcggcaacaacccgctgattgtggaagatccggatgatatcgatgccgcggtccatctgaccattcagtcggcgttcattaccgccggacagcgctgtacctgcgcccgccgcctgctggttaaacgcggcgcgcagggggatgcgttcctgaagcgtctggtggaggtgagcgcgcgtctggttcccgcgaaatgggatgccgagccgcagccgtttatcggcgggctgatctccgcgcaggcggcgctgaacgtgctgaaagcgtggcaggagcacgtggcgcgcggggcgaaaaccctgctggagccgaagctggttcagccgggcacgtcgctgctgacgccggggattattgagatgagtgcgacgagcaacgtgccggatgaagaggtctttggcccgctgctgtgcgtctggcgctatgacgattttgagtcggcgatcgagatggccaacaacacccgctacggcctgtcgagcggcctgatatcgccgcatcgcgagaaattcgaacagctgctgctggaagcgcgcgccgggatcgtgaactggaacaaaccgctgaccggtgcggcgagcaccgcgccgtttggtggcgtaggggcgtcgggcaaccatcgcgccagcgcctggtatgccgccgattactgcgcgtggccgatggcaagcctggaaaccccggcgctgacgctgccggagacgctgaatccggggctggattttacagagggtgacgcccatgaaagcgcgtga

SEQ ID NO: 165599 - DNA, 1326 bp, Enterobacter cloacae
atgaaagcgcgtgaggttaactttgacggcctcgtggggctgacgcaccactatgccgggctgtcgttcggtaatgaagcctcgacgaagcaccgtttccaggtctcgaacccgaagctggcggcgaagcaggggctgttgaaaatgaaggcgctgtccgatgccggtttcccgcaggcggtgatcccgcctcaggagcgaccaaacgtggacgtgctgcgccagctggggttcagcggtacggatgaacaggtggtggaaaaagcaggcacgcagacgccacacctgctttcggcggccagttcagcctcctcgatgtgggtggcgaatgccgccaccgttgcgccgtcggcggatacgctggacggcaaagtgcatctgaccgttgctaacctgaacaacaaattccaccgcgccagcgaagcggagaccaccgggcgcgtgctgcgcgccatttttaatcatgaagcgcatttcgaggtgcattcggcgctgccgcaggtcgcgatgtttggcgatgaaggggcggcaaaccacaaccgtctgggcggcgactatggcgagccgggtttgcagctgtttatctatggacgggaagagggcggccacgccgcgccggttcgttatccggcgagacaaactttagccgcaagccaggcggttgcgcggctgaaccaggttaatccttctcaggtgatttttgcccagcaaaatccgcaggtgatcgaccagggcgtgtttcataacgacgtcattgccgtttccaaccgtcaggtgctgttctgccacgagcaggcgtttgcccatcaggaaaagttgctggccacgctgcgcgaacgcgtgccgggatttatgccgattcaggtgcccacgcaggcggtaagcgtacaggatgcggtcgaaacgtatctgttcaacagccagctgctgagccgggatgatggcagcatgatgctggtgctgccgcaggagtcccgcaaccatcagggcgtctggcgctatctcagcgaactggtgcaggcggataacccgattgatgaactgcgcgtgtttgatctgcgggaaagtatggccaatggcgggggaccggcgtgcctgcgactgcgcgtggtgttaacgccggaggagatgcaggccgtgaatccggcggtgatgatgaacgacacgctgttcaatactctcaatgactgggtggaccgctattatcgcgaccgtctggttcaggccgatctggttgatccgcagctgctgcgcgaaggccgcgaggcgctggatgcattatcgaccatcctgcaactgggatcggtttatccgttccagcgctaa

SEQ ID NO: 165600 - DNA, 966 bp, Enterobacter cloacae
atggaaaacttactggcgctgacgctggccgaagagacaccggagcggcaagagggggaaggcccctcgttccactggcgatggctggggcggggcgtgcttgaactgacgccgacgggggaatatgacctgtcgctgctgctttcgaccggcattcacggaaacgaaaccgcgcccgtggagattgtcgatcttttgctgcgcgcgctgtttcgcgcagagatcacgctgcactgccgtctgctggtggtgctgggaaatccgcctgcgctggcgcaaaataaacggtatctcgtgagcgacatcaaccgcatgtttggtggtcgctgggcgcagtttccacagagtgatgagacgactcgcgcgcaatggctggagaaggtggtcacggcgttttttgccggggcgggggaaacgcgctggcacctcgatctgcatacggccattcgcgcctcgtaccacgtgcgttttggcgtgttaccgcagcgtcatcagccgtgggatgaggcgtttctgacctggcttggcgacgccgggctggaggcgctggtcttccaccagacgccaggcggcacgtttacccacttcacctgcgagaatgttggcgcgttatcctgcaccctggagctgggaaaagcgctgccgttcgggcaaaacgacctgacgcgttttgcccctacgcatcaggcgctccgggcgttgctcgccggggttgcgccggaacccacccgggaacccgtcgtgcgctatcgggtcgtgcagcagatcacgcgtcaaagcgaggctttccagcttcatatggcgccacatacgctgaactttacgccgtttcgccagggcgtcctgctggcggaagatggtgagacgcgctatgcggtacagaaatccacggaatatgttttatttcctaatccgtcggtcgcgtttggtttgcgcgctggcctgatgctggaaaaaatgccctga

SEQ ID NO: 165601 - DNA, 495 bp, Enterobacter cloacae; identical to SEQ ID NO: 114778

SEQ ID NO: 165602 - DNA, 558 bp, Enterobacter cloacae
atggaattctttgatatccgtaaaatgccggtcagtctctggcgtaatggtgcgggtgagacgcgtgagatttgctgttttcctcccgcgacgcgggattttttctggcgggccagtattgcctccatcgccagtaacggcgaattttccgcgttcccgggcgtcgaccgggtgattacgctgctggagggcggcgaggtgaccctggatgcaggcagggcgttttgtcataccctgaagcatcatcagccttaccgatttgagggcgatctggcggtgaaagccgtgctcacagaggggcaaatgtcgatggacttcaacatcatgacccgacgggattgctgccaggcaaaggtgcgcgttgctacccggacgttcactaccttcgcatcacgcggtggggtggcattcgtattaagcggcgcctggcaactgggcgacaaattactgacagccgatcagggcgccagctgggaagcgggcagtcataccctccgtttactggaaacgaaggggtcgctgctgttcagtgaaattacctggctgccgggtcattga

SEQ ID NO: 165603 - DNA, 906 bp, Enterobacter cloacae
atgcctgaacagtatatggagcagtatgtgagcaggcgtcaatccgccccgcgtcttgagttcgaagcggcggctatctacgaatatcccgagcatcttcgcccctggcttgaggcactgcctaaacagcctggcgtctatttcttccacggcgacagcgacaccatgccgctctatatcggcaaaagcgtgaatatccgcagccgggtgatgtcgcacctgcgtacgccggatgaagcatcgatgctcaggcagtcccggcggatcacctggatcgagacggcaggcgaactgggcgcgcttctgctcgaagcccggctcatcaaggaacagcagccgctgtttaacaaacgcctgcgccgcaaccgccagctgtgttccttgcagattaacgcaggaaaaccgcaggtcgtttatgcccgggaagtggatttttcgcatgaacccaatctttacggtctgtttgccaacaaacgtgccgcactgcaaaccctgcagtccctggctgatgaattacagctttgttacggcctgttaggactggaagccaccacccgtggtcgcgcctgtttccgctcagcgctgaaacgctgcgccggggcgtgctgtggaaaagagagcgttgaagaacatcatgcccggtttatggctggccttgcctctatcagcgttaactgctggccgtgggaaggcgcggtggcgctgaaagaaacccgcgatgggatgacgcactatcacatcatccgcaactggctctggcttggcgccgttgaaaatctggatgacgctaccgctctgctgcgcacccctgccggtttcgatcaggatggttacaaaattctctgcaagccactgttaaccggaaaatatgagatcatcgtcctcaatgacccggcagccaggtaa

SEQ ID NO: 165604 - DNA, 828 bp, Enterobacter cloacae
atggctctgcaacaagaaattattcaggcgctgggcgcgaaacctgcgattgatgccaatgaagagatccgtcgtagcgttgattttttgaaagcttacctgtctgcacaccctttcctgaagacgctggtgctgggcatcagcggcggtcaggattccactctggccggtaagctgagccagatggccatctccgagctgcgtgacgagaccggtgacaccgcgctgcaatttattgccgtacgtctgccgtatggcgtgcaagccgacgagcaggactgtcaggatgcgattgcgtttattcagccggaccgtgttcttaccgtaaatattaaaggttcggtactggccagcgagcaggccttgcgtgaagccggtattgaactgagcgattttgtccgcggcaacgagaaagcccgtgagcgcatgaaagcgcagtacagtatcgcagggatgaccaaaggggtcgtcgtcggcactgaccacgccgcggaagccatcaccggcttcttcaccaaatacggcgatggcggcacggatatcaaccccctcttccgcctgaacaagcgtcagggcaagcaactgctggcggcgttgggctgcccggagcacctgtataagaaggcgcctacggcggacctggaggacgatcgcccttccctgccggatgaagcggcgctgggcgttacgtatgacaacatcgatgattatctggaaggcaaaacgctcgacgaaggtaccgctaaaattatcgaaggctggtatctgaaaaccgagcataagcgccgtccgcccattacggtgtttgatgatttctggaaaaagtaa

SEQ ID NO: 165605 - DNA, 345 bp, Enterobacter cloacae; identical to SEQ ID NO: 114774

SEQ ID NO: 165606 - DNA, 318 bp, Enterobacter cloacae; identical to SEQ ID NO: 114773

SEQ ID NO: 165607 - DNA, 1359 bp, Enterobacter cloacae
atgagtaaagtcatcgcttcacttgaaaaggtactccttccttttgctgttaaaataggaaagcagcctcacgttaatgccattaagaacggctttattaaattaatgccgttgacattagccggggcaatgttcgttttaattaacaacgtttttctgagctttggagaaggttcctttttttattcattaggaattaggttagatgcttcaactattgaaacccttaatggtttaaaagccattggcggcaacgtatacaatggtacgttgggtattatgtcgctaatggcgcctttctttatcggaatggcgctggcggaagagcgtaaagtggatccgctggcggcaggcttactgtccattgccgcgttcatgaccgtcacaccgtacagcgtgggtgacgcttacgccgttggcgccaactggctgggtggggcaaacatcatttccggtattattatcgggctggtggtggccgaaatgttcaccttcattattcgccgtaactgggttatccgcttgccggatagcgttccggcctccgtttctcgttcattttccgcgttgattccgggcttcattattctctccatcatggggattattgcctgggcgctctctcactggggcacaaacttccaccagatcattatggactctatctcaacgccgctggcgtcgatgggtagcgtggtcggttgggcgtatgtcatctttacctccctgctgtggttcttcggcgtgcatggttcactggcactggcggcgctggacagcggtattatgaccccatgggcactggaaaacgtcgcgctttaccagcagtacggctccgtcgatgcggcgctggcggccggtaaaaccttccatgtgtgggcgaagccgatgcttgactcctatatcttcctgggcggtaccggggcgacgttgggtctgatcatcgcggtctttattgtctctcgccgcgccgaccatcgtcaggttgcgaagctggccctgccatcaggcatcttccagattaacgagccgatcctgtttggtctgccaattatcatgaacccggtgatgttcattcccttcatcctggttcagccgctgctggccgcgattacgctgacggcgtactacctgggcattatcccgccggtgaccaacattgcgccgtggacgatgccggctggtctgggcgcgttcttcaacaccaacggtagcgtggcggccttcctgctggcgatattcaacctcgggattgcaaccctgctctacatgccgttcgtggcgattgcgaacaaggccgcaacggttatcgatgaagaagagagcgaagaggatatcgccctcgcactgaaattctaa

SEQ ID NO: 165608 - DNA, 348 bp, Enterobacter cloacae
atgttagatttagagagtatcgttgccgaagaaaccgcagagaatgatctggaagaggtggtgatgggcctcatcatcaactccgggcaggcacgcagcctggcgtatgcggcgcttaagcaggctaagcagggcgacttcgttgccgcgaaaaccatgatggagcagtcccgtacagcgttaaacgaagcgcatctggtgcagacgaagctcatcgaaagcgaccagggcgaagggaagatgaaagtgagtctggtgctggtacatgcgcaggatcatctgatgacctccatgctggcacgcgagctggtcgcggagctcatcgagcttcacgagaagatgcaataa

SEQ ID NO: 165609 - DNA, 819 bp, Enterobacter cloacae; identical to SEQ ID NO: 114770

SEQ ID NO: 165610 - DNA, 1356 bp, Enterobacter cloacae
atgcaacagaaattaaaagtcgtaaccattggtggcggcagcagctataccccggaattacttgaaggtttcctgaaacggtatcatgaattaccggtcagcgaattatggctggtggatgttgaagaaggtcaggagaagctgaatattatttttgaactgtgcaaacgcatggttgaaaaagcgggcgtgcccttaaccgtgcataaaacgctggatcgccgcctggcactgaaagatgctgacttcgtgaccacgcagctgcgcgtcggccagctgaaggcgcgtgagctggacgagcgcattccgctgagccacggttatctgggccaggaaaccaacggggcaggtggcctgtttaaaggcctgcgtactattccggtcatttttgacatcattaaagacgtggaggagatctgcccgaacgcctgggtgatcaactttaccaacccggccgggatggtcaccgaggcagtctatcgccacaccggtttcaaacgctttatcggcgtctgcaatattccgattggcatgaagatgttcatccgcgatgtactggaactgaccgataacgatgatctgtccattgatctgttcggcctgaatcacatggtctttatcaaagatgtgatagtgaacgggcaatcgcgctttgcggaactgctcgacggcgtcgcctctggtcgcctgaccgcggcctcggtgaaaaacattttcgatctgccattcagcgaagggctgatccgctccctgaatctgctgccgtgctcgtatctgctctactacttcaagcagaaagagatgctggccattgaaatgggcgaatattacaaaggtggcgcacgcgctcaggttgtacagaaagtagagaagcagctttttgatttgtataaagatccgaacctgaacgtcaaaccgaaagagctggagcagcgcggcggggcatactattcggatgccgcgtgtgaagtgattaacgccatttacaatgacaagcaggccgagcactatgtaaacgttccccatcacgggcacatcgacaatattccggcagactgggccgttgagatgacctgcatccttgggcgcgagggtgcaaaaccgcatccccgcattacccatttcgacgataaggtgatgggcctgattcacaccatcaaaggctttgaagtggcggcgagcaatgcggccctgagcggcgagctgaatgacgtgctgctggcgctgaacctcagcccgctggtgcattctgaccgtgacgctgaaaaactcgcgggtgagatgatcctggcgcatgaaaaatggctgccaaactttgctgcaacggttgagaaactgaaactcacacaccgttaa

SEQ ID NO: 165611 - DNA, 750 bp, Enterobacter cloacae
atggaaaacctgctgatcgtcaatgccgatgattttggcctgtcaaaagggcagaactacggcattattgaagcctgtcgccggggcgtcgtgacctctacaacagcgctcatcaacggtgaggcggtggaacatgcggcgcagttaagccgtgagctgcccgagctgggcgtgggcatgcactttgtgctgacgcttgggttgcccctttcgccaatgccgggcctgacgcgcgacggccagctggggaaatggatttgggaaatggcggagcaggacgctctgccgctcgatgagattgcccgcgagctggattgccagtttaaccgctttgtggatgtgtttggccgcgagcctacccatattgacagccatcatcatgtgcatatgatcccggcgattttcccgcttgtggcagagtttgcgcaacgtaaaggcgtggcgatgcgcgtggatcgtgaggtgcgcgggttgccggacgtcgcggtgacgtcaacggaggggttcagcagcgcattttatggcgacgagatcgacgaagcgctgttcctgaaggtgctggatgactccgccgcaaaaggggagcgctcgcttgaggtaatggcgcacccggcgtttgtcgataacatcgtacgtaagagcgcctactgctggccgcgtctggcagaactggatgtgctgacgtcggcgtcgttaaagtacgcgattgccgagcgtgggtatcgtctggggacgttcagggatctttga

SEQ ID NO: 165612 - DNA, 2250 bp, Enterobacter cloacae
atgtcgaacaatgataaaccccatcaagcccctattcatggcaccgaagaatctcaaccgggaatggactcactcgcccctgcggatggctctcataaaccgtcgccgggcctgtccgcgccgggcgagcaacctactgcaccgggaagcgtgaagtcgcccgatgcggataacgagaagttaaaatctctcgacccgcaccgcaaagggggtgaaggctatgcgctgaccaccaatcagggcgtgcgtatcgccgatgaccagaactccctgcgcgccggaacgcgcggcccgacgctgctggaagatttcatcctgcgggaaaaaatcacccatttcgaccatgagcgtatccctgagcgtatcgttcacgctcgcggctccgcggcgcacggctatttccagccgtacaagagcctgaaggcgatcacgaaggcggatttcctttccgatccgaacaaaatcacaccggtatttgtgcgcttctctaccgtacagggcggcgcgggttcggccgatacggtgcgtgatatccgcggcttcgccaccaaattctataccgaagagggcattttcgacctcgtcgggaataacaccccggttttcttcattcaggatgcgcataagttccctgactttgtccatgcggtaaaaccagagccacactgggccataccgcagggacaaagtgcgcatgacaccttctgggactacgtctccctgcaaccggaaacccttcacaacgtgatgtgggcgatgtctgaccgggggatcccacgcagctatcgcaccatggaagggtttggtattcataccttccgtctgattaacgctgaaggcaaagcgacgtttgtgcgtttccactggaaaccggtcgcggggaaagcatccctggtgtgggatgaagcacagaagctgaccgggcgcgatccggacttccaccgtcgcgaactgtgggaatccattgaagccggtgatttcccggaatacgagctggggttacagctgatcccggaagaggacgagttcaaattcgacttcgacctgctcgacccgaccaagcttattcctgaggagctggtgccggttcagctagtgggcaaaatggtgcttaaccgcaacccggataacttcttcgcggagaatgagcaggctgcgttccacccgggccatattgtgccggggctggatttcaccaacgatccgctgctacagggccgtctgttctcttacaccgatacgcagatcagccgtctcggtggaccgaacttccacgaaattcctatcaaccgtccgacctgcccgtaccataacttccagcgtgacgggatgcatcgccaggatatcgataccaacccggcgaactacgagccaaactccattaacgataactggccgcgtgaaaccccgccggggccaaaacgtggcggatttgagtcgtatcaggagcgcgtggacggaacaaaaattcgcgagcgcagcccgtcattcggcgaatattacgctcagcctcgcctgttctggaacagccagaccccgattgaacagcagcacattatcggcggtttcagctttgagctgagcaaagtggtgcgtacctacattcgcgagcgcgtggtcgaccatctggcgcatattgatatccagcttgctcagggcgtggcgaataatctcggcatcacgctgactggcgagcaatgccatgccgcaccgccaaaagacgtgaacgggctgaagaaggatacgtccctgagcctgtacgcggtacctggcgggtcaattaaaggccgcgtagtggctatcctgctgaatgataaaccgcgcgccagcgacgtgctggggatcatgaaggcgctcaaaacccagggcgtacatgccaaactgctttactcccgcatgggtgaagtgacagccgacgatggctctgtcctgccaattgccgcgaccttcgccggggcaccgtcgctgacggttgacgcggtgattatgccgtgcggcgacgttgagagcctgctcggtaacggtgatgccgcctattatctgctggaagcctataagcacctgaagccaatcgccctggcaggcgatgcgcggaagtttaaatctctgctgaaggtaccggatcaaggggaagaaggcattgtcgaaggtgataacattgacgatgcgtttatgacccggttgtttgacctgcttgccgcccaccgcgtgtggtcgcgcagcagtaagattgaccagataccggcgtaa

SEQ ID NO: 165613 - DNA, 240 bp, Enterobacter cloacae
atgaaacctcttcgtcaacaaaaccgccaggttattacttatgtgccccgcgttgaacccgcgccgcctgaccatgccctgaaagtggatggttttcgcgatgtctggatgttacggggtaaatacgttgccttcgtgctgattggcgagcacttccgtcgctcccctgcgtttacggtgccggaatcggcgcagcgatgggctgtgcagacccgccaggatgaagaggttgaagaataa

SEQ ID NO: 165614 - DNA, 1392 bp, Enterobacter cloacae
atgaattttccactcatcgcgaacattgttgtgttcgtcgtattgctattgcttctcgcccaggctcgccacaaacagtggagcctggcgaaaaaggtactggtcggtctggtcatgggcgtggtgtttggcctggccttacacgccatttacggctccgatagcccggtactgaaagattctattcagtggttcaacattgtcggtaacggctatgtacagctgctgcaaatgatcgttatgccgctggtattcgcctctattctgagcgccgtagcccgcctgcataatgcctctcaactgggtaaaatcagtttcctgaccattggtaccctgctcttcaccacgctgattgcggcgctggtgggtgtgctggtaaccaatctgtttggcctgactgctgaaggtctggtgcagggtagcgctgaaaccgcgcgtctgacggcgattgagaccaactacgtgggtaaagtggccgatctgaccgttccgcagatggtgctctccttcattccgaagaatccgttcgctgacctgaccggtgcaagcccaacctccattatcagcgtggtgatcttcgcggcattcctgggcgtggctgcgctcaagctgctgaaggacgatgcgccgaaaggcgagcgcgttctgacagccatcgataccctgcaaagctgggtgatgaagctggtgcgtctggtcatgcagctgacgccgtacggtgtcctggcgctgatgaccaaagtcgtggcaggctctaacctgcaagacatcatcaagcttggcagctttgtgatcgcctcttatctggggctgggcattatgtttgtggtgcacggtatcctgctgggcgtgaacggcgttagcccgctgaaatatttccgcaaagtctggccggtgctgaccttcgccttcaccagccgttccagcgcggcatctatcccgctgaacgtggaagcacagacccgtcgtctgggcgtaccggagtctatcgccagcttctcggcctcctttggcgccaccatcgggcagaacggctgtgcgggtctctacccggcgatgctggccgtgatggttgccccaaccgtggggattaacccgctggatccggtctggattgcgacgctggtgggtatcgtgaccattagctccgccggtgttgcgggcgtgggcggcggcgcgaccttcgctgcgctgatcgttctgcctgcgctgggactgccggtgacgctggttgccctgctgatctctgttgaaccgctgatcgatatggggcgtaccgccctgaacgtgagtggctcaatgaccgccggtaccctgaccagccagtggctgaagcagaccgacaaaacgattctcgacagtgaagaagatgcggaactggcccatcgttaa

SEQ ID NO: 165615 - DNA, 591 bp, Enterobacter cloacae
atgacggcggaaggccacctgcttttttcacttgcctgtgcagtgtttgccaaaaacgctgaactgacccctgtgctggcacagggggactggtggcatattgtcccttccgccgtgctgacctgccttctgccggacatagatcatccaaagtcattccttggccagcggctgaagtggatttcaaaacccatcgccagagcctttggtcatcgcggatttacccacagcctgctggccgtatttggcctgcttacactcttctatttgaaggttccggagagctggatcgtcccggcggatgccattcagggcatggtgctcggctacttaagccatatcctcgccgatatgctgacgccagcgggtgtaccgctgctctggccctgccgctggcgtttccgtctgccaatcctcgtgccgcaaaaaggcaaccagctagagcgcgttctgtgtatggcgctgtttgcgtatgccgtgtggatgccgcagacattgcccgaaaatggtgcagtgcgctggtcatcgcaaatgatcaactcgctacaatttcagttcaatcgttttattaatcaccagattgaacattaa

SEQ ID NO: 165616 - DNA, 762 bp, Enterobacter cloacae
atgatactggatgcttttactctggcaggaaaagtggcgatggtgaccgggtgcgataccggtctggggcaaggtatggccattgccctcgcccaggcaggatgcgatatcgtgggggttaaccgcaaggttcctgacgaaacggcagcgcgcgttacggcgctgggacgacgctttatcgcgattcgcgccgatcttggcaagcaggagagtattcagagcgtggtggataccgcagtcgctgagatgggccgcatcgatattctggttaacaatgccggcaccatccgccgtgccgatgcgctggaatttagcgagaaggactgggacgaggtcatcgatctcaatctgaaatcggtctttttcctctctcaggcagtggcgaaacagtttatcgcgcagggtcagggcggcaagattattaacattgcctccatgctctccttccagggcggcatccgggtgccctcctatacggcgtccaaaagcggcgtgctgggcctcacccgcctgctggcgaacgaatgggcaacgctgggcattaatgtgaatgctattgcgccgggttatatggcgaccaataacacccggcagcttcgcgatgatgagcagcgcagccaggcgatcctcgaccgtattccggcgggtcgctggggtctgccggaggatttacagggtccggtggtgttcctggcctcgtcggcctctgattacgttaacggtcataccctcgccgtagacggtggctggctggcgcgctaa

SEQ ID NO: 165617 - DNA, 672 bp, Enterobacter cloacae
atgtcgaccccgcgccagatacttgccgctatttttgacatggatggattgctgattgattccgaacccctgtgggatcgggctgaactggacgtgatggccagcctcggcgtcgatatcagtcgtcgtaacgagcttcccgataccctggggctgcgcatcgatatggtggttgacctctggtatgcccaccagccatgggttggcccggatcgcgacgaagtaacggcgcgcattatcaaccgcgctatctccctcgtagaagagtataagccgctgttgccgggcgtacgcgacgctatcgccctgtgcaaggcgcaagggctgaaagtggggctggcctccgcctcaccgctgcatatgctggaaaaagtgctgacgatgttcgggctgcgcgacagcttcgacgcgctggcctcggccgaaaagcttccttacagcaagccacatccgcaggtatatatggactgcgccgcgaaactggggctggatccacttacctgtgtggcgctggaagattcggttaacggcatggtggcgtccaaagccgcacgtatgcgctccatcgttgtgccggctgaagaaggccgacacgatccccgttttgccctcgcggacgtcaggctgacgtctcttgaagaattgactgcccgccatctgcgcggggagtaa

SEQ ID NO: 165618 - DNA, 537 bp, Enterobacter cloacae
atgacgtatcaacaagctggacgcatcgcggtcttaaaacgtattgctggttgggttattttcattcccgccctgatttcaacgctgatctccgtactcaaatttatgtacgatcacagcgaaaaacagccgggcatcaatgccgtcatgcttgattttgcgcacgtcatgattgagatgatgcggtttaacaccccgttcctgaacgtcttctggttcaactcgcccacgccggattttcaccaccagctgaatgtcggtttctggataatctatgcgttgatatttatcgcgatggcgttgcaggcctccggcgcgcgcatgagtcgccagacccgctttttgcgcgaaggggtggaagaccagctgatacttgagaaggcgaaaggccctgacgggatgagccgcgagcagatcgaatcgcgcattgtcgttccgcgtcataccatttttgtgcagtttttcccgctctacatcctgccggtcattatcattgtggccgggtatttcttctttacgctgcttggcttcctgtaa

SEQ ID NO: 165619 - DNA, 861 bp, Enterobacter cloacae
atgtggcaggctatcagtcatcttttaagtgagcagctgggtgaaggtgaaattgaactgcgtaacgaactgccaggcggagagatccatgccgcatggcatttacgttacgccgggcgcgatcttttcgttaaatgtgatgagcgtgaattactccccatttttactgccgaagccgatcagcttgagctgttatcgcgcagtaaaacagtcaccgttccgcaggttttagccgtcggtagcgatcgtgactatagctttctggtgatgaactatcttcccgcgcgccctctggatgcgcacaacgcctttattctcgggcaacagatcgcccgtttgcaccagtggagcgatcaacctcagttcgggctcgattttgataacgacctctccactaccccacagccaaacgcatggcagcgccgctggtcgacctttttcgccgagcagcgcatcggttggcagctggagctggccgctgaaaagggattagcgttcggcaacatcgacgcgattgttgaacacattcagcagcgtctggcttcgcatcagcctcaggcttcccttctgcacggagatttatggtcaaacaactgtgcacttgggcctgatggtccctatatatttgacccggcctgctactggggcgacagagaatgtgacctcgcaatgctgccgttgcaccctgaacagccgccgcaaatttatgatggctatcagtctgtctcgccgttacctgcgggtttccttgatcgtcagccggtttatcagctgtacaccttgataaaccgggctattttgtttggcgggagtcatctggtgaatgcccagcgggcgctggaccgcattctggcggcatag

SEQ ID NO: 165620 - DNA, 291 bp, Enterobacter cloacae
atgagcagtggtgatatcacccgctacgtcgtaaccgtgaatattcatgaggcgtcgctgaccgaactgaatgaactcaacaacgcgttcacgcgcgccaattttctgctcacgctgacggacgatgagggcaatattcacgatctcggctcactggcatttggcctgataagcccgctgagtcaggaagaggtgaaggcgctggccagtagcctggtggaaagcgtgactgacaaagccacggaaattgatgtggatagctgggaaaactggcataaaaaagaacaataa

SEQ ID NO: 165621 - DNA, 933 bp, Enterobacter cloacae
atggcttcgatttatacgctgacactctccccttccctcgactccgcgaccatgacgccgcaaatctacccggaaggtaagctgcgctgtagcgcgccggtgtttgagccgggcggcggcggcattaacgtggcgcgcgccattacccatctcggcggaaaagccaccgccatcttccccgctggcggcgccacgggagaacatctggtggcgttgctggcagatgaacaggttgccgtagacaccgtcgacgctaaagactggacccggcagaacctgcatgtccatgttgaatccagcggcgagcaatatcgttttgtgatgccgggggcgaaattgaccgatgatgagtttcgtcaactggaagagaaagtgctgaccattgaaagcggctcattactggtgatcagcggtagtctgccgccgggcgtcgaaacagaaaaactgacggcgctggttcaggcggcgctccagcgcggcatccgctgcattgtcgatagctcaggcgaagccctgaaggcggcgttagaacccggacaacttgaactcgttaaacctaaccagaaagagctcagcgccctggttaatcgagaactcagccagcctgatgacgttcgtactgccgcagaagagctggtacgtacgggcaaagcgcatcgcgttgtggtctctctcggtcctcagggtgcgctggccgtcgacaagacgggctttgtacaggttgtgccaccgccgatgaaaagccagagcaccgtgggtgccggtgacagtatggttggcgcgatggtgctgaagctagcgcagggcgcttcgcttctggagatggcacgctatggcgtcgcggcagggagtgcagccaccataaaccagggaacgcgtctgtgttcgcttgcggatacccagaaaattgtcgattacctggcgagaagctga

SEQ ID NO: 165622 - DNA, 900 bp, Enterobacter cloacae
atgaaagaagaaaatattgctatgttatttgcggctttttataatttgttacctttctatggtcgccttgtcattgatccgcaagaaagtttccgagaccgtgacggtctctttttatgttgtacggactccttaaataaaatgaagcttttgaagacagtacccgcagcactgatgctggcgggtggcgtatttgcgtcactgaatgcaaccgccgatgataccgtttttactgtcatggacgatccctccactgccaaaaaaccctttgaaggtaacgtgaatgccgggtatctggcgcaatccggtaatacgaaaagctcctccctgaccgcagacagcaccctgacctggtacggcaacaccacggcctggtcgctgtggggaaatgccagcaacacctctgctaacgatcaacgctcatcggagaaatacgcggtaggcggacgtagccgatacaacatgaccgattatgactacctgttcgggcaggcgagttggctgactgaccgctacaacggctatcgccagcgtgatgtcgtaactgcgggttatggtcgtcagttcctcaatgggccggtgcacagcctgcgttttgaattcggtccgggtgtccgttacgacgagtacaccaacggcgaagatgaaacccagccgctgggttatgcatcgggcacctatgcatggcagatgacggacaacgcaaaattcacccagggtgtgtcggtgtttggtgctgaagatacaacgctgaactcagaaagtgcgttgaacgtggccatcaacgaacactttggactcaaggtggcgtacaacgtaacctggaactcatcaccacctgattctgcaccggaacataccgatcgccgaaccacgatttctttaggttataaaatgtaa

SEQ ID NO: 165623 - DNA, 234 bp, Enterobacter cloacae; identical to SEQ ID NO: 114756

SEQ ID NO: 165624 - DNA, 1929 bp, Enterobacter cloacae
atgcctgtaattactcttcctgatggcagccaacgccatttcgaccatgctgttagcccaatggatgttgccctggatatcggtcctggactcgcaaaagcaaccatcgcaggtcgcgtaaacggcgagctggtagacgcgtccgatctgattgaaagcgatgcaacgcttgcgatcatcaccgcgaaagacgaagaaggtctggagatcattcgtcactcctgtgcgcacctgttaggccatgctatcaagcagctgtggccaaacaccaaaatggcaatcggcccggttatcgacaacggtttctactacgacgttgaccttgaccacaccctgactcaggaagatatcgacgcgctcgagaaacgaatgcacgagctcgccgaaaccaactatgacgtcattaagaagaaagtcagctggcacgaagcgcgtgaaaccttcgtgaagcgcggcgagagctacaaagtctcgattcttgatgaaaacatcgctcatgatgacaagcctggcttgtaccatcaccaggaatacgtcgacatgtgccgtggaccgcacgtgccgaacatgcgcttctgtcatcacttcaaactgatgaaaatcgcaggcgcttactggcgtggcgacagcaacaacaaaatgttgcagcgtatttatggtaccgcgtgggccgataagaaggccctgaacgcgtacctgcaacgcctggaagaggcggctaagcgtgaccaccgtaaaatcggtaagcagcttgacctgtatcatatgcaggaagaagcgccggggatggtgttctggcataacgacggctggactatcttccgtgaactggaaacgttcgtgcgctccaagctgaaagagtaccagtaccaggaagtgaaaggcccgttcatgatggaccgtgtgctgtgggaaaaaaccggccactgggacaactacaaagatgcgatgttcaccacttcgtctgagaaccgtgaatactgcatcaagccaatgaactgcccgggccacgttcagatcttcaaccagggtctgaaatcctaccgcgatctgccgctgcgtatggcggaattcggtagctgccaccgtaacgagccatcaggtgcgctgcacggtctgatgcgtgttcgtggctttactcaggatgatgcgcatatcttctgtactgaagatcaggtccgtgaagaagttaacgcctgtattcgtatggtctacgatatgtacagcacctttggcttcgagaagatcgtggtcaaactctcaacgcgtccggaaaaacgtatcggcagcgatgagacatgggatcgcgcagaggcggatctcgccgtcgcgctggaagagaacggtattccgttcgaataccagctgggcgagggcgcattctacggtccgaaaattgaatttaccctgtatgactgcctcgatcgcgcatggcagtgcggaacggtacagctggacttctccctgccgcagcgtttaagcgcctcttatgttggcgaagacaacgagcgtcaggtgccggttatgattcaccgtgcgattctcggttcactggagcgcttcatcggcatcctgaccgaagagttcgcgggcttcttcccaacctggcttgcgccagtgcaggtagtggtgatgaacattaccgattctcaggcggattacgttaaagaattgacgcagaaactacaaaatgcgggcattcgcgtaaaagcagacttgagaaatgagaagattggctttaaaatccgcgagcacactttacgtcgtgtcccgtatatgttggtctgtggtgataaagaggtggaagcaggcaaagttgccgttcgcacccgccgtggtaaagacctggggagcctggacgtaagtgaagtgattgagaagctgcaacaagagattcgcagccgcagtcttcaacaactggaggaataa

SEQ ID NO: 165625 - DNA, 342 bp, Enterobacter cloacae; identical to SEQ ID NO: 114754

SEQ ID NO: 165626 - DNA, 198 bp, Enterobacter cloacae; identical to SEQ ID NO: 114753

SEQ ID NO: 165627 - DNA, 357 bp, Enterobacter cloacae; identical to SEQ ID NO: 114752

SEQ ID NO: 165628 - DNA, 984 bp, Enterobacter cloacae
atgtcacatctcgcagagctggttgccagtgcaacggccgccattaaccaggcctcagatgttgccgcgttagacaatgtccgcgtcgaatatctgggcaagaaagggcatttgacccttcagatgactaccctgcgtgaactgccagcagaggagcgcccggcagccggtgcagtgattaacgaagccaaagagcaggtacagcaggcgctgaacgcgcgtaaagccgagctggaaagcgcagtactgaatgcgcgtctggcggcagaaacgattgacgtttctctgccgggtcgtcgtattgaaaacggcggtctgcatccggtgactcgtactatcgatcgtattgaaagtttcttcggtgagctcggctttaccgtggcgactggcccggaaattgaagatgactaccacaacttcgatgccctgaacattcctggccatcatccggcacgtgctgaccacgacactttctggtttgacgctacccgtctgctgcgtactcagacttccggcgttcagatccgtaccatgaaggagcaggagccgccaatccgcatcatcgcgccgggtcgcgtataccgtaacgactacgatcagacccacaccccaatgttccaccagatggaaggtctgattgttgataaaaacatcagctttaccaacctgaaaggcacgctgcacgatttcctgaacaacttctttgaggaagatttgcaggttcgcttccgcccgtcctacttcccgttcaccgaaccgtctgcggaagttgacgtgatgggtaaaaacggcaaatggctggaagtgctgggctgcggcatggtgcatccaaacgtgctgcgcaacgtgggtatcgatccggaagtgtattccggctttgcgttcggtatgggtatggagcgtctgaccatgctgcgctacggcgtaaccgacttacgtgcgttcttcgaaaacgatctgcgtttcctcaaacagtttaaataa

SEQ ID NO: 165629 - DNA, 2388 bp, Enterobacter cloacae
atgaaattcagtgaactgtggttacgcgaatgggtgaacaccacgctggacagcgacgcgctttccaaccagatcaccatggcgggtctggaagttgacggtgtagagccggtttctggcgccttcaccggcgtggtcgtgggcgaagtggttgaatgcggtcagcaccctaacgctgacaaactgcgcgtaacaaaagtcaatgtgggcggtgaccgtctgctggatatcgtctgcggtgcgccaaactgccgtcagggcctgaaagtggccgtggcgaccgtcggtgcggtgctgccgggcgatttcaaaatcaaagcggctaagctgcgcggtgagccgtctgaaggcatgctgtgctccttctccgaactgggtatttccgacgatcactccggcattattgaactgccgcaggatgcgccagttggtaccgatatccgcgaatacctgaagcttgatgacaacaccatcgaaatcagcgtaacgccaaaccgtgctgactgtttaggcatcatcggtgtggcccgcgacgtggccgtgctgaaccagactgaactgaacgtgccggagatcgctccggttgaggcaaccatcagtgacgtgctgccgatacaggtagacgcgcctgaggcctgcccacgctacctcggtcgtgtggtgaaaggtattaacgttaaagcgccaaccccgctgtggatgaaagagaaactgcgtcgctgcggtatccgttctatcgatgcagtcgtcgacgtcaccaactatgttctgctggagctgggccagccaatgcacgcgttcgataaagatcgtatcgaaggtgggatcgtcgtgcgcatggcgaaagagggcgaaaccctggttctgctggacggcagcgaagcgaaactgaacgctgacaccctggtgattgccgatcacaacaaagcgctggcgatgggcgggatcttcggcggcgagcactctggcgttaacgacgagacgcaaaacgtcctgctggaatgtgcgttcttcagcccgctctccatcaccggccgcgcacgccgtcacggtctgcacactgatgcttctcaccgctacgagcgtggcgtggatcctgcgctgcaatacaaagcgatggagcgtgcgactcgcctgctgatcgccatctgcggcggtgaagcgggtccggtaattgatgtgaccaacgaagcgacgctgccgaagcgtgcgaccattaccctgcgccgcagcaagctggatcgcctgattggtcaccacgttgccgatgcgcaggtgaccgacattctgacgcgtctgggctgcgaagtcactgaaggtcaggacgagtggaaagccgttgcgccatcctggcgttttgacatggagattgaagaagacctggtggaagaagtggcccgcgtgtacggctacaacaacatccctgacgagccggtgcaggcgggtctggtgatgggcagccatcgcgaagccgatctgtctctgaagcgtgtgaaaaccatgctgaacgacaaaggctaccaggaagtgatcacctacagcttcgttgatcctaagctgcaacagctgatccacccgggtcaggaagcgctgatcctgccaagcccgatttccagcgagatgtcagcgatgcgtctgtccctgtggaccggcctgctgggcactgtcgtttataaccagaaccgtcagcaaaaccgcgtacgtattttcgaaagcggtttgcgctttgtaccggatactcaggcgaatttaggcatccgtcaggatctcatgctggccggcgccatcggcggtaaccgctttgaagagcactgggacctggcaaaagggacggttgatttctacgatatgaagggcgatctggaagcgattcttgatctgaccggtaaattatccgaaattgaattccgcgcagaagcgattccagccctgcatccgggtcagagtgcggcgatctatttagacggcaaacgcgttggtttcattggggttgttcacccggagctggaacgtaagctggatctgaatggccgtaccatcgtattcgaactggagtggaacccggttgcagaccgcgtcattcctcaggcgcaggacgtctcacgcttcccggcaaaccgccgtgatatcgcggttgtggtcgctgaaaatgtgcccgcagcagatattttggccgaatgtaagaaagttggcgtaaatcaggtagttggcgtaaacttatttgacgtgtaccgcggcaagggcgtagcagaaggtttcaagagcctcgctattagccttatccttcaggataccagccgtacactcgaagaagaggagattgccgctaccgtcgccaaatgtgtagaggcattaaaagagcgattccaggcatcattgagggattga

SEQ ID NO: 165630 - DNA, 300 bp, Enterobacter cloacae; identical to SEQ ID NO: 114749

SEQ ID NO: 165631 - DNA, 981 bp, Enterobacter cloacae
atgcttgatcttgcccgccgccagcaccgctccgatcttcgccgcctgtgtctgctcggggtgctgttgattgtcgccaccaccgtcagcctgtgtgcgggcgatcggtggctggggccggaaagctggtttacgcctgaaggacagctctttgtctggcagatccgcctgccgcggacgctggcggtccttttagtcggcgctgccctggcgctgtgcggcacgatcatgcaggcattatttgaaaaccctctggcggaacccggacttctcggggtctcgaatggcgcaggcgtcgggcttatcgccgccgtgatgctggggggaggcgaactctccacctgggggattagcctcagcgcaatccttggcgcgctgctgatcacccttatccttctgcgctttgcccgtcgccatttatccaccagccggctgctgcttgccggggtagcgttggggatcatctgtagtgcgctgatgacctgggccgtctacttctccacctccttcgatctgcgccagttaatgtactggatgatgggaggatttggtggcgtcgactggcgtcaggggtggctgatggtgctcctgatcccggtcatcctgtggacggcgttccaggcgcagccgcttaatattctcgcgctgggggaaacgtctgctcgccagctcgggatgccgattggattctggcgcaacgtgctggttatcgccattggctggatggtaggcgtaagcgtggcgctggcgggggcgattggctttattgggctggtgatcccgcatatgctgcgcctgtgcggcattacggaccaccgaaccctgctcccggcctcggcggttgccggggcggcaacgctgctgattgccgatatcatcgcccggctcgccctgacggccgctgagttgcccataggcgtggtgaccgcaacgctgggcgcaccggtctttatctggctactattaaaagctggacgttaa

SEQ ID NO: 165632 - DNA, 552 bp, Enterobacter cloacae
atgcagtctgatattctgaataccgaagtgacgaccattgacggcgagaaaaccacgctggaaggctacaagggcaaggtgctgctcatcgtgaacgtggcgtcgaaatgtggccttacgccgcagtatgaacagctggaaaacattcataaagcctgggaaaaagacggctttaccgtactcggcttcccgtgcaaccagttcctgggccaggagccgggtagcgaagaggagattaagaccttttgcagcacaacctatggcgtgacgttcccgatgttcagcaaaattgatgtgaacggggaaaatcgtcatccgctgtatgccaaactggtggccgcggcgccgaccgccgttgcgcctgaagagagtggtttctatgagcgtatggcaagtaaaggccgcgcgccgctctatccggatgatattctgtggaacttcgaaaaattcctgattggccgtgacggtgaggtcgtgcagcgtttttcgccagacatgacgcctgaagatcctatcgtgatggaatcaatcaagctggcgctggcgaaataa

SEQ ID NO: 165633 - DNA, 756 bp, Enterobacter cloacae
atgacgctgctgatgcagctcacggacgttgccggcaaggggcgtcttgagcctgttaccgccgaagtcaacgcaggtgaaatccttcacctggttgggccaaacggcgccggaaaaagcacgctactggcgtgcatggcggggctgaccagcggggaaggggatattaccttcctcgggcaatcgctcggcgactggctacccgctacacttgcctcccgtcgaagctacctggttcagcagcaggttccgccctttgcgatgcccgtctggcactacctgacgctgcatctgcctgacaaaaatcaggtgggattactcaacgaggttgctgcggcactcgggttagacgacaagcttacccggcaggcaaatcagctttccggcggcgagtggcagcgcgtgcgtctggcggccgttatccttcagatccatccggcgggaaatcctcacgggcggttgctgctgctggacgagccgatgagtgggctggacgttgcccaacaggcagcgctggataccctgctcagcgcgctgtgtcgcaaggggattgccattgtgatgagcagccatgatttaaaccatacgttgcgccacgcgcatcgggtgtggttgctggcgcgtggcaagctgattgccagcggaacgcgcgacagcgtgctgacggccgccaatcttgcgagcgcttaccacatgtcgttccggaggctggatattgaaggccacaagatgctcatttccacggcgcaggaataa

SEQ ID NO: 165634 - DNA, 465 bp, Enterobacter cloacae
atgcgattctggtttctccttgttgcggcgctctttcttgcaggatgcagcagccatcgtgcacctccgcccaacccacggctttccgattccattacggtcattgccagcctgaacgatcagctcagcaactggcgcggcacaccttatcgctacggcggcatgagccggggcggggtggattgctcgggatttgtgctgatgaccttccgcgataaatttgacctccagcttccgcgtgaaacgcgtatgcaggcgaaaatcggcactgaaattgataaagacgagctcctgcccggcgatctggtcttttttaaaacgggctccggtgaaagcggccttcatgtcggcatctatgataccgataatcagttcattcatgcctcgaccagccgtggcgtgatgcgctcctctctggataatgtttactggcgtaaaaacttctggcaggccagacgtatttaa

SEQ ID NO: 165635 - DNA, 714 bp, Enterobacter cloacae
atgattattacgctagataatgcttaccagtctgaacttttactccttccggcgcgtgatagtgcaggtttgcttaaaggtttagagattttggttaactttactggcgtgggtgcggacgtacggatcccgactgaactggttatcccacatctttctcaggaagatgaattagcgctgtttcaggagaaactgcaattactcgatacctgtaagctattttttattcagcatcagttaattgcatggatcaatattacacctgcaattgttgagtttttattaactaatgagaacgctgtttcaatccttgagcgatatccgtttcttgagtttaccgttaatgagaactatccaggtttaaataacgggaaagacgatccctgtctggcaagaatggcgatccatttccccttagtactggctaactttggtgcaggggcatcttcccttaaaccggtttatgatggtctgttcaaacgggtgattctggataaaaactttatccagcagcgcgcgtcggcactctcgtttgagccttttatgcgcgccattctctggcagatcgcgccgcattgtcagtcggtcatggtctcgggaattgacgatcacggcatcttagaacgcgtgctgcccttcaatttcggtgcaatgcagggaagcctgtggcctgccgtcccggcagagcgggtcacgactctcgttcagcaataa

SEQ ID NO: 165636 - DNA, 1443 bp, Enterobacter cloacae
atgaccctgtcttttactgctcactggcacgatgaattacccggcttttacaccgcgcttaagccaacgccattacagaacgcgcgtcttatctggcataacgatgcattagcggattcgcttggcatcccttcgacgctttttcagccagaaaaaggcgccggcgtctggggcggcgaaacgctgctcccgggcatgaagccgctggctcaggtctacagcggacatcagtttggcgtctgggcgggacagctcggcgatggccgcggcatcctgctgggtgaacagcttctgccgaatggcgaaacgctcgactggcacctgaaaggggcagggctaaccccgtactcacgcatgggggatggccgcgcggtgctgcgttcaaccatccgtgaaggtctggcttccgaggcgatgcatgccctggggatccctacctcacgcgcgctgtccattgtcaccagcgacacgccggtggcccgtgaaacgatggagcagggagcgatgctggtccgcgttgcggaaagccatctgcgtttcggtcattttgaacacttctactatcgccgcgagccggataaggtccgccagcttgccgattacgcccttcgccgtcactggccgcacctgcaaaacgagccggaccgctatgttctctggttccgtgatattgtcgcgcgcactgccgcaatgattgcccgctggcaggccgtcggctttgcccacggggtgatgaataccgacaacatgtccctgttagggctgacgtttgactacggtccgtacggcttccttgatgactatcagccgggttacatctgtaaccattcggactatcaggggcgttaccgtttcgacaaccagcctgcggtggggctgtggaaccttcagcggcttgcgcaaagcctgtcgccgtttatcgacgtcgatgccctgaacgatgcgctggacagctatcaggagatcctgctgcgggaatatggtgtgttaatgcgcaacaagctggggctgatgacgcaggaaaaaggcgataacgcgctgttgaatgggctgtttgccatcatggtgcgtgaaggcagcgactatacccgaaccttccgtatgctgagccagaccgcgcagcagagcgccgcgtcaccgctgcgcgacgagttcatcgatcgtcaggcgtttgatgactggtttgccgtttaccggacgcgtttacagcaggaacagattgatgacgatacccgccagacgcggatgaaggcggttaacccggcgatggtgttgcgcaactggctggcgcagcgggccattgagcaggcagagcagggggattataccgagctgcatcggctgcatatcgccctgcgcacgccgtttgccgaccgggaggatgaatatgtcagccgcccgccggactggggcaagcggctggaagtgagctgctcaagctaa

SEQ ID NO: 165637 - DNA, 780 bp, Enterobacter cloacae
atggctgaacgttatacggctgaaaatcttacttttacccgatctggccgcacgctgacagataacgtttcgctgtcactgtcgcagggagagctggttacattgatcggccccaacggcgcggggaaatccacgctgctgcggctgctgaccggctacctgaaacccgacagcggcggctgttcgctggcgggaaaagcgctggatgaatggcatccgcagacgctgtcccgctatcgggcagtgatgcgccagcagtctcagcctggatttgactggcaggtggaggagatcgttggcatggggcgtgcgccctggacgcgtcacccggaaccgtcgattgtgcgtgaggtgttgcagctgaccggttgcctgccgctggccggcaggcgttatcatgccctctccggcggcgagcagcagcgcgtccagctcgcccgcgcgctggcgcagctgtggcgtgacggaacgccgcgcggctggctgtttctcgacgaacccacttcagcgctggatctctaccaccagcagcatctgctgcgcctgttgaaatcgctgacccgtcagggccatcttcacgcctgcgtggtgctgcacgatctcaatcttgccgcattatggtcggaccggatcctgctgttacacaacggcaggattgtttctcagggcataccggagacggttttgcaggccgacgcgctggcacactggtacggtgcgcaggtgcacgtcgacagacatccggcgcacgccgcaccgcaggtttttctcgccccttag

SEQ ID NO: 165638 - DNA, 993 bp, Enterobacter cloacae
atgtcccggcgcatcacgttatcgttatggcttctggcggggttgcttaccgtcatgacgttcatggccaccggtgttggggcgttacgcctgccggtgaacgtgctgtggagcggcagcgatgagacgctacgccagatctggcttaccatccgtctgccccgggtgctgctggcgctggtgattggcgggtcgctggcgctcgccggctgcgtcatgcaggggctgttccgcaatccgctggccgacccgggcctgctcgggatcagcagcggtgcggcgctggccgtcgccctgtgggtggtgctcccgctcgcgctgcccgcgctggtgatgctttacgcccctatgctggcggcatttcttggggcgctggcagccactggcgtgatcttcctgctcagcaagcagcgtgacccctctctgtcacgtctgttgctggtgggtatcgccatcaatgccctgtgcggtgcggcagtgggtgtgctttcgtgggtcagcaatgacgcccagctgcgtcagctttcactctggggaatgggaagtcttggtcaggcacagtggtcaacgctgctcgccgtgacctcgctgatggtgcctgccgttctggcgatctggcgttgtgccagcgcattaaatttactgcaactgggtgaggaggaagcgcattaccttggcgtggacgttgcccttgtacagcgaatattactgttatgcagcgccctgctggtcgctgcggctgtcgccgtcagcggcgtgattggctttgtcggactcgtggtgccgcacctgatgcgcatgtggctgggcgccgatcaccgggcaaccctccccggcacggtactcgcgggcgcattactgctgttggtggcggatacggtcgcgcgcaccctggtcgctccggcagaaatgccggtcggcctgctcaccagtatccttggcgctccctggttcttatggctcatttttcgtcgtggagaacagcatggctga

SEQ ID NO: 165639 - DNA, 819 bp, Enterobacter cloacae
atgaaaaactggttcgccctgctctgcgccctgccgctggtcgccgtcgccgcgccggagagaattgtcgccctcggcggcgacgtgacggagatcgtctacgccctcggggcggagtcttctctggttgcgcgcgacagtaccagccagtggccgcaggcaacaaacgcgctgcctgacgtagggtatctccgccagctgaatgcggagggaattttgtccgtacgcccgacgctggtgctggcaagcgaccaggcgcagccctctctggcgctgaagcaggttgaacagagccacgtccgggtggttaccgttcccggcacgcctgacctgcgcgcgattgacgaaaaagtgcgggtgatagctcaggcgacgcatcatgaggcgcaaggggaaaccctgcgcagctcgctgcgtcaggcactggcggcactgccctcaacaccgctcaacaagcgggtgctgtttatcctcagccacggcggaatgaccgcaatggcggccgggcaacagaccggcgcggatgcggcaatacgcgccgccgggttgcagaacgccatgcagggttttacccgctatcagccgctttcccaggagggggtgatggccagccagccggatctggtggtgatttcgcaggacggtcttaacgcgctgggcggcgaagaaaatgtgtggaaactgcccggtctggcgcaaacgccagcgggacgaagcaagcaggtgctggctattgatgatatggccctgctgggcttcagcgtccgcacgccgaaagccatacaacagctgcgtgccagagcggagcaactgccctga

SEQ ID NO: 165640 - DNA, 1029 bp, Enterobacter cloacae
atgggtcactacacacgctggcttgaacttaaagaagaacatccgggtaagtacgcccgtgatatcgccggattaatgcacatcagcgaagcagagctggcatttgcgcgggttggacacgacgcctggcggctgcgcggtgaaatccgcgagattctggcggcgctggagtccgtgggggaaaccaaatgcatctgccgtaacgaatacgccgttcacgaacaaatcggggcgtttactcaccagcacctcggcggtcatgccgggctggtgctgaatccgcgcgcgctggatctgcgtttgttcctcaaccagtgggcgagcgcgtttcacataagtgaaacgacctcccgcggcgaacgtcagagcatacagttcttcgatcatcagggcgacgctttactgaaggtctacaccacggatcacaccgacgttgccgcctggggcgacgtgctgacccgttttatcactgccgataaccccgctctggcactgaaggctgtcgaggcccctgcgcattccgacggtgctgatgcaggctcggtggagaaagagtggcgcgccatgaccgacgtgcatcagttctttagcttactgaagcgccataacctgagccgccagcaggcgtttcgtctggtgagtgacgatctggcctgtcaggtggataacagcgcgctggcacagctgctggagacggcgcgacaggacggaaacgaaatcatgatcttcgtcggcaaccgcggctgcgtgcagatcttcaccggtgtggtggaaaatctgacgcccatgaaaggctggctgaacatcttcaacccaacctttaccctgcatctgctggaggagactatcgccgagacgtgggtaacgcgtaaacctacggcggacggacacgttaccagcctggagctgtttgctgcggatggcactcagatcgcccagctctacgggcagcgtaccgaaggcgagcctgagcagagccagtggcgccgccagattgatgccctgacgccagaagggctggccgcatga

SEQ ID NO: 165641 - DNA, 1983 bp, Enterobacter cloacae
atgccacacctgcaatccgcgtctttacgcccgtctcttctggcgctggcgattgtcagcaccctgccgggcgttacgtttgccgccgcagacgaaatcaccgtcaccgccaccggcaatgcccgcagcgcctttgaagcccccatgatggtgagcgtgattgacgccaccgcgccggaaaaccagaccgccagctccgccgccgacctgctgcgcaaggtgcccggtctgatgctggacggcaccgggcgcaccaacggtcaggacgttaacctccggggctatgaccgccgtggcgtgctgatactggtggatggcgtgcgccagggcactgataccggacacctgaacagcacgttcctcgatccggcgctgatcaaacgtattgaagtagtacgtggtccttccgccttgctgtacggcagcggcgcgctgggcggcgtaatttcgtatgacaccgtcgacgccaacgatctgctggatgcaggtaaaaacagcggctatcgcgtatttgctaccggtgcaacgggcgatcacagcatcgggatgggtgccagcgcctatggccgcaccgataccctggacggtctggtctcctggtccagccgcgatcgcggcgacattcgccagagtgacggcgcgagggcgccaaatgacgaatccatcaacaatatgctggcgaaaggcagctggaaaatcgatccggcgcagacgctgagtggctccctgcgctactacaacaacgacgcgcaggagccgaaaaatccgcagaccacggatgccagcagcagtaacccgatgaccgatcgttccaccattcagcgcgatgcacagcttggctaccgcattgcgccagccggaaacgactggctgaacgccgatgcgaaaatttactggtccgaagcgcggatcaacgcccagaacatcgacgccagcggcgagttccgtaagcagactaccaaaggcggcaaagtggaaaaccgcacccgcctgttcagcgactccttcgcctcgcacctgctgacctacggcggggaatactatcgtcaggagcaacaccctggcggcgcgaccaccggcttcccggacgcgaaaatcgacttcagctccggctggttgcaggatgagatcaccctgcgcgacctgccggtaacgcttctcggcgggacgcgttacgacaactaccgcggcagcagcgacggttacgacgacgtggatgcggataagtggtcatcacgcgccgggttaaccgtgagtccagccgactggctgatgctgttcggctcttacgcccaggccttccgtgcgccaacgatgggcgagatgtataacgactcgaagcacttctctatcggcagcttctacaccaactactgggtgccgaacccgaacctgcgtccggaaactaacgaaacccaggagttcggttttgggctacgttttgacgatctgctgctcgccaacgacgcgctggagttcaaagccagctacttcgacaccaaagcgaaagattacatctccaccaccgtcgattttgcggcggccaccaccatgtcctataacgtacccaatgccaaaatctggggctgggacatgatggcaacctacgcgaccagcctgttcaacctcgacgtggcctacaaccgcacgcgcgggaaagataccgaaacgggcgaatacatctccagcatcaacccggacaccgtcaccagcaagctggatatcccggtggcgcaaagcggcttctccgtgggctggatcggcaccttcgtcgaacgttcaacgcatatcagcagcagctacagcgagcagcctggctacgcagtgaatgatttctacgtcagctataaaggccagcagcagttcaaaggcatcaccaccaccctcgtgctggggaacgccttcgacaaagcctactggtcaccgcagggcatcccgcaggatggccgcaacggcaagatcttcgtcagttatcaatggtaa

SEQ ID NO: 165642 - DNA, 1047 bp, Enterobacter cloacae
atgaacaaaaccgacgaactgcgcaccgcgcgcattgatagcctggtcacaccggctgaactggccctgctgcatcccgtatccgccgaggtggcggaccatgtgacggcctcccgtcgccgcatcgaaaaaattctcaatggtgaagacaaacgtcttctggtggtgattggcccctgctccatccacgacctcgacgcggcaatggattatgcacaacgccttcagacgctgcgcggcacgtatcaggatcgcctggagatcgtgatgcgtacctactttgaaaagccgcgtaccgtcgtgggctggaaaggattgatttccgatcccgatctgaacggtagctaccgggtgaatcacggtattacgctggcgcgcaagctgctgttacaggttaacgagctgggcgtgccaactgccaccgaatttctggatatggtgaccggacagtttattgccgacctcattagctggggcgcgattggcgcacgtaccaccgaaagccagatccaccgtgaaatggcgtcggcgctttcctgcccggtgggcttcaaaaacggaacggacggcaatacccgaattgccgtagatgccatccgcgcgtcacgcgccagccatatgttcctctccccggataaaaacggccagatgaccatctaccagaccagcggcaacccgttcggacatatcattatgcgtggcggtaaaaaaccgaattaccatgcagaagatattgccgccgcctgcgaaacgctggcggaatttgacctgccggagcatctggtggtggatttcagccacggcaactgtcagaaacagcaccgccgccagctggacgtctgcgaggaagtttgccagcagatccgcagcggctcgaccgcggtgaccggcattatggcggaaagcttcatcaaggaaggtacacagaaaattgttgccggacagcagatggtgtacggccagtcgatcaccgacccgtgcctgagctgggaagacagcgagctgctgctggagatgctggcttcagccgtggacacacgcttttaa

SEQ ID NO: 165643 - DNA, 834 bp, Enterobacter cloacae; identical to SEQ ID NO: 114736

SEQ ID NO: 165644 - DNA, 2379 bp, Enterobacter cloacae
atgtccaacaatggctcgtcaccgctggtgctttggtataaccaactcggcatgaatgatgtagacagagttgggggcaaaaatgcctccctgggtgaaatgattacaaatctgtccggtatgggtgtttccgtacctaacgggtttgccacaaccgccgatgcgtttaacctgtttttagaccagagcggtgtaaaccagcgcatttacgacctgctggataaaacggatattgatgatgtcaccgagcttgccaaagccggcgcgcaaatccgccagtggattatcgacacacctttccagccggaactggaaaaagccattcacgacgcgtacaaccagctctccgctgacgacgcgcaggcctcctttgccgtgcgctcttccgccaccgcggaagatatgccggacgcctctttcgccggtcagcaggaaacgttcctgaacgttcagggctatgacgcggtgctggtggcggtgaagcacgtcttcgcctccctcttcaacgaccgcgccatctcctatcgcgtccatcagggctatgaccatcgcggcgtcgcgctctccgcaggcgtgcagcgcatggtgcgttccgacgtaggctcttccggcgtgatgttctctatcgacactgaatccggcttcgaccaggtggtgtttatcacctccgcatggggtctgggcgagatggtggtgcagggggcggtaaaccctgacgaattctacgttcacaagcctacgctggcggctaaccgtccggcagtggtacgtcgcaccatgggctcgaaaaaaatccgcatgatctatgctccgacgcaagagcatggcaagcaggtcaccattgaagatgtgccacaggagcaacgggatcgcttctcactgaccgacgccgaagtggaagagctggcgaagcaggcggtgcagattgaaaaacactatggccgtccaatggacatcgagtgggcgaaagacggacacaccggcaagctgtttatcgtgcaggcgcgtccggaaaccgtccgttcacgtggtcaggtcatggagcgctacaccctgcacgcgcagggcaaaattgtcgcggaaggccgcgcaattggtcaccgcatcggtgccggtccggtgaaagtgatccacgacatcagcgagatgaaccgcattcagcccggcgacgtgctggtgaccgatatgaccgaccctgactgggaaccgatcatgaaaaaagcggctgccatcgtcaccaaccgcggcggccgtacctgtcacgcggctattatcgcccgtgagctggggatcccggcggtagtcggctgcggtgatgccaccgagcgcatgaaggacgaccagaaggtgacggtctcctgtgccgaaggcgataccggctacgtgtatgccgatatcctcgacttcagcgtgaaaagttccagcgtggataccatgccggacctgccgctgaagatcatgatgaacgtcggcaacccggaccgcgcgtttgacttcgcctgtctgccgaacgaaggcgtgggcctggcgcgtctggaatttattattaaccgtatgatcggggtgcacccgcgtgcgctgctggagttcgacgaccaggacgcaaaactgcaaaacgaaatccgcgagatgatgaagggttacgactcgccgagagagttctatgtgggtcgtctgacggaagggatcgccacgctcggcgcggccttctacccgaaacgcgtgatcgtgcgtctgtcggactttaagtccaacgaatacgccaacctggtgggcggcgaacgctacgagccggaagaagagaacccgatgctgggcttccgcggcgccggacgctacgtgtcggaaagcttccgcgactgcttcgcgctggagtgcgaggcggtaaaacgcgtgcgcaatgacatgggtctgaccaacgtggaaatcatgatcccgttcgtccgtaccgtggatcaggcgaaagcggtggtggatgagctggcgcgtcaggggctgaagcgcggcgagaacgggctgaagatcatcatgatgtgtgaaattccgtccaacgccctgctggccgagcagttccttgagcacttcgacggcttctccattggctcgaatgacatgacgcagctggcgctcggcctggaccgcgactccggcgtcgtctctgagctgttcgatgagcgtaacgaggcggtgaaagcgctgctctccatggccattcgcgcggcgaagaaacagggtaaatatgtcgggatttgcggccagggtccttctgaccatgaagactttgcggcctggctgatggacgaggggattgatagcctctccctgaacccggacacagtggtgcagacctggctgagcctggcagagctgaacaagtaa

SEQ ID NO: 165645 - DNA, 1401 bp, Enterobacter cloacae
atgacaatctcctctgtattacgtaccaaagataaaataggttatggcctcggcgatatggccagcgcgctggtctggcaaacggcaacgttatttctcgcttatttctatacggacgtattcggtttgcctgcggccattatgggcaccatgtttttagtggtgcgcgtggtcgatgcgtttgtcgacccgtgcattggcgcgctggtggaccgcactcagacccgccacggtcgttttcgtccctggctgctctggtttgccattccgtttggcgtgagctgcctgattaccttctacgtaccggatgccggggcgatggcaaaaattgtctatgcctgcgtaacctatgccatcctgagtctgatctattccgcgattaacgtcccttactgtgccatgcctggcgcgctgacgctcgacccgcgcgaacgccactcgctgcaatcctggcgctttggcctgtcgtttatcggcgggttgattgtaaccgtcatcgcgctgccgctggtctcattattaggccaggggaatgtgcaaaaaggctatttctatgccatgagcctgatggggctgctgggtattgttttattcttctgctgcttctttatgacccgggagcgttactcgccgcgcaatgacacctccggctcgatgctgacggatttaaaactgctggccgccaatagccagtggcgaattgtttttctgtttaatattttactgttaaccgccgtcgtgacgcgtggctctgcgaccatgtattacgttaattatgttctgttacgtccggaactggtttttgcctttattgtttcaggcatggtggcctccttaagcggcgcattattatctgaacgcctgctgggcaaatttgaccgggtgcgtgcctatcagtggaccattatttctttcgttatttttggcgcgctgattttcttcattccgccctcgcaggtgtggctgatattcggtctgaatattgtgtttagttttattcagaacctgaccacgccgctgcaatggaccatgttctccgatgtggtggactacgaagaacaccgtagcggccgccgcttggacgggctggtcttttctaccgccctgtttgccatcaaatttgggctggcgctgggcggggcggtggtcggttgggtgcttggcatggtggattacgctcccggtcaggcaaaccaggcgcctcacgttcttgcaaccatcaatgccctgttcaccctgatcccctgcgtgctgttcctctgcatggtggcgctccttgccatctacaaacttaacagccggctggtggacagcatcgcccgcgagctggccagcaaacgcgatagtcgaaacgatgcggggcagctcagcccggcaacccaatccgcactacaggagtaa

SEQ ID NO: 165646 - DNA, 2376 bp, Enterobacter cloacae
atgactgcgatctacaaggacgcgggacgttccgtacacgagcgtgtcgctgatttactggcgcgtatgacgccggaagagaaatttgcccagatgcacgcgtactggctgatcctcgatgaacacggcaaccaccgcgagcgcagcgatctgagcgatgaattcgccggcgtgagtgaacaggcgtccctcagcgaaaggctgaagctgggcgtcgggcagatcacccgcccgctcggcacgcacattgttgatgcaaaaaccggcgtgcgtgccgccaaccgcctgcaacgcatgatgatggaggagacccggctcggcattccggcgctgtttcatgaggagtgtctggtggggctgctgtgcaaagatgcaacgctgttcccgtcgtcgctgaactacggttctacctgggacccggcgctggtgcagcgcgcggcggagcagattggcaaagaggcccggtctgtcgggtgccagcaggggctggccccggtgctggatgtctcgcgcgatgtgcgctggggacggacggaagagacctttggggaagatccgtggctggtaggggtgatggcgacggcgtacgtgaaggggttgcagggcgataagcgcgatctgctggcgaccctgaaacattacgtcggccactccttcagcgaaggggcgcgcaatcatgcgccggtccatctcggtttcagcgagcttaacgataccttcctgctgccgtttgagatggcggtaaagctggccaacgccggttcggtgatgccagcctatcacgacattgataatcagccagggcacagcgaccattttctgctcaccaccgtgctgcgtgaacagtggggcttcgacggcattatcgtggcggattacggcggcgtcagcctgctgcaccagcaccacgggatttctcacgatccagcacaatcggcggcgctggcgtttaacgccgggctggacgtggaattgccgaaggatgactgcgcgcgtcatctggctgaagcggtagagcgtgggctcatctcaatggcgaaagtggatgagattgtggcgcgcgtgctaagtgaaaaattccgtctcgggctgtttgaaaaaccgtacgccgacgaagacggtatcgatttgcagaatgaggcgacccggcaggtggcgcgcgaggtggcaacaaaatcgatcacgctgctggaaaataacggcattttgcccctcggcggaaaaccccgtgtagcggtagtggggccgacggcggacgatccgctggcgttactgagcggctacagcttcccggttcatctgatcatcagcgatatggttgaagagacctcgcaggtgactaccccgcgcgcggcgctggaacagtaccttggtgcatcgcagatacgttacgccaaagggtgccacattatcgaaaaacggatggcgggcgcgccggtgttcccgggcgacagcggcggtaaaccgatgcagcaatcgccggtttcacaacgcacggatctgatccccgacgccgtgagcgcggcaaaagagagtgacgtggtggtggcctgcgtgggcgacctcgccggactattccagagcggcaccgtgggggaaggttcggataccgattcgctggatctaccgggcgtgcagcaacagttgctggaggcgctggtggcaaccggtaagccggtgattgtcgtcatgacgggtgggcgtccttataaccttcaggggctggaagagaaggtggccgcgctgatgatggcctgggcgccggggcaggaagggggctgggcgattgccgatgtcttaaccggccgcgcggagccgcagggcaggctggtagtgagcgtgccgaaaaacgccggggcgatgccgtactactataaccacaagctgaaaagcggcggcacgccgtttgcgttccatttcggcgcactttacccgttcggttacggtctcggctggacgcagtttcgctggggcgcggcccgcctggcggaaagccgcgtcccgatcgacggagaggtggcgttaagcgtcgatatcaccaacaccggcgagcgcagcggcagcgaagtggtacaggtgtacgtacgcgataaggtcgctacgcaggtgcgtccgcttcaggagctgaaagcgttccagcgcgttacgctttcaccgggagaaaccgccacgctgacctttaccctgccggtggagatgtttaatttcacccgccgggacgggaagcggattgtcgagccaggggaatttgagctacaggttggcgcgtcctcggcggatatacgcgaggtggtgaacgtgctggtaaccggggagacgcgggagctggcgggggaatggcgcatgctcagccgctgtgacattacacgggcgtaa

SEQ ID NO: 165647 - DNA, 1116 bp, Enterobacter cloacae
atggtcaatcttcgtcagcccagggatgtcgcgcagatactgctgtcggtgctgttcttagccattatgattattgcgtgtctgtggattgttcgtcctttcgtgctcggatttgcctgggccgcgaccgtcgtcgtcgcaacctggcctttactcttacgtttgcagaaactgctgtttggtcgccgcggcctggccgtgctggtgatgacgctgctgttgttcctgctgtttattattcccattgcactgctggttaacagcctggttgacagtagcggcccggttattcgcgcggtcaccagcggtgatatgacgctgccggatctcgcgtggctgaacagtattcctgttgtgggcgcaaaactgtacagcggctggcacagcctgctggagatgggcggtagcgccctgatggccaaagtgcgtccgtacatcggcacaaccaccacctggtttgtggggcaggctgcgcacattggtcgcttcatgatgcactgtacgttgatgctggtcttcagcgccctgctgtactggcgcggcgagcaggttgcgctgggggtgcgtcatttcgccacccgactggcaggtaaacgcggcgatgcggccgtgctgctggcagcccaggccgtccgcgcggtggcgctcggcgtggtggtcacagcgctggtgcaggctgtacttggcggaatcgggctggcgatttccggcgtaccttatgccaccattttcaccgtcgtcatgctgatgacctgtctggctcagctcggtccgctgctggtgctggttccctgcattatctggctttactggacgggggacacgacctggggcacggtgctactggtctggagttgcgtggtgggcaccatggataacgtgatccgtcccctcctcatccgcatgggcgctgacctgccgctgattctgatcctgtccggggtgatcggggggttaattgccttcggcatgattggcctgttcatcggtccggtgctgcttgcggtaacctggcgtctcttctccgcctgggtgcatgaagtgccgccgccgggaaccgaccctgacgtcatcttaagcgaacttgaagaactggaagataagaacgcgcagtaa

SEQ ID NO: 165648 - DNA, 3057 bp, Enterobacter cloacae
atgatcccacagatttctcaggcaccgggcgtcgttcagctggtgcttaattttttgcaggcactggagcaacagggttttacaggtgacaccgccaccgattatgccgacaggctgacgatggcgaccgataacagtatttaccagcttcttcccgatgccgtcgttttcccgcgctctaccgccgatgtggcgctcatcgcccgtctggcgtcgcaggagcgtttcagcaccctggtctttaccccacgcggcggcgggacgggtaccaacgggcaggcgctgaaccagggcatcatcattgatatgtcccgctatatgaaccgcatcattgagatcaacccggaagaggggtgggtgcgagtggaagcgggggtgatcaaagatcagctgaatcagtttttgaaaccttacggctatttttttgcgccagagctttccaccagtaaccgcgcgaccattggcgggatgatcaacaccgatgcctcggggcagggctcgctggtctacggcaaaacctccgatcacgttatgggtgtgcgggcggtgctgctggggggcgatatcctcgatacccaaccgatgccgatcgagctggccgaaactctggcaaaagagagcaccaccagcggacggatttatcgtaccgtgctggagcgctgccgcgaaaatcgcgaactgatcctcaacaaattcccgaagctcaaccgcttcctgacgggctacgatctgcgccatgtctttaatgacgatctgagccagttcgatcttacccgcgtactgaccgggtcagaagggacgctggccttcatcaccgaagcgcgtctggatatcacccggttgccaaaggtgcgccgtctggtgaatgtcaaatacaactcctttgactccgcgctgcgtaatgcaccgtttatggtggaggcgcgggcgctgtcggtggaaaccgtcgattcaaaagttctgaacctggcccgggaagatatcgtctggcattcggtgagcgaactgattaccgacgtgccggataaagagatgctcggcctgaacatcgtcgagttcgccggggatgacgcagagctgattgagagccaggtaagcacgctctgccagcgtctggacgagctgattgcccagggggaaggcggcgtcattggctggcagctgtgtaacgatctctccggcatcgagcgaatctacgcgatgcgtaaaaaagcggtggggctgctcggcaacgcgaaaggggcggcgaagcctattccgtttgcggaagatacctgcgtgccgccggagcaccttgctgattatattgtggagtttcgcgcgctgctcgacagccatggtctgagctatggcatgttcgggcacgtggacgcgggtgtgctgcacgtgcgcccggcgctggacatgtgcgacccgcagcaggagatcctgatgaaggagatctccgaccaggtcgtggccctcacggccaaatacggcggcttgttatggggcgagcacggcaaaggattccgcgccgagtacagcccggcgttttttggcgaacaactttacgccgagctgcgtaaggtgaaagccgcttttgatcccgataaccgcctcaacccgggaaaaatctgcccgccggagggcatcgatgcgccgatgttgcaggtggacgccgtcaagcgcggcacctatgaccgacaaattccgattgcggtacgcgcttcctggcgcggcgcgatggagtgcaacggcaacgggctgtgcttcaacttcgatgtgaaaagcccgatgtgtccgtcgatgaaaatcaccagcaaccgcattcattccccgaaagggcgtgccacgctggtgcgcgaatggctgcgcctgctggccgaccgcggcgttgacccgctcaagctggaacaggagctgccggaaaaacgcgacagcctgcgcgggcttatcgaacgcacccgcaacagctggcatgcgaacaaaggtgaatacgatttctcgcatgaggtgaaagaggcgatgtccggctgcctggcgtgcaaggcgtgttcaacccagtgcccgattaaaattgacgtaccggaattccgttcccgcttcctccagctgtaccacacgcgttatctgcgcccgatgcgcgatcatctggtggcgacggtggagagttacgcgccgctgatggcccgtgcgccaaaaacctttaacttctttatcaaccagccgctggtgcgcaaactgtcagaaaaacatatcggcatggtggatctgccgctgctgtcggtgccatcgctccagcgtcggctggtggggcaccgctcggcgaacatgaccctggaacaactggaagcattaagccctgagcagaaagcgaaggtggtgctggtggtgcaggatccgtttaccagctattacgatgcgcaggtggtggccgattttgtccgactggccgagaaaatcggctaccagccggtggtgctgccgttctcgccgaacggcaaggcgcagcacattaaaggcttcctcacccgctttgcgaaaaccgcgcagaaaacttcagattttctgaatcgcgtggcgcagctcagtatgccgatggtgggcgtcgatccggcgctggtgctctgttaccgggatgaatataagcagacgctcggcgataagcgcggtgattttcaggtcttactggtgcacgagtggctgcctgcggtgctgacgcaaacgcccactcaggaggtgagtggagaagcctggtatctgtttgggcactgcaccgaagtgacggcgctgccgacggcgcctgcccagtgggcttctatctttgcccggtttggcgcgaagctggaaagcgttaacgtgggctgctgcggtatggccggaacctacggccatgaagtcaaaaaccacgctaattcgctcggcatttacgagctgtcgtggcatcaggcgatgcagcgcctgccacgcaaccgctgtctggcgacgggctactcctgccgcagccaggtgaaacgggtggaaggtaacggcgtccgccatccattgcaggctttactggagattatcggatga

SEQ ID NO: 165649 - DNA, 411 bp, Enterobacter cloacae; identical to SEQ ID NO: 114730

SEQ ID NO: 165650 - DNA, 195 bp, Enterobacter cloacae; identical to SEQ ID NO: 114729

SEQ ID NO: 165651 - DNA, 630 bp, Enterobacter cloacae
atgtcttctgacaaaccatcgcatcgcggctctccctatgctcaggaactgatttctcatttacagccgcactgcgccacgcataaaaccgatcccggcgagcaacttgatctccaggttgacgggcagagcatgtgttatttaattcttgatggcacggtcgccatatacagaagaagcgacgacatgatgctttcaacggcgcgcagtcccgccctgtttggcctcgctaacctgacggacatttattttaatgactacctccgaacggtaacgccttgcctgattggtgtgctcacgaccgatcgggtggctgaaattatcaaagagaaggcgctgtgggggctgctttctaatcatctgatgtttgtctataaccgcctctatcacaacgtcatgccgaaaggcgcgccaaccgcgtacgagatgattcgccagcagctcgtgctgctgatgcaggaagatgacagctaccgacgcagcgtgacggcggaaaggtatatcagggataaaacccatctttcccgcagtggcgtaatgcggatcctggctgatctgaaaacgggtgggttcatcgaaatggaagaaggccggctgattaaaattaacaaactgcctgccagatactga

SEQ ID NO: 165652 - DNA, 660 bp, Enterobacter cloacae
atgaatacccgtttcgcgcctgagtcagatattgataagtcaacagtgctcggcgctaagccttttaagcacattgaaaaaataatcgataatgttttgccgcatgcggagagaagcattattgccagaggagaaattatccattattgctccggcgatacccgtcaatgctttttactgttgcatggcagcgtggcgttacaccgtcgcggggacggtatcgtcttaaattctgaatccgcgccatttatactcggcgtgagcagccagttatcgtctgaacacctgtacgtcagagcgctggaaacttcagaggtggccagcgtttcgctggcgtgtttcaatcatgttgtcgcacaacagaatttatgggagcacttctcaaacctgctgatctacaccgcatcgcgcgtctacgaacattgtgcccagatatcgcaaatgtcggcttatgacattatccgctttcaactggttgagttgatgcaggagccggaagccataagacaaaacattaccgccgcggcctatatcaaaagccgcacctatctttcacgcagcggcattatgcggatcctcgcggagttgcggacggggaaatacatcaccatggagcgtggcgtactagttgagatccatcacttaccccgtaagtactga

SEQ ID NO: 165653 - DNA, 531 bp, Enterobacter cloacae
atgaatacaaaattgatgatggcaatgttagcggcaggttctgtactcaccatgaccaatgcattcgcagcggccggtaccgttaattttaacgggaatattctggattctgcctgcgacgttgatgtggcatcccagaatcaggtggtggtattaggcgattattataaaacggaattcccgacaaccggggcgagaacggctgcgacgcaattcaatattattttgaaaaactgtccggtaacggtcaccaatgcaaaagtccgttttgacggcacgccggatttaaccaacgccagcctgctggcgattgatacgtccgtggcgggggcggccaccggggtggcgattaacctgatgacggcagataaagccgatctgccgctgcacggcagcaacagctatatctacccgctcagcagtacggctgataatacgctgaacttctacgcgcagtatatctccaccgcggcatccgtgaccgcgggcccggctaactcggtcgcaaacttctcagtggtatacaactaa

SEQ ID NO: 165654 - DNA, 678 bp, Enterobacter cloacae
atgcgttttatcacgacaacgggcctggctatggcgctgttaccgctgacattaacatccgtcagtgcaggagtaattattggcggcacccgtattattttcgatggggctaaaaaagaggcgtcaataggtattactaatcctgataacgttccttatttaatccagtcgtggatagatgttcaggatgaacaatcgggtaaagcgccttttattattacgccaccactgtatcggctggacggcgggcaaaagaaccttgagcgtattgtcatgaccggctcactgcctcaggggcaggagagtttattctggctgaacattaaagctattccttcagcctcaaagcagatgaactcgctgcaaattgccgtcaaaacgcgcatcaaattaatttatcgaccagagactcttcgtgcgtctacccccgaggagcaagccaataaattaacctggcgtcgtgcgggaaatacccttcaggttaataaccctacgccgtacgttatcaatttcaatgaaattacgttgggtaataagaaacttgacgatgtcacgtacgtgatgccttcaggcacagcccgttttccgttaccgaacggaaccagtggcaatacgctgacgtttaaagtcattaacgattatggcagccctggcgaattacaccgggcaagtttgtga

SEQ ID NO: 165655 - DNA, 2544 bp, Enterobacter cloacae; identical to SEQ ID NO: 146927

SEQ ID NO: 165656 - DNA, 948 bp, Enterobacter cloacae
atgaaatgtcttaacgcgatgctgctgctctgtttgctcgcggcggcaaatatggctcgtgccggtacctgcaccaccatcaccccgcagctttcaaccctgtccgtggggacgatcaacgtgcagcgcgatgcgcctgtcggcacggtggtattttctggcgcggcgtcagccacaggctcctatcttaccgggtgtactaatccgctgatgctgggattcagcctgcgctacaacggcgccacgttgagcagctacggcaaccatgtttacaacacgaacgtcagcgggatagggatacgcttttcttccaacggctattttgaaaacccgagcaatacgttctcgtacaatgcgcagacctcctatgtggactggtacggcgggaggattgagctggtggtgacgggcccggtctcatcgggggtattaacccccgggacgatcggcgtcgtgacgcttcagggaagcgatggcctctaccgtgacggtctgaccacgcagctcacctccggcaccatcaatgctctggcgtgcacggtgaatacggcccagctgacgtttccgataggggatattcccgcctcggcgttcggctccacggtgggcaccacgccgatgggggcacagaacacgcaaaacctgggcctgacctgcgccgccggaaccaatattacggtctcgctcagtggaatacagaacccggacagcgccaataccagcgtgatggccttaaccgggcagggaaatgccggcactgcgaaaggggtgggggtgcagcttatctataacggtgcaccgctggtgatgaacagccgactattcttgcggcagtctgccggggggcaagagacgttgccattaacggcccgatattaccagacgttaacccgcgtggagtcaggttcagcgaatgcctccgccacccttaatttgacctaccagtag

SEQ ID NO: 165657 - DNA, 513 bp, Enterobacter cloacae
atgaaaataagatgcaggacactgcttttacttgccttactcagcgggaaggtatgctccgctgatagcgtcaacatcggtgtgacgggaaatatcgttgcgtcgccgtgcatatttaatggcggcagtaacagccttgatgtcaacctgggcaatattcaggcaaccaatatggcgacgccgggctcaacatcggatccggtgcctttcagtctgctgtttacccagtgcccaaccggaacgcagagtgtgaccgtcactttcaccggcagccccgatcccgaggcgggtgcggactattttatgaacagcggttcggccacgcatgtggcgatagccatgcgcgatgcccaaaccggcgcgcttaaaggaacaggcaccagcatgacccagaccattgccgcggacagaaccgcgacaatggctatgttggcctcggtaagatccatgccgggaggcgccacgccgggaagcatcaatgcggttgtggtgatgacgatgcagtacaactaa

SEQ ID NO: 165658 - DNA, 654 bp, Enterobacter cloacae
atgttaaatattctgattcaggaaacggatctgttttttcaggctgggctacagagctttttcgaagatttttttaagcataactttcatcgctccatcacatttcacctggcgctgaccaatgaaaacgtcagccaggccgatattattgttctttcattatgtcagggggaaacgctgacctgttttccggagttactggcccggcaaaaaggaattgtgataggtctcgtcgacgatgagctgcgtttttcggcgctgccttcctgctttcaggacattatttttcttccgcgccgggcgtcgcttgatcgtattagcggcgttctgtttatcgcgtggttcaggacgcaattaccaggttacacgttgaataaaaagacctgtttcgactgccagcataaagggttatcccggcaacagattcgtattatggtcaatttttaccgggggctgtcggtggtgcagaccgcgaacgcgttgaagatgagcgaaaaaacggtctttacccataaatatatgatgatgcagaaatttaatctgcgaagcgattacgagctgatcgtactgttgagaaggctgatggagaaaaagagccgtccgaacctgcttcgcgattacctggaaaataattatgcacaacaaatagcctaa

SEQ ID NO: 165659 - DNA, 2151 bp, Enterobacter cloacae
atgaaaaaaatcgccagcgtctgcccctactgcggtgcaggctgcaaactaaacctcgtcgtaaaaaataaccggattatccgtgccgaagccgctgatggcgtaaccaatcagggcacgctttgcctgaaagggttctacggctgggactttcttaacgacacacggctgcttaccccccgtctgacgcagcccatgatccgctacagcaaaggcgaggcctttacccctgttacctgggaagaggccattcgctataccgctcacaggcttaaaagcatcaaagaacagtatggccctcggtccattatgaccacgggttcctcacggggaacgggcaatgagaccaactatgtgatgcaaaaatttgcccgtgcggtgctgaatactaacaacgtcgactgctgcgcccgcgtctgtcacggtccgtccgttgccggtttacaggagaccctcggcaacggcgccatgagcaattccattaacgatattgaaaactcaaaatgcctgctggtattcggctataactgcgccgactctcaccccatcgtcgcccgacgcgtgcttaaagcacgtgaaaatggcgctaaaatcatcgtctgcgatccgcgtcatattgaaacggcacgcattgccgatcttcatcttcagctaaaaaatggcagtaacatggcgctggtcaatgcctttggctatgtcctgctggaagaggaactgtacgacaaaaactacgttgcccgctttaccgaagggcttgaggcgtaccggctgacggtaaaagattacgcacccgagcaggttgaacatctgacggggatccgcgcgcgggatgttcgtcaggcaatgcgcatgttcgcagcggcgccttcagcaacggtgatgtggggaatgggcgtcacgcagtttggtcaggcggtcgatgtggtgaaaggtctctccagcctggcgctgctgaccggcaacctgggccgccctgccgtcggcgtgggtccggttcgcgggcaaaataacattcagggtgcctgcgatatgggcgttctgcccaatatgttccccggctaccaggacgtcactgacccggcggtcagactgaaatttgccgatgcgtggaaaatcaatgtcaaccggatggacgatcgcgtcgggacgcgtatcaccgaagtgccacatctcgcgctggaaggaaagatcaaagcgtattacatcatgggggaagatccgcttcagacagaagccgatctgggactggtccgccgcggctttgaggcgctcgattttgtggtggttcaggacatctttatgaccaaaacggcagaggtggctgacgtgctgctccctgccacctcatggggagagcacgccggcgtgttcacctgtgccgatcgcggcttccagcgtttcggcaaagccattgaggccagcggcaacgtgaagcgcgactgggagatcatcagcctgctggccacggagatgggttatcccatgcattacgaggataaccagcagatctgggacgaaatgcgcgagctgtgccccctcttctacggcgtgacctacgaaaaaatgggcgagatgggtcatgtgcagtggccctgtccaaccctcgatcatcccggcactccctacctgtacaaggataatcagttcgacacccccactggcaaaggccagttatttgccgccccctggcgcgccccggcggagatacaggatgcggattacccgctggtactgtgcacggtgcgcgaagtgggtcactactcctgtcgctcaatgaccgggaactgcgcggcgctgcaaagcctggccgacgagccgggccgggtgcagatcaacccggccgacgcggatgaacgggggattgccgagggccaactggtctgggtacgttcacgccggggtaaagtgatcacgcgcgccagcatcagcgagcgcatcaatgcgggagcaatctatatgacctaccagtggtggattggcgcctgtaatgagctgacgcaggataatctcgacccgatctccagaacgccggaaacgaagtattgcgccgtgcagctggaggcgatcgaggaccagcgctgggcggaggattttgcggcttccgcataccagaccatgaagacgcggttgatcgctgcggttaatgtttaa

SEQ ID NO: 165660 - DNA, 213 bp, Enterobacter cloacae
atgccacattcagcgttcttgattaacagggcgtttgtggagagagggtgtgtcatcgtcagtatgttcgtcacaattgacgatgacacgctatccgcagggatgggggaggcgttaaagatcgtccatggtgtaaccgacgacaatttccagcgtcttgcggataacatccgccttaacgacatcgtcggtggattccagcgtctggattag

SEQ ID NO: 165661 - DNA, 279 bp, Enterobacter cloacae
atgagacaaaatattcagcttcaacccgaataccactccgcctttttagatagcgcgttgtcggagtatttccgtcacgcaggcgatcgctttgctgaagagtctgccattttttcgactgcggttcgttgtgttcttgcttccgaaggtcatttgaccaacaaagcgatcattctctggctaatccagacgctggaatccaccgacgatgtcgttaaggcggatgttatccgcaagacgctggaaattgtcgtcggttacaccatggacgatctttaa

SEQ ID NO: 165662 - DNA, 240 bp, Enterobacter cloacae; identical to SEQ ID NO: 114717

SEQ ID NO: 165663 - DNA, 1221 bp, Enterobacter cloacae
atgctcacaaccatcatttaccgcagtcatatctgcgaggacgttccagtgaaagcgctggaagacatggtcgctgctgcaaattgtagaaatcgccagttcgatgtgacggggattttgctgtttaacggcacacacttttttcagttacttgaagggcccgctgataacgttaaggagatctatgagctcatctgccgtgacccacggcatcacaacgtggtcgaattgttaagcgatcacgggccttcaagacgttttggcaacgtgggtatggagctctttgaccttcgtcagtacgataccgacgaagtgctgcaacaggtactcgataaaggcacaacgcgctatcagctgacctataacgatcgcgccctgcaatttttccgcaccttcgttgaagccactgaaaaagccaactactttgagctgcctccggctgacgcctgggagtttgtcaccgaaaatacgccgttatcctcccagccgacagtagtggcaaagggcgcggactgtagtttcgcatttcaacctatcgtcgatccgtttatgcagcaggtagtttcctgggaagccctgatccgcacgccgtccggtgagtccccggaaagctattttgccaacctgtcgcgtgaggcgctgtacgaatcggatctgaagagtaaacaggtggctttgtcgatggccagcgcgctgggcctacagactcaaacgttgtccattaatctgctgccgatgacgctggtcaatgttcctggcgccgtcgattttttactgacggcaattgaggcgaacggttttgtgccggagcaaattgtggtcgagttcaccgagagcgaggcgatctcgcgcttcgaagagttcaccagcgcggtcagacagcttaaaagcgccgggatcagcgtggccatcgatcactttggcgcgggattcgccggtctgcaactgctggcccagtttcagccggacagaatcaagattaaccgtgacttgattgccaacgtgcacaagagcggcccgcgtcaggctattattcaggcgatcattaaatgctgtgcgtctctggaaattctgttctgtgcggtaggcgtagagctggctgaagagtggatgtggctggaatctgccgggatttctcagttccagggacaccttttcgccagcccgcgcctggggggcataccggcgattgcctggcccgagaaaaagtacgatttataa

SEQ ID NO: 165664 - DNA, 369 bp, Enterobacter cloacae
atggaactgcattcagaaaccttcaatccggccgattttgcctggcgtggtttaacgctgacgcccgcggcggcggcgcatattcatgagctggtggcaaaaaatcccgacatcctcggcgtacgcttaggcgttaagcagactggctgcgcgggatttggctacgtgctggataccgtaaccgaacctgaaaaggacgatctggtctttgaaaccgacggtgcaaagttatacgtcgcgctacaggcgatgccgtttatcgatggaaccgaagtcgactacgttcgggaaggtttaaaccagttattcaaatttcataacccgaaagcccagaacgaatgcggctgcggcgaaagctttggggtatag

SEQ ID NO: 165665 - DNA, 1491 bp, Enterobacter cloacae
atgtctcgtaatactgaagcaacgagtgatgtaaacacctggagcggcggacacctcaactataaagagggtttctttacgcagctgcaaaccgatgagctggcgaaaggcatcaacgaagaggtcgtgcgcgccatttcggcgaaacgtaacgagccggagtggatgctggagtttcgcctgagcgcattccgcgcgtggctggagatggaagaaccccactggctgaaagcgcattacgataagctgaactatcaggattatagctactactccgcgccctcctgcggcagctgtgatgatacctgtgcctcgcaacccggcgcggttcagcaaaccggcgcggagaacagcttcctgagtaaagaggtggaagaggcgtttaatcagctcggcgtgcccgtgcgcgaaggcaaagaggtggcggtagacgccatttttgactccgtctcggtggcaaccacctaccgtgaaaaactggcggagcaggggatcattttctgttcctttggtgaagccattcacgatcaccccgagctggtgaaaaagtatattggtaccgtggtgccgagtaacgataacttcttcgcggcactgaatgcggcggtggcgtcagacggtacttttatctacgtgccgaaaggcgtgcgctgcccgatggagctctcgacctatttccgcatcaacgcggaaaaaaccggccagtttgaacgcaccatcctggtggccgatgaaggcagctacgtaagctacatcgaagggtgctccgctcctgtgcgcgacagctaccagctgcacgcggcggtggtagaggtgatcatccataaagatgcggaagtgaagtactctacggtacagaactggttcccgggcgacggcaacaccggtggtattctgaacttcgtcaccaaacgcgcgctgtgcgaaggcgaaaacagcaaaatgtcctggactcagtcagaaaccggctccgccattacctggaaatacccgagctgtattctgcgcggcgacaactccatcggtgagttttactccgtggcgctgaccagcggtcatcagcaggccgataccggcaccaagatgatccacatcggtaaaaacaccaaatcgaccatcatctccaaagggatctctgccggtcacagccagaacagctatcgcgggctggtgaaaatcatgccgacggcaaccaacgcgcgtaacttcacccagtgtgactccatgctgattggcgcggactgcggggcgcataccttcccgtatgtcgaatgccgcaataacagcgcccagcttgagcatgaggcaactacgtcacgtattggtgaagatcagcttttctactgcctgcaacgcgggatcagtgaagaagatgcgatttcaatgatcgttaacggcttctgtaaggacgtgttctctgaactgccgctggaatttgccgttgaagcccagaaactcctcgccattagtcttgaacacagcgtcggttaa

SEQ ID NO: 165666 - DNA, 747 bp, Enterobacter cloacae
atgttaagaattaaagatttacaggttagcgtggaagagaaagagatcctgcgtggcctcaattttgacgtcaaaccgggtgaagttcacgccatcatggggccaaacggctccgggaaaagtacgctttcagcgacgctggcaggacgcgaagattatgaagttaccagcggctccgttgagtttaacggcaaagatctgctggagatgtcgccggaagagcgtgccggcgagggcatctttatggccttccagtatccggtggaaattccgggcgtcagcaaccagttcttcctgcaaaccgcgctgaacgcggtgcgcaagtatcgcggccttgaggcgctggatcgctttgacttccaggatctgatggaagagaagatcaagctgctgaaaatgccggaagatctgttgacccgctcggtaaacgtgggtttctccggcggtgagaagaaacgtaacgatattctgcaaatggcggttctggaaccggcgctgtgcattctcgatgagaccgattcagggctggatatcgatgccctgaagatcgttgccgacggggtgaactccctgcgtgacggcaaccgctcatttatcatcgtgactcactatcagcgaattctggattacatcaaaccggactatgtccacgtgctttaccagggacgcattgtgaaatccggtgactttacgctggttaaacaactggaggagcagggttatggctggcttaccgaacagcagtaa

SEQ ID NO: 165667 - DNA, 1272 bp, Enterobacter cloacae
atggctggcttaccgaacagcagtaatgcacttcagcagtggcaccggctgtttgaagcgcagggtcgagcgcgctctgaacaggctcagcaccatctccagcagatgctgcttctcggtttaccgacgcgtaaacatgagaactggaaatataccccgctggatggcctgctgaacggcgagtttgtcacccgtctggcgcaggtcagccccgatcagcgcgacatgctggcgctgagcgtggatgccgtgcgtctggtatttgtcgacggtctgttccgtgcggagctgagcgacagcgtgcaggagagcgggttcgatatcgtcattaacgatgaacgtcagtcgctgaacgcgcccgttcagcctgaagtcttcctgcacctgacagagagcctgtcgcaatctgtcacccatattcgcgttaagcgtaaccagcgtccggcgaaaccgctgctgctgatgcatatcacccagggcgttgagggtgatgagattaacaccgcccactatcgccaccatcttgagctggcagaaggggcagaggcgacggtgatcgagcattacgtcagccttaacgacacccgtcattttaccggttcgcgtctgacgatgaacgtggcggccaatgctcagctgcaccacatcaagctggcgtttgagaatccgctcagtcaccacttcgcccacaacgatattctgctgggccaggatgccgcggcgtacagccacagcttcctgcttggcggcgcggtgctgcgccacaataccagcacccagctgaacggtgaaaacactacgctacgtattaacagcctggcgatgccagtgaagtcagaagtgtgcgacacgcgcacctggcttgagcataacaaaggctactgcaacagccgtcagctgcacaaaaccatcgtcagcgacaaaggacgtgcggtgtttaacggcctgataaacgtggcgcagcacgccatcaaaactgacgggcagatgaccaacaacaacctcttgctgggacgtctggcagaggtggacaccaaaccacagctggaaatttatgcggacgacgtgaaatgcagccacggggcgacggtcgggcgtattgacgatgagcagatgttctacctgcgctcgcgcgggatagaccagcaggccgcgcaaaagatgattatttacgcctttgcggctgagctgacggaagcgctgcccgatggcggacttaaacagcaggtgctggcccgtatcggtcagcggctgcctggaggcgaagcatga

SEQ ID NO: 165668 - DNA, 1221 bp, Enterobacter cloacae
atgacatttcccgtagagaaagtccgggcagattttccggtactgacccgtgaagtgaacggtctgccgctggcctatctcgacagtgcggccagcgcgcaaaaaccaaatcaggtggtggatgcggaagccgagttttatcgccacggttatgcggcggtacatcgcgggatccacaccctgagcgccgaggcgacccagcgcatggaaaacgtgcgcacgcaggttgcggccttcctcaacgcgcgttcgccggaagagctggtgtttgtgcgtggcaccaccgaagggatcaacctggtggctaacagctggggcaatgcgcaggtgcacgcgggggataacatcatcatcacccagatggagcaccacgccaacatcgtgccctggcagatgctctgtgagcgtgtgggggcgcaactgcgggtgatccccctgaatgaagacggcacgctccagctggaaaagctggacgccctgctggacgacagaacgcggctggtggcggtgacccacgtttcaaacgtgctggggacggaaaatccggtggcgctgatcgtcgacaaagcccatcaggttggtgcgaaagtgttgattgatggcgcccaggcggtgatgcaccatgcggttgacgttcaggctctggactgcgatttctacgtcttctccgggcacaagctgtatggcccgacgggcatcggcgtgttgtatgtgaaagaggacattctccaggccatgccgccgtgggaagggggcgggtcaatgatcgccaccgtcagcctgacggacggcacaacctacgcccgtgcgccctggcgcttcgaggcgggtacgcccaacacgggcgggatcatcgggctgggcgcggccattagctacgtctctgaaacggggctggcggcgattcaggagtacgaacagcagctgatgcattatgccttgcaggagctggccagcgtcccggaactgaccttatatggccctgctgaccgtctgggtgtgatagccttcaacctcggcaagcatcacgcctatgatgtgggcagtttccttgataattacggcgtcgccgtacgtaccgggcatcactgcgcgatgccgctgatggcgtattatcaggtaccggctatgtgccgcgcatcgctggtgatgtacaacacaacggaagaggtcgacagactggtggcgggactaaaacgtattcaccagctgcttggctaa

SEQ ID NO: 165669 - DNA, 417 bp, Enterobacter cloacae
atggcagatttgccggacagagataaattgctgcgcaactttgggcgttgcgcgaactgggaagagaaatacctttatattatcgagctgggccagcgcctgccgccgctcagcgaagaggcgcataacccggacaacatcattcagggctgccagagccaggtctggatcctgatgcagcagacggatgaaggcgtaattgaattacagggtgacagcgatgccgccattgtgaaggggcttattgccgtcgtatttattctttatcaccagatgtcggcgcaggatattgtcgcctttgacgttcgcccgtggtttgaaaaaatggccttaactcaacacctcaccccgtcccgatcccaggggctggaagcgatgatccgcgccatacgcgccaaagccgcaatccttagctaa

SEQ ID NO: 165670 - DNA, 1014 bp, Enterobacter cloacae
atgaagcgcgcgtctctaataactctattactccttggttcgctcagtgctgttaattcagccagggcggttgattatcctttaccgcccgcaggcagccgcctgattgggcaaaaccagacatacaccattcaggaaggtgacaataaacttcagtctatcgctcgtcgctttaataccgccgcacagctcatccttgaaaccaataataccattgcaccggtgaaccctgcgccaggaacggtcattaccatcccttcccagatgctactgccggacaccgagcgcgagggcattgtggtgaatctggcggagctgcgtctttacttctatccgccaggcgaaaatatcgtgcaggtctatccgctgggtattggccagcttgggctggaaacaccggtcagcaccacccgtgtgagtcagaaaatccctaaccctacctggacccccacagcgggcatcagagcgcgctcactggcccagggcattaaactgccgcctgtggtacccgcagggccaaataacccgctggggcgctttgcgctgcgtctgggcatcgggaatggggaatatcttattcacggcaccagcgcgccggacagcgtagggctgcgggtcagctcgggctgtatgcggatgaacgcgccggatatcaaagcgttgtttgagcaagtgcgcgtcggcacgcgggtgcagatcatcaatgagccggtgaagttctccgtcgagccggacggcaaacgttatatcgaagtgcacaggccgctggcgcaggctgagggtgaaaacccacagacggtgccgttcacgcactcggcggcgtttaccgcctttgcagcggaatcaggtagcgataaaacgcttatcgataaagccctggcgcgcagagcggggatcccggtggccgtttcagcaggcaatggttcgtcagccagcaattctgtcctgtcggtacagaacagtcgtgtctcagcggcggtggcggaaggcgagggagagaaagcgcttcagtag

SEQ ID NO: 165671 - DNA, 237 bp, Enterobacter cloacae; identical to SEQ ID NO: 114707

SEQ ID NO: 165672 - DNA, 1422 bp, Enterobacter cloacae
atgaaaaagacgaaaattgtttgtactatcggcccgaaaaccgaatccgaagagatgctgagcaaaatgctggatgccggcatgaacgtgatgcgtctgaacttctcccacggcgactatgctgaacacggtcagcgtatccagaacttgcgcaacgtgatgagcaagaccgggaaaaaagcggcaatcctgctcgacaccaaaggtcctgaaatccgcaccatcaaactggaaggcggtaacgacgtttccctgaaagcgggccagaccttcaccttcaccaccgacaaatccgttgtgggtaacaacgaaatcgttgccgtgacctacgaaggcttcaccagcgatctgtctgttggcaacaccgtgctggtagatgacggcctgatcggcatggaagtgacggcgatcgaaggtaacaaggttatctgtaaagtgctgaacaacggcgatctgggcgaaaacaaaggcgttaacctgccgggtgtgtccattgcgctgccagcgctggctgaaaaagacaaacaagacctgatcttcggctgcgaacaaggcgtggacttcgttgctgcctcctttatccgtaaacgttctgacgtggttgagatccgtgagcacctgaaagcgcacggcggcgagaacattcagatcatctccaagatcgaaaaccaggaaggcctgaacaacttcgacgaaatcctcgaagcgtctgacggtatcatggttgcgcgtggcgacctgggcgttgaaatcccggttgaagaagtgatcttcgcgcagaagatgatgatcgagaaatgtgttcgcgcgcgtaaagtggttatcaccgcaacgcagatgctggactccatgatcaaaaacccacgccctacccgcgctgaagcaggcgacgtggcgaacgccatcctcgacggtaccgatgccgttatgctgtctggcgaatctgcaaaagggaaataccctctggaagcggtcagcatcatggcgaccatctgtgagcgtaccgaccgcgtgatgaaaagccgtctggattacaacaacgacagccgtaaactgcgcatcaccgaagccgtgtgccgtggtgcggtagaaaccgctgagaaactggaagccccactgattgtcgtggcgacccagggcggtaaatctgcgcgtgccgtgcgtaaatacttcccggatgcgaccattctggcgctgaccaccaacgaaactaccgcgcgtcagctggtgctgagcaaaggtgtgatcccacacctggtgaaagagattgcctctaccgatgatttctatcgtctgggtaaagaagtggctctggaactggttgattgtggcctggcccagaaaggcgacgtggtggttatggtttctggcgcgctggttccaagcggcaccaccaacactgcatctgtccacgtgctgtaa

SEQ ID NO: 165673 - DNA, 1146 bp, Enterobacter cloacae
atgaaaaacctggccaccctcagcgttcacagcggtgagtatcacgacccgcacggcgccgtgatgccgccaatttacgccacgtcgacgtttgcgcaaccggcaccgggtgaacataccggctacgaatactcccggagcggcaatccaacccgccacgcgctggagaccgccatcgccgaactggaaggcggcacgcgcgggtacgctttcgcgtcagggctggcagccatttccaccgtgctcgaactgctggataaagacagccatatcgtcgccattgacgacgtgtatggcggtacgtatcgcctgatcgaaaacgtgcgcaagcgcagcaccgggttacaggtgagctgggttaagccggacgatgtagccgggcttgaggccgccattcgcccggacacccgcatgatctgggtggaaacgccaacgaacccgctgctgaaactggccgacctggaggccatcgcggacattgcccggcgccataatgcgatcagcgtggcggataataccttcgcctccccggtcattcaccggccgctggaggcggggttcgatatagtggtccactccgccactaaatatctcaacggtcattcagacgtggttgccgggctggctgttgtcggggcaaataaggatctcgcggagcgtctgggctatctgcaaaacgcggttggcggcgttctggatccgttcagcagtttcctgacgctgcgggggattcgcaccctctctctgcgcgttgagaagcacagcgccaacgcactggcaattgcgcaatggctggagcagcatccgcaggtagaccgcgtgttctatcccgggctggcgtcacatccccagtatgcgctggcacgcagacaaatggcgctgccgggcggcatgatctccgttgtgattaaaggcgatgtgcaacgcgcggcagaggtgatccgtcatcttacgctctttaccctggcggaaagtctgggcggtgtggagagtctggtgagccagccctacagcatgacccacgcctccatacctctggcgcagcgtcttgcaaacggcattgtgccgcagcttatccgcctgtcggtggggattgaggatgcgaaggatctgatcgccgaccttcagcaggcgctggaaaagtga

SEQ ID NO: 165674 - DNA, 1371 bp, Enterobacter cloacae
atgacgctttaccactccgtcaccgaactgattggccgtacgccgctcatccagctgcacaagctggacaccggcccctgctcgctgtttctgaagctggaaaaccagaatcccggcggctcgattaaagaccgcgtcgcgttgtcgatgattaatgaagccgagcgtacgggccagctacggcccggcggcaccattattaaagccacggcggggaacaccggcctggggctggcgttgattgcggcgcagaagggctactcgctgatcctggtggtgccggacaaaatgagccgcgagaagattttccacctgcgcgcgttaggggcgcaggtcgtgctgacccgttcagatgtgaataaagggcatccggcctactaccaggattatgcccggcggctggcgaacgaactgccaggcgcgttttatattgatcagttcaataacgcggccaatccgctggcgcaccgcaccactaccgcaccggaactgtttgaacagcttgacggccagatcgatgccatcgtcgtcggcgtggggtccggcggtacgctgggtggcttacaggcgtggtttgcagaacattcgccgcagacggaatttgtgcttgccgatccggccgggtcggtgctggcggaccaggttgaaaacggacgccatcacgatgccggatcgtggctggttgaagggattggcgaagactttatccctccgctggcgcacatcgaaggggttaaccgcgcctggcgcattaccgatcgcgaggcgttcaccaccgcccgcgatctgctaaaaacggaagggatcctggcaggctcatccaccggcacgctgctggcggcggcgctgaaatattgccaggcgcagactacgccaaaacgtgtggtcaccttcgcctgcgacagcggcaataaatacctctcgaagatgttcaacgacgactggatgcgccagcaggggctgatttcgcgtccgcaggcaggcgatctctcggactatattgccctgcgccacgatgaaggcgcgacggtgactgccgccccggacgacacgctttccaccgtgctggcccgcatgcgcctgtacgacatctcccagctgccggtgctcgataacgacaaggtcgtcggcatcattgacgagtgggacctgctgcgacacatcgggggagatgccgatcgcttctcactccccgtgacggcagccatgacgcgtcaggtcgaatatctggataagcaggccccggagagcgccctgtacgccatctttgaccgtggcctggtggcgattatttatgacgaagatcgctttctgggtctaatcacacgcagtgatgtactcaccgcctggcgtaaccgcctgacaaaataa

SEQ ID NO: 165675 - DNA, 1023 bp, Enterobacter cloacae
atgattgtactcagcaatatttcgaaggtttttgacaacgggaaacaggcgctgacagccgtagataacgtcaacctgacgatagagcagggaaagatttacgggatcatcggttacagcggggccgggaaaagtacgctgatccgtctgctgaacggtctggaaaagcccagcgccggcagcgtcaccattaacggtcaggatatctccgccgcgaagggagaagcgctgcgtcaggcacgcctgaaaatcagcatggtgttccagcactttaatctgctttggtcgcgcacggtgaaggaaaacatcgccttttcaatgcaaattgccggtgtgccaaaagcgcaaattcaggctcgcgttgccgagctggtggagctggtcggcctgaaggggcgcgagaatgcctacccatcccagctgagcggcgggcaaaaacaacgtgtgggcattgcccgcgcgctggccaatcatccggacgtactgctgtgtgacgaagccacctcggcgctggatccgcagaccaccgatcagatcctcgatctgctcctggacattaaccgtcgctttaacctgaccatcgtactcattacgcatgagatgcacgtggtgcgcaaaatctgcgaccgcgtggcggtgatggaaaacggcaaggtggtggaagagggggacgtgctgagcgtgtttacgcatccgcagcagccgatcacccggcagtttgtccgccaggtgagccagtacgcggaggaagagaccttcaataccgaactggcaaacgatctggaaggcacggtaatcaggctgaccttcaccgggcacagcacgcacaggccgatcgtcggtgaactgaccctgcgctacggcctgccgtttaacatcctgcacggcaaaatgacgcaaaccgcccacggtgttttcgggcagctctgggtgcacgtggtggcatcggacgaacaactgaacaatatcctcgccgacctgaagcaaagcgatattgaaggcgaggtaatcaagcatggctga

SEQ ID NO: 165676 - DNA, 669 bp, Enterobacter cloacae
atggctgaagaactctttccgcacctgaagtgggatcagctttgggctgcaacccaggagacgctttacatgaccgcgctttccggcgtggcgacgtttgtcctggggatcgcgctcggtctggcgctgtttttaaccgcccgcggcgggttattccacaaccgcacggtctacagcgtgatgtcgattgtggtgaacgtgttccgctcgattccgttcatcattcttatcgttctgctgatcccgttcaccaagaccgttgtggggaccattcttggcgctaacgctgcgctgcccgccctgattgtgggcgcggcgccgttctacgcccgtctggtcgagattgccctgcgagaagtggacaaaggagtcattgaggccacgcgctcgatgggcgcgcggctgagcacgttagtgtttcgggttttattgccggaatcttcacccgcactggtttcaggtatgacggtgacgctgattgcgctggtgagctacagcgcaatggcaggggtgataggtgccggcggtttgggaaatctggcttatctggaaggattccagcgcaaccatggtgacgtcacgctggtggcaacggtgaccattctgatcatcgtgttcattatccagttctgcggcgatgccattacttcactgttagataaacgctaa

SEQ ID NO: 165677 - DNA, 813 bp, Enterobacter cloacae
atgaaaaagacactgacactgatcgccgccgcaaccctgagtgccctgagctttgcctcctgggcggacacgctcaccgtgggggcgtccaacaccccgcacgcggaaattctggagcaggctaagccgattctggcgaagcaggggatcgatctggagattaaaccattccaggactacattctgccaaacacggcgctggcggggcatgacattgacgccaactatttccagcacatcccttacctgaacagcgtcctgaaagatcacgcgggcgataaggattatgattttgtcagtgcgggcgcaatccacattgagccgatcggtatctattcgaaaaaatacaaatcgctgaaggatctgccggaaggcggcaaaatcatcatgcgtgatgcggtgtccgaggaagggcgtattctctccatcttcgaaaaagagggcgtgatcaagctgaagccaggcatcgataaagtgaccgcgcgcatcagcgatatcgtggagaacccgaaaaagctgcaattcacccctaacgttgaggcatctctgctgccgcagatgtacaacaacgacgaaggtgctgcggtggtgatcaacgccaactacgcaattgatgccggtctggatccggtgcacgatcccattgcggttgaaagcggtgagaataacccgtacgctaacatcattaccgttcatcgcggtgacgagaagaagaaggatatcgtcgcgctggtgaacgtgctgcactccaaagagattcaggactggatccgcaccaaatacaaaggcgcagtcatcccggtaaacaactaa

SEQ ID NO: 165678 - DNA, 210 bp, Enterobacter cloacae; identical to SEQ ID NO: 114700

SEQ ID NO: 165679 - DNA, 687 bp, Enterobacter cloacae
atgatccccggatttaacgttattgtcgaaaacctggattatctgctttggggacgtgcggctgcgggagaacccggcggcgtactgctctcactgctgatggccgcaggcgccgccgcgcttgccctgcccggcgggattgtgctggcttgcgtcgcctggcgctatcccggcgtggtgcgcagtgcgctgtttgcgtgggcagagttgattcgcgggatccccctgatcttcgtgatattctggatgtggtatctgctgccactgataaccggcagggatctcccgggcgcgacgaccgtcacgctggcgctggcctggtttaccgcggctgcggtgatgcattcggtgttagccggactgagagccctgccgtcgggccagaatgaggccgcgctttctcaagggttcagtacgcagcaaacgctgtggcgcgtgctgctgccgcaggcgctgagaaatattctgccgtcgctggtggggatttttatcagcctgctgaaggatacgtcgctggcgtttatcgtgaacgttcctgaactgaccacggtggcgggacagatcaacaaccgggtgcaaatttacccggcggccatttttatcttcacgggtgtgatctattacctgctctgctgctcgcttgagctgctcgcgaagcgctggcgagttagccggccagcgctttaa

SEQ ID NO: 165680 - DNA, 747 bp, Enterobacter cloacae
atgcccgctctggactggcagggggtgctggccggacagcccctgcactggatcctctccggatttctcaccactctgtgggtgacgctggcggggattatgctggccagcctgctcgccttgttctttatgcttttgcggctttccgggggacgtttcgggacattgatcgtcagctgctgggtatcgctgtttcgcaatacgccgctgctggtacagctgctgttctggtatttcgccgcctggaacgggttgccgcaggggctgcgtgacgcggtgaacgcagaccacagctggtccattttgcccggtgacgtctggtggtttacgcccgagtttttatgctccgcctgggggttaggcgtctttacctcggcgtttttaatcgaagaagtggaatcggggctgcgttccgtgcctgccggacagcgggaggcggcgctcgcccagggattttcctcatggcgtctgtttcgctacattcttctgcctcaggggcttgctaacgcctggcagcccgtcgttggccagtaccttaacctgatgaagctctcctcgctcgcgagcgggattggcttcgccgaactgacctaccaagtccgccagatagaaagttacaacgcccatgcactggaagccttcaccgtcggtacggtgctctacttgcttaccgggatggtgacgggaagcgtgctggtgcgcctcggcccccattcagggaggaaaaatcatgatccccggatttaa

SEQ ID NO: 165681 - DNA, 816 bp, Enterobacter cloacae
atgctctcaggtttattttcacgctccgcggccaatgccgcggatttttcacttctggaacaggccagcgttgagtttcgccatgtggacaaacgctacggcgatcatccggttttaaccgacattaacctcaccatcatgccgggtgaagtggttgccattctcggcccttcgggttccggaaaatcgaccctgattcggcttatcaaccagcttgagagcctgagcggcggggagattctgatcgaccacaagccgaccggacagctttccggcagcaggctacgtcagttacgcagccgcgtcgggtttgtgttccagcagttcaatctctatgcccaccttaccgccagtcagaacatcaccctggcactggagcacgttcacggctggaaacccctgcccgcccaggagcgcgcgctggcgctgctggagaaggtcggcatgctggagaaggcgcaccgcttccccgctgaactttccggcggacagcagcagcgcgtggcgattgcccgtgctctggcctcgtcgccgcaaatcattctctttgacgagccgacgtcggcactcgacccggaaatgattggcgaagtgctgtttgtgatgaaaaccctcgcccacagcgggatcaccatgattgtcgttacccatgagatgcagttcgcccgggaaattgccgatcgaatcgtctttatcgacggcggaaaaattctggaaaccgcgcccccggcgcaatttttcaatcaaccgtcgcatccccgtgcgaggcgtttcctgcaaaaagtgctggatccgctgcatcaggagcaactgtaa

SEQ ID NO: 165682 - DNA, 837 bp, Enterobacter cloacae
atgactatggctgcaaaaatgaaagggtttaaaaaacgggcgcaggttctgggattagtggcagcctggggcctggtttcagcgcaggcgcaggccgatcggctggcggatatcaaggcagcaggcgtggtgaaagtggccacgtttgatgccaatccaccctttggctcgattgatgccaaaacgcatgagatcgtgggttacgacgtggacttcgccaaagcgctggcgaaatcgctcggcgtcaagcttgaactggtcgccactaatccggctaaccgtataccgctgctacagtccggaaaagcggatctcatcgtggcggatatcacgatcactccggaacgcgcacaggtcattgatttctcaacgccttactttgtcaccggccagcagttcctggttccggcaaaatcaccggacaagcttgatgactatagccgggcacgcattggcgccgtaaaaggtacgacgggtgaacaggcgctgcaccagcgttttccgcagtcccgcgtcctctcttatgatgatattccgctggcgctgacggcactgcgcaatggcaacgtgcaggccattacccaggacagcaccattctggccggtctgctggcgcaggcgccggataaagccgacttcaaaatcctgcccgacctgctcagtaaagaagagattggcgtgggggtgaaaaagggtgaaacggcgctgctgaaagccgttaacgatgagctggtaaccctggagaaaaacggccaggcggcaaaaatctatgacgtctggttcggtccaggcaccccagctccacagcctcgtaactttaaaatagaagcccggtaa

SEQ ID NO: 165683 - DNA, 174 bp, Enterobacter cloacae; identical to SEQ ID NO: 114695

SEQ ID NO: 165684 - DNA, 1407 bp, Enterobacter cloacae
atgaaacggacagtattaacccccgcgctttctgcctccgcacttctgcttaccatgcaggcggtacacgctggtccacaggcgcatgttgtatgcagttattcccacaccctcggcgatgatgccattatgatgttcggcatgcccaatgaggctatgctgcacgatttttttggtaacgtgcacgcggatgcttactccagccgtgaatctctgcgtacccaggaaaagaccacctgcgataacaaagcagacagctcggcctactgggctccgtcgctaaaattgccggacggaacggtggtcaaacccgcctatcaaaaaacctattatcaggcatcgaatgttgacgcctggccgcttcatccgtttccgccggggctgtcgctgctggcgggcgatcatcatggcaccgcgccaaatccgcatatcacctttttatgcgccaatggcaagggctacaccaccagaacgggtgaagtctgcggcttacgcaaggcgaaggatgccgtgcagtttaatatcggcattcagttcccgaactgctgggacggggtcaacctgaagcccgcccacggcctggctaacgccacctacgatacgagaggacagtgtccgtccgccttcccggtgaagatcccgacggtgaacatgaatattgcgtacgtgctcccgacaattagctctctggataccagtaaagtccagctttccctcgaccccatcatgcatggcagtgagcgtgaagagcggtgggggagcctgtatacggcgcatgctgacttcatgaaaggctggacggaagatgccgcgcgatttatgaccgacctgtgcatgaaccggggaatggattgcggcaccaccgtgccgtatggttattcaaaagcgaaggctaacgtctggctcagcagcatggaaccggcactttcacagcccgatccccaggtcttactggtgcaggataactggaagaacggtggacgcacgaaaaacagcgaaacattgtcgctggtgaagttcaacatccctccgctgcctgccggacaggatcctgcccagtttaaataccgcgtgagaatttatggcgggaaagtggaaactgacggcgcggatcaaatcttcttctatccggcgagtaacgactgggaaccggccaccgtgagctggcagtcacgaccgtcctgcaactatcgctcggatgcggtgctgtacctgaaccactcccgcgaataccggatggtggacgtggataaagcggtgcgcaaggcgctggcagaagggaaaaccgacatttcgtggtatatcggcggcgatcgtcagggaaatcactatcagtttgagacggggtcatctacccaaagcctgatcctgatgctgaccgggtttagcaaaacgccggagatctga

SEQ ID NO: 165685 - DNA, 141 bp, Enterobacter cloacae
atggaaattgatctcgataacttagtctttaacgggctggatgaagcagaagagcgcaacgcggaacgtctcgacgatgcggataaaaaagcccaggcgattgtcgccgatgacgactgcggcgatgcctgcaagatctga

SEQ ID NO: 165686 - DNA, 783 bp, Enterobacter cloacae
atgattacactctgtaaaacctgcggtaccgcttacgatgaacagcccaaaaactgcccgatttgcgacgatgagcgccagtatgtcccggtgacgggccaggcatggacggacttcgacagccttacgaccacgcacaccaacaaatggcaacagctggagccgcagctgttcagcatcaaaaccgttcccgcttttgccatcaaccagcgggcgctcctgctgcgtacgccacagggcaatgttctgtgggactgcatcgccaatcttgaccccgcgaccagagcgttagttgacgcgctcgggggaatcagcgcgatcgcgatttcgcacccgcattactacaccaccatgcaggagtgggccgcggcgtttaacgcaccgatctacctgcacgccagcgatcggcagtgggtgatgcgtgacagcccggcgatacgcttctgggaggaggacgccctggagattatgcctttggggactctgctgcggctgggcgggcactttgccggcggcacggtgctgcactggcagtcaggcgacggcgtgctgctggccggtgatattttgcaggttacgcccggtaaggacgccgtgtcgtttatgtggagttatccgaatatgctgccgctgcctgcccgcaccgttgagtcggtgattggccgactgacagggaaaacgtaccagcgcctgtacggggcctttgaagggcagaacatcccggcgaacgcggatgagatcgtgcagcggtcgggccagaaatatattgcttgtctccgctaa

SEQ ID NO: 165687 - DNA, 636 bp, Enterobacter cloacae
atgcaacatatcattgaaggttttctcagctttcaaaaagagattttcccgcaacgtaaagagctttttcgtagtttagcgtccagtcagaatcccaaagcgctgttcatctcctgctccgacagccgtctggttccggaactggttacgcaacaggagccaggacagctctttgtcattcgaaacgcgggcaacattgtgccaccgttcgggccggagcctggcggtgtctctgcgaccatcgaatatgctgttgttgccctgggcgtgaccgatatcgttatttgcggccactccaactgcggcgcaatgaaggcgattgctgacaacgccgatctggagccgatgccagccgtttcccactggctgcgctattctgatgcggcaaaagcggtggttgagaagaaaacctgggataagccaatcgataaggtgaatgcgatggtgcaggagaacgtctttgcgcagctgagcaatatcaagacccatccgtcggtggcggtaggcctgcgcaacaacgccattcgcctgcacggctgggtatatgacatcgaaagcggcaaaatccttgccctggacaagaacactaaatcgttcgtgtcgctgtcggaaaacccggacgtcttcttcgagtaa

SEQ ID NO: 165688 - DNA, 1596 bp, Enterobacter cloacae
atgaaaaaaatcgccattatcggctcaggtccaacagggatttataccttttactcacttcttaacaacgcagcaccgctttcgatcaccgtgttcgaaaaggcagaccaacccggtgtcgggatgccctacagcgacgaggataattcccggctgatgctggcgaacatcgccagtatcgaaatcccgcccatttttattacctacctcgactggctcaaacagcagagtgcggcccatcttgcccgctataacgtcgatagtgagaaactgcacgaccggcaattcctgccgcgtattctgttgggtgaatattttcacgatcggtttcttgccgtcgttgctgaggcgaaaaagtcgggctttcatgtcgaggtgcaccccaacgcagaagtcacggatattaaggctgatgcagacggtgtggccctttcagtgaacgatgcccctttctcaaggcggtttgatcttgcggttgttgccaccggccacgtctggcctgatgaagatgaaaccacccgcgcatatttcccaagcccatggtcagggctgatggacgcggaggtccgagcctgtgaggtggggatcatgggtacttccctcagcgggctggatgctgcaatggcggttgtgatgcagcatggccggtttagcggggagcagttcgttgtcaataaaggcagcgaagggttaaatatcacgctgatgtcccgcacgggcgttctgccggaggccgacttctactgccctatcccttatgaaccgctgtccgtgttaacggagtctgtggcggaaagcgaaatcgccaaaggcccggacgggctgcttgaccgcatctttgcgctgatggtgaaagagctcgagctggccgatccgcgctggtgccaggcgatatcgctcggtacgctgaatgccgacacgcttcgtgatgtctggtttgaggatcgtaaaaagcatggccctttcacctgggccgaagcgaatctgaaagaagtggagcgcaacaagcgcgaaaaacgcaccgttgcctggcgctataccgtgcttcgtctgcatgaagtggttcaggccatcgtcccttcactcagtgagcatgacagagagcggtttaaatccgggctggagcgtgtgtttatcgataattatgccgccattccaccgcagtctatccgccgtttactggcgctgcgcgaggcagggatcattagcgtggtcgcactcggtgatgattacgacctggatatcggcagcgatcagaccgtcatcaccacggcagaaaagcgttaccgcttcgacgtgtttatcgatgcgcgcgggcaaaagccactcagaaacaaggacattcccttccccaccctgcgtaaacagcttgcggaaaccggcgatgacgtcccggacgtgggggaagactatacgttgcaggcgcctgcatcactgcgggggcgcatcgcttttggggcgatcccctggctgatgcacgatcatccctttgttcagggtttgtctgagtgcgctgaaattggtaaagcgatggcgaaagcggctggaaaacctgcgacaggcgtgcgaaggaagttaccattcatggaattttaa

SEQ ID NO: 165689 - DNA, 555 bp, Enterobacter cloacae; identical to SEQ ID NO: 127223

SEQ ID NO: 165690 - DNA, 201 bp, Enterobacter cloacae
atgaagcgacaagatataaacgcattaaagaattttgattttctggcacgcagttttgcccgtatgtacgccctgggccagccagttgatatcgatgccgtgaccggcaatatgagttatgaacagcaggcatggttccgggagcgatatgaccactaccgaaagcaggctgagcgggcgagagtgatagaactgcgatga

SEQ ID NO: 165691 - DNA, 414 bp, Enterobacter cloacae
atgactctgagagcttttcccatgttgaacgatctctccgactctctgtttgcggaccgttttaaccgtatcgatcgcctttttagccagctaaccggcagtacgccgttgccctccacgccttcttacaatatccggcgggtgggtgataaccgctatgaactgacgctgagcgtgccgggctggaaagagagcgaactggaaattgaaaccgttggcggtcagctgaatatcagcggtaaacgtgaagaagagaaaaccgaaaacggcgaagaagggtggatccatcggggtatcagccgcagcgacttccgggccagctatagtctgccggagcatgtgaaagtaaccggcgcttcgctggaaaacggcttgctggcgattgaattacaccaggatatcccggaagaatag

SEQ ID NO: 165692 - DNA, 1362 bp, Enterobacter cloacae
atgatcgaagcgcgtcagttattggcactggccataccggtgatcgtcgcgcaggtagcccaaaccgcaatgggatttgtggatacggtaatggccggtggttacagcgccaccgatatggccgccgtggcgatcggaacctcaatctggcttccggccattctttttggtcacggcctgctgctggcgctgacgcccgttatcgcgcagcttaacggctccggtcgacgcgaccgcgtggcccatcaggtgcgccagggcttctggctggccgggggtgtctccgtcctgattatgatcgtcctgtggaacgccgggtatattattcgcgccatgcataatatcgacccggcgctggcggataaggcggtcggttatctgcgcgccctgctctggggcgcgcccggctatctgttcttccaggtggcacgtaaccagtgtgaagggctggcaaaaaccaagccgggcatggtgatgggctttatcggcttgctggtgaacattcccgtgaactatatcttcatttacggtcattttggcatgccggaactcggcggcgtgggctgcggcgtggcaacggctgcggtgtactgggtgatgttcggctgtatgctcacctacattaaacatgcgcgatccatgcgtgacattcgtaacgacacctcgttcagcgcacctgactggacgctcatgacccgtctcattcagctggggttacccattgcgctggcgctgttcttcgaagtgacgctgtttgccgtcgtcgccctgctggtctcgccgttagggattattgatgtcgcaggacaccagatcgccctgaacttcagctctttgatgttcgtcctgccgatgtccctggctgccgcggtgacgattcgcgtgggcttccgtctggggcaaggctcgacgctggacgcgcaaacggcagcccgcaccggcctcggcgtcggcgtctgcatggcagtctgtaccgcgctctttaccgtgctgttgcgtgagcaaattgccctgctctataacgacaacccggaggtagtgaccctggcctcgcatctgatgctgctggcggccatttatcagatctctgactccatccaggtgattggaagcggcgtgctgcgtgggtataaagatacgcgttccatcttctttatcacctttatcgcttactgggtgctgggtctgccgtgcgggtacattctggcgttcacggatctggtggtggatcgcatggggccagccggattctggatgggctttatcatcggcttaacgtctgcggccattatgatgatgctgcgtatgcgcttcctgcaacgtcagccgtctgcggtaattttgcagcgcgctgcacgttaa

SEQ ID NO: 165693 - DNA, 642 bp, Enterobacter cloacae
atgtttactggtattgtgcagggcactgccaaagtggtgtccattgatgaaaaaccgaatttccgtactcacgtagttgagctgcctgaatatatgctcgacggcattgaaaccggggcgtcgatagcgcataacggctgctgcctgacggtgaccgaaattaacggtaaccagataagctttgatttaatgaaagagacgctgcgtatcactaacctgggtgagctggtggtgggagatatcgttaacgttgaacgcgcggcgaaattcagcgatgagattggcgggcatctgatgtcgggccatattatgaccaccgcagaagtggcgaaaatcgtgacctcggaaaataaccgtcaaatctggtttaaggtgcaggatccgtcattaatgaaatacatcctttataaaggatttattggcatcgatgggattagtctgaccgtcggtgaagtgacgccaacgcgtttttgcgtgcatttaattcctgaaacgctgcaacgtactacgcttggcgcaaaaaaactggggcagcgcgtaaatatcgaaattgatccccagacccaggcggtcgtggataccgttgagcgcgtactggcggcgaaagaggcggcgataattaaaaccaaggaagaagaataa

SEQ ID NO: 165694 - DNA, 1149 bp, Enterobacter cloacae
atgagttcatcgtgtatagaagaagtcagcgttccggacgataactggtcccggatcgtcagtgaactgttgggacgtgcgggcattacgattaatggctcatccccctccgatccccagataaagcatcccgattttttcaaacgcgtgttacaggaggggtcgttagggctgggtgaaagctatatggacggctggtgggagtgtgagcggctggatatgttcttctccagcgtattacgcgccggtcttgaaaaacagctccctcgtcatttcaaagataccttacgcattgcctccgcccgcctgttcaatctgcaaagtaaaaaacgggcgtggatcgtcggtaaagagcattacgatcttggcaacgatctgttcagccgtatgctcgatcctttaatgcagtactcctgcggatactggaaaaaagcgacgaccctggaagaggcgcagcaggacaagctgcaactgatctgcgataaattgcagttacagcccggtatgcgtgtgctggacatcggctgtggctggggtggtcttgcctggtttatggctaaaaattacggcgtcagcgtagtcggcgtcacgatttcggctgaacagcagaagatggcgcaggaacgctgtctgggtctggatgttgatattcggcttcaggactaccgcgacctgaacgagcagttcgatcgcattgtttccgtaggtatgttcgagcacgtggggccgaagaactacaagacttacttcgaggtcgccgatcgtaacctgaagcctgagggaattttcctgctacacaccatcggctctaaacgcaccgataacaatgtggatccctggatcaacaaatatatcttcccgaatggctgtttaccctctgttcgccagattgcgaacgccagcgaaccgcattttattgtggaagactggcataacttcggcgcagattacgacaccaccctgatggcctggcatgaacgtttccaggctgcatggcctgaaatcgccgacaactattcggaacgattcaaacggatgtttagctattatctgaatgcctgtgcgggcgcgttccgtgcgcgggatatacagctttggcaggtggtgtttagtcgtgggattgagcacggtttgcgtgtggctcgctga

SEQ ID NO: 165695 - DNA, 1200 bp, Enterobacter cloacae
gtgcaacccaggaaaggatttttagtctggctcggcggcttaagcgtgctgggctttttggcgaccgatatgtatctgcccgcgttcgccgcgatgcaggaagatttgcaaacccctgccgccgccatcagcgccagtttaagtttgttcctcgccggctttgcttttgcgcaattgctgtgggggccgctctcggatcgttttggccgtaagcccgtcctgttgttggggctggcgatttttgccgtaggctgtctgggcatgctgtgggtccgcgatgccgcctggttgctggcgctgcgctttattcaggcggtcggtgtctgcgccgcagcggtgacctggcaggcgctggtgaccgattactaccccgcctcgcgcactaaccgcatattcgccactattatgccgctggtcggcctgtcgccggcgcttgccccgttactgggcagctggatcctggcgcatttcgactggcaggccattttcgccacgctctttgctattacgctggtcctgatgctgcctgctttcgggcttaaacctgcgcataaaaaagagacgcatccggacgcaaagcccatcacctttacctctttactgcggtcgaaagcctatcgcggtaacgtgctgatttatgctgcctgctctgccagcttctttgcctggctaaccggttcgccgttcattctgcatgacatgggctacagcccggcggctatcggcctgagctatgtaccacagaccatcgccttcctggtgggtggctatggctgtcgcgccgcgctgcaaaaatgggaaggccaacagatgctgccctggctgctggttttgtatgcgctaagcgtgattgcgacctgggctgtcggctttattcccggcgccgggcttgcagaaattttgattccgttctgcgtcatggcgatcgctaacggggccatctaccctattgttgtagcccaggcgttgcgtccatttccgcaggcgacaggccgcgctgccgcgctgcaaaataccctgcaacttggcctgtgcttcctggcaagtctcgtggtctctgcgttgattgcaaccccgctgctcaccaccaccagcgtgatgttggtcaccgttgcactggctggtttgggctatcggatgcagtcctcagcccatcgcgagcagagtgaaaacgcgcagacagaaacgtcgcacgcctga

SEQ ID NO: 165696 - DNA, 912 bp, Enterobacter cloacae; identical to SEQ ID NO: 114683

SEQ ID NO: 165697 - DNA, 1026 bp, Enterobacter cloacae
atggcaacaattaaagacgtagcaaaacgcgcaaacgtttccactacaaccgtatcacatgttattaacaaaacgcgtttcgtcgctgaagagacgcgtaatgccgtctgggcggcaatcaaagagctgcactactcgccaagtgcggtcgcccgcagcctgaaggttaatcacaccaaatcgattggtctgctggccaccagcagtgaagcggcctactttgctgaaatcatcgaagccgttgaaaaaaactgcttccagaaaggctataccctgattctgggcaacgcgtggaacaacattgaaaaacagcgcgcttacctgtcaatgatggcgcaaaagcgcgtcgacggcctgctggtaatgtgttctgaataccccgagtcggtcctttccatgctggaagagtatcgccacattccgatggtggtcatggactggggcgaagcgcgcgcagactttaccgactccgttattgataacgcctttgaaggcggctacatggcggggcgttatctggtagaacgcggtcatcgtgaaattggcgtgatcccgggtccgctggagcgtaacaccggggctggccgtctggccggtttcatgaaagcgatggaagaggcgctgatcaccgtgccggaaaactggattgttcagggcgacttcgagccggagtcgggctatcgcgccatgcagcagatcgtctcccagccgcatcgccctaccgcggtgttctgcggcggcgacatcatggcgatgggcgcgctctgcgcggcggatgaactcggcctgcgcgtcccgcaggatatctcggtgatcggctatgacaacgtgcgcaacgcccgcttctttaccccggcgctgaccaccattcaccagccgaaagattcgctgggtgaaacggccttcaatatgctgctggacaggatcgtcaacaagcgtgaacagtcccagtccattgaagttcacccgcgcctgattgaacgccgttccgttgcggacggtccgttccgcgactaccgtcgttaa

SEQ ID NO: 165698 - DNA, 1167 bp, Enterobacter cloacae
atgaaaatcaattttcccctgctggccctggcgattggcgcctttgggattggcaccactgaattctcccctatggggttattgcctgttatcgcccggggtgtggacgtctcaattcctgcggccggtatgttaattagcgcctacgcgattggcgtgatggtgggcgcgccgctgatgacgctgctgctttcccaccgcgctcgccgcaatgcgctgattttcctgatggcgattttcactctcggaaatgtgctttccgcgatttcgcccgattacaccactctgatgctttcgcgcattctgaccagcctcaaccatggcgccttcttcggactgggctcggttgttgccgccagcgtggtgccaaaacataagcaggccagcgcggtagccactatgttcatgggcctcaccatcgctaatatcggcggcgttcccgctgccacctggctgggagaagccatcggctggcgtatgtctttcctcgcaaccgccggactgggcgtggtcgcgatggttgcgctgttcttctcactgccgaaaggaagtgcgggagaacgtccggaagtacgtaaagagctggcggtgctgatgcgtcctcaggtgttgtccgcgctgcttaccacggtactgggggccggggcgatgtttacgctctacacctatatctccccggtgctgcacgacattacccacgcaacgccactctttgttaccgcgatgctggtgctgattggtgtcgggttctcgattggcaactatctcggcgggaaatttgccgaccgctccgtcagtggaacactgaaaggttttttaacgctgctgattgtcatcatggtggcgattccgtggctggcgcgtaacgaagtgggtgccgcgattgccatggtggtgtggggcgccgcaacctttgccgtggtgccaccgttgcagatgcgcgtaatgcgcgttgcgcacgaagcgccggggctctcttcgtcggtgaatatcggtgcgtttaacctgggcaatgcgctgggggccgcagcgggcggggcggtgatctcaggtggtttgggttacagctttgtgccggtgatgggggcgatcattgctgcactcggcctgctgctggtgatgatgtctggtcgtaaacagcctgaagcggtgtgtacggcggaataa

SEQ ID NO: 165699 - DNA, 582 bp, Enterobacter cloacae
atgtcgttcgaattacctgcactaccgtatgcaaaagacgccctggccccgcacatttccgcggaaaccctggagtaccattacggcaagcatcaccagacctatgtcaccaacctgaacaatctgatcaagggcaccgattttgaaggcaaaacgctggaagagatcgtgcgcagttcagacggcggcgtattcaacaacgccgcacaggtgtggaaccacaccttctactggcactgcctggcccccaatgcaggcggagaacctaccggtgagctggcggcagcgattaacgccgcgttcggcagtttcgcggattttaaaacgaagtttactgacgcagccgttaaaaactttggctccggctggacctggctggtaaaagaggctgatggcaaactggctatcgtttccacttctaatgcgggtacccctctgaccaccagcgccacgccgctgatgaccgtggacgtatgggaacacgcctattacattgattaccgtaatgcgcgcccgaactacctggaacacttctgggcactggttaactgggaatttgttgcgaagaacttcgccgcgtaa

SEQ ID NO: 165700 - DNA, 759 bp, Enterobacter cloacae
gtggcgcggataactaaaatctcgatgacgctctgtgctttactgtttaccacactctcatttacgccagcggcgaacgcctctgaacaggcgcggcattctgctgtacaaaaatcgcatctggcaaaaaccacagaacgtaagaaaaaaaccaccagtaaaacagtaaagaagaaaaccaccgctcagaccaaaaagaccgcctccagtaaaaccaaaactctccgttccggcacgcacaaaaccacccgcacgaccgccagcctggtgaatgaaaaatgcaccgtgcgcaaaggccataaaacgaaatgcgcaaaagtgacgacgctggctgacgtgcataaagcgcgtatgcagaaagcgcaaaaaacggcgatgaacaaactgatggggcaaataggtaaaccgtatcgctggggtggcacctctccgcgcaccggttttgactgtagtgggctggtttattatgcctataaagatctggtgaagtttcgcattccacgcaccgccaatgagatgtaccatctgcgcgacgccgcgcctgtaaaccgtggcgaactgcaaaatggcgacctggtgttcttccgcacccagggacgcggtacggccgatcacgttggggtgtatgtgggtaacggtaaatttatccagtcaccgcgcagcggtcaggacattcagatcacctctctcagcgaagattattgggtgcgccactatgtgggtgcgcgccgcgtgatgacgccaaaaaccattcgctaa

SEQ ID NO: 165701 - DNA, 348 bp, Enterobacter cloacae
atgagcaccactattgaaaaaattcagcgccagatcgctgaaaacccgattctcctgtacatgaaaggttctccgaagctgccaagctgcggcttctccgcgcaagcggttcaggcgctgtccgcctgtggtgagcgttttgcttacgttgatatcctgcaaaacccggacattcgcgctgaactgccaaaatacgccaactggccgaccttcccacagctgtgggttgatggtgaactggtcggcggatgcgacatcctgattgaaatgtatcagcgcggcgaactgcaacagctgatcaaagagactgcggcgaagtataaaaccgaagagccggacgcagagtaa

SEQ ID NO: 165702 - DNA, 660 bp, Enterobacter cloacae; identical to SEQ ID NO: 114677

SEQ ID NO: 165703 - DNA, 408 bp, Enterobacter cloacae
atgcgcctacttcacaccatgctgcgcgttggcgacctgcaacgttccatcgatttctacactaacgttctgggcatgaagctgctgcgcaccagcgaaaatccggaatataaatactctctggcgtttgtcggttacggcccggaatctgatgaagcggtcatcgagctgacctacaactggggcgtggacagctacgagctgggtacagcttacggccacatcgcgctggaagtggataacgccgccgaagcctgcgaacgtatccgcagcaatggcggtaacgtcacccgtgaagccggtccggttaaaggcggtaccaccgtaattgcgtttgtggaagatccggacggttataaaatcgaactgatcgaagccaaagacgctggtcgcggcctgggcaattga

SEQ ID NO: 165704 - DNA, 1098 bp, Enterobacter cloacae
atgtccgctgaaaagctgtttaccccactgaaagtgggtgccgttactgccccaaaccgcgtgtttatggccccacttacccgtctgcgcagcatcgagccgggcgatatcccaacgccattgatgggtgagtattaccgtcagcgcgccagctcgggcctgattatctccgaagccacgcagatttctgctcaggcaaaaggctacgccggtgcaccgggtctgcacagcccggaacagatcgccgcgtggaaaaaaatcaccgcaggcgtgcatgctgaagatggccgtattgcggttcagctgtggcacaccggtcgtatctcacacagcagcatccagcctggcggtcaggcgccggtttctgcctctgccctgaacgccaatacccgcacttccctgcgcgatgaaaacggtaatgcgatccgcgtcgacaccaccacgccacgcgcgctggagctggacgagctcccgggtattgtgaatgatttccgtcaggccgtcgccaacgcccgtgaagcgggcttcgacctggttgagctgcactctgcgcacggttacctgctgcatcagttcctgtccccgtcttccaaccagcgtaccgaccagtacggcggcagcgttgaaaaccgcgcgcgtctggtgcttgaagtggttgatgctgtttgtaatgagtggagcgcagaccgcattggtattcgtgtctccccgatcggtactttccagaacgtcgacaacggtccgaacgaagaagcagacgcgctgtatctgattgaagagctggcgaaacgcggtatcgcctatctgcacatgtccgagccggactgggcaggcggcaagccttacagtgaagccttccgtcagaaagtgcgcgagcgcttccacggcgtgattatcggggcgggtgcgtatacggcagagaaagccgaggatttgatcggtaaaggcctgatcgacgccgtggcctttggccgtgactacattgctaacccggatctggttgcccgtttgcagaaaaaagccgaactgaacccgcagcgtcctgaaagcttctatggcggcggcgcggaaggttataccgactacccttcactgtaa

SEQ ID NO: 165705 - DNA, 600 bp, Enterobacter cloacae
atgagcagacacactgaacacgatacacgagaacatttgctggctaccggcgagcgcctttgcatgcatcgcgggtttaccggtatggggctgagcgaattgttaaaaaccgctgaagtacctaagggatcgttttatcactattttcgatccaaagaggcgtttggcgttgccatgctggagcggcactacgccagctaccatcagcgcctggcaacccacttcgccagcggtgaaggtgactaccgggatcgtgttctgaactactatcaggaaacgctgaagcagttctgtcagcagggcatcatcagcggctgcctgacggtaaaactgtctgccgaagtgtgcgatctctccgaagatatgcgcaccgcaatggataatggggccagcggcgtgattgccctgttggctcaggcgctggagagcgggcgcaatgaaaaaacgctctccttctccggcgatccgctcacgcaggcacaggtgctctattccctctggttaggcgccaacctgcaagcaaaaatgtctcgcagcgccgtgccgctcgaaagcgcgctggcgcatgtgaaaaactgtattaccgcgcctggcgtgtag

SEQ ID NO: 165706 - DNA, 1785 bp, Enterobacter cloacae
ttgctctgccacacctacctccagaacgtcattattccctacagtgaagaccctaaatggcttgcatgcaaggatgtccgccacaaacagagcattaaggtttcgctaatcttcccttcttatactcgccgcattgatataacgaatggtctggtcatcatgtggttcactaaaaagttacactgtaacgatataaaatttactctgggctgtgcacttttcttcaccgtactgaatgcactgtttatccagcgcagctggtcaatcattgcgcctgcgcatctgcacgatctcctgtttgctgccagcgtgccgctggtgctgttctgcggctgggtgattgtcttcagcctgctgaatattccctttattcgcaagccgctcatgattgtcctgaccctgggatgcgccgccgcgacctggtttatgtatacctatggcacggttatcgatcagaacatgattgtgaacgtgttcgaaactaattcccaggaagcgactgccctggtgacgccgcagatgatcctgtggctggccgttgcgggtctggttccatcgattattttagccctgacgcgcattcgcaccggaaaatggtggtatgccctcctgacgcgtgtcgccgctatgctgggcgcgttgctggtgatcatcctggtcgcggcggtgttttataaagactatgcttcgctgttccgcaataacaaaagcatcgtcaaaatggtcaccccggcgaattacgtgagcgccgtggtgaaatacagcaaaatgcgctggtttgccggcgaccagacgctggtccgcattggcgaggatgctcataaaggcgcgctgatttccagccaacgcaagaaaaccgtgctgattgtggtggtgggcgaagcctcccgcgccgcaaactactcgttaaatggttacccgcgtgaaaccaaccccgagctgaaaaagcaggatgtcatcaacttcccccaggcctcctcctgtggcacggaaaccgccgtttccgtcccctgcatgttctccggcatgacgcggaaaaaatatgacgcggacctcgcccatcaccaggaaggtctgctcgatgtacttaaccatgccggtttcaacctgctgtggcgcgacaacgacggcgggtgtaaaggcgcctgcgaccgcgtgccgcacacggacatgacccagtggaaactggatcagttctgtaaggacaaatcctgtatcgacgacgtcaacctctaccgtctggacaacgtactggatggaataaagcaggatacggttctggttattcatctgatgggcagccacggtccggcctactacaaccgttatccggacagctttcgcaagttcaccccaacctgcgataccaatgaaattcaggattgcgatcatcagtcgctgatcaatacctatgacaactcgattttgtataccgacagcgtggtcagccgaaccatcgacgcgctaaaagcccggcaggccaacatgaacacggcgctcatttacctctccgatcacggtgaatcgctgggcgaaagcggaatttacctgcacggtacgccgtatatgctggccccggagcagcaaacgcatattccgtttatgttctggctctccccggattatgcgaaaaacttcggcgtaaacacggattgcctgcgtgaccatgccgcaaaagaggcggtttcacaggacaatttattcgccaccgttctgggcatgatggacgtgaaatcagcggtttatcaaccgcagctggatattctgtcgcaatgtcgtcgctaa

SEQ ID NO: 165707 - DNA, 897 bp, Enterobacter cloacae
atggttcagcgtattacccttgccccgcagggcccggagttctcccgatttgttatgggctactggcgccttatggactggaatatgtctccggtccagctggcggactttatagaagagcatctcgatctcgggatcaccaccgtcgatcacgctgatatttatggcggctatcagtgcgaggctgcctttggcgaagcgctgaagcgtgcgccggcgctgcgtgaacgtatggagattgtgaccaaatgcggtattgccaccacagcaaaaccggagcatgcgcttgggcattacatcactgacagcgcgcatatcgttaaaagcgccgagcagtcactgattaacctggccaccgatcgtatcgacctgctgctgatccaccgacccgatccgttgatggatgcggatgaggtcgcggaagccttcctgacgctgcaccagagcggcaaagtgcgccattttggcgtgtctaacttcaccccggcacagtttgcgctattgcagtctcgcctgccgtttacgctggcgacgaatcaggtggagatctcgcctgttcatcagccgctgctgctggatggcacgctcgaccaactgcaacagctgcgcatccgtccaatggcatggtcctgtctgggaggcggccgcctatttaacgatgaggcattccagccgctgcgtaacgagcttgaaacggtggcgcgcgaactgaatgcggagagtatcgagcaggtggtttacgcctggatcctgtgcctgccgtctaaaccgctgccaattattggctccggcaaaattgagcgcgtccgcgctgcgcttgtggctgaggagctggatatgacgcgtcagcagtggttccgcatccgcaaggcggcgctgggctacgacgtaccctga

SEQ ID NO: 165708 - DNA, 519 bp, Enterobacter cloacae
atgaagcgttttgctctggcaatggtcacgctggttgtttgcgcaggtgcgcatgcagccagcgaggacgttgaaatgaatctcgtcacttctcagggggtaggccagtccatcgggacggtgaaaatcaccgaaaccgataaagggctggaatttgctcccgatctcaaggctcttccacccggcgaacatggttttcacgttcatgccaaaggcagctgtcaacccgcgatgaaagaggggaaaccaacagctgcggaagccgcaggggggcatctcgacccgcacaactccggtaagcatgaaggcccggaagggatagggcacctcggcgatttgccggtgctggtggtaaataacgatggtaaagccaccgatccggttgtggcgccacgactcaaaaagcttgacgaggtcaaaggcaaggcgctgatggtccacgtgggcggcgataacatgtccgatcagcctaaaccgcttggcggcggcggggcgcgctatgcctgcggggtgatctga

SEQ ID NO: 165709 - DNA, 2037 bp, Enterobacter cloacae
atgatgaacctgggggctttctcctggcgcaatacgccgtggataaaagcgacacggccgcagtggcgttatgcgctgcgcaacggcatcgccatgtgccttgcgcttacggttgcctattatctgaatctggatgagccttactgggcgatgacctctgcggcggtcgtcagcttccctaccgtcgggggcgttatcagtaaaagcctcgggcgcgtggcgggtagcctgctgggggcaaccgccgcactgcttcttgccggccataccctgaacgatccctggctctttctgttaagcatgtcggcatggctggggctgtgtacctgggcctgcgcccattttaccaataacgttgcctatgcgtttcagctggcgggttacaccgcggccattatcgcctttccggtcgtcaacgtgctggataccaccgagctgtgggatatcgcccaggcacgcgtgtgtgaagtgatggtcggcattctgtgcggaggcgtcatgatgatgatcctgcccagtacctcagatggcactacgcttatcaccgcccttaaaacgatgcacgcacgtttgctggaacatgccagcctgctctggcagcctgacagcagcgatgacatccgcctcgcgcacgaaaaggtcatcggccagatcctgaccatgaacctgttgcgcatccaggctttctggagccactaccgttttcgtcgccagaacacgcttctgaactatttactgcaccagcaattgcggatgacgagcgcgatctcaagccttcgccggatgttgctgaactggtctgcaccgccagcccatacccgggagattatcgaggcgctgctcgccgctcttgcgcgtccggatgccgatatctataccgtggcccgcattatcgcgccgctcgccccaacggatgaatatgactacaggcaccgtgccttctggcagcgtctgaactatttctgccgcctgtatctgcgcagcagccgctggttaaaagccgtcgagaatgccacgcccgtcaccgaattttccgttcccggtagtcctgctctggcgcgccataccgacgcaatggaggcgctgtggagcggttttcgtacgttttgcgcgttaacggccgtgggcgcatgggccatcaccacgcaatgggatgcgggcagtgcggccctgacgcttgcggcaatcagctgcgtgctctattccgtcgccgcttccccctttaattccctgacgcttctgctgcgtacgctggtactgctgtcgctattcagcttcgtggtgaaatttggtttgatggtgcagataaccgacctctggcaatttctgctgtttctcttcccgctattaaccaccatgcagttgctcaaactgcaaatgcctaaactggccggtctgtggggtcagttgattgtttttatgggctcatttatctctgtaacgaatccaccggtttacgattacgctgattttctcaacgacaacctggcgaagatcctcggcgtggggctggcgtggctggctttcgctgtgctacgcccgggctcggacgcgcgtaaaagccgcaggcatattcgggagttgcgcaggggttttgtcgatcagctgagccgcaggccgcatctgcgcgaaagcgagtatgaatcgctggtttaccatcatgtcagccagctgaacaacagccaggattcactctcccgtcgctggctgctgcgctggggcgtggtgctgttaaactgttcgcacgtggtgtggcaactgcgcgcctgggagacgcgttccgatccgctgtcgcaggtccgtgataactgtatttccatgctccgagatgtgatgagcgagcgcggggtgcagcagcgccccctgagcgtcacgctcgccgagcttcagcgtatttgcgacgcgctggcgcaccatcatcagcctgcggcccgcgatctggcgtccattatctggcggctgcactgctccctgtcacagcttgaacaggcgccgccacccggtacgattggcgatcagatcaccccgcaggcatag

SEQ ID NO: 165710 - DNA, 804 bp, Enterobacter cloacae
atggccggctggtggctctggaattattacatgcagtcgccctggacgcgtgacggcaagatccgcgcggaacaggtcagcatcacgccacaggtgtccggcagtatcagcgcgctgctggtgaaggacaaccagtacgttcatgcgggcgatgtgctattccgtatcgatgagacccctttccacattgcggtgcttaatgcccaggcgcagctcgcaaaagctcaatcagatctggcaaaagccaataacgaagccgaacgccgccgccatctgtcgagaaattacatctctgcggaggatctcgataccgccaatatcaatgtaaaagccatgcaggccagcctgaaggttgcagaggcaacgctgaaacaggccgagtggcaactgacccagaccatggtcaaagccccggtggatggatggatcacgagcctgtctacccgtgtgggtgattacgccaccacaggccagccggtcttcgccctggtcgatagccactctttctatgttgtaggttattttgaagagaccaagctgcgccatatccgcgagggagcgcctgcccggatcacgctttacagcggcgcagaaacgttacagggtcacgttagcagcataggtcgggcaatatacgatcagagcgtggaaaccgattctggcctggtgcctgacatcaaacccaacgtcccgtgggtgcgcctggctcagcgggtgcctgttcgcgtcgagtttgatcaactgccgaaagacattaccctggtctctggcacaacctgcaccgtcgccatcggatcgcgatga

SEQ ID NO: 165711 - DNA, 237 bp, Enterobacter cloacae
gtgacgttgttttccttctccgcagggttgcccctccaggatttgattgttggcgcatcggtctactttccgccactgtttaaagccgtgatggtcggttttgtaatctggctcattgcgcatcgtctgctgcgcgactggatgtattccggtgaaatctggcacccgatgttaatggatctctccctgtttaccctctccgtctgtcttggccttgccgtgttaaccgtgtggtga

SEQ ID NO: 165712 - DNA, 435 bp, Enterobacter cloacae
ttggaatcgccattaggttctgatctggcaaggttggtacgcatctggcgtgctctgattgaccatcgcctgaaacctctggaacttacgcagacgcactgggttacgctgcataacattcatcagctcccgcccgatcagtcacagatccaactggcaaaagcgattggtattgagcagccttctctggtgcgtacccttgaccagctggaagagaagggactcatctcccgacaaacctgcgccagcgatcgtcgcgccaagcggattaaattgacggaaaaagcggccccgattattactgagatggagaccgtcatcagtaaaacgcgaggggagatcctggccggtatttcccccgctgagctggagatgctgatcggactcatcgcccgtcttgaacaaaacatccacgatttacagtcgcgcgactga

SEQ ID NO: 165713 - DNA, 1365 bp, Enterobacter cloacae
atgcttgcgatctgtcgatttgtaaagaaccgctttgtggccttcgcgcttggatgcattgttatcattgccgtattacaagctttttttataaaacttgttgaatgggtcccttcgttttcacctttgtttttccctacgctgacgatatttcttctggtgtttcatctgtttattgcctgttttatggcaatgaaatactggtgcgacagaaggcgattatatcttgttcccattgccctggcctttgccggctcagcgttattgatggtggggactctgtccagcttcccggcctggcttgatctctatcagttcaacgtggcgaactataatgacgccatgattttctatatgttccgccactttttaatggcggtgctgataatcatctcggcattgctgtataccctgcgtacgtccgctctctcacgaagcacccacatcggtatcgttgtcggcgcctcgctctttacgggcagtatgcttgggctggcattgttctattccagccattcaaccctgctcacactggacctggtagacaatgaaacccgacagtttatggttctctggagccaggcgattaatattattttgatcgtcctgtgggtagtaacgttaatcaccctgatggccattacccgcgtgaggaatttgttttgggtcggcggcaattttttatgcgtctgttatatcgtcaccctgctcatgctattgttaggcggacacgctgaagatatttcatggtaccgggcacggttattagaaactgtcgctacattaatcattatcttcatcttactttccgatgtatttaatttgtatcgtgactcgcatgtaaaatatcagcagtcttatcaaaactcgatccgcgatcccctcacccgtctgtataatcgtagctatttctatgattcattaaaccacgcgctgagtacagcaaccctggcgcacccggtatcggtgatcgtgagcgatcttgaccgtttcaaacgcattaacgactgctacggccatttgcagggggataaggttttacagtttgtctcaaacctgttgaccgattcagtgcgaccgcaggatatcgcagcgcggatcggcggcgaagaatttgtgctcatgctgacaaataccccttccgatcttgcgcaacaggttgccgaacgcatacgtctcaaattgagcggtttcgacaacgttagcagcggcggttatctcccggaaccgataactatcagtatgggggtattcaccgccacctcgccggagaccagcgctgaaacctgtgtggaaagcgcggataaagccatgtacgaggcaaaagagacgggccgcaaccgggtggtggtgttcagaacatga

SEQ ID NO: 165714 - DNA, 468 bp, Enterobacter cloacae
atgattttacgtgtactgggcgtttcgctgattggtttaacactggcgggttgtgtgaatgacagttcactctccggcgacgtatatagtgcttctgaagctaaacaggtacagaacgtgacatacggtactatcgttaatgcccgtcctgttcagattcagggtggcgatgacacgaacgtggtgggcgcaatcggtggtgctgtgctgggtggtttcctgggtaataccattggcggcggcaccggacgttctctggctaccgcagcgggcgcagttgcaggcggcgtagcaggtcagggcgttcagggtgcgatgaacaaaactcagggcgttgagctggaaatccgtaaagacgatggcagcaccattatggttgtgcagaaacagggtaacacccgcttctctgctggccagcgtgttgtactggcaagcaacggcagccaggttaccgtctcgccgcgctaa

SEQ ID NO: 165715 - DNA, 1125 bp, Enterobacter cloacae
atgaaatcgggtcgctatatcggtgtgatgtctggtaccagtcttgacggtgtggatgtcgttctggccgccattgatgaaaacatggtggcgcagcaggcaagcctgacctggcctattcctgtctcgttaaaagaagagatcctgaacatctgccagggacaacagctgacgctttcccaactgggccaactggatgtgcgtctgggggcgctgtttgctgaggcggtactggccctgatgcagcaggaaagactccacccgcaggatatcgtggcaataggttgccatgggcagaccgtctggcatgaacctgtcggcgaggcgccgcacacgatgcatattggcgataacaaccagattgtggcaaaaaccggcgtgacggtggtgggtgatttccgtcgtcgcgatatggccctcggcgggcagggggcgccgctggttccggcatttcatcaggcgctgctggcgcacccggtagagcgcaggatggtcctgaacatcggcgggatcgccaacctgtcgatgcttattcccgggcagcccgtgcgggggtacgataccggacccggtaatatgctgatggatgcctggatctggcgtcagagcggtaaagcctacgacaaagacgcgcagtgggccagccaggggaaagtgatccttcccttgctgcaaaccctattaagcgatcctttctttgctctgcccgcgccgaaaagcacggggcgggaatatttcaactacggctggcttgaacgtcagctggcgcgcttccccggccttgcgcctcaggatgtgcaggctacgctgacggagctcaccgcggtgtcgatttctgaacaggtgttgctgagcggcggatgtgagcgcttgctggtatgcggaggcggaagccgtaacccgctggtgatggcacgcctcgccgccttgctgccaggcaccgaagtcacgaccactgatgaagccgggatcagcggagacgatatggaagcgctggccttcgcctggcttgcctggcgtacggttgccggtctgccggggaatttaccctccgtaaccggtgcgcgggaggcgagcgtccttggggccattttccccgcaaacccgcgccataatcagagttaa

SEQ ID NO: 165716 - DNA, 324 bp, Enterobacter cloacae; identical to SEQ ID NO: 114663

SEQ ID NO: 165717 - DNA, 657 bp, Enterobacter cloacae
atgtcagataacgacgaactacagcaaattgcgcatctgcgccgtgaatacaccaaaggcggtctgcgccgccaggatcttcccgccgaaccgctggtgctttttgaacgctggctgaagcaggcctgcgaagcgaaactggctgacccgacggcaatggtcgttgccacggttgatgaaaatggtcagccgtatcaacgcatcgttcttctcaagcattatgacgagaaagggctggtgttctacaccaatcttggcagtcgtaaagcgcatcaccttgaaaataatccgcgtattagcctgctcttcccgtggcatatgctggagcgccaggtgatggtcaccggcaaggcggagcgcctctctacgctcgaagtggtaaaatatttccacagccgcccgcgcgacagtcagatcggcgcctgggtctctaaacagtccagccgaatctcagcccgcggcgtgctggagagtaaattcctcgaactcaaacagaagtttcagcagggtgaagtaccgctgccgagtttctggggcgggttccgcatccccattgagcagatggaattctggcagggcggtgaacaccgcctgcacgaccgctttttataccagcgcgacaacggtggctggaaaatcgacagactggccccgtaa

SEQ ID NO: 165718 - DNA, 1275 bp, Enterobacter cloacae
atggcaagcagtaacttgattaaacaattgcaagagcggggcctcgtggcccaggtgacggacgaggaagcgttagcagagcgactggcgcaaggcccgatcgcgctctattgcggcttcgatcccaccgctgacagcttgcatttggggcatcttgttccattgttatgcctgaaacgcttccagatggccggccataagcctgtcgcactggttggcggcgcgaccggtctgattggcgacccaagtttcaaagccgctgagcgtaagctgaataccgaagacaccgtgcaggagtgggtggataagatccgtaaacaggttgcaccgttcctggatttcgactgcggtgacaactctgcgattgcggcgaacaactacgactggtttggtggcatgaacgtgctgacgttcctgcgtgacatcggcaaacacttctctgttaaccagatgattaacaaagaagcagtaaagcagcgtcttaaccgtgacgatcagggtatctctttcacggagttctcctacaacctgttgcaggggtatgacttcgcctgcctgaacaagctgcacggcgtctctctgcaaattggcggttccgaccagtggggtaacatcacctccggtatcgatctgacccgtcgcctccaccagaatcaggtgtttggtctgaccgtgccgttgatcaccaaagccgacggtaccaagttcggtaagaccgaaggcggcgcggtatggctggatccgaagaaaaccagcccgtacaagttctaccagttctggatcaacacggcggatgccgacgtttatcgcttcctgaagttcttcacctttatggatatcgaagaaatcaatgcgctggaagaagaagacaagaacagcggtaaagcaccacgcgcccagtacgtgctggcggacgaagtgactaaactggttcacggcgaagaaggtctggcggcggcgaagcgcattacggctagcctgttcaacggaaccctgagcgatttaagcgaagcggatttcgaacagctggcgcaggatggcgtgccgatggttgagatggaaaaaggcgccgatctgatgcaggcgctggtggactccgagctccagccgtctcgcggtcaggcgcgtaaaaccatcgcctctaacgcgatcaccattaatggcgaaaaacaggccgatccggaatacacctttaccgagaacgaccgtctctatggtcgctacacactgctgcgtcgcggtaagaaaaattactgcctggtctgctggaagtaa

SEQ ID NO: 165719 - DNA, 861 bp, Enterobacter cloacae
atgaagaacatcctcgccattcagtcccacgttgtgtttggacatgctggcaacagcgctgcggaattcccgatgcgccgcctcggcgttaacgtctggcccctcaataccgtccagttctcgaatcacacccagtacggtaaatggaccggctgcgtaatgccgccgtcgcatctgacggaaatcgttcaggggattgcggatatcgaccagcttaaacgctgcgatgccgtactcagcggctatctgggttcggcggagcagggggaacatatcctcggcattgtgcgccaggtgaaagcggcaaaccccgcggcgaaatatttctgcgatccggtaatgggacatcctgaaaaaggctgcatcgtagcgccgggtgttgcggagtttcatgtccgtcatgcattgcccgccagcgatattattgcccccaacctgattgaacttgagatcctgtgcgagcatccggtcaacagcgtagaagaggctgtaagcgcctctcgcgagctgatcgcccaggggccagagattgtgctggttaagcacctggcacgcgcagggttgagccaggaccgttttgaaatgctgctggtgacgaaggatgaagcctggcatatcagtcgaccgctggtggatttcggtgcacgtcagcctgtcggggtcggggatgtgaccagcggtttgctgctggtgaagctattgcagggcgcgagcctgcgcgatgcgctggagcacgtcaccgcagccgtttatgaaatcatgattgcgacgaagacgatgcaggaatatgagctccaggtcgtcgcggcgcaggatcgcatcgcgaagccggagcactattttagcgcaacgcagctttag

SEQ ID NO: 165720 - DNA, 606 bp, Enterobacter cloacae; identical to SEQ ID NO: 114659

SEQ ID NO: 165721 - DNA, 1509 bp, Enterobacter cloacae
gtgtctactgcaaacaataaaccaacagatgagagcgtaagtcttaacgctttcaaacagcctaaagcgttctatctcattttctctattgaattatgggagcgttttggctactacggcctgcaagggatcatggcggtttacctggttaaacaactgggtatgtctgaagccgattccatcacgctgttctcttccttcagcgccctggtgtatggcctggtcgctatcggcggctggttaggcgataaagtcctcggtactaaacgagtcattatgctgggcgccgttgttctggcgattggctatgggctggttgcctggtccgggcacgatgcaggtgtggtttacatgggcatggctaccatcgcggtaggtaacggcctgttcaaggcgaacccgtcttccctgctctctacctgctacagcaaagatgacccacgtctggacggtgcatttaccatgtactacatgtccatcaacatcggttccttcttctctatgctggcaaccccatggctggccgcaaaattcggctggagcgtagcgtttgcgctgagcttcgtgggtatgctgatcaccgttgtgaacttcctgttctgccgtagctgggttaaagactatggttcaaaaccagacttcgaacccgtgcacatgggcaaactgctggcaaccatcgtcggcatcgtgatcctggccgctgtcgccacctggctgctgcacaaccagggcgttgcacgtgccgtactgggcgtggttgcgctgggtatcgtgtttatcttcgcgaaagaagcctttgcgatgcagggtgcggcacgtcgtaagatgattgtggcgttcatcctgatgctggaagcgatcatcttcttcgttctgtacagccagatgccaacgtctctgaacttcttcgctatccgcaacgttgagcactccatccttggtatcgcgttcgagccggagcagtatcaggccctgaacccgttctggatcatgattggtagcccgattctggccgctatctataacaagatgggcgaccgtctgcctatgccgcacaagttcgctatcggtatggtgctgtgctctggcgcattcctggtgctgccgctggggacgaaattcgcgaccgacgcgggtatcgtgtctgttaactggctgatcctgagctatgcgctgcaatccatcggtgaactgatgatctccggtctgggcctggcgatggttgcgcagctggtccctcagcgtctgatgggcttcatcatgggtagctggttcctgaccaccgctggcgcggctatcatcgcaggtaagattgcgaacctgatggcggtaccagacaacgttaccgacccgctggtttccctgaatgtctacggcaccgtgttcatgcaaattggtatcgcgaccgccgtgattgccgtgctgatgctgctgaccgcaccaaaactgaatcgtatgacgcaggacgacgacaaatccgctaaagcgatcaaaaccgcgaacgcgtaa

SEQ ID NO: 165722 - DNA, 636 bp, Enterobacter cloacae
atgaataaagagaaacgcattgcgatcctgacgcgcctgcgcgatgagaatcctcatcctacgacagagctgaactttaactcgccgtttgaactgttgatcgcggtgctgctctctgcacaggcgacggacgtgagcgtcaacaaagccacggccctgctctaccctgtcgccaatacgccgcaggccatgctggagctgggcgttgaaggtgtgaaatcctatatcaagaccattggcctgtttaacagcaaggccgaaaacgtcattaagacctgccggatcctgctggagcagcacggcggtgaagtcccggaagaccgcgctgcgctggaagcgttgccgggcgtcgggcgtaaaacggcaaatgtggtgctgaacacggcgtttggctggccgaccatcgccgtggatacccatatctttcgcgtctctaaccgtacccggttcgcgccgggtaaaaacgtggaagaggtggaagagaagcttttaaaagtggtcccggcggaatttaaggtggactgccaccactggctgatcctgcacggacggtatacctgtattgcccgtaagccacgctgcggttcctgcattatcgaagatctctgcgaatacaaagaaaaagtctatccctga

SEQ ID NO: 165723 - DNA, 687 bp, Enterobacter cloacae
atgagccaggttaaagaggttatcgtccagggtctctggaagaacaactccgcgctggtacagctgctggggctgtgtccgctgctggcggtgacgtctaccgccaccaacgcgctcgggctggggctggcgaccacgctggtgctgaccctgactaacttttccatttcagttttgcgccgctggacgccgtcggaaatccgtattccgatctatgtcatgatcattgcgtcggtggtcagcgtggtgcaaatgctgattaacgcctacgcatttggcctgtaccagtcgctcgggattttcattccgcttatcgtgactaactgtattgtcgtaggccgcgctgaagcctttgcggtgaaaaacaatccggccatatccgcgctggatggtttttccatcggcatgggcgcgactgccgccatgttcgttctcggctctctgcgtgaaattttgggcaacggtacgctcttcgacggtgcggacgcgctgcttggcggctgggcgaagtcgctgcgtattgaggtgttccatacggacactccgttcctgctggccatgctgccgcctggcgccttcattggccttgggatgatgctggcgttaaaatacctgattgatgaaaaacgtaaacgccgcgccgctgagcgcagcgtacaggaagggatccccgagaaagcagtatga

SEQ ID NO: 165724 - DNA, 621 bp, Enterobacter cloacae; identical to SEQ ID NO: 114655

SEQ ID NO: 165725 - DNA, 1053 bp, Enterobacter cloacae; identical to SEQ ID NO: 114654

SEQ ID NO: 165726 - DNA, 2022 bp, Enterobacter cloacae
atgcttaagttattttctgccttcagaaaagagaagatctgggatttcgacggcggcattcatccgcctgagatgaaatcgcagtctaacggcacgccgctgcgccagatcccgctggcgacccgttacgttatgccccttaaacagcatatcggcgcggaaggtgaactgtgcgtgaaagaaggcgatagcgttcttcgcggccagccgctgacctttggtcgcggacggatgttgccgatacatgccccgacttccggtaaggtggtggctgttgccccccataccgttgcccatccgtcggcgttgtctgagctgagcgtgatcattgaagccgatggtgaagaccgctggatcgatcgtgacggctggagcgactaccgttcccacagccgtgaagcgctgattgaacgcattcatcagttcggcgtggcgggtctgggaggcgcaggcttcccgaccggcgctaagcttcacggcggcggcgataaaatcgaaacgctgatcatcaacgccgccgagtgcgaaccgtacatcaccgccgatgaccgtctgatgcaggactgtgccgcgcaggtggtggaagggattcgcattcttgcgcatattctgcaaccccgcgaagtgttgatcggtattgaggacaataaaccgcaggccatttcgatgctgcgtgcggtactggcggacagccacgatatcgccctgcgagtgatcccgaccaaatacccgtccggcggggcaaaacagctgacgcagatcctgaccggcaaacaggtcccccacgggggccgttcgtccgacatcggcgtgctgatgcaaaacgtgggaaccgcctacgcggtgaaacgtgcggtgattgacggcgagccattgaccgagcgcgtcgtcacgctgaccggcgagtccgtctcccgtcccggcaacgtctgggcgcgtctgggtacgccggtgcgtcatctgctggaacaggctggcttctgcccgggtagcgatcaactggtcattatgggtggcccgctgatgggctttaccctgccgtggctggatgtgccggtggtgaagattaccaactgcctgctcgccccttccccaacggagatgggcgaaacgcaggaagagaaaggctgcatacgctgtagcgcctgtgcggacgcatgcccggcagatttactgccgcagcagttgtactggtacagcaaaggccagttgcacgataaagcccaggcgcataacctggctgactgtattgaatgcggtgcctgcgcctgggtctgcccaagcaatattccgctggtgcaatacttccgtcaggagaaagccgaaatctacgccatctccatggaagaaaaacgtgccgctgaagcgaaggcccgctttgaagcgcgtcaggcacgactggagcgcgagaaacaagcccgtcaggaacgccataagcaggctgccgtccagcctgcggcgaaagatcaggatgccattaacgcagccctggcccgcgtgcgcgagaagaaagccaccgccgcccagacggttgtgatcgctccgggagaaaaaccggacaacagcgaagcgattgcggcccgcgaagcgcgtaaagccgaagctcgcgcgcgtcaggcggagaaagcgcaacacgccaaaccggaagccgatatcgacccgcgtaaagcggcagtggaagcggctatcgccagggcaaaagcccgtaaggccggtcagcagacagtggtggttgaacaggaagcgacggatccgcgcaaggcggccgttgaagccgctatcgcccgtgccaaagcacgaaaagcggcacaggttcagccagccgaagagagtgaagcgcctgtcgacccgcgtaaagccgccgttgaagcggccatcgcccgtgccaaagcacgaaaagcggcacagcaggacgaacggcctgcggccgccaacgacgatccacgcaaagccgcagtcgccgccgcgattgcgcgcgttcaggcaaagaaagccgcgcagcaagccgttaacgaggattaa

SEQ ID NO: 165727 - DNA, 579 bp, Enterobacter cloacae
atgagtgctatctggattgccatcgcgtccatcagcgtactgggactcgtctttggcatcattctgggttatgcctcccgccggtttgcggtggaggacgatccggtggttgaaaaaattgatgaacttttaccgcagagccagtgcgggcagtgcggctaccctggctgccgcccttacgctgaggcggtgggcgtgcagggcgaaaagatcaaccgctgcgcaccgggtggcgaagcggtcatgcttaaaatagctgccctgctgaacgtcgatccccagcctgtcgacggcgatgaacaggcccaggagcccgttcgtgcccttgctgtcatcgacgaagccaactgcattggctgcaccaaatgtattcaggcgtgtccagttgacgccattgtgggcgcaacgcgcgcgatgcacaccgttgtggcggatctgtgcaccggctgtaatctctgcgtggcgccctgcccgacgcagtgtatagaactacgcccggttgaaacgactactgaaagctggaagtgggaccttcagaccattccggttcgcaatattcctgtggaacaacatgcttaa

SEQ ID NO: 165728 - DNA, 582 bp, Enterobacter cloacae
atgaccgattacttactgctctttgtcggaactgtgctggttaataacttcgtactggtgaagttccttggcctgtgcccgtttatgggcgtctccaaaaagctggagacggcaatgggcatggggctggcgaccaccttcgtgatgacgatggcctccatttgcgcatggctgattgatacctggatcctgatcccactggacatgctctacctgcgcaccttgtcctttattctggtcattgcggttgtggtgcaatttaccgagatggtggtgcggaaaaccagccctgccctgtatcgcctgctgggcattttcctgcctctcatcaccaccaactgcgcggtgctgggcgtggcgctgctcaatatcaaccttgggcataatttcctgcaatcggcgctgtacggtttttccgcggcggtcggtttctcttttgttatggtcctgttcgcctcgattcgcgagcgtctggccgcggcggatattcccgcgccgtttcgcggtaacgccatcgctctggtgaccgcaggtttaatgtctctggcctttatgggctttagtggtctggtgaagttgtaa

SEQ ID NO: 165729 - DNA, 441 bp, Enterobacter cloacae
atgaccgcattgcctggagagagaattgggggctggttaatcgccccgctggcatggctgctggtggcattattaagcgcttcgctggcgctgttgctatacaccaccgcactggttacgcctcatgctatccagacactgatgtcccagagtgcgctcaatattgcaacgtggtttgtgtcgttcgttttcgcgatcgcgatgtggtactacacgctgtggctgactatcgccttcttcaaacgccgcaaaagcgtgccgaaacattacattatctggctgctggtctccgtgctgctggctgtcaaagcattcgctttctcgccagtatctgacgcgctggcggttcgccagttactgtttccgctactggcgacggcgcttatggtcccttatttcaagcgttcgacgcgcgttaagaagacctttgtcaacccgtaa

SEQ ID NO: 165730 - DNA, 216 bp, Enterobacter cloacae; identical to SEQ ID NO: 114649

SEQ ID NO: 165731 - DNA, 1041 bp, Enterobacter cloacae
atgagtgaaaacatccgcgtcggtcttattggctacgggtacgcaagcaaaacctttcatgcaccgctggttgccggcacgccgggaatggaactggcggctatcacaagcagcgatgagactaaggtccgcgccgactggccagccgtgccggtggtaacggagcctaagcatctgtttaacgatcctaatattgaccttattatcattccaactcctaacgacactcatttccccctggcgaaagcggcgctggaggcagggaaacatgttgttgtcgataagcccttcaccgtgacgttgtcacaggcgcgcgagctggatgcgctggcgcgaagtctgggtcggttattatcggtctttcacaatcggcgctgggacagcgatttcctgacggttaaggcgctgataaacgaaggcacgctcggcgaaattgccttttttgaatcgcatttcgatcgttatcgtccgcaggtgcgagatcgctggcgcgagcaggcgggaccgggcagcggcatctggtatgacttagcgccgcatcttctcgatcaggccgtccatctgtttggtctgcccgtgagcatgacggtcgatttagcgcagctcaggccgggggcgcagaccaccgactatttccatgccattttgagttatccgcagcggcgcattgtgctgcacgggacaatgcttgcggcggcggaatcggcccgctatatcattcacggggcgcgcggcagctatgtgaagttcggcctggatccgcaggaagagcgcctcaaaaatggcgaacgcttaccgcaggaggactggggctacgacatgcgcgacggggtggtgacgcgtgcggagggtgaggtactggttgaagagacggtattgaccctgccggggaactatccagcgtattacgccgccattcgtgacgcgctgaatggttcaggtgaaaatccggttcccgcaagccaggcaatccagattatggagctcatcgagctcgggatcgaatctgccaaacatcgcgcaacgctctgtctggcataa

SEQ ID NO: 165732 - DNA, 999 bp, Enterobacter cloacae
atgattgatacacgcctgcctttaactgatattcaccgccacctcgacggaaacattcgtgcccaaaccattctcgatcttggtcgccagttcaatttaaccctccctgccgaaacgcttgaaaccctgatcccgcatgttcaggtcacgtcgaacgaaccggatctggtgagttttctgagcaagctcgactggggcgtgaagatgctggcctcggtcgatgcctgtcgccgtgtcgcctttgaaaacatcgaagatgccgcgcgtaacggcctgcactatgttgaactgcgtttctccccaggctatatggcgatgacccacaacctccccgtagcgggcgtggttgaagcggtcattgaaggcgtgcgtgaaggctgcaaaacctttgacgttcaggcgcgtttgatcggcattatgagccgtaccttcggtgaagcggcctgtcttcaggaactggaagcattactggcgcatcgcgaccagatcaccgctatcgacctggccggtgacgagctgggcttcccgggcagtctgttcctgtctcatttcaaccgcgcacgtgatgcaggatggcatattaccgttcatgcgggggaagctgcggggccggaaagcatctggcaggccattcgtgaactgggtgcggaacgtataggtcatggcgtgaaagccattgaagatcgcgcgctgatggatttcctcgccgaacaacgtattggaatcgaatcctgcctgacctccaatattcagaccagtacagtagcgtcgctggcgcaacacccgctgaaaaccttcctcgaacacggggtgctggcttcgctgaacacggacgatccggcggttcagggcgtggatattattcacgaatacaacatcgccgcaccacaggccgggctgagccgcgagcagatccgtcaggcgcaaatcaacgggctggagatcgccttcctgacgcctgaagagaaacaggcgctgcgcgataaagttgctcagtag

SEQ ID NO: 165733 - DNA, 1173 bp, Enterobacter cloacae
atgtttgatttttcaaccgtcgtggatcgacacggcacctggtgtacccagtgggattatgtcgctgaccgttttggcgctgccgacctgctgcccttcaccatctctgatatggatttcgccaccgccccctgcattaccgatgcgctgcaccagcgaataaaccacggggtgtttggctacagtcgctggaaaaatgacgaatttctggccgccgtggcgcactggttccggcaacgctttaacagtcagattgataccgaaaccgtggtgtatgggccgtcggtcatttatatggtctcggagctgatccgcctctggtcctcgcctggcgacggcgtggtggtccataccccggcttacgatgccttttataaagccatcgaaggcaaccagcgtaccgttgtttccgtgccgatgcagaaaacagcgcatggctgggagggcaatatggccgggctggaagcggcgctgtcaaaaccggaaaacaaggtgctgctgctgtgtagcccgcaaaacccgaccggcaaagtctggacgcgggaagagctgaccacaatggcggccctgtgtgaacgttatgacgtagcggtgatcagcgacgaaattcatatggacatggtatggggcacgcatcgtcataccccgtggaatgaggttgcgcgcggtaaatgggcgctgctgacctcgggttccaaaagcttcaacattccggcgctgacgggtgcctgggggcttatcgccgatgacgccagccgtagcgcctatctgaatgcattaaaaggtcgggacggactctcttccccttccgtgctggcgctgaccgcgcacattgctgcctaccgacagggagaaccctggctggacgcgctgcggacctatctcgaagaaaacctgcgctacattgctgacgaactgaatactgcatttccgacactcaactggcaaccgcccgaggccacctatctggcatggatcgatctcagcccgcttggcattgatgacaatacgctgcaaaacgtgctgattgatcagcaaaaagtggccatcatgccgggatatacctatggggatgaaggtaaaggctatgtgcgtctgaacgctggctgtccgcgtagtaagcttgaacagggcgttcaacgccttatcgccggcatcaacactctgctgtaa

SEQ ID NO: 165734 - DNA, 1593 bp, Enterobacter cloacae
atgacgacgaaagcagcacaaaaaatatcgctgtgggagtttttccagcaactgggtaaaacctttatgctgcccgtggcgcttctctctttttgcgggatcatgctggggattggcagctcgttaagcagccatgacgtcattaccctgatccctttcctcggaaatccggtacttcaggcgatcttcatctggatgagcaaggtcggatcgtttgcctttagcttcctgccggtaatgttctgtatcgccatccctctgggtctggcgcgcgaaaataaaggcgtggcggcgtttgcgggcttcgttggctatgcggtcatgaaccttgcggttaacttctggctgactgccaaagggatcctgcccacgaccgacgcggcggtactgaaagccaataacattcagagcgtgattggtattcagtccatcgataccgggatccttggagccgtgatcgcgggggtaattatctggatgctgcacgagcgcttccacaacatccgcctgcccgatgcgctggccttcttcggcgggacccgctttgtgccaatcattacgctggttgtgatgggtctgtttggtctgatcatccctctgatttggccgatttttgccatggggatcaccggtatcggccgcattatcaatggcgcgggtgatttcggcccgatgattttcggtacgggtgaacgtctgctgctgccatttggtttacagcatatcctggttgccctgatccgctttaccgaagccggcggtaccatggacgtttgcggtcattccgttagcggtgcgctgaccatcttccaggcccagctgagctgcccgaccactcacggcttctctgaaagtgagacgcgtttcctctctcagggtaaaatgcctgccttcctcggcggcctgccgggcgcagcgctggcgatgtaccactgtgcccgtccggaaaatcgtcataaaattaaaggtctgctgatctccggcgttattgcctgcgtggtgggcggtacgacagaacctatcgagttcctgttcctgttcgtagcgccggtactgtacctcatccacgccgtactgacgggcctgggctttaccgtgatggctgtgctcggtgtgaccatcggtaacaccgacggtaacgtgattgacttcgtggtattcggtatcctgcacggcctgtccaccaagtggtatctggtgccggttgtggccgccatctggttcgcggtttactacgggatcttccgcttcgccatcacccgctttaacctgaaaacgcctggccgcgataccgatacggccaccagcgttgaacaggcggtagccggcaccattgggaaatccggatataacacgccggctattctggcggcgctgggcggtgcggataacattacctctctggataactgcatcacccgcctgcgtttgtcggtggcggacatgtccaaagtggataccaacgcacttaaagctaaccgggctatcggcgtggtacagttaaatcaacacaatttgcaggtcgtcattggcccgcaggtacagtcagtgaaggatgagctggcaaccctgatgcgaaccgtcgaagcctga

SEQ ID NO: 165735 - DNA, 1029 bp, Enterobacter cloacae
atggctgtagcgaaaaagatcaccatcaacgatgtcgcgctcgcggcgggggtttccgtcagcaccgtttcgctggtattgagcgggaaggggcgcatctctcctgcaacgggtcagcgcgtcaacgaggccgttgagcagctgggctttgtgcgtaatcgccaggcgtcggcgctgcgcggtgggcaaagcggggtgatagggctgatcgttcgcgacctcgcgtcgccgttttatgcggaactgaccgccgggcttaccgaggcgcttgaggctcaggggcgaatggttttcctgctccacggtgggcgcgaaccggagcagctgctctccaggctggatatgctgctgacgcaaggggtggatggggtgatcgtggccggcgcgtccggcgtgggcagtgaattgtgtgagcgcgcggcgcagaaaggcgtaccgctggtgtttgcctcgcgcgccagctatctcgacgaagccgatacccttcggccggataacatgcaggccgcgcaaatgctgaccgagcatcttattcatcgcggccatcagcgcatcgcctggctcggcggtaaaagctcgtccctgacgcgtgccgagcgggtgggcggttactgctccacgctcatcaaatatggcctgccgtttcacagcgaatgggtggtggagtgtgaatccagccagaaaaaagccgcggaagccatcggcacgttgctccgcaacagcccgacgatcagcgctgtgatttgctataacgacgtcattgcgatgggggcgtggttcggtttgatccgcgccggacgccagagcggtgagggcggggtagaaacgttcttcggccatcaggtggcgctgggggcgtttgcggatgtcggtgaaaatgcgttagacgatctccccatcgtctgggcgacgacgccggctcgtgagatggggtacaccctggcagacaggatcatgcagcgcattgaaaatacggacgtgcaggccgggcatcagattgtggctgcgcggttagtgacggtgaagtaa

SEQ ID NO: 165736 - DNA, 1527 bp, Enterobacter cloacae
atgaaaaaatcggtcgtagcggtaggagtgattgttgctttaggcgtgatctggacgggtgcttcctggtataccgggaaacagctggaaagccgtctggcagagatgatgacgcaggcaaacagcgagattaagcgcagcgcgcctgaagcaggtctggagctgagctaccagaactaccagcgtggcgtgtttaccagccatatgcaggtggtggtgaagccggttgcgggtaatcagaacgcctggctgaaaccgggccagagcgtggtgctggatgaagtggtcagccacggtccgttcccgctggcgcagttgaaaaagtttaacctgatcccctccatggcatccgccagaaccgtactggtgaataacgaggtgacgaagccgattttcgatatggcgaaaaatgagtcgccgtttgagatcaatacccgcatcagctatgccggtgatacgcattccgacatcgacctgaaagccctgaattacgaacaaggcaccgacaaagtcgccttcagcggcggtaatttccagcttgatgccgatcgcgacggcaagaatgtctccctgaccggcgatgccgccagcggcctggtgaattcagtcaatgaatataaccagaaggttcagcttaccttcaacaaccttaaagccagcggcaatagccgtatgaccgattttgatgagcgtatcggcgaccagaaactgagcctcgataagatcgccattgcgatcgaaggcaaagagatggcggtgctggaaggcatggatctggacggtaagtctgacgtctccaaagacggtaaaagcatcaacacccagctggattacagcctgaaaagcctgaaagtacagaatcaggatctgggtaccggtaagctgtcgctgaaaatcggcaacattgacggccaggcgtggcatgaattcagtcagaaatacagtaaagagagccaggctctgctgaccgatgccgccctgcaacagaacccgcaggcgtaccagcagcaggcgatgacggtgctgtttaataacctgccgatcctgctgaagggcgagccggtgattaccgttgcgccactgagctggaaaaacggcaaaggcgaaaccaacttcaacctgtcgctgttcctgaaggatccggccgctgcgaccggcgaaccgcagaccctggcgcaggaagttgaccgcagcgtgaaatcgctcgacagcaagctgaccatcccgatggatatggcgaccgagttcatgacgcagattgcgaaacttgaagggtatggtgaagaagatgcaggcaaactggcaaaccaacaggtgaaaggcctggcggcgatgggccagatgttccgcatcacgaaggtggaagacaacaccatttccaccagcctgcaatatgcgaatggccaggtgacgctcaacggcgacaaaatgccgctggaagagtttgtcggtatgtttggtatgccgacgctgggcatgccggcaccggctgaaccggcagcgccgccggcagtaccgcagcagtaa

SEQ ID NO: 165737 - DNA, 1194 bp, Enterobacter cloacae
atgaatcagggcttgataatgcaaaaactcatcaactcagtgcaaaactacgcctggggaagtaaaactgcgttaacggatctctacggtatcgccaacccggacaacctgccgatggcagagctgtggatgggcgcgcatccgaagagcagctcaaaaattgaagatgccagcggccaggttcgcagcctgcgtgacgtcatcgacgccgacaaagccgcactgctcggcgataaagtggcgaatcgttttggtgagctgccgtttctcttcaaggtattgtgcgccgaccagccgctctccattcaggttcacccgaacaaaaaagcctctgagctgggctttgccaaagaaaatgccgccggtattccgttagacgccgcagagcgtaactacaaagatcctaaccacaagccggaactggttttcgccctgacccctttcctggcgatgaatgccttccgcgagttttccgagatcatctccctgctgcaaccggtcgccggggctcacaacgcgatcgcccatttcctggaaaacccgaacgcagaagccttgagcgagctgtttgccagcctgctgaatatgcagggcgaggaaaaatcccacgcgctggcggtgctgaaagccgcgctgaacagccagcagggtgagccatgggacaccattcgcgtaatttccacgttttatccggacgacagcggtctcttctctccgctgctgctgaacgtggtgaagctcaacccgggcgaagcgatgttcctgttcgctgaaaccccgcacgcctacctgaacggcgtggcgctggaggtgatggctaactccgataacgtactgcgcgcgggcctgacgccaaaatacatcgacatccctgagctggttgccaacgtgaagttcgtggcgaaacctgctgcggagctgcttacgcagccggtgaaaaacggcgcagagctggacttcccgattccggttgacgattttgccttctcgctgcacgacctcagcgcagacgaaaccgccattgcacaggagagcgcagcgatcctgttctgtgtagaaggcgaagcgacattgcataaagatagcgagcgtctggtgcttaaaccgggtgaatccgcctttgtcgcggccaacgagtcgcctgtccgggtgagcggtaccggtcgcctggcgcgtgtttttaataagctttag

SEQ ID NO: 165738 - DNA, 1647 bp, Enterobacter cloacae
atgtcgaataaacccttccattatcaggatcctttccccctcagtcaggatcagaccgagtattacctgttaacccgcgattacgtttctgtctctgagtttgaagggcaggagatcctcaaagttgacccgcaggcgctgacgctgctggcgcagcaagccttccacgatgcttcctttatgctccgtccggcgcatcagcggcaggttgctgatatccttagcgatccggaagccagcgagaacgataagtacgttgccctgcaattcctgcgtaactctgatatcgccgcgaaaggcattctgccgacctgccaggacaccggcacggcgattatcaccggtaaaaaaggccagcgcgtctggaccggcggcggtgacgaagcggcgctggcgcgcggcgtttacaatacctacaccgaagacaacctgcgctattcgcaaaacgcggcgctggatatgtacaaagaggtgaacaccggcaccaacctgcctgcgcagattgacctctacagcgtcgacggtgacgagtacaaattcctctgcatcgccaaaggcggcggttcagccaacaaaacctatctttaccaggaaaccaaagcgctgcttaccccgggcaagctgaagaattatctggtcgagaagatgcgcaccctcggcaccgcggcctgcccgccgtaccatatcgcgtttgtgattggcggtacgtctgccgaaagcaccctgaaaaccgttaagctggcctcaaccaaatactacgatggcctgccagcggaaggtaacgaacatggtcaggcgttccgggacgtgcagcttgagcaggaactgctggccgaagcgcagaatctgggcctgggcgcgcagtttggcggcaaatacttcgcgcatgacattcgcgtgatccgcctgccgcgccacggtgcttcctgtccggtgggcatgggcgtctcatgctcggcggatcgcaacatcaaggcgaagatcaaccgcgacggcatctggatcgagaagctggagaacaacccgggcaaatatattcctgaagaactgcgtaaagcgggcgagggggaagcggttcgcgtagacctgaatcgtccgatgaaagagatcctcgcgcagctttcgcagtatccggtttcaacgcgcctttccctgaacgggacgattatcgtgggtcgcgacatcgcccatgcgaagctgaaagagcgcctggacaacggcgaagggctgccgcagtacattaaagatcacccgatctactacgcaggcccggcaaaaacgcctgatggatatgcttccggctcgttaggcccaaccacggcgggccgtatggactcctacgtcgaccagttgcaggcaaacggcggcagcatgatcatgctggcgaaaggcaaccgcagccagcaggtgacggacgcgtgccacaagcacggcggcttctacctcggtagcatcggtggcccggcagcggtgctggcgcagggcagtatcaagagccttgagtgcgtggagtacccggaactgggtatggaagcgatctggaaaattgaagtggaagacttcccggcgttcatcctcgtggatgacaaaggtaacgacttcttcaaacagatccagtcttcccagtgttcggcgtgtgtgaagtaa

SEQ ID NO: 165739 - DNA, 1395 bp, Enterobacter cloacae
atgacaatgcatcgccgcgagaaagactccatgggcgccatcgacgtcccggccgacaagctatggggcgcacaaacccagcgttcgctggagcatttccgcatttcgacagagaaaatgcccgtctcgctaatccaggcgctggcgttgaccaaacgcgctgccgccaaagtcaatcaggatctgggcctgctggatgccgataaagccaccgccatcatcaatgccgccgacgaagtgctggcgggcaaacatcccgacgaattcccccttgccatctggcagaccggctcaggcacccagagcaacatgaacatgaacgaggtgctggcgaaccgtgcaagcgagctgcttggcggcgtgcgcggcatggagcgcaagatccacccgaacgatgacgtgaacaaaagccagagttccaacgacgtgttcccgacggccatgcacgtggcggccgtcatcgcaatccgcgagcagcttatcccgcagctcaacgtgcttaaatctacgcttaacgaaaaagcgcaggccttccgcgacatcgttaaaattggtcgtacgcaccttcaggacgccacgccgctgacgcttggtcaggagatctccggctgggtggcaatgctggagcacaatcttaagcatatcgacaacagcctgccgcatctggcggagctggcgctcggcgggacggcggtgggcactggcttaaacacccatcccgagtacgcggtgcgcgtggccgaagagctggcgaagatcaccgggcagccgtttgttaccgctccgaataaattcgaagcgctggcgacctgtgatgcgctggtgcatacccatggcgcgctgaaagggcttgcggcctcgctgatgaaaattgccaacgacgtgcgctggctggcctccggcccgcgctgcggcatcggcgaaatcagcattccggaaaacgagccgggcagctccattatgccgggtaaagtgaacccgacccagtgcgaagccatgaccatgctgtgctgtcaggtgatgggtaatgacgtggcggttaacatgggcggcgcgtcgggtaacttcgagcttaacgtctatcgtccgatggtgatccacaacgtactgcaatcgattcgtctgctggccgatggcatggagagctttaacgagcactgcgcggtgggcattgagcctaatcgcgagcgaatcagccaactgctgaatgagtctctgatgctggtaacggcgctgaacacccatattggttatgacaaagcggccgaaatcgctaaaaaagcgcacaaagaggggcttaccctgaaagcctctgcgctggcgctgggctacctgacggacgccgagtttgatgcctgggtccgcccggaagcgatggtgggcagcctcagataa

SEQ ID NO: 165740 - DNA, 930 bp, Enterobacter cloacae
atggcaacttacgatctcatcgaaaggcttaacaccacatttcgggaaatagagcaggcgttactgaccctgacggggcaacttcaggactgccgcctgctggccgcccgcgtcttttctctgcccgaggtggcgaaaggcgcggagcacgacccgctgaacaccattgaggtgacgcagcatgttggcaaggcggcgctggaaatgacgttgcagcactttcgtcgccttttcatccagcagcagtctgaaaatcgcagcagtaaggccgccgttcgcctgcccggcgtcatctgcctgcaaacggatgccgcaacgcgtgaagggattgaggcgcagattacgcatatcaatacgctgaaagccgcctttgagaagattgtaaccgttgagtccgggctggcgccggctgcccgttttgaatgggtgcatcgccagcttccggggctgatcaccctgaatgcttaccgcacgctgacggtactgcgccaccccgccacgctgcgcttcggctgggccaacaagcacatcattaaaaatttcacgcgcgatgagatcctggctcagctggagaaaagcctgaaatcgccgcgaacggtcgccccgtggtcgcgggaacagtggattgaacggctggagcaggagtaccacagcattgcctccctgccagctgatacccgtcttaaaataaagcgtccggtgaaggtacagcctatcgcccgcgtctggtacgccggacaacaaaagcaggtgcaatacgcctgcccgacgccgctgattgcgctctacgatgccgatcagggtgcggtggtgccggatatcggggaactgctgaattacgatgctgaaaacgttcagcatcgctataaaccccaggcgcagccgctacagctgattattccgcggctgcacctgtatgtggcgcagtga

SEQ ID NO: 165741 - DNA, 1299 bp, Enterobacter cloacae
atgaaaaagctgtttgtgcagttttatctcctgctgtttgtctgctttctggtgatgaccatgctggtcgggctggtctataaattcaccgcagagcgcgcgggcaggcaatccctggacgatctgatgaaaagctcgctctacctgatgcgtagcgagctgcgagaaattcctcctcatgactgggcgcgcacgttaaaagagctggatctgaatctgtcgtttgatttgcgtatcgaacccatgaaggattttgacttagcgccgcctgcgatgcagcgtctgcgcgacggagacatcgtcgcactggacgagaaatataccttcattcagcgtattccacgcagccactatgtccttgccgtcgggccagtgccctatctctattacctgcaccagatgcgcctgctggatctcgccctgctgggctttattgccatctcgctcgctttccctgtgttcatctggatgcgaccgcactggcaggacatgctgaaactggaatccgccgcacagcgttttggggagggtcatttaactgaacgcatccatttcgacagcggttccagttttgaccggctcggtattgccttcaaccagatggccgataatatcaacgccctgattgccagcaagaagcagctgatcgacggcattgcgcatgaactgcgcactccgctggtacgcctgcgttatcgcctggagatgagcgagaacctcaccggggcggaatcgcaggcgctcaatcgggatattggccagcttgaagcgctgattgaagagctgctgacctatgcccgcctcgatcggcctcagacggagttgcacctcagtacaccggatctccccgtctggctacagacgcatattaacgatgtgcagagcgttaaccctcagcgaaaactgctggcagccattacccccggcgcgtacggcgcgctggacatgcgactgatggaacgcgtgctggataatctgatgaacaacgccatgcgctacagcgaaacgacgctgcgcataggtttagatttgcagggaagccaggcgattctgtgtgtagaagacgatggccccggcattgagccggcggagcgtgaaaaagttttcgagccgtttgtgcgcctcgatcccagccgcgaccgggctaccggcggctgtggcctggggctggctattgtccgttccattgcccaggcgatgggtggtacggttcgctgcgaagcgagcgagctgggtggggcccgtttcgtctttagctggccgatctatcacaatattccccttcccgtacctgcctga

SEQ ID NO: 165742 - DNA, 228 bp, Enterobacter cloacae; identical to SEQ ID NO: 117820

SEQ ID NO: 165743 - DNA, 219 bp, Enterobacter cloacae
atgtcatcaaaaattttaggtctggttaagtggtttaaggaagataaaggctttggttttatctcccctgtagatggcagcaaagatgttttcgtgcatttctctgcccttcagggagagaacttcaaaacactttttgaaggtcagaaagtcgaatttatcatcgtaagcggcgataaaggccctgctgctgcgaatgtaacgctttgcgataaataa

SEQ ID NO: 165744 - DNA, 372 bp, Enterobacter cloacae
atgtcatggagagtcattagctcggtaatttgtcctaacacgggaatcgtttattcaagcatcttgggactcaagttcttgaaactcatcatttggtatgaaagtgatgtctatttgtaccccggtgacaggatatatccgacaaaaaatggcgtcttcataaatggtgttttcaagcctatatcgatatacaacatatcaccttacaacgaaatgttgtggagtgaaattaaaaacaagatggcctgcccatacaatcgaaaccagcacgaggagatatgcacttacgcggtgcattgcaacgcgcggaaatgcccgcatgggtttgccaccaacccactgattgtcagcacaggtaaatccagacattag

SEQ ID NO: 165745 - DNA, 753 bp, Enterobacter cloacae
gtgtatgttgacgtttttcgcgatgacagacgttgtatgaataagattgtttatgttgaagatgaacccgaggtggggcaattaatcgccgcttatctgggtaaacatgatatggaagtggttgtcgaggctcgtggcgatcgcgctgaagacgtcgtcaaccgcgaaaatccggatctggtgttgctggacatcatgctgcccgggaaagatggtatgacgctctgccgggatctgcgcgcgaaatgggacggcccgatcgtgctgctgacctctctcgacagcgatatgaatcatattctgtcgcttgagatgggcgcaaacgactacatcctgaaaaccacgccgccggcggttctgctagcccgtttacgcctccatctgcgtcagcgtgccagcgctgagcgtgaagcgcctgcgccctccttaacgccgcataaagcgatgcgtttcggcacactttctatcgacccggtcaaccgacaggttatgctttccggggagctgattgcgctctcaaccgcagattttgacctgctgtgggagcttgcaacccatgccggacaaattatggaccgggatgcattgctgaaaaatctgcgcggcgtaagttacgacggaatggatcgtagcgttgatgtggcgatttcacgactgcgtaaaaaactgttggataacgccacggaaccttaccgcatcaaaaccgtacgcaacaagggctatttgtttgcaccgcacgcctgggaaacctga

SEQ ID NO: 165746 - DNA, 336 bp, Enterobacter cloacae
atggggctggtgataaaagccgcgctgggtgcgctggtcgtgctgctgattggggtgctggctaaaacgaagaactactacattgccgggctgatcccgctgtttcccacctttgcgttaatcgcgcactatattgtggcctctgagcggggtattgaggcgctgcgcgccaccattgtgttcgggatgtggtcgatcatcccgtattttatttacctgctgtcgctgtggtacttcaccggttttctgcgtctgcccatggcgctgggcggggcggtggtctgctggagcctcagcgcctgggtgctcatcttcttctggagccgctttcactag

SEQ ID NO: 165747 - DNA, 723 bp, Enterobacter cloacae
atgggacatacgcagcaacgcccaatattgatcactggcgcaggccgtcgcattggcctcgccctcgcccatcactttctcaatcttcgccatccggttatcgtcagttaccgcacggaatatccctccattgaagggctacgaaatgccggagcagtctgcattcaggcggatttctccacagatgaaggtattctcgccttcgcggacaaagtgaagtcgaccacccacggactgcgggcggttattcacaacgccagtacctggcttcccgaaaaagcaggacattcactcagcgaaacgctcgcctgcatgatgcagatccacgttaatgcgccttatctgctcaaccatgccctacaggatttgctgcgcggacacggccatgccgcaggcgacattatccatttcaccgattacgtggtggagcgaggaagcgacaaacacatcgcctatgcggccagcaaagccgcgctggataatatgacccgctctttcgcacgcaagctggcgcccgaggtaaaggtcaacgcgattgctccggcgatgattttatttaacgaaggcgatgatgccgagtatcgtcagcaggcgctcaacaagtcgttaatgaaaattgcgcccggcgagaaagaggtgatcgacctgatcgattatctgctgaccagctgttacgtcacgggccgaacgtttgccgtggacggtggccgccccctgcgctag

SEQ ID NO: 165748 - DNA, 1383 bp, Enterobacter cloacae
atggaaaagaaacttggcctgagtgctttaactgcacttgtattgagctcaatgctgggcgcgggcgtattcagtttgccgcagaacatggcggccgtcgccagcccggccgcattactgattggctggggcattaccggtgtcgggattttgctgctggcgttcgccatgctgctgctgacccgtatccgaccggatctggacggcggaatattcacttacgcccgggaaggtttcggcgagctgatcggcttctgctccgcctggggttactggctgtgcgcggtgatcgccaacgtctcctatctggttatcgtcttctcggcgctcagcttctttaccgatacgcccgaactgcgcctgtttggcgacggcaatacctggcagtccatcgtcggcgcctcggtcctgctgtggatagttcactggctgattttgcgtggcgtccagaccgcagccagcattaacctggtggcgacgctggccaagctggtgccgcttggcctgttcgtcgtgctggccttcctcgccttccgtctcgatgtctttacgctcgatttcagcggcattgcgctgggcgtccccgtctgggaacaggtgaaaaataccatgctgatcaccctgtgggtgttcatcggcgttgaaggtgccgtcgtggtctctgcccgcgcgcgtaacaagcgcgatgtgggacgcgccacgctgctggccgtactggcggcgctgggcgtttatctgctggtgacgctgttgtcgctcggcgtggtggcccgccctgaactggcggaaatgcgtaacccgtccatggcagggctgatggtgaaaatgttgggtccctggggggacgtgattatcgcggcgggtctgattgtttccgtttgcggcgcctatctgagctggaccattatggcagcggaagtcccgttcctggccgccacgcacaaagcgttcccgcgcctgtttgcccgtcagaacaaaaacagtgcgccatcggcctctctgtggctcaccaacatcagcgtgcaggtctgtctggtgctgatctggctcacaggatcggactataacacgctgctgaccatcgcctccgagatgattctggtaccctatttcttagtgggcgcatatctgttaaaaattgcgacccgcccggcacactatgcggtaggcgtcggcgcctgtatttacggtctatggttgttgtatgcttccggaccgatgcatctgctgctgtccgtggtgctctacgcgccgggcctgctggtgtttatttacgctcgccgtacacatcagcttgataatgcccttaagcgccgcgaaatggcattgataggtttgctgttagtcgctgccgtaccggcaacgtggatgttaatgggatag

SEQ ID NO: 165749 - DNA, 945 bp, Enterobacter cloacae
atgaagcttaagaacacactcctggcgtccgcacttctttccgcgaccgccctgtctgcgaatgccgcgacagagttgacgccggagcaagcggcagcgttaaaaccttttgaccatacggtcattgtgggtcgctataactcaattggcgatgccgtcgccgccgcatcaaaagccgccgataaaaacggcgctgcctcgttttacgttgttgaccagtccgatcagggcaacagcggcaaccagcgcgtgacgattgcgctgtacaaagagaacgccccaaaagcagatgaacagaaaaaccgcgtgattaacggcattgttgaactgccgaaagatcaggctgttcagctggaaccgtatgacaccgtgaccgttcagggcttctaccgcagccagcctgaagttaacgatgccatcaccaaagccgcgagagaaaaaggcgcttacgcgttctatatcgtgcgtcaggttgatgccaaccagggcggaaaccagcgcatcaccgccttcatctataagcaagatgcgaaaaaacgcgtagtacaaagcccggatgccattccagcggattcagatgcgggacgtgccgcgttagcgaaaggcggtgaagaagcgaagaaagtggaaattccgggcgttgcaacctcggcggcaccaagcgctgaagtgggtcgtttctttgaaacccaatccaccaaaggtggtcgttataccgttacgttaccagacggcacgaaaattgaagagctgaacaaagccactgccgcgcagatggtgccgttcgacagcatcaagtttacgggcaactatggcaacatgacggaaatctcctatcaggtggcgaagcgtgctgcgaagaaaggcgcgaagtattaccacatcacccgccagtggcaggaacgtggtaacaacctgaccatcagcgccgatctgtacaagtaa

SEQ ID NO: 165750 - DNA, 1530 bp, Enterobacter cloacae
atgcgtattggggtaccaaaagaacggttagccaatgaaacccgcgtagcggcaacaccaaaaacggtggagcaactgcttaaactgggttttaccgtcgcgattgaaagcggcgcgggcaaactggcgagtttcgatgacgaggcctttactcaggctggcgcggaagtagtggacggtgctgaggtctggcaatcacccatcattctgaaggtcaacgcaccggaagagagtgaaattgaactgctgaacgcgggcacgacgcttgtgagctttgtctggccagcccaaaacccggagctgatggagaagctggcagcacgtggtgtcaccgtgatggcgatggactccgtgccgcgtatttcgcgcgcgcagtctctggatgcgctgagctccatggcgaacattgccggctatcgcgccattgtcgaagctgcgcatgagtttggtcgcttctttaccggtcagattacggcggcaggtaaagtaccacccgcgaaggtgatggtgattggtgccggtgtggcaggtcttgccgctatcggggccgcaaacagcctgggcgctattgttcgcgcgtttgatacccggccggaagtgaaggagcaggtgcagagtatgggcgccgaattccttgagctggacttcaaggaagaagcgggcagcggtgatggttacgcgaaggtcatgtctgaagcctttattaaggcggaaatggcactctttgcggcgcaggcaaaagaggtggacatcattgtcaccaccgcgcttattccgggtaaaccggcgccgaagctgatcacccgtgagatggtggattccatgcagccgggcagcgttattgtcgatctggcggcgcaaaacggcggtaactgtgagtataccgtgccaaaccaggtcacgacgaccgcgaacggcgtgaaggtgatcggttataccgacctgccagggcgtctgccaacccagtcctctcagctgtacggcacgaacctcgttaacctgctgaagctgctctgcaaagagaaagacggcaacattaccgttgattttgatgatgtggtggtgcgtggcgttaccgtggtgcgtgaaggggaaatcacctggcctgcaccgccgattcaggtttccgctcaacctcaggctgcgccgaaagcggcgccagagcccgcggagccagcaaaacctgcgtcgccgtggcgcaaatacgccatcatggcgctggttattatcctgtttggctggctggcggatgtcgcgccaaaagagttccttggccacttcaccgtcttcgcgctctcctgcgtggtgggttactacgtcgtgtggaacgtttctcatgcgctgcataccccgttgatgtcggtcaccaatgccatctccgggattatcgtggtcggggcattgctgcaaattggtcatggcggctggatcagcttcctgagcttcattgcggtgctgatcgccagtatcaatattttcggtggtttcaccgtgactcagcgcatgctgaaaatgtttcgtaaaggctaa

SEQ ID NO: 165751 - DNA, 1389 bp, Enterobacter cloacae
atgtctggaggattagttacagccgcatacattgttgctgcaatcctgtttattttcagtctggcggggctttccaaacacgaaacgtctcagcagggaaataactttggtatcgccgggatggcgattgcgctgattgccaccatctttgggccggacaccggcaacgtggcgtggatcctggtggcgatgatcatcggcggcgcgattggtattcgtctggcgaaacgcgttgaaatgaccgagatgccggagctggttgccattctgcacagcttcgtgggtctggcggcggtgctggtgggcttcaacagctacctgtaccacgaaccgggcctggagccgattctggtgaacatccacctgaccgaagtgttcctcggcatcttcatcggtgcggtgaccttcaccgggtcgattgtggcgttcggcaagctgcgcgggaagatctcttccaaaccgctgatgctgcctaaccgccacaagctgaacctggcggcgctggtcgtttcctttgtgctgctggtggtcttcgtgcgtaccgaaagcgtaggcttgcaggtgctggcgttactggtgatgaccatcatcgcgctggccttcggctggcatctggtggcgtctatcggcggagcagatatgccggtggtggtttccatgctgaactcctactccggttgggcagcggcggcggcaggctttatgctgagcaacgacctgctgattgtcaccggtgcgctggtcggttcttccggtgcgatcctgtcttacatcatgtgtaaggcgatgaaccgttcgtttatcagcgtcatcgcgggtggcttcggttctgacggctcatcaaccggttctgatgaggaagtgggtgaacaccgtgaaatcagcgcggaagacaccgcagagatgctgaaaaactcgcattccgtcatcatcaccccaggctatggcatggcggtggcgcaggcgcagtatccggtggcggaaatcaccgagaaactccgcgcgcgcggcatcaaggttcgctttggtattcacccggtggcggggcgtctgccaggccacatgaacgtgctgctggcggaagcgaaggtgccttacgacattgtgctggaaatggacgagatcaacgatgatttcgccgacaccgacaccgtgttggtgattggcgccaacgacaccgttaacccggcggcgcaggacgacccgcgtagtccgattgcgggtatgcctgttctcgaagtgtggaaggcgcagaacgtcattgtcttcaaacgctctatgaacaccggctatgctggcgtgcagaacccgctgttctttaaagataacacccacatgctgtttggcgacgccaaggccagcgtggatgcgatcctgaaagcgctgtaa

SEQ ID NO: 165752 - DNA, 1110 bp, Enterobacter cloacae
atgcgatttttgtcccgcttcgacatcatcgagctgatgatgacgccatctttctggatcggcgtcgccacggtggtttttgtgactctgctggtgtactggctgctgacgcgcctgatcgccttcgttaagaaagggatcactacctggggcgacaagcaccccaccaccaaccggatgcgttttatcctgacggatatgcttaaccgcaccagccgcttcctgctttttgtcgtggcgctgttattcagcctgcgtttcgtcgacttaccggatcatctctttggtaccgtgagccacgcctggttcctggtcttcgctatccaggtggcgctgtggatggatcagggggtggtgtcgtggcttcgtcacgtcatgctggcgccgggaagccataaaaacccggtgacgctggtgatcacggggcttatcctccgtgccatagtctggtcagtgatgctgctgtctattcttgctaacgcgggcgtcaacatcactgctctggttgccagccttggggtagggggtattgcaatcgccctcgcggtgcaaacgatcctgagcgacgtgtttgcatcgctctccatcggttttgataagccgttcgaaattggcgattttgtggtgtttaacgatgtcgccgggacagtagagcacattggcctgaaaaccacccgtatccgcagcctgagcggggagcagattgtctgcgggaacgccatcctgctgcaacagacgctgcataactacaagcggatgcaaacgcgccggatcgtctttaccttcggggttgccagcgacacggcgccggacaaactgcgttcagtgggtgatatggtcaaacagatcattaccgacgtcggggaaacgaagtttgaccgcgcccatttcctgggcttcgatcgcgatcgcctgaccttcgaggtggtccatatcgttaatacggcggactacaacaagtacatggatattcagcaggagatcaatatccgtattctggaggggctgaaccagcaggagatcaagctggcgctgccgagcatggttctgcacgcgccctggatgaatgccggcgacgaggcaccgacgcagcggttgagcgaagcgtaa

SEQ ID NO: 165753 - DNA, 951 bp, Enterobacter cloacae
atggcaaagtatcaaaacatgctggtggctatcgatcctaaccaggacgatcagccggcattacgacgtgctgtgtatttacatcaacggattggtggcaaaattaaagcctttttgccgatttatgacttctcatacgagatgaccacccttctgtcgcctgacgagcgcaccgctatgcgtcagggagtgatcagccagcgtaccgcgtggatccgcgagcaggcgaaatattacctggaagcgggcgtaccgattgatatcaaagtggtctggcacaaccgacctttcgaagccattattcaggaagtggtggccggtgggcatgacctgctgctgaaaatggcgcaccagcatgacaaactggaatccgtgattttcactccaaccgactggcacctgctgcgcaaatgcccttgcccggtatggatggtgaaagatcagccatggcctgagggcgggaaagccgtcgtggcggtgaatctggccagcgaagaggattatcacaattcgctgaacgagaagctggtgaaggaaaccatccagcttgccgaccaggttaaccacaccgaagtccatctggtgggcgcctatccggttacgccaatcaatatcgccatcgagttgcctgaatttgacccgagcgtgtataacgacgcgattcgcggtcagcatctgctggccatgaaagcgctgcgccagaaattcagtatcgatgagaatatgacgcacgtagaaaaagggttaccggaagaggttattccggatctggcggaacatttgcaggccgggattgtggtgctgggcaccattggccggaccggtatctctgccgcgttcctgggaaataccgccgagcaggtgattgaccacctgcgctgcgaccttctggtcatcaaaccggatcagtatcaaacgccggttgaactggacgatgaggaagacgattga

SEQ ID NO: 165754 - DNA, 753 bp, Enterobacter cloacae; identical to SEQ ID NO: 117808

SEQ ID NO: 165755 - DNA, 516 bp, Enterobacter cloacae
atgctgagattactcgaagataatattgcgacgccgctggggccgctgtgggttatcgcggatgaagcgttcaatctgcgcgcggttgaatgggaagagcacagcgaccggatggttgagctgctcaacatccattatcgcgccgagggttacgagcgtattactgcccgtaatcctggcgggctgagcgataaactgacggcctacttcgagggcgatctcagcattattaataccctgccaaccgccacggcgggcacccctttccagcgcgaggtgtggcaggcgctgcgtaatattccctgcgggcaggtgatgcactacggtcagttggcagaacagcttggccgtgccggcgcggcgcgcgcggtcggtgcggcaaatggctctaaccccgtcagcattgtggtgccttgccatcgcgtgatcgggcgcaacggcaccctcaccggctatgccgggggcgtacagcgcaaagagtggctgctgcgtcacgaagggtattttctgctgtaa

SEQ ID NO: 165756 - DNA, 1527 bp, Enterobacter cloacae
atgagtatgtcttccataccttcgcattccccatccggtaagctctatggctgggttgaaaggatcggcaataaagtaccgcaccctttcctgctttttatctatttaattgtcatcctgatggtcgcgacggccgtgctgtccgcctttgaggtgagcgtgcgcagcccggccgacggcagtatggtagcagtgaaaaacctgctcagcgttgaagggttgcactggtttttgccgaacgtgattaaaaacttcagcggttttgcgccgctgggcgccatcctggcgctggtgttaggcgcgggactggccgaacgcgtgggtctgctgcccgcgctgatggtgaaaatggcctcgcacgtcagcgcgcgttatgccagctatatggtgctgtttattgccttcttcagccatatctcgtccgacgcggcgctggtgatcatgccgccgatgggggcgctgattttcctcgccgttggccgtcatcctgttgcgggtctgctgtcggcgattgcgggcgtcggctgtgggtttaccgctaacctgcttatcgtgaccaccgatgtgctgctctccggcatcagtacggaggcagccagcaccatcgatgcgactatgcacgtcagcgtgatcgacaactggtactttatggccagttcggtgattgtcctgacgattgtcggggggctgattaccgataagatcattgagccgcgcctgggtaaatgggaaggccggagcgatgaaaagctggagacgctgagcaaagagcagcagttcggcctgcgcgtagccgggatcgtctcgctggcgttcattgcggtggtggcgctgatggtggtgccggaaaatggcgtgctgcgcgatccgatcaaacacaccgtactgccctcgccgtttattcagggcattgtgccgctgataattctcttcttcttcgtcgtttcgctcgcgttcggcatcgccaccggcaaaatccgccgtcagggagatctgccgcacctgatgatcgagccgatgaaggagatggcgggttttatcgtgatggtgttcccgctggcgcagtttgtcgccatgtttaactggagcaacatgggcaagtttatggccgtgagcctgacggacgcgctggaggcggcggggttgagcggtgttccggcgtttgtcggcctggcgctgctgtcgtccctgctgtgcatgtttattgccagcggatcggccatctggtcgattctggcgcccatctttgtccccatgtttatgatgctcggcttccatcctgcgttcgcccagatccttttccgtgtcgccgattcctcggtgatcccgctggcgcccgtgtcacccttcgttccgctgtttttaggcttcctgcaacgctacagaccggaggctaagctgggtacctactattcgctggttctgccctatccgcttatcttcttaggggtatggctggtgatgctggtggcgtggtatcttgtcggcctgccgattggaccgggtgtttacccgaggctgaactaa

SEQ ID NO: 165757 - DNA, 798 bp, Enterobacter cloacae
atgaccaccggtacaaacttcctcaacgaacacatcattgaaaaagcgcgcgttcattacgccatcaccgataccggcgggatttcgcccaacgtggtacaggcccaggccgaggtgctgtacctgatccgcgccccggagatggccgatgcgcagcagatctacgcgcgcatcgagaaaatcgcccagggtgcggcgatgatgaccgaaaccaccgtcgagtgccgctttgataaagcctgctccagctatctgccgaaccgtacgctcgaagcggcgatgtaccgcgcattgcagcattatggcacgccggcctggacggaagaggaacgcgaatttgcccgtgaaatccgcgccacgctcacggcaaacgacctgcaaaacagcctgaaaaacattgccgcaacggggggcgaagagggaaaagcgtttgcccgacgccatcaggagacgctgctggtggatgaagttgccccttacgccatcaccgataacgtgctggcaggctccaccgatgtgggggatgtcagctggaagatgcctgttgcacagtgctttagcccctgttttaccgtcggcaccccactgcatacctggcaattagtggcgcaggggcgtacctcaattgcccataagggcatgttgctggccggaaaagtgatgggcgcgaccgcgctgcatctgcttcaggatgccgacctgttgcgaaaatgccgggaagagttcgaacaacacataacagaaaaaccgtacgagtgtccgatcccgcagggcgtgacaccgtcacctttaaaataa

SEQ ID NO: 165758 - DNA, 573 bp, Enterobacter cloacae
atgcaggagaactatgcttttatcgctgatgccatcgacacgcgatgtcagacgtttaccgatattgccgacgacatctgggatcatcccgaaacgcgcttcgaagagttctggtccgccgaacggctcgccagcgcgctggaagcagagggctttaccctgacgcgggaagccggaggcattcccaatgcctttattgccagctacggcagcggcaagcccgttatcgcccttctgggcgaatacgatgccctggccgggctaagccagcaggcgcactgcgcgacggcgcaatccgccaccccgggggcgaacggccacggctgcgggcataacctgttaggcactgctgccttcgccggggcggtggcggtgaaaagctggctggaacaacacggcggcagcggaacggtacgattttacggctgccccggcgaggaaggcggctccggtaaaacctttatggtacgtgaagggctgtttgacgacgtggacgctgccgtgacatggcacccggaggcctttgccgggatgtttaacgtcagcacgctggccaatattcaggccgcctag

SEQ ID NO: 165759 - DNA, 1311 bp, Enterobacter cloacae; identical to SEQ ID NO: 127224

SEQ ID NO: 165760 - DNA, 906 bp, Enterobacter cloacae
atgtcatttcagattaaatttcatcaaatcagggcgtttgtcgaagtggcgcgtcagggcagcattcgcggcgccagccggacgcttaatctttcgcagcccgcgctgaccaaatccattaaagagctggaggagggtatggcggcccagctatttgtgcgccggagtaaaggcgtcgcgctgaccgagtgcggggaagggttttatcaccgcgctaatttgattctggaagagctgcgtgcagcgcaggatgacatccgccagcgacagggcgagcttgccgggcagatcaatattgggatgggagccagcatttcacgcagcctgatgccggccgtcattacgcgttttcatgcgcagcatcctcaggtcaacgtccggattatggaaggccagctggtgtcgatgattaatgaattacgtcagggtgagctggactttaccatcaatacctattatcaggggccgtacgatcacgaatttacgtttgaaaagctgttcgaaaagccttttgctgtattttgtcgggcagggcatccggcgacaggggcgacctcaattaatgagcttttgcaatataactggacgatgcctacgccccggggaagttattataagcagttgcaggatacttttaaccatcgctctcaaataccgcgaattggcgttgtctgtgagaccttttcctcctgtattagcctcgtcgcacaaagcgatttcatcagcattttaccgcaggagctgggctgcgatccgcttctggcgcaccgtctgataatgctgccggttgtcgaaactctgcctaaagcagcatattatttaattcagcgtcgtgattctcgccagacaccgcttgccgaatcattaatcacgcagtttcgaagggaagccaggaaattaatttaa

SEQ ID NO: 165761 - DNA, 564 bp, Enterobacter cloacae; identical to SEQ ID NO: 117802

SEQ ID NO: 165762 - DNA, 1662 bp, Enterobacter cloacae
atgctgaaaaatctgcacgtgattaccggtattatctttgccctcaccatattctgtctgctgcaagttgtcacgggagggttgttctactctgccgttaacaacgatcgtcacaactttcagaactccgggttactcaatgcccaacaggagagcctgagcgacagcgtgaacacgctggtgaaaacgcgcgttaccgtcacccgcgtggcgatccgctacctgaaaaaccagcgcgatccggcctctctcgcagcaatcaacacgctgttgggcaccgcgaacggttcgctgaccaaagccgaagactattacaaaaactggcaggcgatttcgcaggtgaagggccagaatgccgcgcttaccgaagagatgcagaaagcctggaagcaaatgcacgaggtgatgcgcttgtccattgagtatctgcgcgccgataactatcaggcctatggcgacctggacgcccagcaggcgcaggatgagatggaggcggtctatacccgctggcgcgctgaaaacaacgtgctgctgaaagccgccgccgaagagaaccagagcagctttacccagatgcagtggacgctggcggcgatcttcctgactgtgatcgccgtgctggtggtgatctggcagggtttacagcacctgctcctgaaaccgctcaacgccatcatgaaccatattcgcaccatcgcgagcggcgatctgacgcaaaacgtcgcgattaccgggcgcaacgagatgggccagctggctgctggtctgcacgagatgcagcagtcgctggtgagcaccgtcagcgccgtgcgcggcagcacagattctatctatacgggcgcaggagaaattgccgccgggagtaacgacctttccgcgcgaaccgagcagcaggccgcctcgctggaagagaccgccgccagcatggaagagctgactgccacggtgaaacagaactcggataacgcccgtcaggcgacgctgctggcgaagaatgcgtctgaaaccgccgcacgcggcggtcaggtggtggataacgtggtgcgtaccatgaatgacattgccgacagttctcagcaaattgcgcatatcaccggcgttatcgacagcattgccttccagaccaacattctggcgctcaacgcggcggttgaagccgcccgtgccggggaacaaggtcgcggctttgcggtcgtggcaggtgaagtacggacgctggccagccgcagcgcgcaggcggcaaaagagatcaaagggcttatcgagaactctgtcagccgggtgaataccggctcagaacaggtgagcgaggcgggtgcgaccatgaaagagatcgtcgcggccgtgacgcgcgtaaccgatattatggctgagatttcctcggcgtctgacgagcagagccgcggtatagagcaggtcagcctggcggtctcgcagatggacagcgtcacgcagcaaaacgccgcgctggtacaggagtcggcaacggcggcggcagcgctggaagatcagtctgaacagctgcgtcaggccgtggcggcattccggctgaacgctcaggcatcgctggcggctcgccctaaaaacgtgaaaacgcccgtactgctgcgcccgtcagcggcaggcgcgaatacagctgacgcgaactgggaaaccttctga

SEQ ID NO: 165763 - DNA, 867 bp, Enterobacter cloacae
atgagcagcatagataaaagcggaacgttcacgctcggaacgcgtacggttaaacgatttggctatggcgcgatgcagcttgccgggcctggcgtttttggtccgccaaaagacaaaaatgcggcgctggcggtgctgcgtgaagcggtggcgtcgggtgtgaatcacattgataccagcgatttttacggacctcatgtgaccaaccagcttatctgcgaggcgcttcatccgtaccgggacgaccttacgattgtgaccaagatcggagcccgacgcggcgaggatgcctcctggctgccggcgttttccgcgcaggagctgacgcaggcggtgcatgacaacctgcgtaacctgaagcgggatgtgctggacgtggttaacctgcggatcatgtttagcaaccacggaccggcggaaggctcgattgccgcgccgctgagtacccttgcagagctgcaacagcaggggctggttcgccatattgggctgagcaacgtcaccgcttcgcaagtcgctgaagcgcagaagatggtttccgtggtgtgtgtacagaacatgtacaacgttgtgaatcgcggtgacgatgcgctggtcgattcgctggcgcagcaggggattgcctgggtgccgttcttcccgctgggaggtttcacgccactgcaatcttccggactacaggcggtggcggattcactgggcgcgacgccgatgcaggtggcgctggcatggctgctgcaacgctcgccaaatatcctcttgatcccgggaacctcgtcggtggcgcatctgcgtgaaaacctggcggcagccgatctggtattgccgcctgaggcgctggagacgttaaattcgctggtggggtaa

SEQ ID NO: 165764 - DNA, 201 bp, Enterobacter cloacae
atgcccgcccgtgattatcccgataagcgtgttgctcgcggtgtcgcaaaggaggccgaactcaggatgttaagcgcgcgcatcgatcctgcgctgatggagtacatccgcattactgcgtatgaaacacggaaaagtaagcaggaaatcgtggcggaagcgttagcgcttcatcgccaaagaagtcagattggatcataa

SEQ ID NO: 165765 - DNA, 420 bp, Enterobacter cloacae
atgatctttttcagacccgcagagttgcgtgaaatcgttgctattccacttttcagcgacttagtacagtgcggcttccccagcccggcagcggattatgtagagcggcgtatcgatttaaacgagttattagtcgcccatcccagctccacttattttgtcaaagccgccggtgactcgatgatagaaggggggattaataacggtgatttgctggtggtggacagttcccgcaagcctgagcatggcgatatcgtgattgcggcggtagagggcgaatttaccgtgaagcgcctccagttgcgtcccaatattcaactcaaccccatgaacagcgcctattcaccgattattgtcggcagcgacgatacgctcgatatctttggtgtagtgacgtatatcgtgaaatccgcgagctga

SEQ ID NO: 165766 - DNA, 2430 bp, Enterobacter cloacae
atgtcagacaataatccccgcccatccggctggttaggcccgtggtgcctgctggtgggtgtgatacttcttgtaacggggctcttttttgccatcggcggttttaaactggtttccctgggggggagttggtattttctcatcgccggggttatcactctgctctctgcgattcagttcttccgccgcaagtcctctgccgtggggctgtttgccctggtgtttcttggcaccctgatttgggcatttttcgatgccgggctcgacttctggccgctggtttcccgtttaatggtacccgccgggctgatggtgctggcagccgccacctggcctgcattgcgtaaacgtgaaggaaaaccgtcctgcgcaaaaggggccctgggggtctgcgcggtccttattgtcgccatgggcgtcacctttgttcagatgtttcaaccccatccgaccgtgccgtttagcggtgaaaaacgcccgctggtgccggtaaaagatgatgcgaaacagcagaactgggatcactacggtaatacggctggcggtagtcgctttgtggcgctggaccagataacccgtgacaacgtgaaaaacctgaaaccggtctggacctaccataccggtgacgtaccggaaagtccggacggcaatggcgcagaagatcagcaaacgccgctacaggttggcgatcgtgtcttcctctgtacgccgcataacaacgtgatcgccgtggatgccgatagcgggaaagagatctggaaagcggaaatcaacgccaagtctgcaatctggatgcgctgccgtggcctggcgtactttgatgccaccaaaccgctggcacagccaacggtagccggctccacgccggtcctgccagcgcaggtggcaccgggcgctgcatgccagcgccgtatcctgatgaacaccatcgacggtaagctgatcgcgttagacgccgataacggcaagttctgcccggacttcggtactaacggcagcgttaacctgcatgaagggatgggcgacgcgtcagatcccacctacgtgctgacgtcggccccgacgctggcgggtacgacggttgtcgttggcggccgcgttgcggataacgtcagcaccgatatgccgggaggcgttatacgtggttatgacgtgatcaccggccagctgcgctgggcgttcgacccgcgtaatccggatccgaactatgttctgaagccgggcgaacactacaaacgtagctctgcaaactcctgggcccctatgtcctgggatgcgtcgatgaataccgtgtttatcccgatgggaagttcctctgtcgacctgtggggcgctgaccgtattccggaagatcacaaatacgccacctcaatcctcgcgctggatgcgactaccgggaaagagaagtgggtataccagaccgtgcataacgacctctgggatttcgatatcccgatgcagccgagcctggttgatttcccgacgaaagagggcaacaagcccgcggtggtggtgggcaccaaagcggggcaaatttacgttcttgatcgcctgacgggtaaaccgctcactgaagtgaaagaggttccggtaaaaccagcggatattccacgtgaacagtacccggcaacgcagccgcgctctgtggggatgccgcagattggcgcggaaaccctgaaagaatcggatatgtggggggcgacgccgtttgaccagctggcctgtcgtatcagcttcaaatcaatgcgttatgacggtctgtacacgatgccgggaaccgatatttccctgagcttcccgggctcgctggggggaatgaactggggtagtctgtccacggatccgaacaaccagtacatcttcgtcaacgacatgcgtctgggtctgtgggtccagctgattaaacaagatccgcagagcgcggtggcaaacacgggcggtgaagccgtgaacgccgggatgggcgccgttccgatgaaaggaacgccgtattcggtcaacaaaaaccgtttcatgtcaccgctgggcattccgtgccagaaaccaccgtttggctctctctccgcgattgacctgaaaacgcagaaaatcgtctggcaggtgccggtcggtaccgttcaggataccggtccgtttggggtaaaaatgcgcatgccaatgcctgtcggtatgccgacgctgggcggtacgctggccacgcagggcggtctggtcttcattgcgggaacccaggattactacctgcgcgcctttgattcctccacgggggaagaagtgtggaaagcgcgtctcccggtgggtagccagggcggacctatcagctatgtatcaccgaaaaccggcaaacagtacattctgatctctgccggcggtgcacgtcagtcgccggatcgtggtgactacgtgattgcctacgcgctggataaataa

SEQ ID NO: 165767 - DNA, 243 bp, Enterobacter cloacae
atggcgcgaaatgactcgccgtcgccgacgctggcgggtgcttttcacgggctgaccagaaccgccgctttcttcctgtgcgtggtttttagtcaaaaaaaagccccgtactacgacggggccgggctgcttatttcgctgttatttatccagcgcgtaggcaatcacgtagtcaccacgatccggcgactgacgtgcaccgccggcagagatcagaatgtactgtttgccggttttcggtga

SEQ ID NO: 165768 - DNA, 2277 bp, Enterobacter cloacae
atgaccacccgcatcgtggaactggcaggcggtttgcgcgcaacgctggtgcatcagccgcaggcgacacgcgcggcggcgctggcgcgcgtgagtgccggaagccatcacgagccaccgcgcttcgccggtctggcgcatttgcttgagcacctgctgttccgcggtagccagcgctatcagggcgatgatcgactcatggcctgggtccagcgccagggcggcagcgtcaatgccaccacgctggctcgccacagcgcttttttcttcgacgttgccgccgataacctgtccgacggcgtcgcgcggctgcgggatatgttgctggcgccgctgctttcaccgcatgacatacagcgcgaagtggcggtcattgatgcggaaaaccggctcatccagcaacatgattccgccaggcgcgaagcggcggcgcgccacgcgatggaagaacccgcggtttttcgccgttttcaggtgggtagcaaggagtctctcgggcaggacccggtatcgctgcaaaccgcgttgcgcgactttcatcgtcgctattatgtagccgggcacctgcaattgtggctgcaagggccgcaaacgctggatgtgctggccgagcttgcccatacgtttgcgtcaggttttgcgtcaggaggcatgcctgaaaccgctcccccgttgcgtcttagcgctgaagcagattatcagctggcggtaacggagcgacccgcactgtggcgttgtccgctcattcgaaaaagtgacaacgtcactttatttcgggagtttttactggacgacgcccccggaagcctgattgccgggctacgggcgcgcgggctggcagaagaggtagccctgaactggctttatcaggatgacgattacggctggctggcgctaacggttgatagcgaacggcccgaggacattgacccgcatattacccactggctacgggcgctacagcaaacgacggatgagcagcagcggcattattatcggctggcacagcagcgtttcagcgccctgccgacgctggagcagctgcgccagcgggcatttggttttgcacccggcgcggcgcccgtgggtttttacgccttttgtgccaacttacgggcggcgcccacctcgtatctggcctgcaaaaaaatggaaaccgctgaaattattgccagccagggctttgccctgccgcttagccattggcgtcgccagccggttgcagatgatagccccatcgcgttttccttctacccgcagactgccaggtatgctgcgccagccccgacgtcagaagccgctccgctgctgcatttgtcggcgcagacacaaccgccgacgctgatcctgcgcaggcctttttattcgcgtgtggaacgcgcacacggggtggcgatgggcaaacagttacgccctctccttgctgaactgcgccatatcgacggcagcgccgagtggcaaacggttgacggtagctggcagctcaccctgcggcttcctgacgccatggtgacggcggaacccatcatcggggcgataatcgatcgcctctcccaccccgctccggctactacgtcagtgccagaaggcattgccatccgtgagctgcttcagcaattgcctgaacgtctggcatcggatccgccgcgggacggctggctggcggcgttagttggcggcagcgccggacacgcgcacgggttagcccggcagcttggcctgctccgggcaccggttaacgctgagccgttgtcgttaagcggttgtcccggcgggatcgaacacatcccgcacgccagcgcggattcggcgctgctggtgtttattcccctgccgccgggcgcgtcgctcgccgcgctgcggatgctggcgttatgctgcgaaccgcaatttttccagcgcctgcgcgtggaacagcagattggctacgtagtcagctgtcgttatcagcgtattgccgatcgcgatggcctgttgctggcgttacagtcgcctgaccgttctcccgtgaacctgttgggctgctgcaaacgatttttgcgtgagctgacgccgtgcgatgaggcagcgttcagcgtgttgcgacagcagctggcgacgcagatccgctcaccgatggatgccagcgccacggcagtggccgccctgcgccagcgctatggtttgccggtgttaacgccgcaggctattgatgccctgcaacctgacgagataatcgcgctatggcgcgaaatgactcgccgtcgccgacgctggcgggtgcttttcacgggctga

SEQ ID NO: 165769 - DNA, 1143 bp, Enterobacter cloacae
gtgagccagaataaacccgccgtcaatccaccgctgtggctgctggcggagctgacctatcgctgtccgctacagtgtccttactgctctaacccgctggactttgcccggcaggatcaggagctgaccaccgaacagtggattgaggttttccgccaggcgcgggcgatgggcagcgtgcagataggcttttccggcggcgaaccgttgacgcgtaaagatctgccggagctgatccgcgccgcccgcgatctcggtttttataccaacctgatcacctcgggaattggcctgacggaaagcaagctcgacgcgttcagcgaggccggtctggaccatatccagattagctttcaggccagcgatgaagtgctcaacgctgcgctggcggggaacaaaaaagccttccagcagaagctggcgatggccagagcggtcaaagcccgcgattacccgatggtgctgaatttcgtcctgcaccggcataatatcgatcagatcgataaaatcatcgagctgtgcatcgaactggacgccgacgacgtcgaacttgccacctgccagttctacggttgggcgttccttaaccgtcaggggcttctgccgacgcgggaacagattgcccgcgcggaacgcgtggttgccgaatatcggcaaaaaatggccgccagcggcaatctgaccaacctgctgttcgtcacccccgattattacgaagagcgaccaaaaggctgtatgggcggctgggggtcgatttttctcagcgtgaccccggaaggcacggcgctgccctgccacagcgcgcgccagctgccggtggatttcccgtcggtgcttgagcagagcctggaatccatctggtatgactctttcggcttcaaccgctatcgcgggtttgactggatgccagagccgtgccgctcctgcgatgaaaaggagaaggacttcggcggctgccgctgccaggcctttatgctcacagggaatgcggataacgccgatccggtgtgcagcaaatcgccgcatcatcataaaatcctcgaggcgcgccgcgaagcagcctgtagtgatatgaagatcggtcagcttcagttccgcaaccgtacccgttctcagcttatctataaaacccgggaactgtaa

SEQ ID NO: 165770 - DNA, 279 bp, Enterobacter cloacae
atgcaaaaaaactccatcgtcgcctttcgtcgcggctatcgcctgcaatgggaagccgctcaggacagccatgtcatcctctatccggaaggcatggctaaactcaatgagaccgcggccgcgatcctcgaactggtcgatggccaacgcgacgcggcggccatcattgacatactcaacgaacggttcccggaagccggcggcgtggatgacgacgtcgtagaattcctgcaaatcgcttatcaacagaagtggattattttccgtgagccagaataa

SEQ ID NO: 165771 - DNA, 756 bp, Enterobacter cloacae
atgcacattcgcgaaacgctctcaccgcaagagtttgagcacgccctccgggcgaaaggcgcctactatcatattcaccatccgtaccatatcgcgatgcataacggcgaggccagccgcgagcagatccagggctgggtggcgaaccggttttactaccagacgacgatcccgctgaaagacgcggcaattatggcgaactgcccggatccgcacacgcgtcgcaaatgggtgcagcggatcctcgatcacgacggcagcaacggtcatgacggcggtatcgaagcctggctacagctgggcgaagccgtggggctcagccgcgaggacttaatcagcgaacgccacgtgctgcccggcgtccgtttcgccgtcgacgcttacgttaacttcgcccgccgcgccaactggcaggaggcggcatgcagctcgctcaccgaactgttcgccccgcaaatccatcagtcgcgtctcgacagctggccacagcactacccgtggatcaaagaggaaggctatttttatttccgcagccgcctcagccaggccagacgcgacgttgaacacggtctggagctggcgaagcgttactgcgatagcgcggaaaagcagaatcggatgctggagatccttcagttcaaactcgatatcctgtggtcgatgctcgacgcgatgaccatggcctacgcgctacagcgtccgccttatcacacggtcaccgacaaagcggcctggcacacaacccgactggtataa

SEQ ID NO: 165772 - DNA, 918 bp, Enterobacter cloacae
atgtttattaaagtcctcggttccgccgctggcggtggtttcccccagtggaactgtaactgcgccaactgtcagggtttgcgcgacggtacccttcaggcgacccctcgcacccagtcgtcgatcatcgtcagcgataacggcaaagagtgggtgctgtgtaacgcctcccccgatatcagccagcagattgcccatacgccagaactgaataagaaagaggttctgcgcggcacgcatattggcggcattattctcaccgatagccagattgaccacaccaccgggctgctcagcctgcgcgagggctgcccgcatcaggtatggtgtacgccggaggtgcatgaagatctttccagcggattcccgatttttaccatgctccggcactggaacggtggcctgattcaccacccgatcgcgccgctcaccgcctttagcgtggaagcctgccctgatttgcagtttaccgctgtccccatcgccagtaacgcaccgccctattcgccgtggcgcgaccgcccgctgccggggcataacgtggcgctgtttatcgaaaaccgccgcaacggtcagacgctgttctacgcaccaggtctcggtgaacccgatgacaccatcctgccgtggcttaaaaaagcggactgtctgctgattgacggcaccgtctggcaggacgatgaactccaggccaccggcgtcgggcgcaataccggccgcgacatgggccatctggcgctcggcgatgaacacggcatgatggcgctgctggcctcgctgccggcaaagcgcaagattctgatccacattaataacaccaacccgatccttaacgagcagtcgccgcagcgtcacgcccttgcgcagcagggaatagaagtgagctgggacgggatgaacatcacgcttcaggactaa

SEQ ID NO: 165773 - DNA, 1020 bp, Enterobacter cloacae
atggcgatttttgatggtcacaatgacctgttgcttaatttatggcttcaccatcgccaggatccggtaacggccttcttctccggcattgagaagggacacctcgattatccacgcatgcagcaaggcggattttccggcgggctgttcgcgctgttcgtgccgccgcaggagtatatcgcccgcatggcgccacaatacgccagcgagccgtggcagccggtcgacattctctggcagcagctgacgatccttaagcagcttgtcgcccactccgatggccaggcgcgattgtgcctgagcgcggcggatatcgaacgctgccgtcaggataaagtgctggcgatggtggcgcatattgagggcgcgggcggttttgacggcgagggagacgatctacaggctttctataccgccggggtgcgcagcattgggcctttctggaacattgctaaccgttttggcaccggcgttaacggggcgtttcccggcagcccggacagcggcccagggcttaccgctgagggtatcgccctcattaagcacgctaacgtcctgaacatgctgattgatgtttcgcatatgaatgaaaaagcgttctgggataccgctcgtcattcctcttcaccgctggtcgccacccattccaacgcccatacgctgtgcccgcaaccgcgcaatctgaccgatcggcagctactggctatccgcgacagcggcggcgtggcaggcgtcaatttcggcaacgcgtttttgcgcgccgacggtaaacgcgatagcgataccccgctgagcacaatcgttcgtcatatcgactatcttattaacatcatgggtgacgatcatgtcgcgctgggctccgattttgacggcattacgttgcctgatgatttacacgatgtgagtggtttaccacggctaatcagcgcgttgcgtgacagcggctatgatcaatttgtgctgaataagctgctgtggggcaactggcaaaaggtattgcaaaatgtttggcaacaatag

SEQ ID NO: 165774 - DNA, 1266 bp, Enterobacter cloacae
atgtttgcactgtgtgatgtgaacgctttctatgcttcctgtgaaacggtttttcgcccggacctgaagggacgaccggtggtcgtgttgtccaataacgatgggtgcgtcatctctcgctccgctgaagccaaaccctttgtgaaaatgggtgaaccgtacttcaaacagaaagatctcttcaggcatcatggcgtggtttgtttcagcagtaattatgaactttacgcggatatgtccaaccgggtaatgaacacgcttgaagagatgtcgcctcgtagcgaaatatactcaattgatgagatcttttgcgatcttaccggcgtgcgtaattgtcgcgatctttccgattttgggcatgaaatgagagcgaccgtactgcaacgcacccatctgaccgtcggggtgggcatcgcacccacaaagacgctggcgaaactggcaaatcacgcggcgaaacgctggcagcgccagacgggaggcgttgttgatttatccaatgtggatcgtcagagaaagctgatggcggcgctacccgtcgaagacgtttggggtgtaggacgtcgcatagcgaagaagcttgagatgatggggattaagaccgtcctgcaactggcagacaccgatatccggttcataagaaaacatttcaatgtcgtgctggagagaacggtgcgtgaattacggggggaaccgtgtcttgaactggaagagtttgccccggtaaagcaagaaatcgtctgttcgcgctcgtttggcgaacgcctcaccgaatatgacgatgtacgccaggccatctgtagttatgccgcccgggcagcagaaaaacttcgcaatgagcatcagcattgccgctttatctccgtatttgttaaaacctcgcccttcgcgcttaacgagccatattatggcaatagcgcgtcggtaaaactgctcaccccaacccaggatagccgggatattatcggcgcatcagttcgttgtctggatgcggtctggaagaacggccatcggtaccagaaagccggagtgatgctgggagatttttatagccagggcgtcgcgcaacttaatctgtttgacgacaacgcacccaggaaaaacagccaaaagttaatggatgtattagaccatctgaatgctgaaaatggccgtggcacgctttacttcgcgggacagggtatacagcagccgtggcagatgaaacgggaaatgctttcaccccgctacaccacccgctttgcggatctcctcactgttaagtga

SEQ ID NO: 165775 - DNA, 447 bp, Enterobacter cloacae
atgcgggagagcattaacgttctttttgtggtgctgtcttttgtggcactgattatgctgatacgctttttcgtcaggcgtattcggcatccaacgcgcatcgttgccgatagccggggaatgaaaaaaatctcaacccatcctgtctggtttggcggctcgtcaggtaaaacctacttttatgatgagcagtatttatacgaggttataaagagcagcacccgtaaaattgagctggcgactatcataaaaattaaaccaggctcgatagtgataaataacaggcggatctggtctgtgacttatcttgagggaacccgtgaaaaacaggtgcaattttataataatctgacggtgtttaatcaaaacttcgctgcgtttttagaggcagtaaaacgcgtgaaccctgaggcagatattaaagccgtgtcattgttcaacctgtga

SEQ ID NO: 165776 - DNA, 348 bp, Enterobacter cloacae
atggctctgatccccaaaaactacgcacggctggaaagcggctaccgtgaaaaagcgctaaaaatctacccctgggtttgtggacgctgctcgcgtgagtttgtttattcaaatcttcgtgaactcacggttcaccatatcgaccacgatcacaccaataacccggaagatggcagtaactgggagctgttgtgcctgttttgtcacgatcacgaacactcaaagtacaccgaagcggatcagtatggcaccaccgttgtcgcgggtgaggatgcgcaaaaagacgtgggtgtcgccacgtttaacccctttgccgatctcaaagcgatgatgaacaagaagaagtaa

SEQ ID NO: 165777 - DNA, 1035 bp, Enterobacter cloacae
atgaaaaagatcggatttttgtcgtttggtcactggacgccgtcacctcagtccggcacgcgaaccgcggctgacacgctgctacagtccatcgatctggcggtcgccgccgaagagctgggcgcggacggggcttatttccgtgtgcatcactttgcccgccagctcagttcgccattccccttgctggctgcaataggcgcgaaaaccaaacgcattgaaatcgggacgggcgtgatcgacatgcggtatgaaaatccgctgtatatggcggaagatgctggcgcggcagatctcatctccggcgggcgattacagcttggtatcagccggggttccccggagcaggtgattgatggctggcgttattttggttacgtgccgcaggaaggggaaaacgaatctgatatggcgcgccgccacactgaggtactgcttgatgtattacgcggtgaagggtttgcaaagcctaacccacagccgatgttcccaaacccgccgggattattgcgtctggagccgcattcagaaggcttacgcgatcgtatctggtggggggctggctctaatgcaacggcagtatgggcggcaacactggggatgaacctgcaaagctcaacgctgaaagatgatgaaaccggcgagccgttccatattcagcaggcaaaacagatccgtgcctaccgacaggcctgggctgaggcagggcatacccgtcagccacgcgtttcggtcagccgcagtatttttgccctgatggacgatcgcgaccggatgtatttcggttcaagccgcaatgaaagcgacagcgtgggctatctggatgagaaaacgcgggccattttcggacgcagctatgccgcagagccagacaagctgattgaacagttgaaaaaggatgaagcgatcgcggaagcggatacgctgttacttaccgtgccgaatcagctgggcgtggaatacaacgcacatgtgatcgagtccatcctgaaacatgtcgcaccggaaatgggatggcgcgatcgcaatgcttaa

SEQ ID NO: 165778 - DNA, 846 bp, Enterobacter cloacae
gtgcgcatgcttttttccccggtgaacgcctccgatctcatccccatcaccggagcatatcgccatcgcacgccgctgcctgcgatagccggttatgaaggggtaggaatagtgaccgaaacgcccgccgcttatccggcgctgctgggcaagcgggtcctgccgttacgggggcagggaacctggcagcgctatgtcgactgcccggcggcgtatgcggttcccgtcccggacgacgtcgactcgctacttgccgcgcgggcgtatatcaacccgcttgccgcacagatgatgctggaccgctatcctccggtcgggaaaacggtgctgctcaccgctgccggttctgactgcgccgttctgctcgggcaatgggcacgccaggcgggcgcagaggcggtttacgggatccatcgctcgcccgtgcacgctcaacgtctggctgaaatggggatcgtcccgattgcgcaacatgatacgaccgccgtcaacgctgccgccgcgcaagcggaggtggtgtacgacgccacgggcggcagtctggcggagacgatcctgagcgtgatgcccgaaaccggcacctttgtctgctacgggctactctccgggcagaccttccggcagcagcggccgttgccgcgcgtggcgtggtttcacattcgtaactatctggacgcgctgagcgctgaggcgtggcaggcggagtttcggcgcatctggcctaaactgcgcgccagccagtgcagcgatgtcaccctctacccgctgtcggaatggcagcgggcagtgggcaactatcgcgaagcgggaagaacgggtaagcccatgctgtcgatggacaattaa

SEQ ID NO: 165779 - DNA, 1041 bp, Enterobacter cloacae; identical to SEQ ID NO: 117783

SEQ ID NO: 165780 - DNA, 363 bp, Enterobacter cloacae
atgttttactggattttattagctctggcgatcgtcgctgaaattaccggcaccttgtcgatgaaatgggcaagcgtgagtgagggcagcaccggttttattttgatgctggtcatgattacgctttcctatattttcctctcttttgcggttaaaaaaatcgcgctgggcgtggcatacgcattgtgggaaggtattggtattttattgattacgctgtttagcgtcatgttatttgatgaaaccctgacgacaatgaaaattgccgggctgacgaccctggtcgcaggtatcgtgctgattaaatcgggtacacgcaaaccggcaaaacagcagaaggagcagacccatgcagcagtttga

SEQ ID NO: 165781 - DNA, 330 bp, Enterobacter cloacae
atgcagcagtttgaatggatccacgcggcctggctggctttcgccatcgttctggaaattattgccaacgtctttctgaagttctccgacggttttcgtcgtaaagcctacggcctgttatcgattgccgcggttctgggggcgtttagcgccctgtcacaggcggtgaaaggcatcgatctgtccgtggcctatgcgctgtgggggggcttcggtattgccgccaccctggcggcaggctggattatgttcgggcagcgtttaaacaataaaggctggatagggctggtattactgctcgccggtatgatcatgattaaactggcctga

SEQ ID NO: 165782 - DNA, 822 bp, Enterobacter cloacae
atgcgtaaatctgttgtgttgttactgggaacgtttagcctttttgctggcttttcacatgcggatgatggcgacgatgacgccattagcgccaaagaggtaaagacgctgttttttggtcatgacgatcgtacgcgtgtcaccgatcctaccgaatcgccctgggatgccatcgggcaactggaaaccgccagcggcaatttatgtaccgcgaccctcattacgccacgccttgcgctgacggcgggtcattgcctgttaatgccgcctgaaggcaaaccggataaagcgatcgccctgcgctttgtgtcgcaaaaaggaatatggcgctacgaaattcacggtattgaggggcgggtggatccgtcgcttggcaaacgcctgaaaccggatggcgatggctggattgtgccgcccggggcggcctcctgggatttcgggctgatcgttttacgttatccgccgtccgggatcaccccgctgccgctctttgatggcgataaagccgcgctcaccgccgccctgaaagccgccgatcgaaaagtgacgcagtcaggctaccctgttgatcacctcgattcgctgtacacccatacggactgcgtggtgacgggctgggcgcaaaacagcgtactgtcgcatcagtgcgatacgctaccgggtgatagcggatcgcccctgatgttaaaaaccgataacggctggcagctgattggcgttcagagttctgcgccagcggcgaaagaccgctggcgcgccgataaccgggcgttgtcggtgaccggttttcgcgaccggctggaagccctggcgcagcagtag

SEQ ID NO: 165783 - DNA, 306 bp, Enterobacter cloacae; identical to SEQ ID NO: 117779

SEQ ID NO: 165784 - DNA, 1485 bp, Enterobacter cloacae
atgaaaaacaataactatcaacaactcacccgcaccttccagcgcctctcccgcttctcgcacctctcctccatcgccagctgggacatgttcaccatgatgccgccaggcggcagcgccgcgcgcggtgaagcgctggcggagatgagcgtcctgcaacatcagatcctgaccgataaaaaagtgggtgaatggctggcggcggcggcagacgaagatctgaatgacgttgagcaagccaacctgcgtgaaatgacacgccactaccagcaggccactttactgccggaatcgctggtggaggccaaatcgctggcgggcagcaggtgtgaacacgcgtggcgcactcagcgtccggccaacgactggcagggcttttcagccaacctgaaagaggtggtgaaactcagtcgtgaagaggcccgcctgcgcgctgaggctaaaggctgcacgccttacgacgcgctgctggatatctttgaacccgacatgaccagcgctcgcctggatgtgctgttcggcgatctgaagtcctggctgccggagctgctggcaaaggttgtggaaaaacaggctcaacgatcgttcgttccgccacagggtcccttcccgaccgccacgcagcgcgagctgggcctggaagcgatgaaaatgcttggcttcgattttaacggcggtcgtctggacgttagcgcccacccgttctgcggcggcgtgccggaagatgtgcgtatcaccacgcgttacgatgaagatgaactgctcagcgcgcttttcggcgtgatccacgaaaccggacatgcccgctacgagcaaaaccttccgcgagcgtgggccggccagcccgttgcgctggcgcgctctacggcgatccatgaatcccagagcttgttctttgaaatgcagctgggccgcagcgacgctttcctgaagcatctgcttccggcggttcatgcccgtttcggtagccaggcggcattcagcgaagagaattttattgcctggaaccagcgcgtgaagccgggctacatccgcgttgatgcggatgaagtgagctatccggcgcatgtggtgctgcgctatgagatcgagcgcgcgctaatcaatggcgaaattgaagtcgatgatattcccgctttatgggatgagaaaatgcaggcgtggcttgggttatccaccaaagataactaccgcaacggctgtatgcaggatatccactggaccgacggcggttttggctacttcccgtcttacacgctgggggcaatgtatgcggcacagctgttccatgccgccaaaactgcgctgcccgggttgcaggcatccattgccgggggcgatttctcggcgctgtttgactggctgcgtcagaatatctggcagcacggcagccgtttcagcacgtcgcagctcatcacccaggccacgggtgaagatctgaatatccgctacttccgcgaacacctgacgtcccgctacctgtaa

SEQ ID NO: 165785 - DNA, 1254 bp, Enterobacter cloacae
gtgagccgtacaacgaccgttgatatcgcgccggccagcgacattgatgatttacccgcagcaccgcagccggttcagtttattaaacgtggtaccccccagtttatgcgcgtcacgctggcgctcttctcagcgggtctcgccacttttgccctgctctactgcgttcagccgatcctgccggtcctgtcgcatgaatttggcgtgtcgccagccagcagcagtatttcgctctccatttcaaccgggatgctggcgatcggtctgctgttcaccgggccactttcggatgccatcggacgtaagcaggtcatggtaacggcgttaatgctggcctccgtgtgtaccttgctgtccaccatgatgaccagctggcacggcattctggtcatgcgcgcgctgattgggttatccctgagcggcgtggcggcggtcgggatgacctatctcagcgaggagatccacccgagcttcgtggccttctccatggggctgtacattagcgggaactctatcggcgggatgagcggacgcctgctcagcggtgtgtttactgatttctttaactggcgcattgcgctggccgttatcggctgcttcgccctcgcttcggcgctgatgttctggaaaatcctgccggaatcgcgccatttccgcccgacctccctgcgtccgaaaacgttatttatcaactttcgtctgcactggcgcgatcaagggctgccccgtttgttcctgaccggtttcctgctgatgggctcgttcgtgacgctgtttaattacatcggctatcgtctgatgctttcaccgtggcatcttagccaggcattggtgggtttgctctctgtggcatatctcaccgggacatggagttcgccaaaagcgggcgctatgaccgcgcgcttcggtcgaggtccggtgatgctggtttccaccgccgtgatgctgttcggactgctgatgacgcttttctcttccctgtggctgatttttgccggaatgctgctcttctctgcgggcttctttgccgcgcattccgttgccagcagctggattggcccacgcgcgcgccgcgccaaaggtcaggcttcgtcactgtatctgttcagttactatctcggttccagcatagccggtacgctcggcggggtgttctggcataactacggctggaacggcgtgggcggatttatcgcgctgatgttgtgcgcggcactgctggtgggcgcgagcctgcataaacgactgcattaa

SEQ ID NO: 165786 - DNA, 906 bp, Enterobacter cloacae
atgaatatcgagctgcgccatctgcgctattttgtcgccgtcgccgaagagctgcattttggtcgtgcggcggcaaggctgaatatctctcagccaccgctaagccagcagatccagatcctggagcagcaggtcggggcgcgtctgctggcgcgaaccaaccgcagcgtgagcctgacggcggcgggaaaacagtttctcgccgatagccggcagatcctgagtatggtggaggacgccgccgccagagcggaacggctttatcttggggagacgggggagctgcgcatcgggtttacctcatcggccccctttatcagcgctgtttcacaaacgctatcctcgtttcgccgtaactttccggatgtgcatattcagacgcgcgaaataaatacccgggagcagatatcgccgcttaacgaaggatcgctcgacctggggctgatgcgtaacacgcagttgcctgataccctggcgtggcaggtgatcctccgcgaaccgctgatggcgatgatcccccgggatcatccgctcgccgcgcaggacagcgtcacgctggctgaactggcgaaagagccgtttgtcttttttgacccacaggtgggtaccgggttgtatgacgatattcttggtctgatgcggcgatatggccttgtcccgactatcgcgcaggaggtgggggaagccatgacgatcattggtctcgttgccgcagggcttggcgtatcgattctcccggcctcatttaaacgggtacaactggcggaaatgcgctgggtgaagatagccgagcaggatgcagtctcagagatgtggctggtgtggtctaaacatcatgaacagagccatgcggcacagcgtttcaaagaacaattaattaccgcttctcgcgggcattatttatag

SEQ ID NO: 165787 - DNA, 1221 bp, Enterobacter cloacae
gtggttgctgatagtcagccagggcatatcgatcagatcaagcagaccaacgcgggtgccgtttatcgcctgattgatcagcttggtccggtttcgcgtatcgatctttcgcgcctggcacaactggcacccgccagtattaccaagattgtccgcgaaatgctggaagcccatctggttcaggaaacagaaattcaggagccgggcagccgtggccgtccggcggtagggctggtggtggaaacggaagcctggcactacctgtcgctgcggattagccgcggggaaatcttcctcgcgctgcgcgacctcagcagcaagctggtggtggaggaccggctggaactcccgcttaatgcagagcaaccacttctcgatgccattctgacccacatcgaccagttctttattcgtcaccagcagcgtcttgaacgtttaacggcgattgcgatcaccctgccgggaattattgataccgaaaatggcattgttcaccgcatgccgttttatgaaaacgtcaaagagatgccgctgggcgacgtgctggaaaaccacaccggtgtgccggtctacattcagcatgatatcagcgcctggacgatggcggaggcattgtttggtgcctcccggggcgcacgcgacgtaattcaggtggtgattgatcataacgttggcgcaggtgtgatcaccgacgggcgtctgttgcatgctggcagcagtagcctggtggagatcggccatacgcaggtcgatccgtacggaaaacgctgctactgcggtaaccatggctgtctggagacgattgccagcgtcgaaagcgtgctggagctggcgcaggtgcggctcagccagtcgatgagctccacgctgcacggtcaaccgttaagcgtcgaggcactgtgcgctgcggcaaggcagggcgatctgctggcgaaggacattattaccggcgtgggcaataatgtcgggcgcattctggccattatggtgaacctgtttaacccgcaaaaaatactgatcggctccccgctcagccaggcggcggatatcctctttccggcgatttccgcctgcatcaatcagcaggcgcttcccgcgtacagtaaaaacatcgtggtcgaaagtacgcaattttccaaccagggtacgatggccggcgccgcgctggtaaaagatgcgatgtacaacggctcgttactgattcgtttgctacagggctaa

SEQ ID NO: 165788 - DNA, 696 bp, Enterobacter cloacae
atgcttaagcgtttctttattactggtacggatacgtctgtcgggaagacagtcgtatcccgcgcgttacttcaggccctggcggcaagcggtaaacgcgttgcaggatacaagccggttgcaaaaggcagtaaagagacgccagaagggctgcgcaataaggatgccctggttctgcaaagcgtctcgtctctggaactgccttatgatgccgttaatcctatcgccttaagcgaagaggaaagcagcgtcgctcacagtgggcttatcaactacagcctgctttctgatggcctggcaaatctgagtgaaaaggttgaccacgttgtcgttgaagggaccggcggctggcgcagcctgatgaacgatttacgtcccctttccgaatgggtggtgcaggagcagttgccggtgattatggtcgtgggcattcaggaaggatgcatcaaccatgccttgctgacggcgcaggctatcgctaatgacggcctgccgctgattggttgggtggcgaaccgtattaacccgggccttgcgcactacgctgaaatcatcgatgtgctgagcaaaaagctgcctggcccgctggtgggcgaactgccttatctgccccgcgccgagcagcgcgaattagcgcactacatcgatctctcggctttcggcggtatgctggccgtagatcgagtcgtggcgtag

SEQ ID NO: 165789 - DNA, 1311 bp, Enterobacter cloacae
atgcaacgtcttcacgcttaccccgacatccgcgcgatgtttcgccgtctcctgattgctaccgtcaccggcgtgctggcggcgctggccgttgcggtgttccgccacagcatgtatctgctggagtggctatttctcagcaacgaaagcggaagtctggtgaacgccgcggccgcgttatcgccctggcggcgggcgctgacgcctgcgctgggtggtctggccgcgggagtgctactgtggggatggcagcgcatgacggcacaacgtccccacgcccccaccgattatatggaagcgcttgagaccggtgacggccagtttgattatggcgccagcctggtgaaatccctcgcgtcgttgctggtggtcgccagcggcagcgccatcggccgtgaaggcgccatgatcctgctcgccgccctcgccgcctccttttttgcacaacgttgtacgccgaaatccgaatggaaactgtggatcgcctgcggtgccgccgccgggatggccagcgcctatcatgcgccgctggcgggcagcctgtttatcgcagagatcctgtttggcacgctgatgctggcctccctcggcccggtggtgattgctgctgtagtggccctgctgaccacgcgcctgttaagtcccggcgcgaatacgctatatgatgtccatctcagcgagatgcttacggcggtggattatttcctgatcgttggcgtgggtctgctggctggcgtttgcggcccgctgctgatgtggctgatggcggccagccacaggctgtttctgcgtctcaaactttcaccgccgtggcagctggcgctgggtggtctgatcgtcgggctgctgtcgctgctaacgccgaaggtatgggggaatggctatagcgtggttcaggcgtttttgcagtcgccgccgctgctgtcggtgattgctggcgtctttatttgcaagctgctggcggtgctggcaagcagcgggtccggcgcgccgggaggcgtgttcacgccaaccttgttcgtcggtatggcaacgggaatgctgtttgcgcagatctttgcgctgtggtttcctggctctgagacggcgatcctgctcggactggcgggtatggcgacgctgctcgccgccacaacgcatgcgccaatcatgtcggccttgatggtatgtgagatgaccgggcagtattttttacttcccggtttgctggttgcctgtgttgtggcgtcggtattgtcgagaacgctacgccacgactcgatctacggccagcataccgccgaaagccgagagatcgatgtagtgcgctaa

SEQ ID NO: 165790 - DNA, 1149 bp, Enterobacter cloacae
atgataaaactggaaaacctcaccaaacaattttcacagaaacacggccagacgtttaaggccgtcgacaacgtcaacctgaacgtgcctgaaggggaaatgtgcgtgctgctcggcccgtccggctgcgggaaaaccactaccctgaagatgatcaaccgtctcattacgccaagcagcgggacgatcctgattaacggcgaagacaccagcggaatggacaccgtgaccctgcgccgcaacattggctacgtgatccagcagattggcctgttcccgaacatgaccatcgaagagaacattaccgtcgtgccgcgcatgctgggctgggataaagcgcgctgtaaatcccgtgccgaggagctgatggatatggtggcaatggatccgcataaattccttcatcgctatccgcgcgaaatgtccggcggtcagcagcagcgtatcggcgtcatccgcgcgctggcagcggatcctccggtcctgctgatggatgaaccgttcggcgcggtcgacccgattaaccgtgaggtgatccagaaccagttcctggagatgcagcgcaagctgaaaaagaccgtgatgctggtgagccacgatattgacgaagcgctgaagctgggcgaccgtattgccgtcttccgtcagggtcgtatcgtgcagtgcgccagcccggacgagctgttggcgaaacccgcgaatgagtttgtcggctcgtttgttggtcaggaccggacgttgaaacgcctgctgctggtatcggcgggcgacgtcaccgaccagcagccgaccattacggtacgcgaatcgacgccgctgccggaggccttcgccaccatggatgacaacgatattcgcgccattaccgtggttgatgagcacggcaaaccgctcggctttgtgaagcgccgcgaagcgcgtaacgccagcggcagctgcggggatattctgcatccgttccgcatgaccggtaaggccgaggataacctgcgcgtggtgctttctcgcctgtatgagagcaacaccagctggatgccgattgtggacgaggacggacgctataacggcgagatatcccaggattatattgcggagtatttgagttcagggcgtacgcgccgggcattaaatattcatagcgagagttaa

SEQ ID NO: 165791 - DNA, 648 bp, Enterobacter cloacae
atggagacgattcactatattctcgacaactgggactatctcttaaccctgacgctgcaacacctgtggctggtggcgctcgccgtgggcctggcgattgtgattggcgtgccgctgggcattttaattgtccgccataaatggctggcaacgccggtgctggggattgccaccattgtgctcaccatcccgtcaattgcgcttttcggcctgatgatcccgctcttttcgctgatcggtcagggcattggcgccctgcccgcgattacggcggtgttcctctattcgctgctgccgattgtgcgtaacacccacacggcgctcgacagcctgccgccgggcctgcgagaagcgggacgcggcatcggcatgaccttctggcagcgtctgcgctgggtggaaatcccgatggcgctgccggtgatttttggcggcatccgcaccgccgtggtgatgaacatcggcgtcatggcgattgccgccgtgatcggtgcgggcgggctgggcctgctgctgcttaacggtattggcgggagtgatattcgtatgttgattgcgggcgcgctgatgatttgtcttttagcgattgtgctcgactggttgctgcaccgtttgcaggtggtactgactccgaaggggattcgataa

SEQ ID NO: 165792 - DNA, 900 bp, Enterobacter cloacae
atgagactgttttccggcctgacggcgctgtgcgccgccgcgctcttcaccagccaggcgctcgccgcgccgctgatcctggcaaccaagagctttaccgagcagcacattctctcggccatgaccgtgcagtatctgcaaaagaaagggtttcaggtacagccgcagaccaatattgcaacggtgatttcccgcaatgcgatgatcaacaagcagattgatatgacctgggagtataccggcacgtcgctgatcatcttcaaccacatcaacaaacgcatgtcgccgcaggagtcatacgagacggtgaaacgcctcgatgcgaagcacggtctggtgtggcttaaacctgccgatatgaacaatacctatgcctttgccatgcagcgcaagcgcgccgaggctgaacatatcaataccatgtctgaaatggtggcaaagattgagcagatccgtaaaaccgatccggataacaactggctgctgggccttgacctggaatttgccgggcgcagcgacgggatgaaaccgttgcaggcggcctacaacatggagctggatcgcccgcagatccgccagatggatcctggcctggtctataacgcggtgcgcgacgggtttgtcgatgcggggctgatctacaccaccgacgggcgcgtaaagggcttcgatcttaaagtgctggaagacgataaaggcttcttcccgagttacgccgtgacgccagttgttcggaaagacacgctggaggctaatccggggctggaggaggcgctgaacaccctctcagcccagctcaataacgacgttatcaccgaactgaataagaaggtggatatcgaccatcagtcaccgcagcaggtcgcccgtgatttcctgcgtagcaaacagttgctgtag

SEQ ID NO: 165793 - DNA, 711 bp, Enterobacter cloacae
atgcacccattacttaaacgttcgctgctttttgtcggcgcgattatcgtggttctcgctctcctcacctggggaattggactggagacgattaaggcgcgccaggttgacctgatttacctcgggcaacagcacctgattctggtcttttcatccatgttctttgccctgctggtgggcattccaagcggtattctgctgagccgtccggccgcgcgtggtatcgccgaatatgtgatgcaaatctttaacgtgggcaacaccctgccgccgctggccgttctggcgctggcgatggtggtgattggcatcggtgataaaccggccattatcgccctctttctggcttccctgctgccgattgtgcgtaacacctatgccgggctgtgctctgttcccgcgtcgttgctggaagcggcaaacggcatcggcatgaccaaatggcagcgcctgcgtcaggtcgaactgcctaacgcctggccggtgatgctttccggtattcgcattgccactgcgattaacgtcggtaccgcaccgctggcattcctgattggcgccagcagctacggcgagctgatattcccggggatctatctgaatgacttcccgacgctgatcctgggcgcggcggccaccgccctgttcgccctgattctggatacgctgctggcggcactgggccgactactgagcccgcatctcgcgcgataa

SEQ ID NO: 165794 - DNA, 750 bp, Enterobacter cloacae
ttgctgattaaattaaagaaagaacgaacgcatcaggaggatcgtcgtcttgccctctggctgacgacctctgcgggactgctgaatgccattgcgctgggcgcgttcggtttttttccctcgcatatgacgggtaatacctcgcagttatccagcgaagtttcctccaccgatctcagcgatattcttttctttggcgccattattctgtcgtttgtctcaggcgccatcgctgcgcggattattgttatctgggggattatccataacgtcaggctggtattcagccaggttctgtttgttgaagggctattactggccggggtatccctgtacgaaatgtattttcactccttcgccacgaatcaggagattattattttcctgtgcgggttgatgggcattcataattccacctccactcagctatccggcggtcgggtgagatccacgcacatcaccggcacgctgaccgatgcgggcatttcgctggcctccgttatggtcgccatgctgcgccgggattactccaaagatacggccgcgcaaaagagtcagctcaagacccatttaactacccttttctcctttatcagcggcgggatcgcggggctgatcctgttcagagcgtttggattccacgccatgctggcgctgggcctgatgctggtactcgttgccgccttctctatcgtccgcatctcgtggcgggtacgcaaggtgcgcgccgcgctcagtcgtcaggtttaa

SEQ ID NO: 165795 - DNA, 1185 bp, Enterobacter cloacae
atgtccacactgaatcaaacctcatcccgtgatgctgagcgtgcacactggggcggtatttttgccatgaccctgtgcgtttttgtcctcattgcctcggaatttatgcccgtcagtctgctcacgcccctcgccagagatttaggggtgacagaggggacggctggccaggggatcgccctctctggtgcgctggctgtcctgaccagcctttttctttcccggcttgccgggaatatgaatcgcaaacatcttctttcaggcatgaccgtcctgatggcgctgtcagggatcattatcgccttcgccccaaacgctttgatgtatatggcaggccgggcgctgatcggcatcgccatcggcggtttctggtcgatgtctgctgccaccgccattcggctggtgcctcagcatcaggtctctcgtgcgctggcgatttttaacggcggcaacgcgctggcgacggtggtcgccgccccgctgggcagttatctcggctcgaccattggctggcgcggcgcgtttctttgcctggttcccgtggcgattgtggcgttcatctggcaatattttagcctgcccaacatgggcgggaaccagggtccgtcgccacgtaaaagcgtatttcgcctgttccaccggcctgctgtttcgatgggtctgatggcgtgcggcctgttcttcatgggacagtttgcgttatttacctatgtacgccccttcctcgaaaccgtcacccacgtcagtccttccgccttatcgctaatcctgctcactatcggtatcgcaggtttcatcggcacgctgatcgtcgcgctggccctgaatgccgcgttttacctcaccttaatggccataccgctgcttatggcgctgattgcaggggtattaatgctcaccggggacagcctgtggatcgtggccctgctgttaggtttctggggaatgctggcaactgcggcccccacgggctggtggacgtggatcgcccgtacgttaccggaagatgccgaggatggcggcgggctaatggtcgcggtgatccaactgtccattgcgcttggctcaacggcgggtggcgtggtgtttgatgcctttggctggcagagcaccttcgctttaagcggcatattactcctgagtgccgtaatactgacttttacgacgtcgcgccaccggaaataa

SEQ ID NO: 165796 - DNA, 1059 bp, Enterobacter cloacae
atgagttatgcagaatcacgaaatcctgccgcccccgtttcgatggtgacaacctgggataagaccttcgccgagagcaataaagtcgaccaccgcaaggtgacgttcgagaaccgatacgggatcaccctggtcggcgatctgtacattcccaggaacagcggcgaccagaagctggcggcgattgccgtcagtggaccgttcggtgcggtaaaagaacaatccagtggtctttacgcccagactctggctgaacaggggttcgtgaccctggccttcgacccatcctacacgggtgaaagcggcggccagccgcgtaacgttgcctcccctgacatcaacaccgaagactttagcgccgcagtggatttcctcggattacagaaagaagtcgaccgtaaccgtatcggcattctcgggatctgcggctggggtggtatggcgctgaacgcggcatccatggatacccgcgtgaaggcggtcgccaccagcgtaatgtacgatatgagccgcgcgatgggtcacggcgtgggcgacgggaaagatcgttattcagcggccgatcgccgggccgtgttgcagtatctgaacgcgcaacgctggaaagatgctgaaagcggcaccttcgcccatggcggccacgatatttatgtcgatgaaaacggtaaggtaacggcggccgggcgtattctgccggaagcattgcccgccgatccgcatccggtactgaaagagttctatgattactaccgtatgccgcgcggcttccatgcccgttccgtaaactccaccggcgcatggaccgcgaccatgccgttgtcctttatgaatatgccgctgctgagctatgccggggagatcaccatcccaacgctgattgtgaccggtgaaaacgcgcactcacgttattttgcggaagatgcgtttaaagctgtcggcagcaaacagaaagaactggtgattgttcccggtgcgaatcacgttgatctctacgataacgtcgcagggaaaatcccgttcgcgcagttcgggcagtttttcaaaaccagtctggattaa

SEQ ID NO: 165797 - DNA, 885 bp, Enterobacter cloacae
atggcgaagcgggaaaactacaatgagctgtatctgtttatccaggtggtgcgggagggaagcttcacggcagccgcgcaacggctcgggctggcacaatccgggatcagtcgatcggttcgcgagctggaagagcggctgggcgttcggcttctggtgcgtacaacgcgcaaactgtcgctgacccacgccggggagcaactttaccagaccgctggttcagcctttgatgcgctcgataccgggctgaccagactggcgcattaccgccagacgccatccggcacggtgcgcattaatgccagccagcacgccatcgaaaaatgcctgctgccaaagctcgctatcttcaaacagcgttacccggatatccgtctggaattgatgaatgagagccggttcgtggatatcattgccgagcgattcgacgcgggcgtccggcttgggccggaggtgggacaaggaatgattgccgtgcgcatcacgcccgatatggagatggctgtggttgccgctccggcgcattttcggcgctatggtttcccgcagacgcccgccgatctggatgctcatccctgcattgcctaccagtttgccgacggtaaccactatcaatgggagcttgttcaggacgggaagcatgttactcaccgcccggagggacaatgggccttttccgacagctacatggaggccgaagcggcccggctgggactcgggctggcctatgtcccggttgagctggtggctgacgatctggagcgtggcacgcttatacgcgtcttacagcgctacagcctgcggatggacggactgtacctctattatccacaccgcaacgtatccccggcgctgagagcggtgattgatacgctgaaaatttag

SEQ ID NO: 165798 - DNA, 678 bp, Enterobacter cloacae
atgacaaaaatagtgccagaatatacggtagttgacttatcacgttgggcaagaaaggaacactttgaagtatttcagggctttgctcaatctacatttaaccaaacggttcagctggacattaccgtgctgctaaagcatatcaaagaggttggctggaaattttatcctgcgattatttcccttatttctgacgtcgtaaaccggcatccggaattccgtatggccatgaaggatgatgagcttgtaatatggaatgaggttcatccaagctatacccttttccataaagaaacggagacgttttcatcgttatggagtcattacgatggaaatattcaccattttcagcgcgtttatgcagaagatgtcgcccgctatggcaatatccttgcttattggcctaaggaagagtcccgggaaaatatattcttcatatcggatattccgtgggtcagctttagcagtttcaacgtcaacgtcgctaacatgcggaatttttttgcgcccatgttcacgtttggaaaatactataaccaggatggaaaggtcttgttgcctttcgccgttcaggtccatcattctgtctgtgacggtttccatgtggccaggctgatcaacgagttacaagagttgtgtgataatttaccgcaccattcagaggcgctcaacgtgtga

SEQ ID NO: 165799 - DNA, 315 bp, Enterobacter cloacae
atggaaccgaattttacgccagaacagattgaaatgattaaccgcattgttttcgagcagatcgagatcatgcatgagaaagtagctgaaataatcgcagatacagagacggtggcgcatcagcgcctgaaggataacgggatcactatgacagatttctatcctgcaaataaaaacttcctgatgatgacacttgtacaggatctgatagataaagtgcacgggggcgataaggacctggccaaaacaatgataaccatggaagcaaaaaggctgaatatcagcgtaaacgttgaggcggacaaatcaagataa

SEQ ID NO: 165800 - DNA, 312 bp, Enterobacter cloacae
atggctgttgaaacaaaatttgttgtcgtaagaaaaggtgaagaaaaaatgacatttgccagtaagaaagaggctgacgctcacgacaaactgctcgatatggcagaagcgtttaccgactggctgttgcaaagtggaatgcagatggatgaaacgcaggcggagaaccttggtctttatctcgccgagcagaaagagtccgtgcagcatatcctgcgtaccagcaagcttcccgagctcaatgctgaaacggataaaacagcatcagatgcggacagcagcaaaaaaatccgggccgtcaaagccgcctga

SEQ ID NO: 165801 - DNA, 615 bp, Enterobacter cloacae
atgaatgacgtctcacaccgcgaatcgttcgcgttcagcgcccgggtactgggcgcgctgttttatttcgctccagacagcgagcagaccgcgccgctggtgagtgccctgaccgcaggtgactgggttcaggactggccgctggcggaggaaaatctgctgcctgtcgccagtatgtttaagaccccatcggatgaagcgttgaaagacgcctggcagcgtctgtttattggcccgtatgccctgcccgcccccccgtggggctcggtctggcttgatcgcgagtccgtgctgtttggcgattcgaccctcgcgttgcgtcagtggatgcgtgaaaaccatatcgcctttgagatgcagcagaatgagcccgaagatcatttcggaacgttgctgatgctggcggcatggcttgccgagaacggtcgcgaaacagaacgcgaccagcttcttgcctggcatctgctgccatggagcacgcgtttccttagcgtattcgttgaaaacgcggcccatccgttctacaccgcgctgggtaaacttgcccagctgacgctggcggaatggcagtccactttgctgatcccgattgccgaaaaaacgctgtaccgataa

SEQ ID NO: 165802 - DNA, 855 bp, Enterobacter cloacae
atgggaagtggatggcatgaatggccgctggtgatcttcaccgttttcgggcagtgcgtggccggcgcgttaatcgtaatgggcttcgtctggcttaaggaaaatgatgacaaggccagaatgcgcatcgtgcgcagcctgttttttctctggctggtaatgggtattgggtttatggcctcggtactgcatcttggctccccgctgcgtgccttcaactcgcttaaccgcgtgggcgcgtcagcgctgagtaatgagatcgcggcgggttcgatcttctttgccgtgggcggtttctggtggctggtgtcggttatcggtaaaatgcccccagctttgggcaaaatctggctggttgtcagccagatcctgggcatcgtttttgtctgggcgatgacccgggtctatcagattgagactgtcccgacctggtatacgggttacaccacgctgagcttcttcctgacgatggtccttgctggtcctctgctggctgcactgctgctgcgcgccgcaaacgtgacattcaaaggcactcttgccgcgtctgtcagcgtactggcacttatcgtctgcgtggcggtcgtcgtgttgcaaagcaatacgctggggacaatacagagttccatccagcaggctaacgccctgcttccggattatggttcgcttcaggtatggcgcatcgcgctgctggcggcgggtttaggctgctggatctgcccgctgattcgtcgtcaggagccaaaaacgctcggcctgtttgcaggtgtcgtgctggtggcgctgggtgaactgattggccgtgggctattttatggtctgcatatgaccgcagggttagcaattgcaggttaa

SEQ ID NO: 165803 - DNA, 618 bp, Enterobacter cloacae
atgactacccagtatggattttttattgattccagccgctgcaccgggtgtaaaacctgcgagctggcctgcaaggattacaaagacctgaccccggacgttagcttccggcgtatttatgaatatgcgggcggcgactggcaggaggacaacggcgtctggcatcaggatgtcttcgcctattacctgtcgattgcctgcaaccactgcgaagatccggcctgcaccaaggtctgcccgagcggggcaatgcacaagcgcgacgacggttttgtggtggtggacgaggatgtctgcatcggctgtcgctactgccacatggcctgcccgtacggcgcgccgcagtacaatgccgccaaaggccacatgaccaagtgcgacggctgccacacccgcgtggcggacggcaaaaagcccatctgcgtcgagtcctgcccgctgcgcgcgctggactttggcccgattgaagagctgcgcaaaaaacacggtcagcttgctgccgtcgcgccgctgccgtctgcgcacttcacgaagccgagtattgtgattaaacctaacgccaacagccgtccgacgggtgacaccaccggctacctggcaaacccgaaggaggtgtga

SEQ ID NO: 165804 - DNA, 2439 bp, Enterobacter cloacae
atgtccgaagttgaacatcacggcggtataagccgtcgaactctggttaaatctactgccataggatctctggcgcttgccgccggtgggatcgcattaccttttggtctgaaaagcgccgccgccgctgtgcagtccgctattcagcccgcagaagacaaagttgtctggggcgcctgctcggtaaactgcggtagccgctgcgcgctacgtctgcacgttcgcgatgacgaagtctactgggttgaaacggataataccggcgaggatatttacggcaaccatcaggttcgcgcctgtctgcgaggccgttcaattcgccgtcgcattaatcacccagaccgtctgaactatccgatgaaacgcgtgggcaaacgcggagaaggcaagtttgagcgtatcacctgggaagaagcgctggacaccatcgccgcgagcctgaaaagcgtggtcgaaaaatacggcaacgaagcggtctacattaactactcctccggaattgtaggcggcaacatcacccgctcctccccttatgcctcgctggtcgcgcgcctgatgaactgctacggcggcttcctcagccactacggcacctacagcaccgcgcagatcgcctgcgcaatgccctacacctacggcagcaacgacggcaacagcacatcggatatcgaaaacaccaaactggtcgtgatgttcggcaataatccggcggaaacgcgcatgagcggcggcgggatcacttactaccttgagcaggcgcgcgaacggtcaaacgcgcggatgatcgttatcgatccgcgctacaccgacactgccgcagggcgtgaagacgagtggatcccgattcgtccgggcaccgatgccgcgctggtggcaggtattgcgtgggtgctgattaatgaaaatcttgtcgatcaacctttcctcgataaatactgcgtgggttatgacgaaaaaaccctgccggaaggcgcaccggctaatggtcattacaaagcctatattctcggccagggtgatgacaaaaccgcgaaaacccctgagtgggcgtctcgcataacgggcatccctgccgatcgcatcattaagctggcccgtgaaatcggttcggcgaaaccggcctacatttgccagggctggggcccgcagcgtcaggctaacggggagcaaacgtcccgcgccatcgccatgctgccgatcctgaccggcaacgtcggcattaacggcggcaacagcggcgcgcgcgaatcgacctacaccatcaccatcgaacgcatgccgctgccggaaaatccggtgaaaacgcaaatttcctgcttcagctggacggatgccatcgtgcgtggaccggagatgaccgccctgcgcgacggcgtacgcggcaaagataagctcgatgtgccgatcaagttcatctggaactacgcgggtaataccatcatcaaccagcactccgatatcaacaaaactcacgacattttgcaggatgagaacaagtgcgaaacgatcgtcgtcatcgacaacttcatgacctcgtccgcgaagtatgccgatattgttctgccggacctgatgaccgtcgagcaggaagatatcatccccaacgattacgccggcaacatgggatacctgatttttctccagccggttaccgccccgaagttcgagcgcaagcccatctactggatcatgagtgaagtggcgaaacgcctcggaccggatatccatcagaaattcactgaaggccgtacgcaggagcagtggctgcgctacctgtacgccaaaatggtcgccaaagatccgctgctgccgtcctacgacgcgctgaaaaaaatgggtatttataagcgcaaagatcctaacggacatttcgtggcctataaaaaattccgtgacgatccggatgccaatccgctgaaaaccccgtcgggcaaaatcgagatctactccagcaagctggcggatattgcggcaacctgggaactgcaaaaagacgagaccatcaccccgctgccggtctatacctcaacctttgaaggctgggacgcgcccgagcgcagcaaattcccgctgcaactgttcggtttccactttaaagcccgtacccactccagctacggcaacgtggatgtgctccaggccgcctgtcgccaggaggtgtggcttaaccctgtggatgcggagcaacgtggaatcaaaaacggggatatggtgcgcgtcttcaacgaccgcggcgaagtgcgtattgccgcgaaagtcaccccgcgcatcatgcccggagtaagtgcgatgggccagggcgcctggcatgacgccaacatgaacggcgatcgtgtcgatcacggctcctgcatcaataccctgaccacgcaccgcccgtcaccgctggcgaaaggcaacccgcagcacacgaacctggtgcagatcgagaaggcataa

SEQ ID NO: 165805 - DNA, 306 bp, Enterobacter cloacae; identical to SEQ ID NO: 116826

SEQ ID NO: 165806 - DNA, 711 bp, Enterobacter cloacae
gtgaacaaatacgcagcgataacgctactggcaacggtactggtgggatgcgacaacaacaccgcgccgctgtcatttacgccggagatggcgagtttttcgaacgagtttgactttgatcctctgcgcgggccggtgaaggattttacccagacgctgttcaacgataagggtgaagtctctaaacgtgtgaccggcacgatgtcaacggaagggtgtttcgatacgcttgaactgcacgatctcgacgctaatacgggcgttgcgatggtgctggatgctaactactacgtcgatgcggaaacccagcagcagaaggtaaagttgcagggaaaatgtcagctggcggaactgccgtctgccggcctgacgtgggacaccgacgataacgggtttgtggttgccgcgcacagcaaagagatggaagtgaagtaccagtatgacgccgacggctacccgctgggtaaaactacagtttccggcgacaagcgtttatcggtcaagtcggtgccgtcgaaagatctgcgcaagcgcatggattatacggcggtaagcctgttgaacgataaaccgatgggcaatgtaaagcagagctgtgattacgatcgccacaataacccggtgagctgtgagctggtgatcaccgatgacagcgtcaaacctgccgttgagcacaagtacaccatcaaaaacagcattgaatattattga

SEQ ID NO: 165807 - DNA, 561 bp, Enterobacter cloacae; identical to SEQ ID NO: 116823

SEQ ID NO: 165808 - DNA, 339 bp, Enterobacter cloacae; identical to SEQ ID NO: 116822

SEQ ID NO: 165809 - DNA, 327 bp, Enterobacter cloacae
atgttcaaaacgacgctgctttttttcgcgaccgcgctgtgcgaaatcatcggatgctttttgccgtggctctggctaaagcggggcgcttccgcgctgctgctgatcccggcgggtttgtccctggccctttttgtctggctgctcaccctgcatccggccgccagcgggagggtatatgcggcctacggcggagtgtacgtctgtaccgcgctgctgtggctgcgcgttgtcgatggcgtcaggctaagcctgtatgactgggcaggcgcgctgattgccctgtgcggcatgttgatcatcgtggccggttggggacgcgcataa

SEQ ID NO: 165810 - DNA, 1215 bp, Enterobacter cloacae
atgaagattgtcggggctgaagtatttgtcacctgcccggggcgtaactttgtcacccttaaaatcaccaccgatgagggcattgtcggcctgggtgatgccacgctgaacggacgtgaactttccgttgcctcctacctgaaagatcacctgtgccctcagttgattggccgcgatgcgcaccgcatcgaagatatctggcagttcttctataaaggcgcgtactggcgtcgtggtccggtcaccatgtcagcgatttctgccgtggatatggcgttgtgggacattaaggcgaaagccgcgaacatgccgctctatcagcttctgggcggagcctcccgggaaggggtgatggtttattgtcacaccaccgggcacaccattgacgacgtgctggaagattatgcccgtcataaagagatgggcttcaaggcaattcgcgtgcagtgcggcgtgccgggaatgaaaaccacctacggcatggcaaaaggaaaagggctggcgtatgagccagcgaccaagggcgcctggccggaagagcagctgtggtccactgaaaaatacctcgacttcacgccgaaactgttcgacgcagtgcgcagtcagttcggcttcaatgaacatctccttcacgacatgcaccaccgtctgacgcccatcgaagcggcgcgattcggcaaaagcattgaagagtaccgtctgttctggatggaagatccgactcccgctgaaaaccaggagtgtttccgcctgatccgccagcacaccgtcacgcccattgcggtgggggaagtgttcaacagcatctgggactgcaagcagctgattgaagagcagctcattgactatatccgcgccaccataacccatgcgggcggcatcaccgggatgcgtcgcattgcggactttgcctcactttatcaggtgcgtaccggctcacacggcccgtcggatctgtcgccgatttgccacgccgcggcgctgcattttgacctgtgggtaccgaactttggcgtgcaagagtatatggggtattcggagcagatgctggaagtgttcccgcacagctggcgcttcgataacggctatatgcacccgggcgacaagccagggctgggcattgagtttgatgagaagctggcggcgaaatacccgtacgatccggcttatctgccggtggctcgtctggaagacggcaccctctggaactggtaa

SEQ ID NO: 165811 - DNA, 1020 bp, Enterobacter cloacae
atgaaaagcgtagtgatccaacagccggatgtgctggtgattgaagagcgtcctctcccgttgccgggcgcaggcgacgtccgcgtcaaaattaagctcgccggtatttgcggttcagacagccatatctatcgcgggcataacccgtttgcaaaatacccgcgggtaatcggtcacgagttctttggcgaaatagacgcggttggcgaaggcgtggagggcacccgactgggccagcgcgtttcggttgatccggtgatcagctgcgggcactgctacccgtgttccgttggaaaaccgaacgtttgtacttcgctggtggtgctgggcgtccaccgtgacggcggcttcagcgaatacgccgtggtgccggcgaaaaatgcctggcgcattccggatgcgatccctgaccaccacgcggtgatggttgagccattcaccattgccgccaacgtaacggggcaggcgaaacccaccgaacaggatgtggcgctgatttacggcgcaggcccgatggggctggtcaccgtgcaggcgctgaagggcgtttacaaggtgaagcaggtcatcgtggtggatcgcattgatgagcggctggagatggcgcaacgcagcggcgcagactgggttttcaacaacggcgagcagtccttacagaccgcgctggatgaaaaaggcatcaagccgacgttaatcatcgatgctgcctgtcatccgtccattttacaggaagcgattacgctggcgtctccggcggcgcgcatcgtgctgatgggcttctccagcgacccgagccagattgtgcagcaggggatcaccggcaaagagctgtcgatcttctcttcgcgcctgaatgccaacaaattcccggtggtcattgactggctggaaaaagggctgatcgaccctgaaaaactggtcacccatacatttgactatcaccacgttacagacgccatcgaactgtttgaaaaagaccagcggcagtgctgcaaagtcttgctcacgttcgaccaataa

SEQ ID NO: 165812 - DNA, 1386 bp, Enterobacter cloacae
atgactcaagcacaacctcaaagaagtacgtcagatctggtgaaagccgccgtatctggctggctgggcaccgccctggagtttatggatttccagctctactcccttggcgccgcgctggtgtttcatgaaattttcttccctgagcagtccgcggccatggcgctgatcctggcgatgggcacctacggcgcaggctacatcgcgcgtattgtcggggcatttatcttcggcagaatgggcgacagaattggccgtaaaaaagtgctgtttatcaccatcaccatgatggggatctgcaccaccttaatcggcgtcctgccaacctacgcgcagatcgggattttcgcaccggtgctgctggtgacgctgcgtattattcaggggctgggcgcgggggctgaaatctccggcgcaggcaccatgctggccgaatacgccccgcagggtaaacgcggcatcatctcctcgctggtggccatgggcaccaactgcgggacgctgagcgccacggcgatctgggccgtgatgttctttgccctcgatcgtgaagaacttattgcctggggctggcgcgtgccgttcctcgccagcgtggtggtgatgatcttcgccatctggctgcgtatgaaccttaaagagagcccggtgtttgagaaggtaaacgatgccgaagccgttgcgccggttgctgtgcaggatacctcggtcggcgcgatgtttaagagcaaatcgttctggctggcgacggggctgcgctttggtcaggccggtaactctgggcttatccagaccttccttgccgggtacttggtacagacgctgttatttgataaagcgatcccaaccgatgcgctgatgatcagctcgattcttggcttcgtctctatcccgctgctgggctggctgtccgataaagtggggcgccgtctgccatatatcatccttaacatttcagccattattctggcttacccgatgctgtcgattatcgtcgataagagttacgcgccgggcgtgattatgctctctatcatcgttattcataactttgcggtgctcgggctgtttgcgctggaaaacatcaccatggcggagatgtttggatcgcggaaccgctttacccgcatggcgatctccaaagaggcgggcggtctcgtggcggtaggctttggtccggtgctggcggggatcttctgcaatatgaccgggtcctggtggccgattgtggcgatgctggtggcgtactcgctgattgggctggtctccgctttgctgatgccagaagtgcgcgaccgcgatttgagcctggtggaagatgcagctgaacccctgcgccagagcgataccgcagcgaagcagcggaaatatggagccctgtcatga

SEQ ID NO: 165813 - DNA, 1407 bp, Enterobacter cloacae
atgagttttattaacgataactttatgattggcaatgcgagaggtgttgaactttatcgaaacgtcgcgaaagcgctgccaattattgattatcactgtcacctggacgcgaaagatatcttcgagaataaaaatctcgataatattaccgaactctggctggctggcgatcattataaatggcgcgccatgcgcgccaacggtattgacgaaaaatacattacgggcgatgccccggcggaggataaatttgcggcatgggctgaaacggtcgaagcgagctatggaaatccgctctatcactggactcatttagaacttcaccactattttaactgtgacgaaccgctgggcaggcataactggcgtgaaataatggagcactgtaatctgctattgcagcagcctgattttacgccgagggaactcattaaacgctccagggtagaagttatttgcacgacagatgctccgcttgatgatttacgctaccatcaattattgcgtgatgacgcgacgttcaacgttaaggtattaccgacctttcgtccggacgatgtttttgcgcaaaacgcggaacagtttgccgactttatcgatcgattaggtgagacgacaggatctaaaatccagacattcagcgattttgttaagggaatgagccagcgtattgcctggttccacgaaatggggtgccgaatttccgatcacggacccgtggagatccattttcagtcagcagatgaaagacaggttgaatccgtgtttgcccgaaagcgccggggtgaaaatctggacgcccgtaataatgcgattcttgacagtgccatttttattatgctggcgcataattacaggcagcataactgggcaatgcagatacacttcggtgcgattcgcaataataattcccgcatgtaccgttctttgggtagtaatactggttttgactcgctgaccgatcagtcgaatcttgcggccaatctcaaccaactcctggatgcaatggcgcaggctgaagctttgcccaaaaccattctatataacctcaacgccagctataacgatattgtcgcgacgactatcgctaattttcagactgcggaattgggcgttaaatcgccgatacagtttggctccggatggtggtttaacgacactcaacgcggaatggaaaaccagctacatagccttgcggatcaggggctattaatgaattttgtcggtatgttaaccgattcccgtagtctggtttcgtatactcgccacgattatttccgacgtattttgtgcaatatcattggtggctgggtggagcgtggtgaagttccggataataacgccatcctaacgaagatggttaaaaatatttgccatgataatgctgaaaactatttcagattctaa

SEQ ID NO: 165814 - DNA, 1539 bp, Enterobacter cloacae
atgtctcgtactgcaaaaaaaattactattccggttagtatcggctacggactaacggatattatgggcggcggtgcctttaccgttatcggtgcctggttattattcttctatacgacatttgttgggttgtcaccggttgaagcggcgtctattgttgctatagcgcgcattgtcgatgctatcgttagtttgtttatgggaagtttcactgaccatttttacaaaaactattttggtaaaaaatttggtcgccgacgtttctttttgctgatcggtgcaccgttgatgctggtctatgcattgctgtggcttgatggcatgacatacggtttttatctcgccgtctatctagcatttgaaattattgctgcaatggtactgatcccgtgggaaacgttaccgtcagaaatgacaaaagactttaaccagcggaccaaactctctacctgtcgcatgtttctttcagcgtccgggacgtttctggcgacatttattcccggattactgataggctatttcggggaaaacagcgcccatgcctacctcataaacggcgttatttttgctgtactgtttatggtatgtgtattcatctcgtggaaagtgacctgggaacgcgagttgacgccggaaatgctctccgggctggaaaaaaacacacgcccacaaacagcaggggagaagctggctgcctttggacgactttttaaggagtatggttccaccctgaaaatccgggccttcaggaaacatctcgccatctatctgctgtcgtttaccggcaaagatgtctacaacacggtatttgtatttttctgcgtgtactgtctgaatgtctcttcctcactggcaggcacgctgctgtcgatgagtattgtggggctgcccgtcacgttaattgcgggtatagggatcatcagatatgggccatcaaagctatatgtatttgcctattcactgatgttgctctgtttggggggcttctttgccgtgtaccagatccctgcgctgaataccgtcgcgacgctggtcattctggccggggtgtatcaggtggggcgctgcgtccttgagtttacaccgtggaacgtgttcccgttcattccagatatcgatgaaatggtcagccgtcagcgtcgtgagggactgtttgccgcggtaatgacattctcccgaaaaaccacggtcgctattgccacctttattgtgggtctcctgttacaaagcggcggatttgtaaaagggagccagacgcagccaaccgaagccatccacaccatcgcaatgctgatgttcatcggcactgctgccttgcttatcctggccctgtggcaggctctgacatttaacctgaacaagcgtacgcacaaaatctttgtggatgagctggatcgcctgaaagccaacggctctccccaacgcgtatccgccgaagctcgccgggtcgtggaagatttaacaggctattcctacgacaggttgtggcgtgagccgacggtccggtccggcgagcagacggtgcgcacccctgtatga

SEQ ID NO: 165815 - DNA, 1464 bp, Enterobacter cloacae
atggaaaaccgtttattacaggcgaaggcaacgcgtcctcagtacgatcgcgacagcctcaaggcacgcattgttcatttagggtttggcgcgtttcaccgtgcgcaccaggcggtgtacaccgatatactcgccgcagaacagggcagcgactggggttactgcgaagttaacctgattggcggcgaacagcagatcgccgatctgaaggcacaggataatctttataccgtagcagagatgtctgccgatgcgtggacggcgcgcgtggtcggcgtcgtcaaaaatgcgctgcatgcgcaggtcgacggccttgaaaccgtgctggcggcgctgtgcgatccgcaggtcgccattgtttccctgaccatcaccgagaaagggtattgccactccccggcaaccggacaactgatgttcgatcatccgttaatcgttgccgacatgcaaaacccccatcagccgaaatctgcgccaggcgtagtggttgaagcgctggcgcggcgtaaggcggcggggctgccagcattcagcgtgatgtcatgcgataacatgccggaaaacggccacgtgatgcgcaatgtcacctgcgcctacgcgcgcgctgttgacggcgaactggccgactggattgaagcgaacgtcaccttcccgtcaaccatggtggaccgtattgtgcccgccgtcacggctgaaacgctggataaaattgaacagctaaccggcgtacgcgatccggcaggtgtcgcctgcgagccgttccgccagtgggtggtagaagataatttcgtcgccggacgtccacagtgggaaaaggccggtgcggaactggtttctgatgtcattccgtttgaagagatgaagctgcgtatgcttaacggcagccactcgttcctggcctatctcggctacctggccggttatcagcacattaacgactgcatggaagatgaacattatcgcgcagccgcgcatgcgctgatgctgaaagagcaggcgccgacgctgaaagtgaagggggtggatttagctcactatgccgacctgctgatcgcacgttacagcaatccggccctgcgccaccgcacctggcaaatcgccatggacggtagccagaaattgccgcagcggatgctcgattccgttcgctggcaccttgtccaccagaaacccttcccgctgctggccctcggtgttgcgggctggatgcgttatgtcggcggtgtggatgagcagggtaacgcgattgaggtgagcgatccgcagctggcggtgattcaggcggcggtaaacggtagcgctgaaggcgaaagccgcgttagcgcgctgttgggcattgaggctattttcggtaacgagctgccgaaggacgcggtgtttgtggctgcggtcatgcaggcctatcaaacgttgctgcaaaaaggcgcgaaggccacggttgctgagtacgcctcccggctttaa

SEQ ID NO: 165816 - DNA, 204 bp, Enterobacter cloacae
atgatgacatacgaccgtaaccgaaatgcaatcaccactggcagccgcgtcatgattagcggcacaggccagttcggcgtgattaaagcgatccacagcgacggccttaatgccgagcaggtgcgtcgtggtaaaacggttgaagtcgaaggatgcgaaggtaagttcgaaccgattgagctgattcgcctggggatgcactaa

SEQ ID NO: 165817 - DNA, 432 bp, Enterobacter cloacae
atgtataagaaaattttgatgcctgttgatgtgtttgaaatggatttgagcgataaagcggtacgccacgcggtcaacctcgcgaaggcggaaggcgcgacgatcaccctggtcaacattctccctaacagcagccgttcgttactgcgggggttcaatgccgatattaagaagttcgaagagtatatgaccgccgagtctgataagaagatgaaggcgctgaaacggctctttgatatgtccccggacaatattgactgtgaagttcgcttcggcaacgtacgcgatgaaatcatcaagctcagcaaagaggggaaatatgatgtcattgttatcggatcaaaaaatccgagcattacaacccatctgctgggttcaaatgctgaaactattctgcgctacgccactattccggtattagtggtccgctaa

SEQ ID NO: 165818 - DNA, 687 bp, Enterobacter cloacae
atggccgctgaatcgcaacttaatcctacccagcccgttaatcagcaaatatatcgcatcttacgccgtgatattgtccgctgcctgatcccaccgggaacgccactctcagaaaaagaggtttcggtacgttttgacgtttcccgtcagcccgtacgtgaggcgtttattaagctcgcagaaaacggccttattcagatccgccctcagcgcggcagctacgtaaataaaatttcgctttcgcaggtacggaatggctgttttgttcgccaggccatcgagtgcgccgtggtgcgtcgcgccgcgtcgctcatcaacgataaccagtgctacctgctggagcaaaacctgcatcagcaacgaatcgccatcgaccgcaaacagttaaacgactttttccagctggacgacgagttccaccagaaactggcgcagatcgccgagtgccagctcgcgtgggataccgtcgaaaacatcaaagctaccatcgaccgcgtgcgctacatgagcctcgaccatgtttctccgccagagatgttgctgcgccagcatcatgatattttcagcgcgctggaaaaacgcgacgtggaagccgtagataaagcgatgacgcttcaccttcaggaaattagtgagtcagttcagttaattcgccaggaaaaccgcgagtggttcagcgaagaataa

SEQ ID NO: 165819 - DNA, 747 bp, Enterobacter cloacae
atgattattttagttaccggggcgacagcgggttttggtgaaagcatcacgcgtcgcttcgtcgccaacggacacaaagtgattgcaacagggcgtcgtcaggagcgtttgcaggagctaaaagacgagctgggtgacagcattctgaccgcacagctggacgtgcgcaaccgcgccgccattgaagagatgattgccaacctgcctgccgaatggcgtgaaattgacgtgctggtcaataacgctggcctggcactgggcatggagcctgcccacaaagccagcgtggaagactgggaaaacatgatcgacaccaacaacaaagggctggtgtacatgacccgcgccgtgctgccgggcatggttgaacgtaaccgtggccatatcattaacatcggttccaccgccggaagctggccttacgcgggcggcaacgtctatggcgcgaccaaagcctttgtccgccagttcagcctgaacctgcgcaccgacctgcacggaaccgcgatccgcgtgaccgatgttgaaccgggtctggtaggcggaactgaattctccaacgtgcgtttcaaaggcgacgacgcgaaagcggataaaacctatgaaaacgcgaatgcgctgacgccggaagatatcaccgaaaccgtctggtgggtcgcgaatctgccgaagcatgtcaacatcaatacggttgagatgatgcccgtcagccagtcctatgccggactcagcgtgcatcgcggttaa

SEQ ID NO: 165820 - DNA, 2034 bp, Enterobacter cloacae
atgtcggtcaacaatcctttttttgaaattagcctgttgccttatcaggcgccacgttttgatgcgattaacgacagccattatcgtccggcatttgatgaagcaatgcgcctgaagcgtgcagacattgacgcgattatcgcgcagcgcgccgcgccggacttcgacaataccgtgctggcgctggaaaagagcggggccatgctgtcgcgcgtgagcagcgtgttcttcgccatgacgtccgcacacaccaacgatgatcttcaggcactggacgagcagttctccaccgaactggccgggctggcgaacgatatctggctaaacgatacgcttttcgcccgcgtggaagccgtctggcaggatcgcgaggcgctggatgccgaatcccgacgactgacggaggagatgtatcagcactttgttcttgcgggcgcgcgtctgaacgccgatgaaaaagccgagctgaaagccctgaataccgaagccgccaccctgaccagccagttcaaccagcgcctgctggcggcgaacaaggcgggagggctggtggtggacaatgttcaccagcttgacgggctcagtgcggaggaggtggctgccgcggctcacgctgccgcagaaaaagggctgacggatcgctggctgatcccgcttttgaataccacgcaacagcccgcgctggcggcgctgtcgttgcgcgagacccgtaaaaagttgttcagcgcgggctgggaacgcactcagaaaggcgacgaaaacgatacgcgcgagctgatccgtcggcttaccgcgttgcgggcaagacaggcgcagctgctcggctttgacaactatgcgagctggagcattgccgatcagatggcgaaaacgccggaagccgcgctcgaattcatgcgcgggatagttcctgcggcacgcggcagggccgcgctggagcaggcggatattcagaaggtcatcgacgacgagcagggtggttttacggtacaggcctgggactgggcgttttatgccgaacgcgtgcgctcagcgaaatacgcgctggatgagtcgcaaatcaaaccctatttcgcgctcaataccgtgctggaagatggcgtattctggaccgccacgcagctgttcggtatccgctttgtcgagcgtttcgatattccggtttaccacccggatgttcgcgtgtgggagattttcgaccacacgggtgaaggcatggcgctgttctacggcgactttttcgcgcgtgattccaaagcgggcggcgcgtggatggggaattttgttgagcagtcttacgagtttgccgcgcgtccggtgatttataacgtctgcaactatcaaaaaccggcgaacgggcagaccgcgctaatctcctgggatgatgtgattaccctgttccacgagtttggccataccctgcatggcctgtttgccagccagcgctatgccacgctttcaggcaccaacacgccacgtgatttcgttgaatttccttcgcaaatcaatgaacactgggccagccatccgcaggtgtttgcgcactttgctcgtcactatcaaaccggcgaaccgatgccggatgcgctgcgggaaaaaatgctcaatgcgacccagtttaataagggttatgacatgacggagctattgagcgccgcgctgctggatatgaactggcacggcattcaggagcccgttgaagacgtggaagcctttgaagccgccgcgttgaaaaaagaggggttggatcttccagccgtaccgccgcgctatcgcagcagctatttcgcccacatcttcggcggcggctacgcggcgggctattacgcctatctctggacgcagatgctggcggacgatggatatcagtggtttgtcgagcagggcggtttgacgcgcgtgaacggacagaaattccgcgaggcgattttgtcccgcggcaacagcactgatttagctgaactttaccggaactggcgcgggcacgatccgaagatcgaaccgatgctggagaatcgcggattgagtgcgtaa

SEQ ID NO: 165821 - DNA, 669 bp, Enterobacter cloacae
atgtttgaaggcaaagacaaggatggcgacccggttggtgcgcgtgaaatcctcttccacaagggacaactgtttatcggcggcgttgccgaccctgggtttatctccgtggttgatgccaacaccatgacgctaaaagcccgaatcgaaaatgccgggaaatgggtgacggggattatttattcgccgctgacagaccgcctttatgccgccaatggcggcggtgaaattctggtgattaacccggagacgtataaaatcgaacagcgctggacgccgggagataaaaaagcgtatttgttcctgaatatggcagaagatccggccaccgggcgcctgttcgtgactgatgattcaaaagccaaaaccacactggtatttgatgagcgcagcgggaaagttatcaagcgtcttaaaggcgatgcgctgggaattaagtttaacgctgagcgcaacgaaattttcatcactcagcgcgaatccaggaaggtgttgcagcttgacgccgggagctatgctgtgaaaaacagctggacgttcaccagccatcccaacagtcttctggtaacaccggacggtaaaacgttatacgtaaccgtgaagcaggacttcaatgacgacaacacgacgaaaggcccggatagtgtggttcgtatttcattaaattaa

SEQ ID NO: 165822 - DNA, 390 bp, Enterobacter cloacae; identical to SEQ ID NO: 127270

SEQ ID NO: 165823 - DNA, 2169 bp, Enterobacter cloacae
atgatttttaaaggcagggctaatcgcgcgaaagcgcccgcagggttaattcctgcttccttctcactttcactgcttgcgctggcaatgtccgccgtcatgcacccggcacaggcggatgaaaatacgcaagaacaagagatggttgtctacggtgacgggaacgggagcgccgactcgcagcaggattatgcggtaaaaaccacgcgttcaggcaccaaaatgctgctgaccccgcgcgatatcccccagtcagtcagcgtcgtgacgcgccagcgtatgcaggatcaagacctgcaaaccattgaccaggtacttaccaatgccaccggcgtttcgtcgcagcaggttgatagcgagcgttccagctacttttcccgcggctttgaaatcaccaatttcgcctacgatgagatccccacatcaatgggcgacgcgtggaactttggcgatgcgcaggaagatactgccatttatgatcgtatagagattgtgcgtggcgcaaacggcctgatgaccggcgctggcgatccgggagcaacggtgaacatggtgcgtaaacgtgccgacagtaaaaccttcaggggcaacgtcagcgcaagttacggaagctggaacaaacagcgttatgtgggcgacatctccgcgcccctcaattccgacggcagcctgcgtgggcgcgtcgtggcaggttatcaggatcaggacagctggcttgacagatatggcaagcgcaagaaatttctctatggcgtcattgaaggcgatgtaacggaacacacgacggcctcgctgggctgggactatcagcaaacaaacacagccaacccgacctggggcggattacccagcctgtacagtaacggcagccgtacccattacgatcgcaacgtcaatacctcggcagactggacgggatactccgttgagtcgcgtaaattttttgctaacctcacccacaactgggataacggctggtcggtgcgtttcaatggaacccacggcgagcaaacgttcaatgataccctgctttatgtgatgggcaatccggacgccaccaccggagaaggcgcatcaggctggggtagtaaggatcgcggcaagcgcactctggacgcctttgatgcctacgccagcgggccttttgaacttctcgggcgtcaacatcagctgatggccggagccaactatagccgacagcacaatgctaccttcagcaaagacgggccaatggacagtgctcagattggcatcttcaacaacagctgggacggcagcgtggccgagccggagtggggcgactggtatcaaaatgcggatgatatcgtgcggcaaaaatcggcgtatacggcggcacgcctgtcgctggcggatccgttgtcgctaatcgttggcgcacgttatacccagtacagctcagatggcagcagcggcgatatgcgtaaatacaacacaaccccttacggcgggctggtgtatgacatcaacgacagcctttccgcttacgccagctatacctcaatttttgccccgcaaaccaaacgcacgaaagagggtgcatggctctctcccgtcaccggtaaaaattatgaaaccggcctgaaggcagactggatggacggtcgactgaccaccaacgttgccgtattccgcatagaacaggagaacgcgggggaggaaatcagcggggtattcgttaatggatccagcgaacaagcttatcaggcaaccaaaggcgcagtgagcaaaggggcggaatttgaggtgaacggtgccgttaccgacaatctacagcttaccttcagcgcgacccgctatgttgcccgtgattcagatggccgcttcaacagcttcgcgccgcagacgcagcttaagctgttcagccgttaccgcgtcccggcgcttccggatctgaccctaggcggcggcgtgaactggcagaatcaggtgtacaaagatgtcactggtccggacggcgagacgcagcgcctctatcagggcagctatccgctcgtcgacttgttcgcgcagtatcagctgacgaaacagctggcggtgcaggcaaacgttcgtaacctgttcgaccgcgaatactactcataccttgatgactctgccgtctatggcgaaccgcgtagcgtctcggtaagcatgagttacacattctga

SEQ ID NO: 165824 - DNA, 504 bp, Enterobacter cloacae
atgaatttgtatatgttttatgtcggcggaaatgccggtaaatccaatattgaggtccacgacatccagtttgtggcggcacgtaagcccaatgatgcctggcctgcactgcgtgaagcatggtttggtgatagtgataaaattcatatagacggctatagccgtatcacgtgggccgacggatactctgtcacgctttccccggagccgccccagtctacgaagagattatttttcgtcaatgcgggtggttacaggccggatacgcttgcagaactgcacgaatatgatctgttcgtcgccgaaaatgcccggcaggctaaggagaaagcattactaacgctactttgcggtgtcgatcaacaacataaggataatttaaaagaggttgatgattgcctgttgcttgaaaaggttggagggttgtttattcatctgacaccctgcgatacagggcaccgcgatcttccagagtggcagggatatctaccgataggcgcatga

SEQ ID NO: 165825 - DNA, 915 bp, Enterobacter cloacae; identical to SEQ ID NO: 127269

SEQ ID NO: 165826 - DNA, 747 bp, Enterobacter cloacae
gtggcggggtggttatctctgcccgctatcctgctgttaagtatcccctttatcacgctgattagcgtcacgccctggcatcatctgaagctggcctggcgcgacgacagcgccattgtcgtctctatgggactgggtgtgctggcactcggaattatcattcttattggcatgccggtggcatggtggctgtcacaagccacgggtcgaaaacgattgatcggtgaactgctggtgatgatcccactgctgacgccaccgctggcaatggggattttgctggtttcggctttcgggccttatggcgtgattggccgctggctttcactgttgggagctacgctggtaaataatccggcggcgtttgtgctggctcaggtttacggcgctttgccttattttatcgtggtgtcgcgttcggcgtttgccactgttcccaaaaatattcttgaagcgggacaaacgttgggagcttctccctggaaccgctttcgttttcttacattacccctggcattgcctgggctggcttctgccgtaacactcgcctgggttcgcgcggtaggcgagttcgggatcgtgatgatctttgcttatttcccgcagggtataccggtaaagctgtataccaatctgcaaaatgacggggtggacacagtatatactttgctatggatgctgctggtagtgacgcttcccctgccaatggtctgctttgctcttggcaaacgaatggccaggaaatga

SEQ ID NO: 165827 - DNA, 240 bp, Enterobacter cloacae
atgtttgtggaactggtttatgacaagcgaaacgtacaggggctggagggagccagggaaatcattctggctgaactgacaaaacgcgtgcaccggatttttcctgatgccagcgtgacggttaagccaatgcaagcgaacggcctgaacagcgacgccagcaaaagcgaccgtgaaaagctcaaccgcatgcttgaggagatgttcgaagagtcggacatgtggttaatacaagagtaa

SEQ ID NO: 165828 - DNA, 1266 bp, Enterobacter cloacae
atgatgaataaagccacaactctctcagctaatattacaacacgctctaactggcactggcaggataatatctggacgctgggcctttatggtacagccgtcggagcgggaacactgttccttcccgtggaaatcggcacccgtggtccggttatttttctggttatgctcctgctggggctgccgttatccctgatcccccatttactcctttgtcgtgtatatatgcgtgaagagaagactgaaaacggcacgttgccgatcttcggctccttcttcagcggaaggggtgaaaagctgatcaccctgttctattgtgtgaccttcttcccggtaaccctggtttacggggtggcgctgattaatgcgctgagtaatttactggtggagcatctgcatattaccgccctcagccgtgggccattgtcgtttatcgtggttgctgcgctgtatgtggtgcttagcaagggccgggacagagtcgtggccattatgagcgcactggcgctgccgttcgcggcatctgtactgctgatcgccgtatcacttatcccgggatggcatctgtctaacctgaccgatacggccgctgaaatgaacgccacgccgctgccggtaacgctgaaaaatatctggctgacgctgccgcttattaccttctcgttttgctgtgcgcctatggtctccccgctgagctcttactaccgggagaggaaagcggagggtgagaaaaaggcactgttcgtgatccgtatcgcctacttagctatcttcgccagtatcctctttttcgtgctgagctgcgtgctggggatcccccatgacaactttgtgcgagcgaaggcggaaaacctgaatgtgctgtcggtgatgaagggaaacggtgatttcagcctgatttaccactttgccccgctcatcgctatcatcggtatgacgaaatccttcctcggcgtaggtctgtcggtcgcacaaacgtttggtcagctggctgccagcgtatccggcaaaaaggccaacgccagcaagcggctggcctctctggcgctgttcctgctgacctatggcattgtttatgccaatccggatgtgctcagcctgattgaaatgttctgcggaccactgatcgcggtgattctgttccttatcccggcgtacctcatatacacccgcccctcgctggcagagcttcgcggcgtgacggtgtttttggttgttctgggcgggctggcaacgctgtctgcattgctctggacaatgctttag

SEQ ID NO: 165829 - DNA, 366 bp, Enterobacter cloacae
atgttgcattctcaatcctcgcgggtcggcagcattttgctgctgctgaccgcgataatagccttcgcggtggcgctatacgcctggtggacgccgcttaccggcgtcactggcaccattggcgcactgggcgtggtcattgccagcgtagtgctggcgatactgacctttatgttacgtgcggcatcgcgtcgcggggcgcgcgtttttctgattattgtcaccctgatggtgttggcgggtattgctttcgccgccgcgctgctgcaccagtacatcataacggcagtcatggtggtcggcctgattggtctgattatgctgagcagccattccgctcgttacaaccatcccgtcagaagctga

SEQ ID NO: 165830 - DNA, 2097 bp, Enterobacter cloacae
gtgcacaacgataagcattatcccttcataaaagtcagcatgacggcgctggcgctgctggtcgctccgctcgcgctacaggcgcaggataaggccgctgaagcctctcaggggacaaaggaatcactgaacattgatgcggccgatcagcaggcgcccggaaccacaaaaaccaccgacgatgcctcaaccggcagcggtgatggaaagaaagtcgcctcggccagccagccagcgacgccgctggtgcccggcaccgccacctgggacagcttccacggccagcttaacgcgcagaaatacagtcccctgacccaaattacggcggataacgtcgggaaattaacgaaagtctgggagttccataccggcgacgtctcggacggtaaaggcgatacgccagctaccgtctggtccgcaacgcccattttcgccaacgatacgctctacatcggcacgccattcgatcgcctgattgcgctggatccggggacgggtaaagagaagtggcactatgacaccaaatcgtcgcgcaaggcgctgacccagccggtgctgaaaaatcgcggcgtttcctactggcaggccaaaaatccggtgacaggtgaggcatgccagaagatggtctatatgggcaccgttgacggcaagctctttgcgctggacgccgattcaggcaaaccgtgcagcggctttgcgaacaacggcgtgctggatctgaaccagtggaataccgttaacgcgaagtatccgctctctgtcctgcaaccgccaaccgttgtcggcaaccatctgctggtgggctgggccgggaaggactgggcctatgccgaagcccctccgggcaccgtattttcagtcaacgcccagaccggtaagcttgagtggacctttgaggcgatcccggcagagatccgcaagcgtaccggtactgccaacgtctggacgcacatgtccgccgatgaggccaacgggctggtctatctcccggtctcatcgccgtctcccaactattggggcggcaaccgcgtggacgctattccgcttggcacctcgaccaccgccctggacatcaacaccggtaaagtggtctggtcccgtcagtgggtacaccacgacgtctgggattacgatatcaactccgccccgacgctgatggacatcaccgtagacggcaagcagatcccggcgctggtgcaggccaccaagcagggtttcctgtttgtggttaaccgcctgacgggggaggacgtatggccaatcgaagaacgtccggttccgcagggtgatgggtcggttcagggtgaagttctctcgcccacgcagccattcccgaccaaacccgcgccgctgctcgaccagtcgaaaaaaccggaaatctggaagctggcggatatcgtcggtggcggccagtgctcccgcctgtgggataacctgacctatgagggaatgtataccccgccaaccaccaaaggcgaaggcacgctcacctatcccgatagcgccggcggcgtccagtggggtggggtggcgttcgatccgcaaaaacagatcgctatcgtcaacacctcacatatcgtccagtacgtgaagctgtacagccgtgaggattacgataacgcagacaaagactccggcaacgaaagcggctttgccccacaggaaggcgccccgtacggtatgcgtctgctggtggcgagcaactggctgggcatgccgtgctggcaaccgccgtttggtgaaatcgtggcgctggacatgcacacgggcgatgtgaaatggcgtcgtccggttggcgcctcccagcagtatggcttcttcatgccggaaagctggggttcgcctaccattggtggtccggcagtgacggcgggcggcgtgatcttcatcggtgcttcaatggatgccaaagtgcgtgcctactcggtagagagcggtgaagagctgtggtccgatcaggccgaagctccggcggtagcgaacccgtccgtctatgaatataaaggtcgccagtatgtggccttcgtggcaggcgggaatacgatcctgaaggatcaggtgggcgatcaggtggtggtctacgccttgccggaataa

SEQ ID NO: 165831 - DNA, 591 bp, Enterobacter cloacae
atgcacacgagtaaaaccctgaaaaggctgctagccgtatcagcagttgcagcaatgttcagcaccgttggcgtacaagcccagacaaccagtgccgcgcaaactcaaactgcgggccaggctcaaccggacgccagactcagctccggcgacgagaaagcattgaaggacatggcgcaggccaatatcaacgaagttgccgccgccaggctcgccctcgacaaggcccaaaccagtgaagtgaaaacattcgcccagaaaatggtcgacgatcacggcgccgcgctgaccaaagtcaagaccgttgcccagaaaaagggcgtggagctgccgaccgaaccagacgccgcgcataaagccctgaactcaaggctggaaaaccagcgcggtgacgcttttgacaaaatgtatatggaatatgctggcgtgaaggaccacgagaaggtgctgtcgaagcttaagagcgacgccagtaaaatcgacgatccggatgtgaaggctctggccaacgagcacactccggtcgttgagcagcatctgaagtccgccgagcagatgtcaacgcgtgctggcgcatcagccgataaataa

SEQ ID NO: 165832 - DNA, 279 bp, Enterobacter cloacae
atgaaaaaagcactattagggagtgtattggctttaacagtagcaagcttcggcgcgtctgcggcagatatgatttccaaggatgaagcgcaccacttcaagcttgaatatcttggtaatgtatctgtaggggcttcaggtggacaaatttcttcaccttcagatcttcatcaaaaactctcaaaactggcagacgagaagggcgggaaatactacgtcatcattgctgcccgcgagcatggccctaacttccaggccgtcgcagaagtctttaaataa

SEQ ID NO: 165833 - DNA, 174 bp, Enterobacter cloacae
atgaacgttgacgcactgacgcaaaaggcagaagaagaaatttcagcgcttataaccaaaaaaatttcagagttacgtaaaaaaacagggcaggaagtgtctgaaattgagtttatcgctcgtgaagccatgacaggcctcgagggatatgaggtaaaaatcaaacttatttaa

SEQ ID NO: 165834 - DNA, 990 bp, Enterobacter cloacae
atgaaactcgcggtatatagcacaaagcagtacgacaaaaagtatctgcaacatgttaacgagacgtacggtttcgatcttgaatttttcgactttctgctaactgaaaagacggctaaaaccgcccacggctgcgaaggcgtgtgtatcttcgttaacgacgacggtagccgaccggtgctggaagagttgaaaaaacagggcgtgaaatacattgccctgcgctgcgcgggctttaacaacgtcgatctcgatgccgccaaagagctgggtctgaaggtcgttcgcgtcccggcctattctccggaagccgtggcagaacatgcggtcgggatgatgatgtcgctcaaccgtcgtattcaccgtgcctatcagcgaacccgtgatgctaacttctctctggaagggctgaccggctttaccatgtacggtaaaaccgcaggcgtcatcggtaccggcaaaattggcgtggccgcccttcgcatcctgaaaggatttggcatgcgcctgctggcgtttgatccgtacccaagcgccgctgcgctggagctgggcgtggagtatgtcgatttgaaaacgctcttctcgcagtctgacgttatctccctgcactgtccgctgaccccggagaactatcatctgcttaaccagtcggcgttcgatcagatgaaagacggcgtgatgatcatcaataccagccgcggcgggctgatcgactctcaggcggctatcgaagcgttgaaaacgcaaaaaatcggcgcgttgggtatggatgtgtacgagaacgaacgcgatctgttctttgaggataaatctaatgacgtgatccaggacgacgtgttccgtcgcctgtctgcctgtcacaacgtgttgttcaccggacaccaggcgttcctgaccgccgaagcgctgatcagcatttcggaaaccacgctggggaatttgcgtcaactcgaaaagggcgaagcgtgcccgaacgcgatagtgtaa

SEQ ID NO: 165835 - DNA, 2640 bp, Enterobacter cloacae
atgaagggtaaatacaaagccgcaattgcgctattactgctgctatttcttgtgccgctgacgctgctgatgacgctcgcccagtgggtacccacgctcgccgggatctggctccccgttggaacgcgcatcgcgtttgaaaaaagcccacggctcacgcgtcacgccctgatcatccccgatctccgctatctggtagaagagtgtgaaattgcccgcgtggaaaacgtgactctgtcacaccccagccgctgggatctggatattggcgcacttgaacttaactctgtctgcctgagcaaattaccgcaatcggcgccatctacggtggcgccgaaaacgctggcgcagtggcaggccatcctgcccaacacctggctgaccatccatcgctttaccctttctccctggcagcagtgggagggtgagctgcatgcctcactgacgccagcccgccaggacatcacctataacggcaagcaggtgagcattaaggggcagttgcgcggccagaccctctccatcagccagttcgatgtgcaactgccggatcagccgcagcccgtgaagctggtcggtgaatttaccctgccgctggtgccggacggcgtgccggtgaaagggcatacggtcgcgacctttaacgtgccacagttatcctcgctggtcgatgccgatctggactgggaggacaatcagggccagctggtggtcatggcgcgggacaaccccgatccgctgctcgatttaccgtggcagatcaccgctcagcagttgaccatcagcgacggacgctggaactggttagcctccggcgtgccaatgagcggacgcgtcggactgaaagtggataactggcagcaggggctggagaaagccaccttcacggggcggctcaacgtgctgacccagggggatgcgggtaagggcaacgcggtgctgaatatcggtcccggctcgctcagtatggataacagcgctatgccgctgcacctgagcggggaagccaagcaaaacgatctgatcctgtatgccaggctcccggcgatgctgaccggcagcctttacgatccgcagcttacgtttgaacccggcgctttattgcgctcgcgcgggcgcatcatcgactcgctggatatcgatgagatccgctggccgctggcgggcgtgaagctcacgcagaagggcgtggacggccgcctgcaagccattctgcgggcgcatgaaaacgaaatgggcgattttgagctgcatctggacggccaggctaacgactttttaccggacaacggtttgtggcagtggcgctactggggtaaagggaacttcacgccgatgaacgcgcgctgggatgtccggggaaccggggagtggcgcgacaacgttatcgaactgaccgatctttccacggggttcgacaaattgcagtacggtacgatgctggtcagcaagccgcgcctggtgctggatcacccggtgcgctggtcgcgggacccggataaccccacctttagcggcgcgctcgcgcttaacgccgggcaaacaagcttttcaggcggaagcgtgctgccgccgtccgttttgaccttcagcgttgacgggacagacccgacggtgttccagtttaaagggaacctgcacgcggacgacatcggcccggtccaggtgaatggacgctgggacggcgaacgccttcgcggtcaggcctggtggccaaaacagtctcttacggtgtttcagccgctgatcccgccagactggaaaatgaccctgcgcggcggcgaaatgtacgcgcaggtggctttctctgcggcgcccgatcaggggtttgaggccggggggcacggggtgctgaaagcgggcagcgcgtggatgccggataacgaaatcaacggcgtggattttgttctgccgttccgcttaagccagggtacctggtcgctgggcacgcgcgggccggtaacgttacgaatcgacgaggtgaaaaacctggtcacagcccgaaatatcaccgcggatctccagggcgattatccctggaccgaagcgaacccgctcctgctcaccaacgtgaaggtggaagcgctcggcgggaaaatcaccatgcagcagttgagaatgccgcagcatgatccggctttactgcgcgtggataatatttcctccagcgaactgataagcgcggtgaatccgaagcagtttgccatgtccggcccggtgagcggcgcgctgccgttctggctggacaatgaaaaatggatcattaaagatggctggctgaccaacccggggccgatgacgctgcgcatcgaccaggacacggcggatgccattgtgaaagacaacatggttgccggggcggcgatcaactggctccgctatatggaaatttcgcagtcgtggacaaaactcaatgtggataatctgggtgtgttaaccatgcaggcggccattaaaggcaccagccgcgtcgagggcaaaagcagtttcgtaaacctgaattacacccatgaagagaacatttttaccctctggcgcagcctgcgctttggggacaatctgcaaacatggtttgagcaacatgcggcgataccccttctccgcggttcgacaggcaaggaaagtgaggaacaacaatga

SEQ ID NO: 165836 - DNA, 192 bp, Enterobacter cloacae; identical to SEQ ID NO: 116796

SEQ ID NO: 165837 - DNA, 318 bp, Enterobacter cloacae
atgaaacgattagctctgatcttactggcgctggggatgaacgttcacgccgccacgcttacgctcaacgatgcgcgtgcccaggggcgcgtaggggaaaccctgagcggctatcttgcgcccgttcagcacgacgctgaaaccctggcgctggtgaaccgtatcaacgccgcacgcacggaaagttaccagcagctggctgacagtaataatttacccgtcgacgaggtggcgaaaatggcgggacaaaagctggtggcccgcgcgcagccgggtgagtacgtgatgggaattaacggcaagtggctgaaaaaatag

SEQ ID NO: 165838 - DNA, 1500 bp, Enterobacter cloacae
atgtccgaatcacatgtcgccatcctgccgggcgtgcagcagtttttagatcgccagcacggcctgtggatcgaagggcgtcaggcggcatccgatagcgaaaagcgtctgaacgtctacaacccggcgaccggagaggttattgcctctaccgccgatgccagcgtcgatgatgtcgatcgtgcggtgatgtctggctggcgcgcctttgtcgcccgaagctgggccggacggctgccggcagagcgggaacgcatcctgctgcggtttgcggatctggtggaacagcatggcgaagagctggcacagctcgaaaccctggagcaggggaaatcgattaacatttcccgcgccttcgaggtgggctgcaccctgaactggatgcgctacacggcagggctgaccaccaaaattgccggtaaaaccctcgatctctcgattccactgccgcagggcgcgcgttatcaggcgtggacgcgtaaagagccggtgggagtcgtggcggggattgtgccgtggaacttcccgctgatgattggcatgtggaaagtgatgcccgcgctggcggcaggttgctccatcgtgatcaaaccgtctgaaaccacgccgctcaccctgttacgggtggcggaactggcgagcgaggcggggatcccggagggtgtgttcaacgtggtgactggcagtggcgccgtctgtggcgcggcgctgacctcgcacccgcgcattgccaaagtgagctttaccggttcgacggcgacgggcaagcagattgcccgcgcggcggcggacacgctaacgggtgtgacgctggagctgggcggcaaaaacccggccatcgtgctgaaagatgccgatccggcgtgggtgattgaagggctgatgaccggcagcttcctgaaccaggggcaggtctgcgcggccagctcgcgcatttatattgaggctccgctgttcgacacgctggtcagtgggtttgaacaggccgtgaaatccctcagcgtcgggccgggcatgtcgccggaggcgtttatcaacccgctggtgtcgcgcgcccactgcgataaggttcaggcgttcctggatgaggcgaaggcgcacaatgcggagctgatcgccgggaaccgggggccagacggcaaaggttattacgtttcgccaacgctggtggtcaacccggataatcatctgcggctgacgcgtgaagaggtcttcgggccggtggtgaacctggttcgtgtggccgatggggaagaggcgcttcagctggcgaatgacactgaatatggcttaacggccagcgtctggacgcagaacatcagtaaagcgctggcgtataccgacaggttacaggccggaaccgtgtgggtgaacagccacacgctgatagacgccaacctgccgttcggcggcatgaagcagtccggcaccgggcgcgatttcggccccgactggctggacggctggtgtgaaaccaagtcggtgtgtgtgcggtattaa

SEQ ID NO: 165839 - DNA, 144 bp, Enterobacter cloacae
atgggcattttttggctgcacaatagtgcacaaatttgcacaatttttttgatgctgtttatgccctttccgccctgtggcggcgcggtctgcccccagatcgggaaatgcacaaaaaacgaagcaaatgtcgcgcgcaggtga

SEQ ID NO: 165840 - DNA, 504 bp, Enterobacter cloacae
atgacattagacgccaacaccctgcaaatcatcagtaacgctattgtgctactcggcgttatcgttgccatctggacgatcgtctacaacgtccgtaccgcaaagaaaactcaaaccgctaattttcttttcgaaagccgccaggatacgcagtacatagagtcgctacatgtccttaagcaagtgcatcgttcaggaaaatctttccgctcttacgtctttccatgcgacggcaacaagatcaccgaagaggaaatgatcgaacgccgcaagtttcagtacatcctgaacttttacgaaagggttgccgtaagtatccgcgaaggtatttataacgagcagatgatcaagcggacgtcatacaccaccgtgatagaaacctacgatattgccgaaccccttatcaaagccatcagggaacacatcaaatcagagacgacctatcaagagttcgaatggctggtgaagcgctggaaagctaaaccgcttaagaaaaataaataa

SEQ ID NO: 165841 - DNA, 702 bp, Enterobacter cloacae
atgagctatctgggaagtaaagcggcgagcggggtttatcagaagattattgctgaaatgcccccgcatgatacctacattgaaacgcatctggggggcggtgctatcatgctgcgcaagccaccggccaggcacaatatcggcattgataaggatgaggaagcgctgacgaatttcatggaacgtgaggggtacgggcagatcccaaaccttcaactggtaaaccgtgacgcagtagacgttctggaaaaattctttctctacccacccagcgcgggcaaccgcgtattgctgtacgtggatcctccgtaccttcatgaaaccagaaccagcaacgcacgttaccgctgtgagtaccaggttgcagaccatgtgcgcttgctaacctgtctgaaatccctaccacccgagatccggattatactgtcaggctacccgtcgcagctctatgaggagcttttaccgggctggcgcagtaaagaatttcaggccatgacacgcggcggcgtgcgaacagaaaaaatctggatgaactaccctgaaggggccgcatattcccacaagtttgccggaaaagattacaacgatcggcaccgtataaagcgcaaagctgagcgctggcgcgcaaaatatgcagcccttccgcctgctgaacgactggcaatcatggtggcgctaaacgaggtcgatgcagggcagtaa

SEQ ID NO: 165842 - DNA, 225 bp, Enterobacter cloacae
atgatttcgcttcatgatggagatgcctctttcgcctcatcttttacgaaggttgtttattctgaggatggcaaacagtgcttttcggctgggtttaagccaaccaaaggtaaaaaattcgttgtcctcctgttgggtgaggtggataaaacagcgattgattatgatcttgaagctgcattaaaccggcttggcttttaccggaaagaagataaccggttatga

SEQ ID NO: 165843 - DNA, 309 bp, Enterobacter cloacae
atggcaaaaatctatatcgctggcccgatgagcggtttgcctggactcaatcggcaggcttttaaccgtgctgccgggcacgtagtgcgacgcggaaacgttgcccttaatccggcgattttgccggatggattagagcaggcggaatacatggatatttgcttcgctatgttgcgttgtgctgacgggatcttcttgctggatggctggcagcagtctgccggagccagggcagagcgcgcgcttgctgaaaagttagggttggatattcagcaccaactgattgatcggctggaggggggatcatga

SEQ ID NO: 165844 - DNA, 249 bp, Enterobacter cloacae
atgagtaacgtagcgaaacttcaattaggtttttcaccgctgactaaaaaaattcagttggcaaagatgcgcgatgatggggaagggcgccgccttcgcgttggtagcgatcctggtcgtgatgtgactaacgaagctgcgcaattagtttggcagttggttatgtctgagggcggcgaaatcggctggaacctgtcggacggtagccgcatggttttgaaggctgagaaagtggggcacgcatcatga

SEQ ID NO: 165845 - DNA, 213 bp, Enterobacter cloacae
atgaccagacgtgatcaatatagcttcattttgcatgtccttttacctgctatcgaaaatgaaggattaaccattaaaacccgccgtgatggtgagttaaccctttcagccagcggatcagtaaccgttaattttattagcaacctgcgacagcactgcattgacgaattgcagcgctcttccgttccttcttctccttacggttatttataa

SEQ ID NO: 165846 - DNA, 204 bp, Enterobacter cloacae
atgagccagttagtgcaattaagccgccactcttatttatatcgtggcttcacgattcaaaagtgcccgcgtaatccatttacgtttaagcactcttatcgtatttccagcaatggcgattattacgggcgtgactttgctttagcagaagccatgcgcacggttgatcagatgtataagcaagggggcagtaatgcacgatga

SEQ ID NO: 165847 - DNA, 282 bp, Enterobacter cloacae
atgaaagacaaatacccagagggctacatcgaattgcgtcaccctgtggacgcggtgccaactccgaaatttgccgaaatgatcggtaaatccgccaacgcggtgggcgatatggtacgcgacggtaagttgccggttgtccagatgaagaacccggaagctgttacaggtcgttcagaaaactggatctacatcccggaatttaaccgcgctatgcgtgacgcctatttcaaccgcccgaaagagcagcgcgacgcctggttactgtggatcggtctttga

SEQ ID NO: 165848 - DNA, 396 bp, Enterobacter cloacae
atggattacagcaagctaagcgactttgaaattaacaaacgagtttccatttgcattcatccagatataaaaaactggaattgttatgacgtttctggaagggcgtgtttcgtgataaacgagggcacaccaaagcgcgtgcaatatggtttttcatttacaagcgatccggcagacgcatggccgatcattgttggtcacaagctaagcctgatcaatgcggacaacgagtggctttgcgttcctgatgataccgcggttgatgggaccactggcgacgatgttcagatgatttattccggcgatgggcatgttcacgccaacccacttagagcagcgatggtcgtattccttactctacaggagtcagccaatgctcaggataatccagcctaa

SEQ ID NO: 165849 - DNA, 654 bp, Enterobacter cloacae
atgcttcgtttcaatttagacaaaaagcttttttcaatgatattgcttatgtcattgatattcttcttaccaattatcttatcaagtcactattacgttgatgatttaggtcgttctatttacggatattcaaagtggtctgataacggcaggcctcttgctgatcttttattcctatctttgagctttgggcctcagttgccagacatatctccactaccgcaattgcttgccttgggcatcttatcgctgagcgtttacttttctgcaaaagcatttctcactgaatttgatgggtacgttgctgccatcatttcaatggttgcaatttcaagcccattcttgttggagaatatatcatataaatacgatgctttcccaatgtcgatatccgtattgtgtgcaataattccttttgcattcaaatcggtagaattaaaaaaacaatttctatattgcttcacttctgtaattttaattttgtgcatctatcaggcatcaattaacatatatataatattcgctattttatacgtattaaatatattcagattaggtgaaactcgcaatggattgttatcaatagtagcatccattggcggattaggtattagttatattatatattcaactttcatttcccatattttttag

SEQ ID NO: 165850 - DNA, 1047 bp, Enterobacter cloacae; identical to SEQ ID NO: 127267

SEQ ID NO: 165851 - DNA, 159 bp, Enterobacter cloacae; identical to SEQ ID NO: 121217

SEQ ID NO: 165852 - DNA, 801 bp, Enterobacter cloacae
atgaacagaatatacctgcagaaaatggaacattttggaaacaacatatataacaaaacctcatctaaactaaaaagtagacttgtaaaaaaccccaaacatgaatgggttagatgtgacaaagcatataaacccattatttcaaagaaaaaatataataaagctcaagatataattcagctccgatccatacatttgactaatgaagagcttttagaaaagctaaaacaaaaattggaatctaatggaaaactatcaggatttatcattgatgaagatgatacaggcccttcatcttctgtttacagaacccgatttggtggtcttttaagagcatatactttgattggttataagccagaacatgattacagttatctccaaataaatgaagcactaagatcattttactcaggtataattgaggattttaaggggaggattttaaaaagtaactgctatatagacgaatataaatatgccccaatgctttacatcaatgatgagcttttaatttccgtccttattactaaatgcatacatatgaaatcaggtaaacttagatggaaggtccggtttgataactcacagaaagcagacataacaattgttatacgaatggattcacaaaatatttcgcctcttgatttttatatcataccaaagatagaaaacgaatatagtaaaatgtgcatgacggaaacaaacaacattcgattagatctctatagatttgataatctggataaacttctacaaattattactcgcatgaaagtgagggaactatatgctgcctga

SEQ ID NO: 165853 - DNA, 450 bp, Enterobacter cloacae
atgaaaacgaaagtccaactgtcattcatgatgttcgttgaatggtttatctggggcgcatggtttgtgccgctgtggctgtggctgagtaagagcgggtttaccgccggggaaattggctggtcgtacgcctgtaccgcgattgccgcgatcctctctcccatcctggtcggctcgctgacggaccgtttcttcgccgcccagaaagtgctggccgtgctgatgttcgctggcgcgattctgatgtatttcgcagcacagcaaacccagttcagcaccttcttcccgctgctgctggcctactccctgacctatatgccgaccatcgcgctgaccaacagcatcgcctttgcgaacgtcgatgacgtggaggctgatttcccgcgcatccgcgtgatgggcaccatcggctggattgcctccggcctggcgtgcggcttcctgccgtaa

SEQ ID NO: 165854 - DNA, 276 bp, Enterobacter cloacae; identical to SEQ ID NO: 77241

SEQ ID NO: 165855 - DNA, 762 bp, Enterobacter cloacae
atgaagaatcatttccctatttggattggagttgtttcggtagcatctgtcattgggtatgcagtgtttttgatttttttttcttggccgataacctcgatttctgaaccgggggtttttggagatagctttggtgttctaacatctttgttttctgcgttagcttttgtttgcgttgtatggactttaaattatcaacgagaggaatttaaacttcaaaagcaagagttggcggaaagtaaaaaagaaatcgcaaagcaaggattcgagaattctttttttcaaatgttgaaaatacagaatgatattgttgaggggattacatatgagaagataggcatgatggaaaaagatgagttcaagggaagagatgccttgaaggaactttcgataaaacttcactctcaaataaaatctcttgcaaaaaatgctattgatttagatagagttaaacattcttatgaagcattctttaacgaggatgggcataggttggctcactacttcaggtttttatataacattttcaggttcttatcagaggcggatattgataataaaatgctatatgctcggttggtcagagcccaaatatctaatcaggagttgtttttactttactataactcattgaccccggcgggcagaaaattccaaaattacattcatgagtttaatttaatggataacttattggttaatgagttggtatgtgagtctcatcaggatttccttcctgaagtaaacttttatcgcgaataa

SEQ ID NO: 165856 - DNA, 171 bp, Enterobacter cloacae
atgcgcatgatgaattcaaacacgatggcgatcatcacaccgccaaacagcacccacagcgtggcctccgactgggacggcaccaccctgtcatacacctgcatggaaaagaccatgccggagagcgccagcacgttggcgaccagcgccaccagcattatgtcgctgtaa

SEQ ID NO: 165857 - DNA, 813 bp, Enterobacter cloacae
atgaaaattgcaataggaatttcaacgttaaatgatggtatttatcaagtacaagaaaagataagatcattacctgaaaatattattgttataatttcacatcagatatccgacgagaaaaattatccagaaaacataattacctatccaaatgcaataataaaaaagtcctttgtcaaaggattaagcaaaagtagaaatgtccttcttgagcaagcaataatattaaacattgattaccttttgataagtgatgatgatgttttctatttaaatgaagggttattacagcttgaagatttcttaaataagcaaagcgttaactcacattatcaatttcaaagctgcactgaagatgggatactaaggaagaaatatccgcactcgttaaaaaaaataaatcgtcttgatagctttaaaatttcctcgattgaaatgtgcttgaatataaaaaatatcataaggaacggagcacgttttgatgagcgatttgggttaggggcaacttatcaggcgggtgaagaacctatttttattaatgatctgttaaaatcgaaggaaagaatcttctttgtccctataaccgtaacagttcatcctatagaaagttctggcaataaaatattcacaagctcagaatcactggctgatagaggggctatatttatcaggtgtggtggttatacgcttggattaatctatttatttgctttctggatgcggaagtttctcttttcaaaagtattaatagaaaataagataaaacctttttctgctttgcttattttacttaaaggatatttttcagtatga

SEQ ID NO: 165858 - DNA, 564 bp, Enterobacter cloacae
gtgaaactgattgatattttggtgcgggaattgccagagcgtggcggttggcctgaaacagcatcaacggccacacaagacagcgatggggaaatttgcttttcctctggtggaaaacacgagtattgcattacttcgtggaaaggagggaaatggacaggtgatggctttatggcagaacacgcaatcgactatgaaatatccatcatcagtcgcgaacaatacgaggcagcacttgcatccagcaagccagaatgggatggcgagggattgcctccggttggtagtgagtgtgagattgtcgataaagatggcctgttaaggtatggacatggggaaagcggagaggtcattgctcatatcgaaaacactgctgtgattcgtatgagctacgctcttggttgcttcaatgctggattccttcgccctatccgctcagaggcagataagaagcgagacagcatcatctcaatgatagagaaagcttacaaagattgcccacatagcgatgcagtaccacaggcaatctatgaagctatagcagaacacatccgcatcgactag

SEQ ID NO: 165859 - DNA, 372 bp, Enterobacter cloacae
atggaatcacacagcctcacactcgatgaggcctgtgcatttctcaagatatccagacctaccgccaccaactggatacgcacaggccgccttcaggcaacacgcaaagacccttccaaacccaaatccccatacctcactacacggcaagcctgcattgcggcgcttcagtctccgctgcatactgtcggcgtgagcgcgggtgatggcattcaagaggaaacgaaatgtcactcttccgcagaggtgaaatatggtacgcatcgtactcgctcccgggcgggaagcgaattaaggaaagccttgggacttccgacaaacggctcgctactgagctacatgacaagcgcaaagctgaattgtggcgagtag

SEQ ID NO: 165860 - DNA, 1377 bp, Enterobacter cloacae
atgtacatttcaaaaaatgaaagatatctttcattaattattatagcattttacttgccatttttattatctgatttaccttttagagacgacctgagcaggacttattggggttttgttgggctgtctcaattaggtaggccattggccgacattgcttatagtttagttggatttggctatgagggtgtcaaccttagccctatgcctaaaattatagcgctatccctattattatcgtctgcaatattttcatacagaaagctattcaactccacaggagtaaccgggttactatctttatctattttctttgcaaatccatttattattcaaaattttgcgtatcagtacgactgccttccaatggctttatctattttattgtcgacagtgtctgtattatatagaccaagatccagctatttttattttcttagtgcatcattattattagctagcgcaatatcactttatcaagcatcaatatttattgcggcatctttatatttatgcaagataactatttatttttttcataataaaaattatagagatgttttgatagaatgcatgcttactcttttatcttcctttttctcaattgcatgttacatggtgattttactttttgtggaaaatggagtgtcaaaacgagctagcatcacagggctcagtggtgttattaataatatcgagttcctttgggggaaattaaataacctttaccactcagtttatatttttttcattattttgtcattggtagtattattctctctcttaaggaatgttatcctaaaaagatatgtcaagttatgtttaatattactaatacttgttgcgctgctagtctcttctttgctcccctctgtaatccttaaggaaggattcgccggaccaagggttttaatgtctatttgctcgatctttatatttctatctatcattgcaaccggaaaagaaaaatacgtatacgccatggttttatctgttttaatgatgcattccatgtctatttcatacgccttttcaggtgatattaaggcgcaatacgatagatactcgatgatatcctctcttgttttcaaagatgttgataattacgtatcttcaaattcagcaaaaatatacatttcttgcaaatcaactccatcacaaagagagatggttttctataaatacaacaatcacatagcatggctaaacccagaagaagcttgggctatcaggtttttcataagaaataatggtgaaagcagggttgtacactcatgggatgagtgcattaatacaaatggaggtaaaattattaaagaaaatgcattttataaaatggttgtaaataaaaattcttactatttcataatgaagtaa

SEQ ID NO: 165861 - DNA, 177 bp, Enterobacter cloacae
atggggattccattactgcaacaaaatccgctaattattatgaaaaacgagttggcctttacggaagtgttgggcgagcaagaaatacagataaaacaggcactattgaggttaggttacttcaaacgtcctctgcaaacgacgaaatgtctggactctttaaccttgattctttaa

SEQ ID NO: 165862 - DNA, 378 bp, Enterobacter cloacae
atgaacagggtaacggcaatcgtgatcgctgtggcgacctgtatcatcgtttctctggcatgggccgccaatcactaccgcgacaacgctatttccttcaaagaccagcgcgataaagcgacggtccgagcagaatcatctgaggcgatctccaacaacgtgatcaccacaatgaacctcatccgtgacatttcacaggctacccagaatgcaaagaacgaactggctcaaaagggcgagacacgcattgtctacatcaggcaggcgcttgaaggcgatccttgcgctaaccagcttgttccttctgccgctactgacagcctgcgggaatacgcagaaagtttacgttccggctccagtggtgccgataagcgctga

SEQ ID NO: 165863 - DNA, 489 bp, Enterobacter cloacae
atgaatacctctttgcgtaataaaattgctgccactttaggtggtggggccatagccattgctacagtcatgctgcaaggaaaagatggattagagggaagggaatatgtcccttatcgcgatgtcgttggagtgctgtctgtatgtgatggtcacactggccccgacatcattcagggtaagcgatacacagataaagaatgtgatgcgctaacgcgaaaggatttaacacgaatcgcaggtcaggttgatccgcacatcaaagtcccaaccactgaaacccaacgcgccgctatctattccttcgcctacaacgtaggtgcaacggctgccatcaattcaactctgctcagaaaactaaatgctcgcgattacgcaggcgcatgtgcagaactgaagcgatgggtttatgcgggcggtaagaagtggaagggactgatgaaccgacgtgacgttgagtatgaggtttgtacctggagccagaaatga

SEQ ID NO: 165864 - DNA, 339 bp, Enterobacter cloacae
atgagcctattccagtgtgagaattgtggttgcgtagaaaacacggcgctttcatcgcaagggttcaatggatttttcgagaagttatacgactggtcatatgctccagagcgaaagggaatgaagctgtgcagcgcgtgtggaccggtgaaatatagcgacggtgaaaatactgagtatgggaaatggcataaggtattccctcgtcaatatctcccgctaggaatgttcgagaccaacgaggtaggtaatctcgcgcataaggaaacaaagagcgatgactataagccatacataatcaagcaagagggtagctggcctaaaggagagttattgtga

SEQ ID NO: 165865 - DNA, 384 bp, Enterobacter cloacae
atgagcattgaaaccgagatagagcttggacaagttgtcgcattccccaccaagaaagaaagcctagaggatggcctggtcatccaacgcgaaggcaggaaaattatgtgtcttcattctgcggtgtgggttaacgaaaaggatagaacgttacgctgccgaaaatgcgaaacgcttatagaacctttcgattttctgatgacgctatgcgaccaagaatctcgttatatggaaagcgttaagtatcttcgtcgagaagaaaagcaacgccgacagaatatcgagaagcttattcagattgagaagaatgccaaatccagaatcagacgcgcaggtaacaaagagcctttacccctgtggcagaacgagagggttgaattatga

SEQ ID NO: 165866 - DNA, 219 bp, Enterobacter cloacae
atgagcgcagaagaagactacatcgagcgtttctctgacctcatgaaagatgcagaaagcgaaggagtcgacggcataaacatcatgatgaattacctgatggcttatgtggaggcaatgactgaggacgaagaagagcagggaattatctggcagttaggcgacaaagatctggtcatttccattgagccagcagaacaaacagcgaggtttcactga

SEQ ID NO: 165867 - DNA, 153 bp, Enterobacter cloacae
atgaaagtatcagagattaattatggcgtaattttcgatgcgctcatggcgtactacgaagtggaagaagacgactcagtatgggaaatccttaatcaggcggatgacccgattgaagagattgctaatgcgctgaaagtgatgggcgagtga

SEQ ID NO: 165868 - DNA, 189 bp, Enterobacter cloacae
atgaacaatatcgattatgcattttacgcaatcattgacgatgaggacgcgattgtttctgtgggtcatgaaaaatacggcgaagttaaggctgtattccgcaccaaagaggacgcacagcggaccattgatttgcaagatgatgcaagcggtctgcgtattgaaaaatgtgaaatcgtacaggcctaa

SEQ ID NO: 165869 - DNA, 675 bp, Enterobacter cloacae
atgaccggacgggaagcaatactctcatgcctggaaaaatacggtcatttcactgctggcatggctatccaggaatcgggcctcaccaaaaaccagataaccacagcgtcattcaagatgcgtcgtgacggagaaattaagttcagggagagaaagggcaagacgatagtctacgttgcctgcgacgacgatgacgacccgccacaggaaataaaaccaatgaacacacgagacaaaatactcaaccatcttgaaagcaacaaaccaacatctgcaagagagtttcaccagcttaccggcgcaccaaaatcccgcattacccaactactccgcgatctcacagaatcaggccagcttgaaatccacagcgtacataacggcattaagcgttatcggctgactgagcttcatgctaaccgtagccaggcgattctggactggctggatggtggcagcgaaggaacttcaggagctatctcagcagcaaccggagtagacctgcaaatgaccgcgcagattctggcatcactgagcaagcagggtgaggtgtatcgcgaatggttaggtcgagagaaggtctggctgtaccgcaagaatgcaccgtttaccttcggctgcgctaatcagatgactgcatttatcaaccagagattgagagaggtgcgatgtgtttaa

SEQ ID NO: 165870 - DNA, 141 bp, Enterobacter cloacae
atggacatggaacgtgtaacgtttgaaagcctgtttatcagcgttttccgcgacaagttcagccttagacgaacagaacttggatatcatcacccattcgtaaacagctgctttttcttctggcaggaggggaaatcatga

SEQ ID NO: 165871 - DNA, 693 bp, Enterobacter cloacae
atgaaaaaccttgtccaagcgattaacaatcgcgacagcaatgcactggctcgccttgttggagaaaacaaagagccagatcgcggagtcaacaacgaagctgaaagactggtcgatatcctgttcgacaacctcaagcagcttttcccggcatcagtcagtacagccctgaaagacccgcgtgacgaagcagctgcaaagcgccagtggattgcggcatttgcagagaacaacatccgcagcagagagcagcttaaatctggtatgcaacacgcccggtcaagtgaatcaccgttctggccttctcctggacaattcatcgcatggtgcaaagacgcagagttcaaagctggcggcctgcctgacaccaatgaactgtacgaaatggtcatggaatattgcgcccacaaaatcgagtacgaatctccagagcgttatccatggaagagtaatgcctgctactggatggtgacgaagctgtacgacctgatgcgatcgctcaatcttactgaccaagaactgagaaagcgatgtactgaagagctgcggaaaatggctcgccgcatcgaatcaggcgaagaaattcctgcgccggttgttcaaattccaaagcttcatatcccattaagcaacgataaaggcctggctaaaattgccgagcttcgtgcaaagcatcgactggggaggcactga

SEQ ID NO: 165872 - DNA, 543 bp, Enterobacter cloacae
atgtccaacgacaacaccagtaataaccagcctcacagcgcggattgtccaacggttgtccaggggttgtccataaacaataataatatattaaatactaacgtatttaatgatcgtccgagaaaatcaaatcctcttcctgataagccaaaacccataaagccagaagcagccattcagtcaccgaaaggtgataagtggggaactgctgatgacctgaaagctgctcagtggatgttttgcaaggtgcagatagtcgctccaacagccaagactcctaattggccttcctgggctaatgacataagactcgcaagagcggcgcttaatgccgaccaccgaaaaatctgcgaagtattcgaatgggcgaattcagaccatttctggagcagcaacatactgagtcctggaaagcttcgtgagaagtgggaaacgctcaatgcgcagatgcagcagccaggaagggctaaaaaatcacatgcggctaatcagccacaaactcactggaacgacaaagacgagtgggagaacaacttcctatga

SEQ ID NO: 165873 - DNA, 738 bp, Enterobacter cloacae; identical to SEQ ID NO: 162431

SEQ ID NO: 165874 - DNA, 159 bp, Enterobacter cloacae
atgaaaaaatatggcgttgaaattgttgatcgtcccaagattaaacccatcaaagagcttgatttgacagggatagagggcgaaaaacttgtcagattactgaccaaaaagattctaatccgacatgaaaaaacctttaaacggttggctgatatgtga

SEQ ID NO: 165875 - DNA, 291 bp, Enterobacter cloacae
atgcagaaaagtgatgtgttttttaaagattttaaaatcagttttatcgtggctggcttggcttttactgtcttttttgccatggcgatttttttcgaattagctatgggtgcaatatttaaaattgagccatcacaagcccgaatctctttgtttgttggttttttcatgttggttggagtgggatttttccttttctccaagaatcggctaggcaacaaagttggtgggattgtagtaacagcaatactttcagccgtttttcttagtttgaaattctattatttttag

SEQ ID NO: 165876 - DNA, 681 bp, Enterobacter cloacae
atggttaaaactccttattttaataagcgcagatggcttgagagccgacaggatgaaatcaccgagctgtatcgcactggtaaaagttggcgtgaaatagtcgaacatttgaaaaattctcatgcaatgccctttccactgacggaacccgatttttttaagtattgtgattttttacttgatgaagttggaactagccattttgaggaaaatattgagttacagcgacagctcaccgacttaaaaaagcaattttctacaatagaggaatctaaaacatctctacagcaagagaatgaaaaacttaaaggtaacaatataaaactgactgctagagtgaagcagtttattgaagaatctaaagagcaagatcagttttttgaggaacttcaagccagtaattctgaacaagccaacaaactgattcaacagatcaatttaaataaacaactggagcaatccaatactgagttatcacttaaaaatgaacagcaagcaggaaagttggaaaaaatttcaaaatatatggatacgattcaaaccgagatagataaattttcaaagtcagagcaagcacttaaacaggatgttttaaaggctaaaaatactaacttttggctgaaaatattattagtgaccgtgattgttggaatgggtctagtttttaaaattgttaattga

SEQ ID NO: 165877 - DNA, 1038 bp, Enterobacter cloacae
atgatttattacaccactggtacgaaagagctaacccataccgtattggcttgtttttcgaagggctatgattttgcggttttagttaaaccgacaaattttagtaatgcagaatccatgcttgaaaagtggaatgaccgctatggtttgctaaatacaccacaacagcaatatcgaaaattcttatccggacaaagtacattttgttgcatcgttgcgaatggcggttgttttcagaaagaaaatctaaccgaagctgatttttatcgttacttgcgtgataaatcgaaaaatgaaaataagttatatacccttagacccccgactttgcttttgctttgtcgagtaaatgacttgctgctacgcttgcccgatggtgagattatccaaaataaatatgaccatcttgattatttaaatgatcaaatttctaagcaagttaaaggcgctgaaacctttggaaagataaccctaacagtgggcgattatgtatttttgcaactgacaaaaagagccaaaagcatcaaagagttgcaggaaatcggtttaagtgaaaatactaggcatgcaacaaattttacatggcgattaaatcaagatgcctttgaagctgtgcgccagcgtggcgttaacttggtgaatagctttcaaaaaaataagtctaatactgatgtaaaagagcattttgaaaagtatcttctcagtctagagggatacattggttatcgtggtgtacgtgtgcagatcggcaaactatacggcatgttcaccgcctattttcagtcaaaaatgaatcgcagttttttaagtgcaggtggacgaaagttaaacctaagctatgtccgtgcttcaacgccaaaaattaaaaataatagtgaaatccatacatatttcagggccattaaagatcaagccaatcaaagttcaagagagttacttttgacttggaaaagcagtgatgacggtaagaagtttttacagcgcaaaagtcctgatggctacgtttacaacgatagttactacaaggatattgagtga

SEQ ID NO: 165878 - DNA, 138 bp, Enterobacter cloacae
atggcgttaataaccgcttggcagatgcttcgtaagggcatagtcaaggcgcacaggtgggcttttgaggtgatcgtgaggtcacaggggaatgaggtgttaaactggatttctcggcacgtcatggtgaattgctga

SEQ ID NO: 165879 - DNA, 903 bp, Enterobacter cloacae
atgaaaaatgaattaatagttaaagataatgctctgattaatgctagctacaatcttgagttaaccgaacaaaggctcattttattagcgatcatgtctgcaagagaatctggactaggtattacagcggacagtacaattgaaatacatgcaaaagagtatgccgacagatttaacgtaacaattgatgctgcatataaagctcttaaagaagcagctaatactctttttgaaagaaaattttactatacaaaacaagtacatgattacccgcaactaaaaatatatatgtttaaatctcgttgggttagtcggattgcatatgccgatgattttgcaacactagcaattacttttgctccagatgtagtaccactgattactcgactagaagaacggtttacatactaccaattcaagcagatagctcagctcaccagtaaatatgcaattcgcttgtatgaattactgattgcatggcgtgagattggtaaaatgccacttattgaattgtctgattttcggaaaaaaataggtgttgaacctgatgaatatcaaagaatggagttatttaaaaggcgtgtattagaaccggcaattaaacaaattaacggacacactgatataactgtgtcgtatgatcaacataaaaaaggacgtactatttcaggcttttcatttagatttaaacagaagcaacagcctaaaattgaaaaactgattgatccaaagcgcgacactaatactcctgatttttttatccaaatgaccgaaatgtctaagtattcacaaggaaccgaaagctaccaacagtttgctattcgtattgcagatatgcttttacaacctgaaaaatttagggaactttatccaatcttagaaaaagctggatttaagagataa

SEQ ID NO: 165880 - DNA, 336 bp, Enterobacter cloacae
atgaataaaaatacttttatcaaaaaattcttagaaacttatgtaaatacaaccacaaatcaccctgatgaatcatacgaccacatagattttgatgtaatgattagtcccaaatatgaaaatagaagctgtattgctgtattttcaggtgatcatggaatattcccgattattttagaaataacagataacccataccatatggaacttggatatattgatgtctttctaatttcaaataagccagtcagaagaagtaaaaagcaacgtgacttattgaagttaattatgaaatatctacaagaaaatagtttgctgaaatttagtcatgactaa

SEQ ID NO: 165881 - DNA, 780 bp, Enterobacter cloacae
atggaattgcccaatattattcaacaatttattggaaacagcgttttagagccaaataaaattggtcagtcgccatcggatgtttattcttttaatcgaaataatgaaactttttttcttaagcgatctagcactttatatacagcgaccacatacagtgtttctcgtgaagcgaaaatgttgagttggctctctgagaagttaaaggtgcctgaactcatcatgacttttcaggatgagcagtttgaattcatgatcactaaagcgatcaatgcaaaaccaatttcagcgctttttttaacagaccaagaattgcttgctatctataaggaggtactcaatctgttaaattcaattgctattattgattgtccatttatttcaaacattgatcatcggttaaaagagtcaaaattttttattgataaccaactccttgatgatatagatcaagatgattttgacgctgaattatggggagaccataaaacttacctaagtctatggaatgagttaaatgagactcgtgttgaagaaagattggttttttctcatggcgatatcacggatagtaatatttttatagataaattcaatgaaatttattttttagatcttggccgtgctgggttagcagatgagtttgtagatatatcctttgttgaacgttgcctaagagaggatgcatcggaggaaactgctaaaatatttttaaagcatttaaaaaatgatagacctgacaaaaggaattattttttaaaacttgatgaattgaattga

SEQ ID NO: 165882 - DNA, 1536 bp, Enterobacter cloacae
atgaatatgattaatgtaaaaagagggttttctctgttggaacttatattggcattaggtattggtagtgcaatggccttgttgaagtttcaggatatgaaggcatcgcaagaggactttacggcaaaaacagccggagaacagatcaggcaaattggtgaagctgttaatggatacattaacttacgctacgataaactttctacgttaacatcgagtagtagtcagagtaatgatccggggccaagaacgtgtaatgcgtcggagtgtgaaataacctaccagacactaataaatgaagggcttttgcctgtttcttattccggcattaatatctataaatcaccttataaaattttgcttaagcgaggaggaactgcaccaaactatgtgattaatggtttggttgtagctactacggcatggaaagagggtggaaaaacacgctacgatctgcttggaaaagcaatgcaaactgctggagtggatagtggtatgactcagagtacaacagttatttccgggatgcaggggcaatggcaggagtcttcttctaatttcagtaatattacgggtagtggtttacttggattcagaactggttttaatagtgcattatattccatatatttacgccgtgatggaactctccccatgacaggtgatttaaatatgggaggtaacaatattaacaatgcaaaaaatattactgcgtctggtaccggtagttttggtggcaatatcacctctggaggaaatattaatgcagctaaagaagttatcgcacataatggttatggagatactatcactttagggggcgattctgctggtaatgattatgaaataagattaagtaatggggtaaggccattaagtatttattctcctaacgctgcgaattatacaacagtattacaagtgtggaaaaacgcaaaaatacagcaacgccttgcgactaatgatcttgatcctaatgatttgccttcaggctggagtggtggtcttagaaccaatgatgtctatgctgctggaacagtaggaacaggttcgggaggaactgtaaatgcttatatgaatagtagtggtaatatttatgcatcaaatgatattaacgtaggacatcaggtcaacactcaatatgtctgggcatcaggcaatctgaactctaattacattcattcaaatggaaatattgatgctgatggccgacttaatgttggtgaatatgcttatataaatggtcaggccagcgtcgggggaggatgttcacctaatggattacagggcagaacatcagcagggcagctactttcatgtgtgaatggtgtatggactaataccacatctctaaaacgtatggtatttatgatttctggtgaaacaaagaactatggggatatctgtcaaaaataccttgataacaatggttataccgctcttggatgggttgcatcaggttctgatgcatgtacggaagatgaagaatactgtacaattgataatgtaagatgctttgcattaaaaacacaataa

SEQ ID NO: 165883 - DNA, 381 bp, Enterobacter cloacae
atgaaattactgtatggtaatggcatggaattatcagcgcaaattttcagcatccatatgtggagcggaatttttatctttcttggatcattttcttcaaaatggttatttagtaaggaatatattaattttgaggtgcaaaaaactttattagcggcattgcttaatatcgccctgaatttaattgttattccaaaatacggtgctataggagcagcaatcgtctctttgttctcctattttgtcgctaatcttttattttttgcatgtacaaaaaagaccagagggatattttatgttcaggctgaaagttttaaatatgttttcttgccctggcttttaattaaagattatggaaaggtaaaatgtcagtttcgataa

SEQ ID NO: 165884 - DNA, 480 bp, Enterobacter cloacae
atgcgtattcatcaacagaataagtcccgtaaactatatcgcagcgtcaacacaacgacgctgcatcattctaataatccaggtgctgagtatcggtgggaacgcaatcgcaaaaaagtcggagatgagctactggtaaagcgcgagacaatgcatggtagacagaagcgtggccgagactacacaccattgttttattttctgatcaaacagattggcaaaccgtggaatgaaatattcagtgaagtatgtggacgtcttgataccaccgagccggtattctggttggtcgcgctacatgagcatcagcgaagggatttagtctgcattggcgaaagcagtttttacccgggtttgtttgttgatgagaatggagttctgcaacaggtaaacccttcgattacgagaaatgatgttaaggtgacttgccgttgctgcacacacacttatattggtgaacctgtaccttggaaagattga

SEQ ID NO: 165885 - DNA, 1833 bp, Enterobacter cloacae
atgagattagaaaaagtttgcattaaaggattccgtgggattaaagaagaaataacagttcctatcaaagaacttaacgtcatagtaggtaaaaatgatgcgggtaaatcaacgattctcaaggcattggatctcttcatcaataacagaaccttttacccgcaatttttgaataacgaaactgagaaatattgtgaaatcactctatgctttttaccaaatgatgatggtattgtaatagacgacacagttttaactacttttcaaaaagaagggttcgttaatcaagatggtttgattttgtatagaaaaacttgggatgggactaaggttgggaagatttcccctgaaatatcaatacaaagacgtagttatggagataaagatttttttggaatgactgaaacccaactgataaaggcatgtaccgaagctggtattaaaacagaaaaaggcattgcaactaaaaaagatgttgaagcttttagcaatacagaaaaacgtgaaaagttattgtcttattatattgagatgaattatgaatatcattacatattcgataaagttcctactcaaggacaaaacaggattaaaaaagtcgaggcagaattaaagaaattaatgcctagatttgaatattttgtagcagactcatcgctagacgaaagtgatacaaaaatacaaaattattttagggatttagcactttctacaataaaaaatgaaattgacacttctgaatcggaaacacttatacgctcacgtttacaaaaagtattagataaaataacagctaaaataaatgcagtagtaccagcaactgagcaggtaagagctagagttgatttcgattggtcaaaaataataagcacatcatttgagtcaatctctgataaaggggctattcctcttagcaatcgaggtgatggttttagacgtatcacgatgatggcttattttgaaagccttgctgaagaagttgaacatcaaaatataatattcggatttgaagaaccagaaactttccttcatccatcagcacaagaaaatctttttgataaactctttgatattaccaaaagtggatatcaggttatcattacaacacattcgccagtcatagtagctaaatcatgtaaaagacatttacatcacgtcataaaagaaaatggtgactatcgttatcatgctgaagtagataacgttttggagatagctaatgatctaggtataaaacccgatagcactttctttccggctatagaaaaatctaaattattacttttactcgaaggtatagatgattgtacagcatttaaataccttagtaaaaagtaccatgaagaaactcttatcccaaatcatttcgaagagcttggtattttaactattcctattggggggtgtagcagtatcaagcactgggtgacgcttgatcttattaaagaattcaacaagccattttttattgtgttggattcagataaggaaagtaaagagcatgaatctccaaataaaaaagaacttgagcagatgggctttgtagaaaatgtggattttaatgtgttacgaaggagagaaatagaaaactatttcacaggaaaatctttagagaggttggttcctggttcatccctaattttagatgagtggtgtgatgttaaagcaatgtgtaaaagtcacgctttgacaataagattaggaggaaaaaaggttactcataaacatttttgttcgctaacatttgacgaattaagggaaagcttctttacccaagatggcgatgagtttttggccatatatgataggctctgtgccaaattagcaagctaa

SEQ ID NO: 165886 - DNA, 819 bp, Enterobacter cloacae
atgatctatcactatactgatttgaatgcggcaatatccatagcaaagaatgctgaggtctggctgaccgactatcgttttctgaatgataaagaagagtttataactggctatgaagtgcttttagaggccattaatgaatatcaggacttagaagatgaatatcctcaaggatttatggaggatgttatgaagtcacttacgtctattcgcgatgaaaattttcagcgtttagaacgtaataatatttttgttgcttctttcagtaatgtacccgaccttctcggtcagtggcgaaactacggaaagtattgtcttgaactggattctgaatttttcaaaaacaaagaggttgatgttttagaatgccactatctttatgatgatggtgacgctctggaatatgcaaatacgttgattgaaacccacattttaccagggttactggaaatctggcataaaaacaaaattttcctaacggttgagttgagttcactcattgatatctatgcactttcatttaaacataaggccttcgatgatgaaagtgaagtcaggtttgttttgagttgcccacctgatgatgagcggatctccttcagggcaagaggtgatattttaattccatatatccgtgtgtcatttgagcgtcatttgcttaaatctattaaaatagggccacttaacaatcaggacttagctagcgattctctctgtatgtttgctaaaagcatatcaaggaaggttcaggctgaaatgaatattcatgaatatgaattagtcattgatacttcggttataccctatcgagatatctga

SEQ ID NO: 165887 - DNA, 228 bp, Enterobacter cloacae
atgagcaatgaagcgatgaaaatggcattggcaaagcagttgacgattgctctgcaaaacctcggcgctcctgtcgaattactctgcatcgttggtagctacggagatacgcagactgactctgacattctggaagcgcttgagcagtacaacgagcgaggcacatcgatggaggtgattatcgcacctgaattcatctggaaaccaagttctggagacgcccaatga

SEQ ID NO: 165888 - DNA, 927 bp, Enterobacter cloacae
atgccacagcagagatcaacctctttgaggacaatccctctggatttagaggttaaacaagaagcggtaattaatggtattgagatgggggttcttgataacggaattccatatctcacacagagcgggcttgcaaacgtctgcggcgttcagcgattaaggattaaagaaatcactgacgaatgggcacagtcagtcgagcatggtgttttcaggaaaggtaggatgacatttattggtacataccttctgaatgaagggtttactgatgaaaaattatacattccgatcattcgaaatggtgttgagtaccatgcttatcctgatgtcgtctgcatggcaattttggaatattatgcattcgaggccaagcaagctgaaagtgaaactgctgtaagatcatatcgtgaactggcgaaaaaagggcttaaaactttcatctatgaagctctcaaatatcaaccagaggatccatggcggcattatcacgacagggtttcgctcctcaaagataaaggctcaatcccagacggctacttcatcatttttaatgaaattgcaggtatgatggttgatctaatcaacgctggcttggcaataaaccaacataccgttcctgatggaagcgtcggaagttgctgggctcgccattggaacagtcaaggtttggggcgtgaatttggcgaacgtgtagattgtgagcattattatcctgaagatttccttcaggccaggtcaaatccacaaataatcaatgcttatcctgacggggctctatccgaatttcgtcgatggttcaaacatcagtatcttacaaccaaattccccccatatatccttaaaaagtcaaatgtactcccaggtggccgagaggacgctactcgcttgatcgaggcgttcaaagtggcaggaattgaaggcaattaa

SEQ ID NO: 165889 - DNA, 282 bp, Enterobacter cloacae
atgcaggattatatagtttttgggcgcggatatgacggtgaagttaggcagtttgatgatgaccttgaatttgtacgcattgtttcaaaaccggtaatgatgaaggctggtgaagacgttccaccgggtgctaatctccaatttttcaatcttccggttagcgtgattgagttcgatcagcgccattacaacgtagcgtcagatcagcatgttcctgtagatgagctacggcgagcaatcatgcaagaaaatcctactcctgtgcctcgtagagttatttga

SEQ ID NO: 165890 - DNA, 198 bp, Enterobacter cloacae
atgatgctaatgctgaacctgagtatcggttcgagtccgatcgccacacacagaacccactacctgggacccttcggccagagagccgacattgccttaccctcatcttcctggcttgtcgccaggttttttattccaggccccgggaaccatcctcgacacgcctacttgttaaatcgtcccgagggcctgacctaa

SEQ ID NO: 165891 - DNA, 213 bp, Enterobacter cloacae
atgtccgacatctaccaaatcacgctaaccaccacatcaaaagaaaccttcactggcctgatgaaacgaagccagcctgaaatcgttaacgggttcgtagcactggcgactgatacaggtgagtggcgttacttccggcctgacagtgtggatcagttccactttgtgccggtggctgatgattcaaatgacgaggcggcagacagtaattag

SEQ ID NO: 165892 - DNA, 231 bp, Enterobacter cloacae
atgaagtcagttgaagaagtaattaatgatttgcaatcgcgagtattagcctatgaagtcatgttccaatcgattttttatgctctgcctgttgagataaaagagaaggttgtgagcacgattgaagataatttcaaagcctttgactctggaacacagagtgattcaggtaaagcaaaacttgcagcagcaaaagttatcgcttcccgtacatccggcgcaaaactctaa

SEQ ID NO: 165893 - DNA, 264 bp, Enterobacter cloacae
atgagtacattcgagagcgcaaaaaaaagccagaaagattctgactggcatagagccgatatcgttgcagctcttcataagcaaggttggtcgcttcgtcgtttgtctttgcaccatggatacaaaagtgctggggcactgaaaaacgcattggaccgaccgtggccgaaaggtcagcaaatcattgctgaagctatcggcatcgcaccagaaagcatctggcctactcgttatcataaagcattttcaggtgaatggaattaa

SEQ ID NO: 165894 - DNA, 357 bp, Enterobacter cloacae
atgctgaggcggtacgctgtagcacacgccgtgtatcagccgcggcagtgtgatgtagtcagcctgagtcttatccgcaacaatcagccgttcagctatctgcatttgatactgaggtgggcggccagtgcccaagtaaaaactcaccaacgattccgggaaaccattaagccattcaccaacccgttcaataaaatctggaacaggcagcgcgtcgtcttccagcaccactacccggcaagattgctcagcagcccattcgatagcgcgcctgtgattccagttcgcgccatggtgaccatcatcaaccagcaagtgagcatccagcagcgcagcaagccgttgcgcttgccctaa

SEQ ID NO: 165895 - DNA, 399 bp, Enterobacter cloacae
atggtgacgcagacgttgccgactgcggtctttatgctgcgcagctatttcgacactatcccggatgagatagaagaagccgcgatgatggacggcctgaaccgcctgcaaatcatcttccgcatcaccgtgccgctggcgatctcgggtctggtgtcagtcttcgtttactgcttcatggtggcgtggaatgactacctgttcgcctccattttcctgtccagcgccagcaacttcacgttgccggtggggctgaacacgctcttcagtacgccagattacatctggggtcgcatgatggcggcatcgctggtgaccgcactgcccgttgtcattatgtatgccctgtctgaacgttttattaaaagtggtttgaccgccggcggcgtaaagggctga

SEQ ID NO: 165896 - DNA, 876 bp, Enterobacter cloacae
atgagcaccttcaccaaagagcagttaatcgaaaagcttcagcacagaatttctgtcgcatcaggatttccggagtcagaaaaagcgcaaatggatcttgagctggcgcgtatcgcgctggcatcgctcgaagcggagcctgccattcatcgctggcgcagggtgaccgctgagccatacggcccttatccttggcattacggtaattttatctgcttctcaaaaccagttgatgggattgaggacgagtattattacgccgccccgccagcgccggtatctgtgcctgatggatacaggttgcagccaatttctgaatatgacgcaatgtgcgccgccatgcttcagggtgccgatcgaccacaaaacgaaccgcaaaatattccggaaaatattccagccacacagtttaagccggtagcagacctgtacggcttaacctcaccaactggcggtgaaacatcgttcactttcgacgctgttgaagctcgcgattttattgatggcgggtggtcatgtcaggagtacgtggagcttggacgctttcaggaggctgtgagcggcaaatcacctgtggttccggatggttgggtggcttgcagtgagcagatgccggaagacgagcaggaagtaattgttcagaacaagatgggataccgttatgtatcttacttcgatgagcattccggactgttttttgacatgcgtggcggtattcaaatgaactgcattgagcacatatttgttactcactggatgccactgccagcagcaccgcagcaggaggtagaaagccaaatcaggaagggcaagactgtggccagggaggagtgggaactgggggcgaggttaactaagcatagattcaaaccatag

SEQ ID NO: 165897 - DNA, 186 bp, Enterobacter cloacae
atgagcgaaaaatcgagaattacattcgccagcgttaatcaggcgaagctgccatttaatttagtgctacaggggaacgcaggaaggcctgccggaaccatcaaaatcgacaaggagcttgtgacgttcgaaggtaactttgatgaatcggcgcagatttttatcgatcatctggcacgccgttag

SEQ ID NO: 165898 - DNA, 1194 bp, Enterobacter cloacae; identical to SEQ ID NO: 40131

SEQ ID NO: 165899 - DNA, 198 bp, Enterobacter cloacae
atggatgatattttggtaacgtcagacctgaccagtcgctacaaaatttcacgcaaaaccctttggtcatggcaaagtgcagacacaatgcctcggggcttcgtatgcccgttcccaccccctgactggcccggcaaccctaaccgctggcgctctgagtcaatcaaagagtgggaggataaaaagaagataaattaa

SEQ ID NO: 165900 - DNA, 243 bp, Enterobacter cloacae
atgatgaagctgattaatcgcagtaagcaatcacctattggtcgccgcgcttgcgatgttgcgctggcagctcacttgcaaacatatggcgactatgggcgaagcaagatgaaagagacttatacggtgaaggttgaaggcgtgaaagtctgggtggaggtggtgaaccgaaaggcgagctacgtggctacagcgatgaccggcatgcgccgtctccgctccctgcccgggcaggttggttga

SEQ ID NO: 165901 - DNA, 591 bp, Enterobacter cloacae
atgggctgtgatattcatatgatggttgaggttaaacgctcaattaacggtgaagaaaaatgggttaattatgatcatttccgtaaaaatccatggtatggaaatgacgatggcgaacgggaatttgaacgtattgatttagagagttctcgtaattatgcagcattctcccaactctgcggagtcagagcctacgctgacgaaacgcctaagatatcggaaccacgcggtttacctgacgatgcttgtgagtacaccaagaaggtatcagaagaatggggatgtgatggacattctcacagttacgtcagtcttgccgaaattcgggagttcataaacaaccttactccaatgccattcaaaggaatgatttcagaaaaacaggcggcagatcttgataatggtattaaacccgattcatggtgtgggtggacaagcatgcctggctttgttttccgggaatgggaagatacggtagatgctttaaaaaatattcatgaagcgctggagaatagagctctggaattatggtggttagagaaaaatatcattcctgaaaatattcgaatagtttttttcttcgataattaa

SEQ ID NO: 165902 - DNA, 198 bp, Enterobacter cloacae
atggactttactgaagagcgtgcgggcttgatttctggggcgatcggtatggctgtggttaatcttattgcctttggagtgccaatcaatagagataaccttgtcgaagaactggaacgggcaaggcgtgaaacagggaacgtgatcgggaagggggttaatcgagatgctgcggagatcgtcaggaaggggctgtga

SEQ ID NO: 165903 - DNA, 405 bp, Enterobacter cloacae
atgagctacagcgacgttgttgcaactattgcaatgatagtatcaatcagtgcagttcccgcaagtggttatttaagctacaggtacgctataaaaggcgaaaagcgcaaagaatggaacagtatagtgaccccaatcagggatgaactgatcaatcaaattgatgcgattgataatgggaagtatctgcacgccaatatcagcagaaaggagatattaaggtttgccgatatcagaaaagacaaaaataacaacgaattactgtcggcatttgatgatttcgaactctatcattcgtttgaggaactttggttggtgaacgattttggtaaaacgtcagtcggcgacaccacacgagccctggcagcttcaaaaaaattattgaccttcatcactagggcttaa

SEQ ID NO: 165904 - DNA, 285 bp, Enterobacter cloacae
atgaactctttcgcgaaatacacaattattgactggattgtcctctttcaggtggtgctcatctggttttttatggcttacagggcagggaaatggattttcggcatagcacttcgcaaaggctggcggtggtggaatcgtaaggatgagaagttgctggctttggattccttttacgaggcgtttaaccttggggatatccagccggggaatgccatggtggtcaccactgaaagtggtatgactattcgcatccacaagccaaaggggccggataatggctaa

SEQ ID NO: 165905 - DNA, 180 bp, Enterobacter cloacae
atgtcagtcccggacgaacgtaacctttgtggttatcattcgccgtacaaggcgcgtcgcttcgcgttgcatttcatcaattacttttggcgtcagcggctgacgcgcatatttgcgctcaatctctgcaaaaatcccgttcagcacctcgctgtctggtgggataacttaaacgtttaa

SEQ ID NO: 165906 - DNA, 549 bp, Enterobacter cloacae
atgatttacggttatgcccgagtatcaacaaaccaccaggacactgaattgcaactaacggcgctcaagtcagcgggttgtgagaaaatttttgaagagcatgccagcgggaggaaatcgaatcggccggttctaaaacggctgatcgccactatgcagccgggggatgaactggtggtctggaagctggacaggataggccgcaacgttctgcatgcgctgttgatgttccagcagttacaggaaaagggtatcaacttccgcagtattaccgatggcgtggatctcaaaacagccagcggccgctataactttcgtaacatcctttccgcagcacaatatgaatctgatcttaatagcgaacgtaccttagcagggctggccgtagccagggcaaaagggcgagttggtggtcgcaggcctaagttcacggatgagcaatggcgggaaatgggggagcggatggcaaccggtgaatcacgacaaagcgtatcaaaaacgtatggagtagggctctcaactctgtataaaaagtttccagctagatga

SEQ ID NO: 165907 - DNA, 156 bp, Enterobacter cloacae
atgagtgcgaaggccggactcgaacatcgcaactatcctattgatcttaaaagattaaaatttaccacattagacatgataccatcattcataccatcagtcccgattggtgataatcgaacaatctatgtagaaacattagaccagcattattag

SEQ ID NO: 165908 - DNA, 459 bp, Enterobacter cloacae; identical to SEQ ID NO: 21260

SEQ ID NO: 165909 - DNA, 510 bp, Enterobacter cloacae
atggtcagccggaccatgggcgtgtcgcgtgcgcaactgtcactgcggattaaccgttctgccgactggcaggacaggcgctgtaaccggcgtaatgaagaagcagacgcagaaatactgtcggctatcctcaacattatcagcgatatgccgagttatggttatcgacgcgtgtggggcatcctgcgcaagcaacgtcgcacagagggacagccacctgtgaatgccaaacggctttacaggataatgagcgagcataacctgttgttgttgcatcacaaaccagagcgaccgaagcgtgaacataagggcaagatagcggtggcagaaagtggattggcccctatatttccatacactttttatcacttaacccatgactggttcgtcgccgcagatattcccgtggcgaacgataccccagtgcactatgcggatgccattcgttgtaatgttcgaaggcctccgcaaggttctttaccgctgttaacccgtcgggtttcggcatga

SEQ ID NO: 165910 - DNA, 201 bp, Enterobacter cloacae; identical to SEQ ID NO: 21258

SEQ ID NO: 165911 - DNA, 594 bp, Enterobacter cloacae
ttgctgcttgtcggtttcttctttctggagccgcagggaatcctggtcagtgcgatagcggccgctggcgcagcagtgctgtttgtggtggcgaaaagaggtcattcgatcaacaccggaaaagtcctgcgcggtgcgccatggcagatcgttattttctcactgggcatgtacatcgtggtctatggcctgcgcaatgcagggttcacggagtacctgtctggcgtgctgaatctgctggcagacaaggggttatgggcagcgacgttcggcaccggcttcttgacggcatttctctcatcagtgatgaacaatatgccgacggtgctgattggtgcgctgtcgattgacgggagtacggcgactggcgtcgtcaaagaggcaatgatttatgccaatgtgattggctgcgatttaggcccgaaaatcaccccgattggcagtctggcaactctgctgtggctgcatgtgcttgcccagaaaaatatgacaatcacttggggatattacttccgtaccggcattgtcatgactgtgccggtgctgtttgtcactctggccgcgctggcgtggcggctctctgtcactttgtaa

SEQ ID NO: 165912 - DNA, 315 bp, Enterobacter cloacae; identical to SEQ ID NO: 21256

SEQ ID NO: 165913 - DNA, 237 bp, Enterobacter cloacae; identical to SEQ ID NO: 21253

SEQ ID NO: 165914 - DNA, 864 bp, Enterobacter cloacae; identical to SEQ ID NO: 21250

SEQ ID NO: 165915 - DNA, 372 bp, Enterobacter cloacae; identical to SEQ ID NO: 21249

SEQ ID NO: 165916 - DNA, 1074 bp, Enterobacter cloacae; identical to SEQ ID NO: 21248

SEQ ID NO: 165917 - DNA, 213 bp, Enterobacter cloacae; identical to SEQ ID NO: 21242

SEQ ID NO: 165918 - DNA, 693 bp, Enterobacter cloacae
atgcaggggcaatacctggaccgcgagacagggctgcactacaatctgttccggtattacgacccggactgcggacggtttacgcagcaggacccgatagggctggcgggggggataaatctttaccagtatgcgccgaatgcgctgggatgggtggatccgtgggggttatcgtgcagaaatagctggaatgatttccagagcaaaactcgaggtgcttttgctacaagaggtcatgctgcacgggcctaccgagctactcatggaatttcaaagccagatttccctaatccggcgacatacctcgatgcaggaaaaattagtaggcatttagaactattcaagggaggggttactaagttcgtttggggtattaatcctgaatttagtcatttaggtcctccaggaggccactttgttatgccaaggaccgttgctgatgacttaattagacgttcgggtgggaacattccaaagcttgaaagattgttagggttaaatgcaggtgatctcggagacgctcctttaagagttgatattaataatccgacaggtttaagaatgccaacaggaaatgaacgaggagcaaatgaattttggttgccgggaggatatacttcaggtggtatcccagaggcggccatagatcctactccgctaaatcaattaaagatcacaccgttgaaaaattaa

SEQ ID NO: 165919 - DNA, 300 bp, Enterobacter cloacae
atgtttggccgactgcaataccgccctggcaccatggataagcaaggtcctcaaataggtatcacctcgcttgcttatcccgagcaggacttgtttacccccactggagtgctgacgtggaaccaatccgagccaggcagccagttgtcggcctttctcgaaattgttggctttaccaatggtcgcaatcagcgcgctggcggtaacagggccaataccagggatcttgccgatacgctggcagagagcattttgccgatagcactgctcaatctgcttgtcgggcactgttgcaaatag

SEQ ID NO: 165920 - DNA, 225 bp, Enterobacter cloacae
atgcagtggggtaatgtggataatgccaggggaacctactcgttcccacgggcattcaatgacacctgctttgccgtctttgccacaaataaagatgggcagggcggcgcgattgataacgcttatggttatccggtaagcaaagcgcaattctatctggccagcaaagcgaactctggcgctgataccgcatacggcatttcatggtttgcactggggtactga

SEQ ID NO: 165921 - DNA, 423 bp, Enterobacter cloacae
atgactgaacaatattactacagctattcggcgaaaggttttttctggctgtgtgaagatgagctaaaggggaatgatattcccgctgacctgatacccgtcagcgaggaagagcacgccgcactgttcctcggtcaggagcggggtaaatacattaaccatacgcctgatggaccagttctggttgaccagccggattactcgccagaagaactcattgcgcaggcggaaagcaaaaagtcacgtctgatgcagacggctaacgcagagattgctccattgcaggatgcagttgatttggggattgcgacgacaaaagaaaccgctgcactcaccgagtggaagaaataccgcgtcctgcttaaccgtgtggataccagtaaagcgccggatattgactggcctgttcccccggaggtgtag

SEQ ID NO: 165922 - DNA, 228 bp, Enterobacter cloacae; identical to SEQ ID NO: 140999

SEQ ID NO: 165923 - DNA, 192 bp, Enterobacter cloacae
atggagtcagtcacggcggtgcgctgtgtgaattctgagattttgcgggagggattggacgcgagaattgacgggagatcgggcagaagaaaggccgcattcgcgccctgttcttatctgaataaattcaatattattattcatttacaaatgcgtaataatctttccacatgctccgttatacctgagtaa

SEQ ID NO: 165924 - DNA, 447 bp, Enterobacter cloacae; identical to SEQ ID NO: 149550

SEQ ID NO: 165925 - DNA, 633 bp, Enterobacter cloacae
ttgctgagttttgaagagtgtgaggttgagtggaaaactctcgacgaggtagcttcctttaggcggggctcatttccccagccgtatggtaatagtgaatggtataacggtgaaggttgcatgccttttgttcaggttgcggatgttgccgattttggattcagattgcacagaagcaccaaacaacaaatttcgaagttagctcaatccaaaagtgtatttgttgaagcggggaccgttatcgtgtcactgcagggaactatcggtcgcgtagcgttaacgcaatatgactgttatgtggatagaacgctggcaatattcacgaaatacaaagcagcagtaaataaaaaatattttgctcatcagttaaaagcaaaatttgacctagaaaaggaatttgcaaggggaagcacattaaaaacgattacgaaagaagagttttcgaagtttcaaataccgataccaccattagaagtacagaaccgcatcgtagccctgctggataagttcgacagattgacccattcgattgaagaaggcctccctcgcgaactcgaactacgccagaaacagtacgagtactatcgtgagttattgttcagcttcccgaaactagaagccgccagcaactga

SEQ ID NO: 165926 - DNA, 1080 bp, Enterobacter cloacae
atgactgatacaactccagctaataaaatggtcggcttagaattaaataacgaatggatagtggagaaaatattgccagttggcgcaaaagcaggacttggaactggaggtaacttctccgtttcttatgaagtcaaaaataaaaatacagggaaaatggcatttctaaaagcttttgattttgaaaaaactatgcaagaagcgctatcaaatggacatgatttcatgaagattatgtcagcgttgacatctgattatcaatttgaagataaacttaacgaaatatgcatcgaaaaaagaatgcgtaatatcatcaaagttctgaataaggggcaagcagtaattgatgggcgaatagtaccttacctaataatggagttggcagaatctggagatatacggatgtatgttgaaagaacgaaggatgtaagccttgctatgaagttagggtatcttaaagatgttaccttgggcatcagacaattgcattctgctaacatctctcatcaagatttgaaaccttctaatgttatggttttcgaatcgttaaatgctaaagttggcgatttagggagagcaagcttgcaaggttttccacatcgttttgataatcttccaattacaggcgatcaaaattacgcgcctcctgaacaattatatggagtcatagcccctgaatgggtgaatagaagacaacggtgcgatatttatcagctaggatctatagtggcatttttatttaccggccgaacagttaactctctaatgagagagtttgttcctgtcgaaatagcccctcctcgttggggaggaaccggaaatcaatacgatcttgctttaccttatcttgaaaaagcatttttacaaagtttagaagtgtttgatggagttcatcctgattggttgggttctggtctaaaaaatatagttatgcagtgtagtcatccaagttatgaaattcgagggatgataaaaggaggagggattgcaaaaattgagctaggtttagataggctggttactcaattcgacttgttgattcagaagttgaaggtttatggcattagtaatagtaagtaa

SEQ ID NO: 165927 - DNA, 573 bp, Enterobacter cloacae
atggcaattacacaggcggatgttaataaagatattcgtatgttggcagatagcatagaagatgaaaatcggccattggttaatcctgtacaagctttgaagataagtatgctgtggccattgagttgcgctgctgtttatgcaattgctgtctcctgggctatatataactttacgccacatattgatcatttcgataatatgacaaccctaacaggcgagtatgggtttgtacttgcagcctgttccttagctattgtattttgtctattcataggtgcgtcactatatggtcctgcgcttgcatacctatcgctaagcgaagaagctagagataaatctctaatcataaggcgattaaaaaaagttacgttgaaggtagggggattcttcctcctctgtaacttagggatagcggttctttcaattaaattcccttctgttttagttatctcaccattctcaatcattgtgtcatttttgatcacgcaaggtgttgtaggtgccgaggctgctagatatggaattagttcaatttttggcaaagtgaataaattagctaataaaatctag

SEQ ID NO: 165928 - DNA, 621 bp, Enterobacter cloacae
atgcacgatcatagcgattattcagatttagttttccattggatcaaaactgactactggggtgatgatattgataaagcctatgagggcgcattcgatgtaatgctgaggattattgatgacggtttcctaagggcttctggaaaggataccttcaagagtattgaaagcgtctgcttcacagaatcacccaaggaagttatgaagcatcaaacgtcccgttatatgccatttggattttcatttgagaaaagttacttgtttgaacaaggtggacggcacgtaatttatcaaacaaaggaagagggcattgctatgcccagtgaaatgcattggaggcatgtgacatataacccaaatgaaacttcgaagcgtaaagagggcatcgactttacttgggaaagagaatggcggctgaacaagtctcaacttagcatactcgacattaattccgtaatcgtaccgaaccaggattatgtagaaaggctggtagccgagatagagcatatgaaagggttccccgactatatgtgggataaaatcagagagcatgtagacccggggccgtacaggaagtacacaccagaattcatagatcgctttgatgtaatgtattcgtaa

SEQ ID NO: 165929 - DNA, 174 bp, Enterobacter cloacae
atggtgatggcaataaaaaaccgcccggaggcggttagtagaaatttgctttcgcttgaatttcacaagctcttcagcagggtaaccctgaagcggcggctgactaatgagttctttttccagtttaacaatttatccatagattttttagtcatagaggctccttttgcgtag

SEQ ID NO: 165930 - DNA, 246 bp, Enterobacter cloacae
atggaagtcatccagggaacatgcagctgcggcgagaaaatcagcatcgagttaaacgcggacccgcagatgtgcgcccgcactgacaggaaacgtccgttttatccggacgaaaacgtagagccattcaaggtgggacacttcacatatacccaggaaggtgtgactacgttcaactgccggaagtgtggtggttatatcgctgacactgttccggaagctgcgtggggaccgatcaatgcttaa

SEQ ID NO: 165931 - DNA, 288 bp, Enterobacter cloacae
atgactggtaaaaccgttgaagtgacctgcaagtgctgcccggacaaattcctggcccgagttgctgaccgaaaaagaggttgggcacagttttgcagtaagtcatgcgctgcctattggaagcaatacggtcgtcgcagagggcatcagtcacttgagatgcggcagtcggcaattgacagaaattcaattgagcggctacagcgcgaaaaacatgtgagcgatccatcgcgaggtttcgtttacgtgggtggattcggaccgtgggatgaccataaggactgctga

SEQ ID NO: 165932 - DNA, 492 bp, Enterobacter cloacae
atgccagatatcactcgggaggaggtagaaaaactgctttcttacaatccggaaactggtgagtttagatggaagatcaaatggggaaatcagtctgccggaaatttagcaggaaatactgacaggcttggttatctcaccatccaggtgcacaggaagcttattaaggcccaccgaatcgcatttctcctcatgactggaagttggccgaaaagctacatcgaccacataaacagaaacccttcagacaacagattctgcaatttacgcgaagtaaccccactccaaaacactatgaatcgttccgtcgcatcaaacaacacatccggtgtggcaggagtttcatatgaggagagaagaggaaagtggcgagctcacatcaaggtaaacggaaaaatgaaaagccttggatatttcaagcgaaaagaagatgcgatagcagccagaaaaaaaggtgaagaaactcacttcggcgaattttcagcacgataa

SEQ ID NO: 165933 - DNA, 378 bp, Enterobacter cloacae
gtgaacactctgaccaccattagcacccttcaacgggttaagcgaaatcgcgtcctctcgacgatgggtgcataccaagatttgcacaaactgccacgtggtgttgtgagtatcgctgatgagtttggtgagcgtgtcgaggcggccagagctgcggctaatgaaggtgaatttggcctgtatattgcagcacaaggtggggcgaatgttccacgtgatagccagaccgtctgcgtggctcgtaacgtgactgacgaggtcaatacctacaaagaggatttagagggagtcgtgggcatctacgtcccgcacttgggttctgagttggtacatattacccggttagccgaatggcgcatcgtagcctttggttgttaa

SEQ ID NO: 165934 - DNA, 552 bp, Enterobacter cloacae
atgaaaaatgatgatgatttactgatcactcataaatctttaaatgaagcaattgcttattattgtcaatttaagttcctgcttgaatttgggtcaccctctcagcgaataggttcctgcggtgctctttccttcgcatatttatccatattggttttaagatattgcttagaaaatagcctacaacttcatgaagtcaatgcagatgagttagttagagacccatctttaggtcctttagtttcttcttataaaattttcgacccttcgggtgattatggacataactttgtacatggtaaaatcaaggagattcaacttagattcgaaaatctaggaaatttagttcatcaggaaattcaacctcgatatggtattatattgggaatttatcttttagacaaaagcccagagttcattaacgatttgatattaaaaaactcaatcaataatgatatcaacaccatttcagaattaatcatagaaaactatgacgagtctatcatggagttatctgcaaggatgttcaagtattttttcaaaaacacttaa

SEQ ID NO: 165935 - DNA, 435 bp, Enterobacter cloacae
atgcattcaaccaatagagccaatctttatagagcagagaaagcggttatatcctcaataattggaggtcagttaaatgatgatagtgtcaacacttgcattgaggcattgataaataccaataaaaattgcaattataaccttgcaaaatcagtcaaccatttcccaagattactgacaaatattgatttatcttccgacgttttaaatttatggcaaaagcagccaaaagggtcacttaacaatcctattagcaatactgagttcattaattctcgcgattacgttgaaaacttgatgggagttaaattaacaaacatccaatggcgtcaccttaattactttactccccatctgagcattcagagggaagttgctggccatgtggcgacgatgaacatcagattttcacatatcatgatccaaatggggtaa

SEQ ID NO: 165936 - DNA, 363 bp, Enterobacter cloacae
atgttttcctttctcagtacatttaagcggctcataagtaagcagcaggaagctccaaccactcagccggggcattcaaatgaacagcttttgcaatgggctaccggttgcatgttagaaggtttgcctgatgaattttatgaggcgagaatttcatgcttccgaaacatcgatagtgaaggacacatagcaattgcagctatacatgatttcaagtcaaccagtgaaagcgaatatatctctttcactccaccagatgacctttacgccacacactgcatagagaaaattcttaacgaagaaaactggcgtgaagccactataacctttactccacaaacgacccgattcatatgggaataa

SEQ ID NO: 165937 - DNA, 246 bp, Enterobacter cloacae
atgcaagtagatatttacaaaattcaccactctaaatggggctatatcatcgtaccagcgggcagcgacattaaatctaccatagcctccctgcctggtttctataagtcttcattcactactcatcgaagggtgccaggtccacacgatacctttagcccgaactctgccctaaacagtgatgtggtgcgtgatgatttgagaaataatggttacagatttgcatttaaaataagaaaaccctaa

SEQ ID NO: 165938 - DNA, 480 bp, Enterobacter cloacae
atgctgggggatagaacagtgagtcgattaacatcaatcatctgtgctgccgttatctgcctgatggtttccatggcctgggcgattaaccactaccgcggcaacgccatcacctacaaataccaacgcgataaggtcactgaaaatctcagcctggcaaacgccaccatcaaagatatgcagacccgccagcgtgacgcagctgtactggatgctaaatacacgaaggagttagccgatgcgaaatctcagtttgaagatctgcagcgttgcgttagcactggtaagtgtgggctgcacgtcaacgccagatgtcccgcgaacggaacggccggcgccagcggcatgggcgatgcttccggcccccgacttactgactccgctgaacgggattattttaccctcagagaacgaatcgtcacagtgacgaagcaggttggctatctgcaggactacatcaaagagcagtgtcttaattaa

SEQ ID NO: 165939 - DNA, 756 bp, Enterobacter cloacae
atgctacctaagttaccaactgaaacggtcggtgaaatttataaagatttattccagccagctctgcgtcaatttggacaggcgggggagagtgtagcaaaaacagtctgcttattaagcttaccatttgtatatggtgccggaaggtatgatcaacttgtagtaagggtaagaaagtcgtttgaaaaagtacctcctgctgatttagtcgagccaccggttaataccgtatttcaaattgctgaaaaattaatgtctatgcccgttgatgacgctatttctaaaatgtatgttgagttgttgtcatcttgcgtaaataaaacatgggtaaactctgtccatcctgctttcgtaaacttgattagtcagatatccggcgatgaggcacgtttcatcgattttctgtctcaaagggaaaggacgatatacttaagaagagatgaatcatgggttacacctaccaaagctgaaattgataatgtgctgacaccttggcatggctctatccttgatggaaagcctataagtgaaactgtcttttaccctgatattttaaatgtgcctgagtatttctttacatatttagaacacttgaattcattgggtgttattgagtacgttcatggacctgaagacctcttagataagaattttattaacagtattagaggttatggacattggtatatatcattatctaagtttggtcgcctttttcataatgtatgtatcaaaaattcaggcgcaactgaatag

SEQ ID NO: 165940 - DNA, 192 bp, Enterobacter cloacae
atgagtcccgatgaatttagagcatggttcgcctcgctgcctgaaaaatttcagcgtcaggccaaagctatgtacgacaacgcccggcgcggcggtggtgtccacaccgcttccagcctcgccttgattaaaaaccttatagaaggttcgattaactttgaaggaaagttcccgaatgacaaccaccaataa

SEQ ID NO: 165941 - DNA, 582 bp, Enterobacter cloacae
atgacaaccaccaataacgcaaccctgaccatcgccgatatccagcgcatcaataagctgagcattgtcgagcacatgaacaacgaagcgattgccgccgccactggcttcgacctgcgtgacattgaccgcgtagtccgtggcgtttacgtagacgacctcgccgaccagtggaagccagacgaagaaatcacgctggccgactacaacgccattcgtaagcgctggaaaccgggcaaactgcaccgggataccgagtacgccattgcacgcgatatgttaattcgtccggccactgtgctggtcatcgcgcattcccgattccagaacgcgcacacacacccggcagagaaaaccgtgaaggtgaagccagctaagccgaaagcagtgcgcaagctagtgcctgcggacattgacgaaatccacaagttagagcgctttggctggcctgccgccgagatcgccgaaaagctgggcgtccctgttgaagtcgtcgcgcatgtgcaacgctgtctgagaaatcgttggtcgtacccggatactctggagtctgttaactccaaattcagcgaggctgaatga

SEQ ID NO: 165942 - DNA, 1701 bp, Enterobacter cloacae
atgagtttcttcgataaattcagcgcggacaagttgaaagatgcggctgcagttgccaaaaagaagcttggtgacgcagcggccaaaggcgcagaggcggcaaccgccgcgtcacaaatggtaaaagactttgattatcaagaagcgcaagcaactgctaagcggactgcgtcaaacatagcgggccaggcgggcaaagctacaacaaaggctatcgatacactcatggaacatgattatgcggacacccgtgactatcttgcagatcatgccgtcaaggcgagcgatggcgttgtgaacatgaaagacagtgccgtcgatgccgtacagaatttcgacctgaacgaaacaacagaagccgctataaaattttccaagcaatcagcaggcaagctcaaccgcatgttccgcgatacgctagaactggataagaccacgttcgacatggtcaacgacgttaaaaagcgtctacctaccccagcaagctccgtggacgacatctacgagcaatgccgcaaagaatcaattcgacgcgcgattgctgcttttatgctaggagacatcctagatgaaaaaagtgctgctaaatatggcaagctgactgacgactacgatacctatcgacacgataaacatggcacgtttggtgactactcccatgcaaagccctctgataaaacgccgaacggcacggttttccggaatgactacaacccggatgaacctttggtctatgaacgagataaggctactattgtctcggtcgatcacatcacctcaagaaaagaaatcttctcttctcagctattgaaaatgggcctgaccgatgaacagttgggtaaggtcgtgaacgaccccggcaatctgaagtacatgcaccgaagcatcaacagccaaaagggtgaggctgacttgtatgactggctgtccgcgaattccaagccacatcctaccgatgacggtaagttgatcgtgacgatcaagggatcaggtaaagagcatgtcatcgacaaaaaggcagtcgataaaatttatgcagagagtaagcaggttatccgctctgcaaaaatccaagcagttaaagagatcggtaccactgttgccctcactggcgcgaccatggccgcacaacaggtcgtgggcctgattgtggtggagaccattgacgtgttcctagacgaactgaaacgcatgaagtttgtctccgaagaaggaattgttgaggagatgaagctcagcaagaatcgcctgagcgctgaactcgccaagcgttttgaagaacgtcaaatttggtcgcgtgcgaaatcgctgggcatcgaggctggcgtagcaggcgccttgagcgtgatacctcagattctcatttctttggtattgaagatgccttcatttgtctatgcgctgattcgtgagagcaccctcagcgttgtgcgtgcaatccgtatcgttaccagcaatgagccagacaaactggtggccttgcaagtcgtgattatgggtgcggcatcggctgttgtcggcatttacgcccaacgggttattagtcaaggcattgccgtagtgccattactgaataaattcaactcacaagtctcctcggtcctgtcaggggtgattgtcaccgctgtccccttggccgcgatttacacgttcgagcaaaacaaatcaaagttggtgctaaaattggtcggtcccaaatag

SEQ ID NO: 165943 - DNA, 165 bp, Enterobacter cloacae
atgtcatttcctcaaatgaaaaatgccttcggcagcccgccagccgcgaatcgtggcgatatctccagcgcaacggcttcattcgatgttttactggcgctacatactttcctgctcactgccatctatctcgcctaccggacgatagataagatttattattaa

SEQ ID NO: 165944 - DNA, 669 bp, Enterobacter cloacae
ttggctatattgctgatgtcttcaggttgtcaggcaaaggagccgccgacacaggtggtttatcgtttcgatgaccatcgttttctagagctgaagggctgggattgtgaaggcgagctctggtataccgatacacagaaagcaattcattctcagccgtacttccagttttaccgtatatataccaaacaattcattcatagctctgagcgttatattgccattccagcctgggattctgcgggatttattgtatcaaaggattatggcaaaacctggtacccgtcctcattctcgcccggcgaaaatgaacctaatggagacaatgcacctccctatgatgacattctttctttcacagtagtgaatgaccagggctttctgcagacaaagcaccgcctttatatgtcatccagaccatttgacgatccgcgcgtattgccaggtggttctggaattaagtaccagcttgaaaatggtgaggtggacgaaataacttcagatgcacctggctggaaatgggggatggtgtatttcacaaaaggatggctggagggaaaagtcgtcaggcgtgaatccaattatcagaatttgccagataaagtccctgaagtgaaaggttacaccggctgggaccatatgcaatgtgacatggatgcggggcgctaa

SEQ ID NO: 165945 - DNA, 165 bp, Enterobacter cloacae
atgatgatatttcgtgcggaaaaacgggccgaatttccgcaaccagaaaaacacgacattagattatctaatgcgaaaaatgacgtgaaattagaatatttcaaacgagggaatttccccggcgcagaggccgggaaaagaaagtgtgacaggagtctacattaa

SEQ ID NO: 165946 - DNA, 687 bp, Enterobacter cloacae
gtgtcctggacacttgggtatgagatgtatttctatcttgttttttcattttctttattaatttccacgaaatacagaagctatatttccatagccatattgatggctatgtatttgtgcctatctatttcctttgggaacccaatagactttaacgccaatacatttcatgttcctttctatggatatcatagctacctaggatttgttgggaatccaataatatttgactttgtgctggggatgctaattgcagagtgttatttacgtttttataaggaagtatttgaaaataaaacaattggatatatatcaatccctgtaataactttatgctttatgatgtggcttacaggatttaattcaggccaaggaataactcatactggatttattgcctgcttgatagttttttgcgcaatatgcatagaaacatctaccaaaattgagtttccgaagttcatgatattaatgggtacgtgttcatactctctttatcttattcacgtcccgatcaaaaaaataatagaggcttatggaaaagatattccattcattcctcaggaagcatcagtaataatgtatttgatgtctatttccgtatcaataagcctttctataccaatgtactacctggtagagaaaaaatttatagatatggggcatagcttgtccaagaaaatataa

SEQ ID NO: 165947 - DNA, 351 bp, Enterobacter cloacae
atgccaccacgaacgccaaaagcctgccgccttcgcggctgccgaaacacaacaactgacccatcaggttactgcgaatcccacaaaggcgaaggctggaaatcctacaaatcaggacaatcccgtcatcagcgcggatatgggacgaagtgggaaggtatacgtgctcgcatactgaagcgagacaaagcgctatgccagaaccatctgcggcaggggattgcaaagcaggcttcctgtgtggaccacatcaaggctaaggctcacggcggcactgatgatgacagcaaccttgagagcctgtgctggtcgtgtcacgccgcgaagaccgcgcgtgagcggctaaagtga

SEQ ID NO: 165948 - DNA, 219 bp, Enterobacter cloacae
atgagagagttattcagcgtgctggtggacagagtggccttgatgcctggctggaacgtaaattcgaatgtcagtggcctcacaacgaatggcactcaaaggacttcactctgctacgccacgcccccggcagcattcgcctgtgctggggatgcgataaccaactgcgtgaacaaactactgaaagactggcaggaattgccatgcagaacctggtaa

SEQ ID NO: 165949 - DNA, 444 bp, Enterobacter cloacae
atgacagccaataaaccaatgaccggcgaacagctggatgaactgatgactgttgcagtgaacatgcagcgcgatgctgagaccgattgtaaccgcccttccgctatgttcgcttatgcagttcaggttgctgttctggagctacgtaaagctcgcaatgatgttgctgcgctagctgcggagaatgcggggctgaaggctgcaaacgctgaaggctgcaaatgggacggagagcaatgggttggcatatctatagaaacccaagctaccgacgctttcctggctgaagttcgtgctcagggtgtggagatatttgctgcgcacaagcgagaacgacagcaggctctgcgtagccgaagcatgagaatgtctgaagaagccgctggtatggctgctgatgcagaagacttcgcagaccaaattcgcaaaggagtgcagtcatga

SEQ ID NO: 165950 - DNA, 432 bp, Enterobacter cloacae
atgagcaacatcgacaaacaaactctcgcagatgatgaaagcgtgaaaacttattacatccatccgatggcattcggtggcacgcaaaacccaggctacgggcatgttcctgttgtaaatgcagaagatttcgagacgctgaggaccaagttggaagccgcagaaaatctggcaaaacaacagggaaatatcgcggtagagctatttgatgaggtgacaaaattacgtcgaaacgctgatgacaaagcgccggagctgcgctctcaacttgaagaggcagagaagcggattgctgagctggaggcaatgctggcgcggctctatgccgaatgcgacacgggcgaacgtcgtggcaatggcagtcaatcaggcgttgcaatgccttcgtgggtaactgttgaggcggcgcgcttgctgctgggagttaagtaa

SEQ ID NO: 165951 - DNA, 381 bp, Enterobacter cloacae
atgactgaaaatttgactcgtttttctttcgacggtttttctttccaagatagtttgttggaggacttccgatattcctccggcacccttgagttaatcttgagtaataataatggaaacatgaaaatcaagatatcatttgattgggtccattcgtttcgattaacagacgaaggcgacctgctaaaaatgcaagatgaacagcagggtaatatgataacaggtatttatcttgttgaaaattcatcctatttgggatggtttaatgagcaaagtgccgatgtgcatattgacgaagacattactcattatttgatcgtaactaccaacgatgttgttgacgtactttcatcagagaaaccattgagttcgttactctaa

SEQ ID NO: 165952 - DNA, 600 bp, Enterobacter cloacae
atggaaataaaagatactctcgcattttttgggcttattattacaactataactgcagcgattggtgtgtataaattatttaaagatgttagctggttcttacctaaagcaacaaaatttacacatatttttgaaaattattccgagtatattgaccctcttgaaatggaatttatgaaggcagagattaaaagggatgttaaaaaaagtgttctgggaattaataatttaaaattcaggcgcttagttctgtatattagaacatattctgaattgaatttgccatcatggcgatgggggcacttagcaccgcatgtacaatgtaaatatgatagattctttatacgttataaagggaagtataagcgttatcgcttgtatgcaaaacttgctgccattttttatgttatttttggtctggcattccctctttcgttattaaataatggtatgggttatatgattcttggtgttgttctgatgttatcttgtttatttatggcttttatgttttggatgcttttcccaggaagaaagaaaataaaggaatataataacgcgttattaaagattgatgcgagcaagtatgatgctagataa

SEQ ID NO: 165953 - DNA, 645 bp, Enterobacter cloacae
atggaaatatgtaaggtgcaagagaatgaagccttatatgggaagtttatattaatctacgctactgttagcactaatcgtgatgattatgggaaatgttttcatgaggcaagggaaaaattagaatttattaatgatgaggacataaagttcagcttaaatttagcacttgaaaaaattgctaagcacaagactactttcatggaacggagtgatccggatagtgaaattgattttttcacaagccgtgaaaagcaaatgggatttaagatagatgatccggaagacgagatgggacggattataaaacaggggttgcttgattataatcctgaacgcgttataaaaaattgtgaacatttaattatgattgcttcacgttcagttggcattcctgccatgatggttggcttatattcggctgctatgaaatatcttgtatgcttgaaaaaaaatcatgtaatgggtggttggagattagacgaaatttataattcaaaacccttaggtggattccaaagtgaattctgtaaagattgccaagactgtaaaccaagaagtcctgaatggaaatggacgagtgcatggcaagaagaacaaattgagcttcataaagacctaacaagccgccttgaacgttggtaa

SEQ ID NO: 165954 - DNA, 1065 bp, Enterobacter cloacae
atgacatcacaatcctggcggtctttggttcacagaaaatatcaattatcgttacgtttatttttatttctgaacgcagcttcggcagtgttctcggtaacaaatccgctcaattctgtacgcctgttttctgcccctctgattgctattttcgccatcagtactggcctgttcgtctggcactggagaaagcgcgcgcggaagataaatattcctgtcgtttcagcgatcttcggtattttatgggcctggcaaattgtctccaaattcgccttaattactcaggaccatgcgacgtatttgctaattgctcttttaacggtactttttatcggcacgctggcgttcgccagtaatatcaaagcgtttacgctgcattcattgcccacctttattgtctgcctgtggttaagcgatcacgatatatggctgcgaatgacctattctttcgcacttcctgtggtggcaattgctattcataacattttgcaaagacgcaacgaccgtttcgctcaggagctgctctctcgccttctggaagaacgagaaacccttaccgacctcagcatgatggacccgcttaccgggctctataatcgtcgcggtctgcaaagccgtctggagaatctgcccacggtagaaaatggcgaacactttgtcctgctgatggatatcgaccacttcaaagcctataacgaccattacggccatatgatgggcgaccaggcgctgaagcgcgtctctgcggcaatccgcgacgccgtgcgttctcgcgatattgtggcgcgttttggtggggaagagtttatggtgctgctgaccaacatttcactcgaacacgctcgccagacggccgagcggatccgtcagaaagtatatgatttgaaaatcccgcatctgtttaacgaaagcgtcgcgacaaacgtcactatcagcattggcatcgccattttcgaggatgaagacgtggaaggcgcgctggaaaaagcggacaaagccctctatgaagcaaagcatatgggacgcaataacattctgctaaacgaagagattcagacggcataa

SEQ ID NO: 165955 - DNA, 1281 bp, Enterobacter cloacae
atgcatcgaattgatacacctactgcccaggccgataaatttggtcagggcaaaaatggttttactaatggtgatccggccaccggccgccgtgcaacagacctgaacagcgatatgtgggatgccgttcaggaggagatctgtacggctatagagtcagcaggactgacgctggataaaacaaagcacgaccaactctatcaggcgatcgtaaaaataattacgtctaaaatccctgatgcactgctgagaaataacaatttatctgatgtggtgaacaaagcacttgcaagagaaaatcttgaacttggaagtatcgccacaaagagcaaagatgaatatatattaaaatccggcgacagtatggaggggggtctgggattaatccagacctcttcgttcggtgtgggcaccaaaaacacaattggtggcagctccattgcaataggggataacgactcaggctttaagtccaatggcgacggcattattggactgatggccaacagtgttttagccgggtattttaatgaatatgagcttcagcatagtgccagaatactgacaaaaatttttcaggccattgcaaaaaacaacttgacggagggtgccggaggttttggttcgcaacttgaaagtggcgcaccttttatcactccgcgaataacccgaccaaatgatgacaacaattatttccctttctggaagcaaattgtctctcttgtctctggttatcccgtcgccgcttcaatggggttaatgacgaccgggaaaacaaatttccctcagattgttattcatgcgaaaacagattttgatgtcaatgacaagctatgggtttttgatgtggcatcaggagagttcagaagcccaggccgtttgttaggtactgaaatatttctttcaggaaagacgcgaattgcggccgatggaaacattaacagtgaggtatggggcggctggctgaatgattatttaaaaaatacctataataaaaaaaatacggcaacactggggttctcaggctggagtcgtgatgagtcaacggggctgattatgcagtggggaaatgttgataatgccagaggaacttactcattcccgcgggcattcaatgacgcctgctacgctgtcttcgcgacgaacaaagacggacagggcggcgcgattgataacgcttatggttatccggtaagcaaagcgcaattctatcttgccagcaaagcgaactctggcgctgataccgcatacggcatttcttggtttgcactggggtactga

SEQ ID NO: 165956 - DNA, 420 bp, Enterobacter cloacae
atgactgaacaatattactacagctattcggcgaagggttttttctggctgagtgcagatgaacttaaaggaaacgatattcccgctgacctgatgcctgtcagcgaggaagagcacgccgcactgttcctcggtcaggagcggggtaaatacattaaccatacacctgatgggccagttctggttgaccagccggattactcgccagaagaactcattgcgcaggcggaaagcaaaaagtcacagctgatgcagatggctaatgcagaggttgctccattgcaggatgctgttgatttggatatagcaacaggcgatgagcaggcactcttgctaaaatggaaaaaatatcgtgttttgttaaaccgggtgaatccagaaaatgcgccagatatcatctggcctgatattcccgcttga

SEQ ID NO: 165957 - DNA, 273 bp, Enterobacter cloacae
atgaccaaaacattaacccaaaaagagcaggtggcggtgtttatgcgctaccaaccgaactgcgccgttggcgatgtatccgaagcgctggatatggctggcggcacagatggcaggttgatgcgtgagctcagtgacgaaggcatgatcattcgctcgcgagacagcgctcagtacacatacagggcggtaccgcacgcgtgtattccaggcgttaccctcccggcctggaggagaaatgcgatccagctaggatgcaggctgctgcactga

SEQ ID NO: 165958 - DNA, 570 bp, Enterobacter cloacae
atgctcgtcccgagaccatatttgaatattatggaaaccattatctgcattgccagtggcccctcgctgacggcgcacgattgcgagctggcctccagccccgggtatgccgtaatttcagtcaattcaagctggtcggcgattccaaaatgccagcacatatacgcagcagactgctgctggtgggaagaatacggcgagggaataacatcacaggcggcccgctggtgtggtgatgagttcacggccaggcgtttcggcattaactggctaccgtctgcaatccccggttcgtttaattctggtcagcgagcgattgaactggcaatccaccttggcgccagccgcgttctgttgctgggctatgactgctcaatacgaaacggcactcactggcacggcaaccacgcgctgctgtccaatccagacaaattcagcgtagcgcgctggcaggatgaattttcccgcctcagagctattgctggtggtgtagagataattaactgctcccgctttacgcggcttacctgcttcccccgacagtccctcgagactgcactttctctgtag

SEQ ID NO: 165959 - DNA, 237 bp, Enterobacter cloacae
atgaatccgttgatattaattctcagaggtcaaaagcctaaactaatcaatgtcactgatggacaaaagtcgctgaactggcgtctctccgatggcagtgaaactgaattagagattatgactgcgaatgttgcatccatctcaggcgattcggcgtgttatttaattgcaactgatatggatgaccttgattcacgacaaatcaggcaggccgtggagtccctgactcttagttaa

SEQ ID NO: 165960 - DNA, 195 bp, Enterobacter cloacae
atgatcctggaaaaaatcatcagtagtgcaaccgagttggtaaacatccaggtagtaatggtaatcaccagcggtgactatgtattcatccgctcggagaagtccagcttcaagggtaaagaagtagaacgtttcaatgaggagcttttcgccaaaaggcgtgatgctcagatccttgctataagtaggtattaa

SEQ ID NO: 165961 - DNA, 798 bp, Enterobacter cloacae
atgaagctggaaagtttaccgaagtatttctcaccaaaatcgatgttacccggtgccgttccctgcggtaaaacagctgatactctgaccatcacagatgtaatggcttcacttggtctgcttacatcaaaagctgcagtaggtattgagctttatctggcgaaagccggggttatgtcgtcggataatatcatcgcctacatccatcaattggctgtgcagcgggcagaacggcacgcaccattgcgtaaaatgtcagaagaggacagggtaacgttcctccagacgctggcaaggtacgttttccgcgattactcattgagtgcggccagcctgatcacgtgcagcagctgcgccggggagaagtttataacggcagaggtattcacgaataaagtgacttatccggacggcaagccaccaaaatgggtcagagacactaaaggcatatctccatcagactgggaggtgtggaaagaggttcgcgaacaggtccgtattgtgtgtaagacctgcaccggaaaggggcacgttaaaaacgagtgccgttgccgggggcgcggtgaggtattggataagaagaaatcagagctgcagggagtgccggtctataaaaaatgcccgcgctgctccggtaggggatatccgcgcctgaaagatacagaagtgtttaaagctctgggtgtcaccgaaaccacgtggcgccgcaactataaactcttctttgatcgtctggttgagcactgccacattgaagaatctttcgctgaaaaagttctcagccgggttacaaggtag

SEQ ID NO: 165962 - DNA, 435 bp, Enterobacter cloacae
  misc_feature (400)..(409): n is a, c, g, or t
atgaatcttatacggcgcgtttcagcgatatataaagaacaggagttacctgagtatcgtggcaatcccttaattgaagcacttcctgaagcgcttacggaagatgaagtacttctggaaatgagttatttccccgaaattgacgaaaaaatccgctggactgccccggcgaatgttagagagcagtatgtcgaacgtataaagaaattccgttgccctcaaaccaatcttatccaggcttataagatgatcttacgggcacttagggaaagctatgcagctcgtaatcctttaaaaagcggaacaattcaatatcttcattactatggaaatgagcgtcctgatattgagccagaaagtggatattttaaatcccaggctgaaactattacgatagttnnnnnnnnnncatggatcatttccctcagattatag

SEQ ID NO: 165963 - DNA, 492 bp, Enterobacter cloacae
atgggatcattatctctacgcaatttccgttctattcgtgtgactcaaagaacatctaaatttgttttaggtacatatagtacccctcgtgggattttagaaactgcaaccttgcaattatgggaaatagatctatctaatactacatatggaaggttaggtgaaattgacattccacactttttcacaataatggaaattgatgattctcttcattacactatggatgttaaagagcgtgaagttgatatgtataatatggagagattgcaaatagaaaaacttcaaacattattcgattctttccaaacgccagtacatgcaattggtacagcgataatatctaactcagatgaacatattgaatatggtgaaccacctgagcgtgagatctatttaaattggatcgatatgcgactcaaaaaagttctgccatcttcttttgatgctgaaggtgattttgaaaacttatggcatgaaatttacttgtag

SEQ ID NO: 165964 - DNA, 330 bp, Enterobacter cloacae
atggaatatttggagttcgtagaaaccagtgtattcagtaaggcttgcaagagcctgtttagtgatgacgagtacaaagaatttcaggcttacatgctcacagacccggaggcgggggctgtaatcgtaggaacggcaggatgccgtaaggtcagatggtcaagaccaggcaccggcaagagttcaggggtaagagctatatactactactataacgaagtaggaagactatacatgcttctcatataccctaagagtgagaaagacagcttaaccggggcagaaaagaacatgctcagatccgttgtagaatcatttaaagaggagtaa

SEQ ID NO: 165965 - DNA, 291 bp, Enterobacter cloacae
atgaaaaaagaactgtttgatgatctcattgcttccgcgaaagaagctgtagaaatccataaaggtttaaaagaacctgcaagaattaccagatttgaaattccagatgtaaaacagattagaaaaaacacaggtttaaaacaaaatgattttgctcaattagtcggtgtatctcctgcattagtacaagcatgggaacaacataaaagaacaccgtcaggaagtagtttaaaacttttaagaatgatacagataaaacctgatttgatcgacactttgaaacttgcctaa

SEQ ID NO: 165966 - DNA, 267 bp, Enterobacter cloacae
atggatttagaaatagatgaagatgattatagtgatagtgaaaacaatgaaaccattaataaagaaattgatgaaatttcaaaagtagcaaaaagagaaaacacaaataaaggtaataaaaataaagaagttgcagacattttttcagacatgttaagtgtgttagataaaggtaaaggaagcgatttattaaatgttgttgacatgagcaaagcgaaaagaataacaaaggaagagttttcagtgatatttccagaagctaaataa

SEQ ID NO: 165967 - DNA, 216 bp, Enterobacter cloacae
atggacatcatcgataccgcagcagagattgaagagcttcagcgtaacgctgcccttttcgctcacagacttaaccccaacgcagtatcagcaacgcactgtgtcgaatgcgatgatccgttgccggaggctcgccggaaagcgtatccgggctgcacaatgtgcgtgagttgtcagggtgagcaggaattgcggaataagcagagggggatgtga

SEQ ID NO: 165968 - DNA, 612 bp, Enterobacter cloacae
atgggtcatgcaaaagaaagcgaaatttcttttgatgtagaaggaaaagaaagtattgcagctcggctacgcaaactaatagggaaccgaacagttcgtgccgcagctaacgattggggtctggcgttttccacattaaacaattacctcaccagagggaccgagccatcactcaatgtggcaatgagaatagctgaagtggaaaacgtatcagtcgaatggctagccaccggcgccgtctctgaagcccgctctcgtgatgctaaacttcagcgcgatacttcaaagattgcagaagatgttgatttgggacggatgtttgatgagcaaagggatgtcaacgcattaacagtggcctggcaactgattttcaaagcattatctcgtgaggatgtattagagttagttcgactttttatgcagattggggcaaagggcattatggagaagcttagatatgacggagatgtcgacgcagtctggaataatttcagcacaaaagaaaaagagcagctaatcaggcttcatgatcaaatgaaaaaagggtcacctgacgctggtagtggcgtagccgaaaaagacctgtccaatgatagtaagaaggccggttaa

SEQ ID NO: 165969 - DNA, 237 bp, Enterobacter cloacae
atggaaagaaatgaagtgatagctgtaagggactggcacaacatcgacattgttggcgaactccataagcgcggtctgacgatgcgtggtctttctgtcgatgctggtctcaagccggatacgttgaaaaacgtactccatcgcaagtacccaaaaggtgagcgcattgttgctgatgctctcaatgtagaaccctctttcatctggccaagccgttacgcaaacaaggattcgtga

SEQ ID NO: 165970 - DNA, 2091 bp, Enterobacter cloacae
atgttcgtgacagtgaatgagttagcaggtttacctggagtgccgggaacgccacagggcattcgggcaatgatgaataaaaggattagcgataatcctgacctaattcgtaagcgtaatggcagtaaggcatttgagtaccacattgattgcctgccacagggcgtacaggatgctttgcgcactcgtcatatcaaagaactgatgaccggtgccgaaaatacttcgccagtaatcaccgagtcgaaagcaatttcgccacgcagtaaagctgatgaagaaagcaaaattgccgtgtttcgtaaatgtccggcgcttctggaacaaaagctgggttcactgactgctgcgcagaaacagacggctgatgcacgaatggcgctggtttccgaagtgatccgcctggggcagttacccggttacagctgtgccaaagcggtacgtgaaattatccgacaggctcaggcgggtgaacttccacagcgactcgctgatgcagctgctctggccaacgccaagaaaggtgcatcccgttcactcagtgagatatcgctgaaacgctggctggctgatttcaataaagcatcaacgtcagcagagaggctgatgttactcgcgccgggtaagcgccaggttgtgaaacccgagcagattgcctggctacccgagttcctgacgtgttatcgccgtcctgacggtcggggaattcaggaagcctatgacgatttcaaagtcctctgggatatgcgccacgctgataactccctcatgcgcgatgccattccctcctacgatcaggtgtgttacgcgatggacaaattaccggttgttgtgaagcagaaaggccgtatcacgggtagcgaattccgccagtatgaaggatttatccgtcgtgactgggagtcacttccggtgaattatgtctggattggtgatggtcacggcatgaaaatgaaggttgcgcaccctgaccacggaaacccgttctcccctgaagttacgttcattcttgatggttgctgtcgttatatcgttggctggagcctggcgttatccgagagcgtcattgcggtagcggatgccatgcgccacggtattaaaaaccagggtaagccatttatttattattcagataacggcggcggtgaaaccaacaacacgtttgatgctgatattaccggtattttaccgcgcctcggtatcgatcaccgtctcggtattcctgagaacccgcagggtcgcggcatcatcgaacgtcttaaccgtacactgggccagcgtatctcccgccagtttgcgacttattacggcacaggggcagaccgcagcacggttcgtcgtacaacaaaggcgctgatgtcagccactaatgcagtggccaaaggtaaggagctgtcagttaaacagcagcagacgatgcgtgacctgccttcatgggacgcgttgattgcagaaattgaaagtggtgtcgagtggtacaacaaccgcccgcatgagtcactgccgaaacgcggcgacggtgagcatttcaccccggcccagttccgccgctataagctggaaaaagaagccactgaaatcgaatggttgtctgatatcgaactgcgcgagatgtttatgccgcagattgagcgcagcgtgagtcgttgtgaagtgcgtctgttcaacaacctgtattactcatctgagctgaatcacgaacacggtaataaagtgctggtgaattacgatattcacgatgccactaaagtcattattcgccgtctggatggttcgtatatttgcgatgctatctgggatggtaataagcgccaggccttcccggttacagcggaataccatgcccgtcagcagcgtatcaaagggatgcgagctcgcggcgaagagaaagtccgcctggctgaagctgagaacatccataccctgccagccccgcaggaggaaaactggttacagggcaatgtttatcgccctcgtgccacggcaccgctcatgctggctgaagcggaagaagcagaatgccgcgaggatgaattcctgaataattcactggatatgctcgaatccaataaacgtaaaaacgttatttaa

SEQ ID NO: 165971 - DNA, 948 bp, Enterobacter cloacae
atgtctgatgtgaatatcaccgatattcgcggggttcttcgcaccctggtggatggtaaacgttttacttttgctcaggtcgcccgtgaaacaggtttgtcttccggcacggtcagcagcttcatgaatgagaaatacaacggtgacaatgaacgcgtggaaacggcactggcccgctggattgagaagcaacaggctggcgctgaaatccccgagccaccgcgctttatcgaaacgccgacagtgaaacaaatctggactgcgttccgctatgcgcatctgaccgagtgtatcggtgtcgtgtgcggtaaccctggtgtgggtaaatccgaagccgcccgcgaatatcgtcgtggcaatgataacgtctggctgattaccgtcactcctgcctgctccagcgttcttgaatgcctgacagagctggcctatgagctgggtatgaatgattccccacgtcgtaaaggtccgctggctcgtgccttacgccgccgtcttgatggcactcaggggttaatcatcattgatgaagccgaccatctgggcgctgaaaccctcgaagagcttcgtctgttacaggaagcgacccgtgtcggactggtgctgatgggtaatcaccgcgtctattccaatatgacgggcggtaaccgcacggttgaatttgcgcgtcttttctcgcgtatcgccaaacgcgtggccatcaacaaaaccaaaaaagcggatgtggcagcaattgcggatgcctggtctattacgggtgagaaagagcgtgagcttctccagcagatagcccagaagcccggagcgctgcgtattctcagccactccctgcgccttgcagccatgacagcccacggtgcgggtgaaacggtgaatgaaaaatacatcctcagagcgtttcgcgatctggatttagatgtcgatgtgtcaacactgctgcgaggttaa

SEQ ID NO: 165972 - DNA, 240 bp, Enterobacter cloacae
atgttctctcatctcatttcgtcccatgttcaacaggcgctggccactgaagccatgctcaatcaaaaaggatgcctggtcacagcttttcgtcagtccagaacccggccgattctggaggtgtcatgtcctcctgctgatttactcagccaggcggtgcggattgtcgagcgcaataacgaaggatcccgctctgtctgggtcgcttcattaaacggttgcaggattatctggaggtaa

SEQ ID NO: 165973 - DNA, 618 bp, Enterobacter cloacae
atgaataatacaaataatatcccggaaggttaccgtattaatgctcaggggcatctggtgcctgaatcgcaggtaaagcctctggataaactgcgtgatgaagtggtgatgaatatcatcgagtcggcacgtcaacagcgtcagcaactggccgctttcaagctcaattccatgcagcagattgccgattttattgacctgtcagcggcggagtacggcgtcgagtttggcggtgccaagggcaatgtgtcactggtcagttttgatggccgtttcaaactgctccgtgccgtgggtgaacaccgcatttttgatgagcgtattcaggcggcaaaaacgctgattgatacctgcattaaccagtggtctggcggtgctgacgagaagattatggcgctggttgaccatgcttttcgcgtcaacaaacagggcaaaatcgacattaaccaggtgctggggctgcgccagctcaatatcgacgatgagcgctggaacgaagcgatggatgcggttgcggatgccattcaggtgaccggtaccagtcagtacctgcgcctttatgagcgccaggttgatggcacctataagcagctttcactggatttagccaaactctga

SEQ ID NO: 165974 - DNA, 498 bp, Enterobacter cloacae
atgaccacgaataaaactgttatttacgatgcggcattttctcgctggggatttgattcccaggtactggcgctggcagaagaatccagtgagctggccgcagcctgttcccggtttattaatcacaaaaccaacggcagtaaagttgctgaagaagcggctgatgttgaaatcatgctcgagcagctgcgccataacggtatgggaaacatgattgaccaggaaaaaagccgcaagctgacccggctggcacaagtggttggtgttgaagtccagcctcttcaatcgttcggcccctccgttcttggccttattgaggaggcggcagagcaaatcgacattgccagtacgctctacaaagaccgccagaccagcaatcgttttgcctctgcccgtgctcgtatggctattagccttttaatgcaggcggcgcaaaagatgatgcgcgagcaacagtatgcggagcggatggccgctaaggtgaaaaacgatgagtaa

SEQ ID NO: 165975 - DNA, 549 bp, Enterobacter cloacae
gtgaaaaagctcagtcagattattcatatcgctaaaaatcaacttggcctggatgatgatacctaccgcgcattgttatcttctgtcgttccggggaaaaccagctgccgggaaatgtctgcatccgagcttcagcaggttattaaggcttttgagggtaagggctttaaaagccagccttcccgtcaatcaaagcgtcgaatgtcaaagccttctgacattagcaaaaaaatcaggatggtctggaaagcgatgtttgctgatgggtttctcagggacggtagcgatattgcacttgaccattttgtccagcgccacacgagccagaaaaatggcggcaagggtgtttccagccttgagtggctacgcggagatatggagctgaacttccttgaaagcctgaagcaatggcatatccgggcaatgaaaaaaacgttggtcgagcataatgccccactgcctgtttaccctgataccggtgaagtcgtccgtgactatgatgtgttttgcgcagcctacgctgaagcggcaaagaggtggaataaatga

SEQ ID NO: 165976 - DNA, 393 bp, Enterobacter cloacae
atgaataacgacctgtttgaagacattcaggatgacagcattcttgaccatctggatgatggtacggaaagttcacgctttccctcattactatcagaattgaatgcgttgttgagaaaagagcttgagaggctgggttacgatccacagcattcgattgagcttgtcgtcgcaatcagcagtaaaatcggggggatgcaggtctattttcctcggggtcaggtgcttgaacaacttgtcagagatatgcggatctggcgtgattttaagggcgacaacgtagcggaactggttgagcgctaccacgtcacctacaaaacggtgtataaagcgattaaaagaatgcgaagacttgaaatgaataagcggcaattttctttggacatggagtaa

SEQ ID NO: 165977 - DNA, 324 bp, Enterobacter cloacae
atgggtggcgtgattcttgtaaatttagtgttggttgtttgtgctttttgggttttcgttgatgcggccaacaacaaaattggtgtgcatactattactgaaggtttcagcaaaggatataagagtggcatatcaccagtagcctggggggttggtagccttttcatcctgccatttattatttatatggcgcgtcggaaatcattaattgaaagagctaagtccaaccctgttgatacagataaaaacactggttttatcattctcttcttaattttggctggactgataatgtttacatacagagatattttattcagttaa

SEQ ID NO: 165978 - DNA, 582 bp, Enterobacter cloacae
atgacaacaggcacatcctccccctcatttcttcacgcgctgtcatttattcttgccaaagaaggcggctacgttaatgactccaccgataaaggtggtgaaaccaacttcggtatttctgataagcgcgatggccttaccgatggcaaaaccgacgttaacggcgacggcaaacccgataccccaattaaagatttaacctcagagcaggccggagaaatttactaccgcgattactggtcacctgcttattgcagtgactggccggatggcatttctctcattgtgtttgatgcggctgttcagcatggcgtcaaaaaagcactgtcgttattacaggatgccgcgggcgataaacctgatggcattgtgggacccaaaaccacagcggctgttattggtgccgaccccgaatggcttctcactcgttaccttcttcgtcgctcccgttattacgccgacattatcaaatcaaattccacgcagggtaagtacctcaacggctggtttaatcgcctcgatagcgtggctgatgcctgctgggaggttgttggcggctctgcatctgtaccccggagctga

SEQ ID NO: 165979 - DNA, 219 bp, Enterobacter cloacae
atgggaaaaggttgggatggctctttgcgttttggtcgtcgtgaccgcatcaaaaaagaagtgctgcaccgcgttgggggtggacctccacccgttccggtggactggaccggcggtgatggcactcacgcacacttctataaaaaaggctgggactcagtaggcccgaccgatattgcctggcaatgccagcgttataaggaaaaacaccgtgtttaa

SEQ ID NO: 165980 - DNA, 408 bp, Enterobacter cloacae
gtgtttaaaacttttaataccgactggctgaagcaggcattttgtcgcatttatcagtctggctggaccctggttattctggtggttctgtcgctatggctatgtaatttccacgggcgcaacgcttttctggtctggtggttgccgttgtgtggcgtggtgctcattggtgccagtatttttctgggcaatctgccgtacaggttaatccaacccaagatgcaggtcagcagatttgcctgtttctggtcatggttaatctgggtcgcgggtgcagtatcccttgcattagcccccctgtttgcccacggacttgccttcatctggctcgaccccctcggtgcattgatcggactgatgttctgctgctgggtatcacgtaaggggttactcaaatggatccgataa

SEQ ID NO: 165981 - DNA, 606 bp, Enterobacter cloacae
atggatccgataaccctttcaactattgcctcggttctgctcaaagctggtccttcggtcatgcgtactgtgggtagctggttcggtggtgatgctgcgaaaactgctgactcggttgccgggattgttgagtcggtcaatggcgcgattaatccccaggaccagcagcgtgtgctggaacagaagctggcacagcttccacctgagcagttcgtgcagctcgaatccctcaaagtacaacttgagcaatatcagcttgaacgtgacaaatcgctgctggctgaccagcaggcggcgcatcacgaacagcaggaaactatccgtaacggcgataacgccaccgacgaatatgtccggcagacccggcctcgcatggcacgtttatctctctacagcagcattgcctatgtgatgttgatgtccgttggccagcaagccggtgctgttgccggtgcgtatggccacgcgttttcaatgcccgcacccgactgggatattgccctgatgctggcctctccggcgctgggttatctggggttcagaacgctggacggctttgcccgcttcagtaaatccagcaaacacaaggtgatgatgcccaaatga

SEQ ID NO: 165982 - DNA, 231 bp, Enterobacter cloacae
atgacggatgttcttgaccaggccagcgaccttgaaaatgaagagcgtgaacgtgtcttaaaaagccatttaaaccggattaaagaacaacccgacaacgttggtttttgtaatgactgcggcaacgacataccgcttccccgcctgaaagcgcagccggaagcggtgacctgccacacctgtcagagcatcagagaacaaagggggaagcgtggactgggaagtcgttaa

SEQ ID NO: 165983 - DNA, 303 bp, Enterobacter cloacae
gtggactgggaagtcgttaaggggaactgggccatcatctgggcattgtttatgtcaggcgtgaatcttatccagctactgctggccaagacctacgtcaaacgtgaagagctggagctggtgcgtaaccggcttcaggggctggagaacaccattgcggtacttcccagccagaaagacctgcaccagttgcagcttgaaatgagcaatctgcgcggcgaactgcgcgagctggcaccgtccatcaggcaggtgtcacgcatcagtgacctacttctcgaaaacgaattaaaggataaatga

SEQ ID NO: 165984 - DNA, 288 bp, Enterobacter cloacae
atgcgtgaaattctcgacagtgaccagcgtctggtcattttgcgatcccttctggattgcggcgacagtgctaacgaatccattttgcagacttgcctgcaaacctatggccatagggtttcccgtgatgtggtgcgtacccatctgtcctggttgcgcgagcagggcctggtgagtctgagcgatgtttcggggtgctatgtcgctgaaatcagtgggcgcggtgatgatgtggccaacggtctgaccacggtgccgggtgttaagaaaccacgagccaggggataa

SEQ ID NO: 165985 - DNA, 279 bp, Enterobacter cloacae
atgatggctaagatgaagcctctatcaatagccgagcgtaaggtcattcgtaaactggccactgcttttgtttgcgctgacgcagaaatcaatgcagtagcaaaagtttatgaagaacaaacaggaaaaccctataaccgtaatgctcccgacagttatctgaatgtctttctcaattccgatcccgaatgtaagcgtctgtggacattgctacaaaaagacattctggccacaagcaaacaatttgccgatgggctgaggagagaacgtgacagctga

SEQ ID NO: 165986 - DNA, 1599 bp, Enterobacter cloacae
atgagtcacactacgccagcacaggaaaaattacgtaatcagtccgcttcagcgatcctctccggtgcgttcgatgccgaccaggtgctgctgccttatcagcgccggtggattgccgatacgtcacagctgaaaatcgcagagaaatcccgccgtacaggtcttacatgggcggaagcggctgatgcggcactgaatggttcgatggctgccagtgccggtggttgcgatacgttctatgtcggcacgaccaaagacatggcgcgagaatttattgatgcctgtgctatgtgggcgaaggcttacgggctggcggcatcagatacaggcgaagaagtgctccaggatgaagacaaagatatcctggtgtatgtcatcaacttcgccagtggttttaaaatcaaggcgctgtcgtccaatccctccaacctgcgcggtatgcagggcaatgtcattattgatgaagccggtttccagaaagaccttgctgctgtgctcaaagccgcactggcattgactatgtggggttcaaaggtccgtctcatctccacccataacggcaatgaaaacctgttcaatacacttattcaggacagccgtgcagggaaaaagcgctattccatccacagtattgatattgatgttgcctgcgctgaaggactctataagcgtatctgccaggtcaccaaaaaagcctggtcagaagatgctgaagaggaatggaaagacaacctgctgaaggataccgccacacctgaagatgcgcaggaggagtattactgtattccgaagaacggcggcggcacttacctgccgcgttccattcgtgagcgggcagcccgaggtcatggcccggtgctccgttttcagggttcggctgagtttaacgaccttcctgaaggtctacgcgcactggaaatgcaggaatggcttgagcaatatgtcctgcctgagctgaacaaacttccgcaaaacctgcgccattgtctgggtgaagactttgcccgtaacggtgacctgacggtatttgcccccatcaccgtcaacgatgacaccacccgtgaagtaccgtttctcgttgaaatgggcaatgtccccttcaaacagcaggagcaggctctcttctatatatgtgacaggcttccgaaccgcgacggcatcaaactcgatgggcgcggtaatggtcagtatctgtcggaacaggcggcttatcgctatggttctgaggtcgagcaggtgcagctttctgttccgcactaccgcgaaaacatgcctcgcttcaaggcagcatttgaagatgatgagctgatattgcctaagcacgaagatgtcattaatgaccttggtgccattcagatactgcgcggtgtgccgggtattgatgatgccagaacagcgggaagtgatggccgtaagcgtcatggtgacgcagcgattgctattttccttggctttcttgccagtcgggaagactgccgccgctatgaacttcatcgtctgaccagacccaccgatacccgccacaaccctgattcgggtgatgaccgccgtcaggttcatctgacccgtggcctcaagaaccagcgaggattactctga

SEQ ID NO: 165987 - DNA, 1578 bp, Enterobacter cloacae
atgttaaaacaaatttccggtgctattcgccgtctgctgcacccgtcaacaggtgaaccggtcaccattaaagataatgatattactgagcctgaagcgcgtggtcgcactatgagtgtgcggcgaccttcaccaggcatcagtatagccagtacactttccccgggcagtctcgccggggttttacgtaatgccattgagggcaatgcccgtgattacttcattcttgctgaagaaatggaagaacgtgacctgcattactccagcgtactgcgtacccgtaagctgaccgttgccggtattgttccgacggtagtggccgcaagcgatgaagataacgatatgcagctggctgacgcagtgcgtgatcttctcgagcaaccgcaggtgccggagctgttgtttgaccttcttgatggtctgggaaaaggtgtcggtgtctgcgaaattttgtggaatacccgcgatgcactctggaaaccccgtgattatgagtgggttgatccacgtttcctcaaaactgaccgggagaccctgcgtgaattcagactcattactgacagcaaccctgttgatggtgagcctctgagtaccgggaaatatattattcaccagcctcgcctgaagtctggtctaccgctgcgtaacggtctggcccgactggtggcggtgatgtatatgctcaagtcgtttaccgtgcgtgactggtgggcattcggtgagaagtttggcctgcctctggtggtgggtaaataccataatcaggcaagtcctgagcaaatccgcaccctcattgatgcgatcagttctttggcttctgattctggttgtgccatccccgacagcatgaagctcgatatggtggagacagccagtcgtaatggtggtggagcactgtttaaagagatggccgaatggtgtgatgcccagaccagtaaggcggtgctgggtcagaccatgaccactgataacggtagttcccgcgcacaggccgatgttcatgatcgggtgcgcatggacattgcccgctgggatgcccgccagttagaaaacaccctgaatgaatttcttgtgcgcccgttcatcgagttcaactttggcccacaggaaaactatccccgcgtcaagatgctcatcagcgagccggaagacctgaaggcgtttgtcgatgcacttatcccgttggttgaccgtggaatgaaagtgcaggaatccgaggttcgcgataagtttggactggccgaacctgaagccggtgcatccgtactggctccgacaaacagctttgccgtatcgggttcattaccggcactgaaccgtgagcaactggccctcaaccgctcacaggatgatgagattgacgcgctggttgccgaagggctgaaggactgggagaaatcaggcgatgcctttaccagtcccgtgctgcaactggccaatgaagttgacagctttgaagagtttctggcccgcttgcctgagctgcaaaaaactcttgaacctgatgacttcgccgagcagctggcgatgttgagttttaaagcccgtgcgctgggggatgcgaaagatgcggtctaa

SEQ ID NO: 165988 - DNA, 840 bp, Enterobacter cloacae
atggctgaacctgcaattatccctaaagaggcacttgcctggttaaagtccaaaaagctgaaaccgggatttgatttccgtgatatctggcgcgaagagcaaagtgtcagtttcaccgtggcgaagatgacccagcttgacctgcttcaggacgtgaagacactactcgaagaagcgcttgccgacggtcagaccttcatccagttccgcgagacgctcaagccattactggtaaagcgcggttggtggggagtccagatgatggatgacccgctgacgggtgagtctcgccaggtacagcttggtagtgaccgtcggcttcgggctatctacgataccaatatgcgcacagcccgcagcgcaggtcagtgggaacgtatcgagcgcaccaaacgtgccatgccttatctgctctatacgttgggtccctctcgcgagcatcgcgtcgaacacctgaaatgggctgacctttgcctgccggttgatgatccattctggcaaacacatttctttccgaacggttggggttgcaaatgtggtgcgcgtcaggtcagcaagtatgagtatgagcagttgcttaaaaaaggcgtcacacgcaacgtgccgcagctcgatgacaacggcaacccaacgggtcatgtcactcgcgaaagtgtacctgtcaggacacaggcacctgccactaagcggacaaaatggctgaacaagcgaacgggtgaagaagaaatggtgtcggaaggcattgaccccggctgggattacaatccgggtacaggccgtcaggcagaacttgaacgtcagttacgcgttaaacaacaggcatttgacggtgatagctaa

SEQ ID NO: 165989 - DNA, 969 bp, Enterobacter cloacae
atgagcattcctaaccccaaactggaacttctggcactttgctttgagttaccagaccttgctgataatgcccttcctgaatggttgccgatgatacctgcgggtaatttcattggccgtgatggtcgctcatgggtgaatgataatcctgctgccgttattgccacttcactgcgttacccaaaactgccgttcgatgccgagcattccactgaaatcaaaggtccactgggtgaagaagcgccagcctatgcctggattgatgctatgcgcgtcaacgaagatggcagcatcgatgcgcatatcgaatggacccctgacggtgaagcgctcgttcgtggcaaaaaatatcgctattacagccctgcatttttcaataacggcgcacgccaggttacccgcctgtccagcgtcggtctgaccaataaacccaacctgtatttacccgctctaaattcggagaaccacgagatgactgtacctgtccagattgtgacggtgctggggctcgcggccgctgcgtctgctgatgacgttgtggctgctatccagcaaatgaaagaccgcgaaaccgtagcgctgaaccgcgctgaaaatcctgacctgacgaagttcattccggcagagacctatcaactggcacttaatcgcgcccagacggcggaagagcaactgaaagcgcaggcaggaaaagacgctgaagtcctggttgatggtgctattgcttccggcaaagttgctccggccaaccgcgatatgtatctggcgctttgccgcagccaagaaggtcgcactcagttcggcgagtttgtcaaaacagccccggcattggtcaacactgacccaaccaaagggaaaggtagtaaggaagacaccacgctgaccgattctgaactgtctatgtgccgctcaatgggcattaaagaagaagaatttttggctatccgtaataaagaaggagctcgttaa

SEQ ID NO: 165990 - DNA, 897 bp, Enterobacter cloacae
atggctatcacgatcagtactgatgtgttgtatgcactcaaaacagccctgagtgctgcatttacgcgaggtgtaggccgcgttaaccctcaattccgctcggtggccagtgtcattcccagcacgggcgcatccaatacctatggctggctggatgattttccaggtatcaccgagtggttaaccacccgacagctcgcccagctcaaacagatgggctacagcatcaccaacaagacctgggaaagctcgatcaaggtgaagcgtgaagctgtggaagacgatcagcttggtcagtactccattgttaccgaacaatttggtcgcaacgtcaccattttcccggacgagctggtattcaaactgttgtgtgatggtttcactacaacttgttttgacgggcagtacttcttcgacaccgatcatccagtaggttcgggcactcagagtaacgttattggcacaccgactaccgatacaggtgagccttggttcctggtcgatgccacgcaggcgctgctaccgattatcttccaggaccgtcgcccgtttgatttcaaggcgctggatgacctgagcagcgagcacgtcattctcaataatgaatttatctttggtacagatggccgctgcaatgtgggttatggcttctggcaaaccgctgtgggctccaaagataccctcaatgttcataactatgagttggcatatcaggcgatgcagagcatcaccaacagcgcaggtaaaccgctgggtatcacaccgaccctgctggttgtgggtaaaggtaaccgctctgcggccaaggggctgattgaagcggtcaactccgcgaatggcgcatcgaacatctactacaaagacgtcgatattctggtcagcccttacgtcaaataa

SEQ ID NO: 165991 - DNA, 555 bp, Enterobacter cloacae
gtgagtggaaaaacatcaaaggcagcgggtcagcaaaaggttaaaaacggcactggcgcgacatcatcgccggaagtggcatcgcctgttatcactgacggtgcgggacatgagccgtcagtcactctgccagggcattacattgcagtgggttcacaacccgtcagccctttaaccaatacagttgaaggtcttcagccatccggtgaagtcgttctggagacatcaggcctggtcgcaacagaggctgaacatatcaccacaacatccgatctgttagcggcatcatcaccaacattcccacaaacagatgatgtcgtgactctggaagtgcgagccgttcctgttggtggcttctaccgttgcggccgtttctggccacgcgagcccgtgaatgtcttcgccagtgatgacccggaaggtgacaacgccactaacagtgacggactgaatatgattgttgactgctttatcagtcatgccgatgccgcccgcctgaaagccgagccgatgctcatcgtcaacgttattgaatcggtaacggagaaaccgtaa

SEQ ID NO: 165992 - DNA, 441 bp, Enterobacter cloacae
atgggcatttacgtcacccgtgatgacctgctggcggtggatggtgagttggtctggaatatggccatcgacaaatccaccaatcagctggatgacgcgaagattgaaacggctattgatgacgcagacgcggagattaattcatttctggccaaacgtttccagctgccactggcgatagctactatcccgcgtccacttcaccgggtggcggtttccattgcgatctactggctgtctgagcgtgacagccagattaccgacctgatccagaagcgttatgacgatgccattcgtacgctcaaagagattgcgaacggtacacgtgacctcggactgccaacggccagcacaacgcccgaaaccgataacggcaaaattattgtggtatcggacaaccaacgactcttcacccgcaacaagctccggggcgtgctctga

SEQ ID NO: 165993 - DNA, 543 bp, Enterobacter cloacae
atgggtatttccgttgaggtgatgggtgcggagaagctggcgcaaatccgcatggccatcgagaaactttctgacagctcgctccagcaggagttgctggaaagtatcggtgccgttgttgaatcacagacccgccgtcgaatcagtgatgagaagtcatcacccgcaggtgagaaatggcaggcatggtctgacggttacggcaagactcgtcacggcaaccagagccttttgcagggtaatggtgacctgatggacagcattcagttcatcgtcgagcgaggccgcgttcgtgtcggttccccgctcgcttatgccgccgttcatcaggatggtttttctggcagcgtctccgtaagtgctcataaacgccttatcacacaggcatttggtcgggcactgaaacacggtgtctggcagtcagttggtgcgcaaaaacgcatgatgaatattccgcagcgcgaatatctcgggctgtcatctgaaaatagtgaagagctgatgcacgtcattggcgacttctggcaaggggtgctcccatga

SEQ ID NO: 165994 - DNA, 603 bp, Enterobacter cloacae
atgaataaccgtcccgagctgctgaccaccggcagcacggttgcggccgcagaacatattgtggactggctgaaaccggtactggagggtgaaaacctggaccaggtgaaagtgatcgagcgccatatcggtcagttcaatacaccggctgaagtgaaaacatatctgtctgatcgcaatggttgtatccgggttgcggcactgcgtatccgtaatatccgctctcgtgcaggtggcaccatcggtgatgtgacctgggctgcttatgtcatggccacagacgcatggggatacccacgcgatacgcgttgcgaaattcttgtgggcaaactggctcgccggattgcatcgcgcgaagcggcatctggcatgggcgctgaacgtgccgccagcgccatcagtgccgacaacatctataccagcggactgaacgatctgggcctgaccatgtgggctgtgacatgggagcaggagtttcgacttgatgaagaaatcgatatttcaacgctccctgacttcctgcggctgggggcaacattctccgtcaatgacggtgcaaccaacattgatggcgtgattaacgtcagggaacctaatccatga

SEQ ID NO: 165995 - DNA, 207 bp, Enterobacter cloacae
atgaaaaaacacattaagcccgcccgtgatgggctgctggtccgaaaaaacaaaggtgagcatctgaaggctgaaggcgaagtactgctgatgagcgcctggtggcatcgccgcgaagctgaaggtgatgtggttatcactgatgtgaaggagcctgcaaccgaggttgctcaagcccttcagaataaaaatgtgaaggagaaataa

SEQ ID NO: 165996 - DNA, 1479 bp, Enterobacter cloacae
atgtctctgggctctattcctgatgatatccgcgttccgctggtgtacatcgatatcgacaattctcaggcgatgggcagcgcaccggcgcagtcccgcaaagtgattgttattggccagcagagtgccactggcgcggctgctgctctgacccaaaaccgtattaccagcgatggtcaggccgagaagctgtatggcaaaggctccatgcttgctgagatgctgaaaaccttccgtaaagccaacagctataccgaaacctgggcgatggggctggctgacctggcatctggcgcggcggcgaaagccgagctggcagtggttggcactgcgacggcggcaggtacgctggcattattgattaatggtgtctctgtgcaggtcggtgtggatgagggggacactcgcgatactgtggccaccgccattattgccgctgtcgctaaattgcctgccacgcaggtgggcgcggcgttaaaagcgaccactaccgatacggtagaactgacggcgaactggaaaggcgtcaccggtaacggcatggatgtccgcaagaattactatccaggcgagcaaacgcctgtcggtattaatgtcaccatcactgactttgcaggcggcaccggcacccccgatatcagcacagtggtagcagcactgggtgacgactggtacaccgatatcgtttatgcctggaacgatacccagagtctcaacaccattcgtgacgaactggtgacccgctggggaccgctgaagatgattgaagcccagctttgggcagctttccgtgggactcatgccgagtcaggcaccttcggtgatgcacgtaatgactggctgatttcctgcatggggaccaatctggcaccgcagccatcatggttgtgggcggcgtcttatggcggtatttcttcctactatctcgccatcgatccggcgcgtccgctgcaaacgctggtactgccaggcattctgccaccggctaaagaagtccgttgggatatgcctgagcgcaacctgttgctgcatgacggtattgccacgcatttcgttgatgcgggtggcaatgtctgtatcgagcgtgaaatcaccatgtaccgcgtcaaccagttcggcgacccggacacgtcttatcttgatgtgcagtccccggcaacgcttggtcgtatccgctacatcatcaaaaaccgtttctccagccgatacccacgtcacaagctggcgggtgatgatgtgctggagctgcttgacccaggtcaacccgtgatgacgccgaagattgcacgcgccgagctgctggatatcgcgctcactgaactagtgcctgccggactggttgaagacttcgacgactacaaagccacgctcgatgtcgatatcgatggcagcgataaaaaccgcctgaacttcatcgctcacccaaacctggtcaatcagctgcgtgtgctggctggtctcatccagttcaaacagtaa

SEQ ID NO: 165997 - DNA, 357 bp, Enterobacter cloacae
atgccgagaattctggggatggcgtccatccgtattaacggacgcgagattaaaaccgaaggtaaagccacccttaatccgggtgggtttgcccgcgcacagcatatgggaggcggtaaggtctgggggtactcccgcaagatggcagcgccttccatcaagctgactatcgcggcagcggatgatatggacgttattgaaatcagtggctgggaagatgtcacggtgatgtttgaaggtgacaacggcctcagttatatgatgaccgaatcagcgactgataacccggcagagctggatgaagacgcaggcaccatttctgccaacttcatcggcaccaaactggtgaaggtgtaa

SEQ ID NO: 165998 - DNA, 384 bp, Enterobacter cloacae
atggcacagacctcatttacattgaaaaagggttacatcacgggcaaaggcaccgaagacgaaacccgccacaccacggtaactctccgggagctgaattctcaggatgttgttgaatcacaactggccgcagagcgggtcgtgatcggtgagaacggcaaagcagtggcgtactgctctgaagtgctgatggggcttgagatgctgcgccgccagattatgagtgtcggcagcattcccggtccactgagcgtgaaacagctctatgccttccatcccgaagacctggaacagctgacaaccaaagctgccagcatggatgaactgcttgcagggaccgcctcacgggggcgacctgatgccgctggcgacggcactcagtag

SEQ ID NO: 165999 - DNA, 1788 bp, Enterobacter cloacae
atggcaagccgcctcaccactgaaattctcattaatctggcggggaacctgaccgccaaagcccgccagtacggtgccaatatgtccgagtttgcccgtcgtaatgagcgggcaatgtctgtggtgaaggccacgtcagcagcagcgggccgagggttagatgcattgggtaaccgctacaccgggatgattgccgggttcgctggcggtgccatgcttcgcgaatttgctcaaaccgatcgccggattacacgcatgggtctggctgctgaaaagacccgggcagagatgtctcagatttttagcggtatccaggatgctgcaatcaagttccgtgtcgatgacagtgaggtgacaagtgctgtcgaaaaaattggaacggtgacgggtgatattgattttggtgtcaagaacaaaaataatctcgccgcttcaatcgcagcctctggtggttctggtgaatcaatcggcggtttgttcgcacaattccccaaatatcaactaacgtcagaaaagcaaaccttggaggcaatggataccctcaacaaactgggtaaagagggtgccttcgaactggctgatatagcagacaagggggttagggctctatcaatgtatgccgcagccggtggcacggggattaaagggattaaggatgtgggtgtcgcaatggaatctgctattgatgctactggtgaccgagatacagcttcaacagcagtcgaaaaccttattcgtgatttacaagccccaaaggttgtaaaggaattgggccgcaatggtattaacgtctttggcgatgatggcaggatgcgttctcttcctaagttaatggaagaaattgctaaacgttcgggaaataaaggagctaaagaacaaaataaacgcctggtcgaatccggttttaatcaggacagcatcctcctgttaagtagcgttactactggtaaaggtgcagaaaaccttaagcggtataacgctgtaacagctgatggatcaggtattttgtcggatgcgaaatatgcggctcaggactttacatcagccttgactagcctgaatggcacctggaagaaatttgctaatggcaacctagctaaacccgttcaagaattagctgacgcattgaattcagtagaccagaaaaccgtccagaactggttggaggttggcaagaatatcactattgcagttggtggcattattgcagctcgcaaagtattccagattggtaaaggtgcttgggatttatttggcggtgggaaaggtaaaggaattccaactggcgtggctgatgtattcggttcgggggttatgccggtatatgtgacgaacatgccagcaaatggtctgggggggaataatgataaggggggtgatggaagtaattcagacgtgcctgagctaccgggcaaacttggtttagtttcaacagcaattaataccgccaatgaaattacatcgctaattccatttcctgaaactaaagaagacaaacaagcattaattcaaaaagttcaggacaatgctaatcgccccagcatgtggaatgacattaaagactggttcgcttcagcgaacagtgacccacaaatcgcgaatccgcaaccttgggccagccttcagccccagaatcagacacccgtttatccttccgttccgtcgcaattaaagggagagattcgcgtggtcatcgaaggtgatgcgcgcgtgaaaagcgtcaaaatggaccagccaggcgtcaccctcagcgcccagtcaggcgtatctaatgtggagcagaactga

SEQ ID NO: 166000 - DNA, 1269 bp, Enterobacter cloacae
atggctaaaggtgaatgggaatccctgcgtgatgccacgtttcgcaatgtaccgttttatcttgtcgatgatgaaggcaccagcggccgtcgtgctattccccgcgcataccctaaaaaagaagtgggctggactgaagataatggcgcggtactgacccagcagcagattaacggcaagctggttggaaagaactttcaaaagcagttagaagcccttttaagagcgcttaatacacccggtcccggcgagctggtccatccgtggttcggcattcagaaggtccaggttggtaaggttacgcaccgcctgagcacggaagaaggcggtattgcctacgttacgtttgaagtgtttgaagcaggcgaacgcctgtttccggcaccgaaagaaaataccagcctgacctcactaagcgccgctgatgctgtaaaagaggcgtttgccaacggtgattattttgcagcgctcgatgggcttggcgatatgactgacactttgctcgacgacatgcaggggctggtgatgaatctgccgactatcccgtcagcactgaccgactgggttgatcgtgccgggcgcttcaaagacctcgcaggtgtcattatcgcaaagcctggtgaactcgtgcgtcaggtcaccagtctggccagcagtattcgcgatatcgtcagtgagccaccctggtcattacgggtctatgaccagctccgcagccagtggtcgggagaacgggccgctaagtctgcaaccaaaacgatgccgggagatatgcccgttctggcaagctctccgtctcaggggattaatggtgtggcaagcagcatatcgccaacggccatcacaccatcacctgcgatgcagaccaacataactgacttccgccagatggtactcatcaccgctgtagtcgcccagtctgaagcggtggccacaatggatttcaccacatcagatgaagcgaaagccgctggcgataaactggcggagcaattagctgaacaggctgtcactgctgtagaaaacgggcagcgcgagttatggcgaacgttgcgtgatttacgctttgcggtagtgaacgatgtgcgcgttcgtggtgctcagttgcctgaactgcgtcagttatcacctacggtcaccactacggctgcggcattagcctggcgcgaaaccggcaatactgaaaatcgtgaagagattgtttcccgcaaccggctgcgtgacccgtcgtttattctgccatccagcactattgaggtgatcgaatga

SEQ ID NO: 166001 - DNA, 1101 bp, Enterobacter cloacae
atgatggagcctgcaaccgctacagaaagtgttgttctgacagtcagtggccagcagtgggatggatggactgagatgtccattacccgttcactggaggccattgccggtgagttcgatctcactgttaccacgcaatggtctgaagccgccccgcgcaccatcaaagaaggattaccctgcgcggtcactatcggtacggataccgtgctcactggctatattgatgattttattcccagctacgatgctgagaacgtctcgattcgggtcatggggcgcgataaaaccggtgaccttgtggacagttctgttgtgcataaatccgggcagtggaaaggggtgaagcttgagcagctcgcccgcgagattgcccagccgtatggcattaccgttatcagcgagacagataccggcgaagtcttcccgagtgtggtgcttgagcaaggcgagacgggctttgagctgctcgacaggctggctaaacagcgtggtgtgctgctgacatccgacgcaaagggccagctcatcattacccgagcctcgaaaaaacgggcgtctgttgcgttagtgctgggtgaaaacatcctggcagcccgtggtcgcttcagctggcgtgagcgggcaagccagtacattgtgaaaggctcctccagtgccggtggtgcaacatgggatgaccagccagcgaaggttatcggcggacgtcaggtcagcatcgatgacactgaaattaaccgctatcgcccgaaaattctggttaatgaagacagcctgacggttggcggggccagcacccgtggcgactggtataaagcccgcatgatgggcgaagccaacacgacagagattaccgtcgcaggctggcgtgagaacggcgacagcggtcccttgtggcaaaagaacctgctggccgatattcgtgatccggtgcagaacctcgatactacctggctaatcaagagcgtgacctttactgaaggtgacggtgggcgcatcaccgtactggcactggtgccgcccgagtcgatggatatgccggagacaaaggcgaaagcgaagaaaggcaagaaagcgaaggtggtagcaacatgggactga

SEQ ID NO: 166002 - DNA, 543 bp, Enterobacter cloacae
atgggactgaatccggcaaatgttggccgtacgcttaatcagattggacgccgtctgcgtttgctggttgaccgcgcggtagttcgcattgtgactgatagtctgggtcgccagaaccttcaggttcagtcgctggccgatgccaccaatgatgatgtggaacgcttccagaactacggatttacctctgtccctcctgccggttcagaagcgattgtgctggctgtgggtggcagacgcgaaagtctggtggctatcgcggtggaagataagcgatgtcgaccaaaaggtctggcgtcaggtgatgtctgtatttatcatcaggacggtcagtcgcttattattttaaaaaagaatggcgtgattgatattagagggaaaacggttaattacaccgccgacgaattatttgagattaatacagctcaatttaaatgcgtcggtccttctgatttctctgaggatattactgttaacggtaaatccttcctcaaacatattcataaggatggcgacaatgctgatacaactgcgcccatatga

SEQ ID NO: 166003 - DNA, 453 bp, Enterobacter cloacae
atgactatcggactgagctggaaaaacctactttctcgcggtgatattactgttcaacatgacggcctgtcgcttgacgacgggcttgttactttagtccttatctgcctgttcaccgattctcgcgctgatgctgatgacgaaatcccggatggttccggtgacccacgaggctggcccggcgacacgttcagtgattatcaatggggctcaaagctctggttacttgagcgtgaaaagctcaccgaagctatccgcctacgggtagaggattacgccagcctttccatgcaaccgctgttgcgtgaaggttatgcccgtaatgctgaagtgacggccacaatcgccgcgtctgatcgcatcaactttattgtcacattgacccgtcctgataaatcgctgctgactgttcagctaagccgacgctgggaggccactgcgaatgccatttaa

SEQ ID NO: 166004 - DNA, 1077 bp, Enterobacter cloacae
atgccatttaatacacccactttgcgaaaaataattgctgacggtgaaaaggatattgagattgaacttaatattccaaaattaccgccagttggtgttgagaacgcaattaatatatccgtcagtagtcaggtgcgtgatgtatatgaccatcagagctggattgctgaccagataattccatccccaaagtctgacgatcagaccattatcgacaccgctgcaaccgaaggtgttattcgcaaacaaccgacatttgcaagaggaacggtgattttcaccagtgctgatgctttacccgtcgacaccgaaatgcagacagcgtcttgggttgtctacaaagttacccagtcttcgcaatctattgctggggtggtcacagttgaagtccaggctgatgaagttggtgtagggggaaacctgccagcaggtgaattactaaccctgctatcaccaatagcaggaacggacagtcatggtgttgtcgcagtcacaggtattactggcggtgctgatattgagcctgttcctgaacttttagatcgtcttcttttccgcaagcgcaatccacctgtaggcggcgcagtgcatgattacgtcatctgggcgcgtgagatggcgggtgtgagccgcgcctggtgcttcgatgtgtggcatggctcaggcactgtgggtcttgcgtgggtctatgacgaaagaaccgtaattacccccacagaagcagaccgtacagcgatggaaacttaccttttccgtcacgctgaccccgcgacgggtctgtatgttggtaagcccggtggtattgaagtctggcctgttgctctgcaattaaaacccgttgagatgtcaattaaacttacccctgataacagtcagacgcgttctgccgtgcaggccagtctgaacgcacttcagaaaacattatcacccgcgcagaatctgcccgtttctgctttgcgtaccgctattggcgcatcaactggagtgacagattacacattatcagtcacagatgatgttacagccgcgacagatgagctgatcactttaggtggaatcacatggctcacagtgtaa

SEQ ID NO: 166005 - DNA, 579 bp, Enterobacter cloacae
atggctcacagtgtaaatgagtggcttcacgcacttcagcaggtgatgcctagggggaaagcctggccacgagagctgaatgctgatttaacccgatttttacgcgccttagcacgacgtttaagccgtgttgaaggcgacggtgacgcactactcagtgaaatgcgccccgaaacaacatttcagttactcccggactgggagaattacctgggattgcctgagtgcgaactggatggcgtaacggttgaagaccgcagacgtgcagccgttgaaaagcatcaccgtaagggtggactagccccgtggcagattgaagatgtggctaaggcgctgggattcaccgtgactgtgcgggtgattttgccgcatcactgtatgcggagctgtatgcatccgctctacccagcccgttatcgttggttattacagattgatgttcgcgatattcagggtgggcgttttacgtgcatggataacgttctgacacctttattaagtaatcgcgcccgcaaccttgaatgcgttttatctaaataccgtctggccggaaccggctatgaatacttttattcctga

SEQ ID NO: 166006 - DNA, 2247 bp, Enterobacter cloacae
atgtattttgttgataacggctctgccgttcccgttatgccgcaggtcaaacctgtatccagtgctacaccacagtttttcactgaaggtgggaatggtactccacctacatatcctggtcccgactggttcaacatcttccagctggagctgctcaacgtacttaaagaagcccagattaaccctgataaagcaaatcatacgcagcttgtcactgcgatgaaaaagctcttcctggatgcttcatcaaacggctctgatattcccgacaaagcggcgtttctctcaaatcttggtatctcagcacctggcggggcagggctggttggaattgggcagtcaactatcgcgcaggagactccgttcgtctccccggagatgtatggggcgggggatgcagcgtcacttagtgacacgcagcctctcatagacgccttcgctacagctaaaacgatgggagtaagtgtaaagctgaagcgactttatcgctgcaatagcaacatcatgctgactgcatttatttctgatgtagttggtttaggtcagggtcagacgggtattatttttgaatctgggttcggttttgttgttgataactcggctatatcaggtacccgcaaagccatgcgaattttaaatacttcaatccgcacccgaggaaatctgaatgctacagccctcagattcaccggaacgcacaccgcaaaatatggtgagcagctaaagctcacggatgtgttatttgcaactgatgaaactggtgagttcggttgggattgcaacatacatcttgaccaggccagccaggtatttatggaccactgttcactcagtggcttgacatctgtacctactaattgctgtatcagactgacaaatcaatctcgtgacgtgaacttcacaaatagttgcgcaagtgactttaacgagtttatggatgtgaccggtgggtcggaaggtgtcactgttgcgttcaaccacgtcattgccgggcgccgcggcatcgtatctcatgacactggcggcaattcactctgtgttattggtaaccatttcaacacttctttgtcggttgttgaattaggcgagggaaccggcgccgggagtaatcattgcgaaatttctaataacttctgcattgtattcgaccacccactagattcagctgccccgtacactggatttgatatttgttctaattataaccaactgtccagtaaccagattctgttaacgggattcacaaaaccgaatgtcgttggtgtaaaactcaggagaaatacatcagggtcaagggctgcaactaataatacgatagcaaatccatattcaaacaatttgtcccagggcgttgttatcgaggtcggagcagcaaataaccaaatctacggaaatcagcgcgttaatatgacgcttgccaatgacatagtggatgacggtacgaatacccgatactggttgatggattctgataacaactcgtttctgactggtgatattaaattacatagagtaggaactgcaggaacaaggcaaatccgtgtacatacaaccgcggattcggctgttgcggatggcattatccgctttctgggagggacggcgggcgtagcaaatgatggtgtatgtgaagttacgtttaggcagttagtgactaaattaatacgcccatctgctaataatacgtatacgtgcggggatgttggcgccgcatggtctgggggctttactcaaaccgccttcaccgtcacgtctgacgaaaggagcaaggcaaatttaacaccattcgtaatcacgtcagacgagcgccgtatggatatgccatctgacagtgaagatgaatggaatactttgcttgatgcatggggcgaggttggattcttcatgtatcaattctcagacagggttgaaaagaaaggtgaagagaaagctcgttggcatttcggggttgtcgcccagcgtattgttgaagctcttaccaaacatggccttcgatgggataagtacgcttttatctgttatgacgaatgggaggctgagcaagaagtcatcgaggttacccctgctgtattggataatgatggcaatgtattggagccagaacgagttgaaattatccaggctgcaagagaggcaggaaataaatatggcatccgctacgaagaggcattgatactcgaagctgcatggcagcgcaggaattaccagggcctattggtgcgcatagaggtgttggaggccaagtag

SEQ ID NO: 166007 - DNA, 681 bp, Enterobacter cloacae
atgggtttaccgctgtttccgggtacctcaatttctcttccggcgaacctattagcttttttagacataatgctaacctggccttatctcaacaaagcaggggtaagacagatgattattgggtatgcacgagtatcaacgaatcaccaggacacagagctgcaaatgatggcgctgaaagcggctggttgtgagcaaatccacgaagaacgggccagcggccgcaacactaaccgtcctgtgctcagaaagttggttaatgccctgcaaccgggagatgagctggttatctggaagctggaccgcatggggcgtaacgttctctatgtgctgttgatgttgcagacgcttgtcgagaaaaaggtgaacatccgctctattacggatgcagtcgatatgagttctgccagtggtcgctataacttccgcaacattatcaatatcgcgcagtatgagtcagacctgaactcagagcgcactctggccgggctggcgattgcgaggtctaaggggcgctttggtggccgcaggccgaagtttacggatgagcactggagtgaattcgagaaagagcttcgttccggttgtacgcatcgtgaagtggcgaaaaaatttggggtgggtatgtctactctatataaaaaattcccttcgacagcgtctcagtcggctcaagcctga

SEQ ID NO: 166008 - DNA, 867 bp, Enterobacter cloacae
atgacaagaacagaaatagtaaaggcagtgactaaatggttcgacgttgacaagtataatgtgctgaacgagctgacggttgaacagatatacatagaagtagaaagacgtgttcttgcttacaatctgctcacccaatacgattcgcttaaaccccaacttaaagctcttgttgatgatcatgagcagaagatacagtccgggaaagtcctctttaatgaggacgctaaaattgacaagccagaagaaatcctttcatcaagctacatagcaaatccacttactattgctggtgcaaaagatgtcattggggctgttgatatggtgaatagacttattggcccggaagaagaggctaagaggtcaaggcagctttcgcaataccttagtcaagcgggcatcagtaaagatgtcatgtttgttgaaattcatctctcagaggcttctacagaagacatcattgagcatctgaaaacgatgataccgcgatggaagaaggagcttaaggtgaagccccatgaagaaagaggttatcgttttggggtcggttcgatcaaaagagtgatgaagtataatctcataccgatgtttgacctcatgttttgggaaaaaaagactggcaataagattggcatggcgctgctggcgagactgctttaccctcatttgattagtgaaaacaaccgtagcgaaggcatggtaaaagatactgattatcctttggctgtaggttttatgaccaaccagagctacattaaatcgttaggcgattttatagttaaatacgactctgacagggattggaaagtgtggagtttcatcaactactacttacccgaagacgagcaagaagaacaagaaaagtaa

SEQ ID NO: 166009 - DNA, 219 bp, Enterobacter cloacae
atgaatacgaatgtagtatcaaacagtaaaagacttattcgtttaccagaagtattaaatcgtactggtttatgtaaagcgtggatttatcgtttgattagtcgtaatgaattcccatcgccaataaaacttggtgaaagagcaatagcattcttagagagtgatattgataaatggattgatgaaaagatatatttatcacgtaataaagtagcgtaa

SEQ ID NO: 166010 - DNA, 129 bp, Enterobacter cloacae
atgaccaattttatcgcacacaacagcgttacacggcgttatctgaaacgtggcgagctgatggctaaacgatttaccagcagctctttgcgaggggctgacggtaaacaaaaagagaggcgcttatga

SEQ ID NO: 166011 - DNA, 201 bp, Enterobacter cloacae
atggatagcctcaatgtcatttccgcccgcgccaagctgatttcatggaaaagacagtttggacctttcgtcagatgccctgaatgcttccatggtctatccaagtgcgatctgtgcaaaggctctggcaaggttatccaggaagatatcgactcatggaataactcagtagcaaaatttatgcggcaggaggtgaagtga

SEQ ID NO: 166012 - DNA, 171 bp, Enterobacter cloacae
atgaataatcctctcgcacgcgtcatcacaaacgaaatcttccgcgttcggactcgccgtcagcgcaagccagtgattaagccgtccgacatcccgaccctgaaggactacaccgcccgtctggtcgataagaaatggctgcgcctggcggcacggaggaagtcatcgtga

SEQ ID NO: 166013 - DNA, 306 bp, Enterobacter cloacae
gtgagcaatatcattcagcaacttcaagattatgacctctgccagcttcagtcgctgaggaatcacatcaacgaacttatcgcccagaaaaagcaggaagagaagcgagttgtttggcgggtaatggatgcatttatggccgtagataacttcagggaagaagattatttgaaggctgtagagtgcctggctgcagaggcggaaaaaataaatgccgatgagcactccaccaataaggagcgcgagttgcggatcgtcgctgagcgtgtgcccgcatctgaatatgagggctggttcaatggctaa

SEQ ID NO: 166014 - DNA, 195 bp, Enterobacter cloacae
atgctaaaaaaatacttcgttgcttatcagatcttaaaacatggcgagcaacctatttatggttctgctgttctacctgatcatgacgatgttgaaccagatgttttcttcagcaaagtagcaagagaaatagccaaaaaacatatggtactgcttgaaggggtaatcatcacagccttcaatcgggttaattaa

SEQ ID NO: 166015 - DNA, 156 bp, Enterobacter cloacae
atgaaacgaggcgggttactgcaaagcggtaggctttatcgtgttggtgaggtcgtcatgcactcatttactccaccaaatgcactcaagcgcagcgagcaacttaaaggccagtgcggaaacgtgacggttgtgctgcgctggaaggagggctga

SEQ ID NO: 166016 - DNA, 675 bp, Enterobacter cloacae
atgactgcactaatcgacatcggcgaggtggtgataagcgatgcccgagcaggcggcaaagattacctcctaagaccatcattcgaagcaatgaaccgtatcggcacgccagcggagattgttcaggtctacgccacaatccacggcgaagaggtttccaggctcatagacgtttgcaccgctgtgcccggaaaggctcaggaatggctctcaccttcgtttaatcgcgccactgagaagttgctgtcaacgtgcatgcaagtcctgcaggcgtgttgtgacgatgacctgacgccggtgatcggcgaatggaagggctggagtagatgcgttgtctaccgccctggaaagatgccaaagagtgacatcatcttgctggcccagcatctcatgcagcacggcatcatcggcaaggcgaaagtacgaaagctgcagcgtcatgagaacggtgaaaccaccaacgagtttcggaccgtagattatatagtcgcagcgcaaacgcactttgctataagcgaggaagaggcttcccgcctgaccatgaccaagttccagatgttgctggccgcgaagtatccagagcagaaaggcttcacccgcgaggaatacgaaagcgtggctgatgatttcctggcgaggcaggccgcgcgtcgggcgcaggcgaatcagaagtaa

SEQ ID NO: 166017 - DNA, 543 bp, Enterobacter cloacae
atgatttcctggcgaggcaggccgcgcgtcgggcgcaggcgaatcagaagtaactggccttcactccgcccatctgttgagatctataaatcagctattaccgttgcgcctgtgctattcctggataggatgttcactttcacctatggggataaggatatgaagcgattgataatcgtaagcattgcagcgctatcactggcaggttgtggtaagccacccccaacagaagatgaggccttccagcttgcaaagaaagaaatgtcgatggctctatgcggggataagagcgcaagctgtttctctgtagaagggggtagcgcaaaggtttcagagaggaaaagcgacaacacctataatgcttcggcaacctttagatccattaagggtaatgggaagagtttggattacagtggtggtgtcgtttcgtttcagatagatgcagagacgagcgctgtttatgttcagactatagagggctggtcagaagatggaaataaaaccatagcgctctgtggtcgcgattataaattttgcagataa

SEQ ID NO: 166018 - DNA, 2241 bp, Enterobacter cloacae
atggctggagaagagcaagtaggaaacatcgtctatcaggtgcagatggacgttgccaaccttattgaggcccagcgcaaagtcaacgaacggcttgagaagatgaatggtggagccgctaaggccgctaaatcattagatcagctgcaaaccagcatcagccgagttgcaagtgcgattgccacatcaattgttattgaatggggtcgtgcctttcttgttgctgcggacaacatgagtcaacttaatgcccgtatcgagaggttgacagggagcgccgccacagcatcacagaccatgcaaagtctgatgaatattagctctatgactggcggttctctccaggacacagccaagctgtgggagacgttaagcactgccttgagaagtaccggggctacgaatggacaaatactccagcttacagaaactcttcagaaaatagggcggattggtggaacatccgccgaggaaatggcaaacgctctgcgccaattcggtcagtcgatttcctctggtgttgtccgtgccgaagagttcaactcgatactggagcagatgccagaactggctaggcaaatggccgcaggccttggcattagcattggcgagcttcgccagttgatgctggatggcaaacttaccgcgcaggatgcgctcaacgccatccagaaacagaccggcgttgtgaacatagagtttgcgaaattgccacgcactctgtcacaggctaacgcttcactgacaaattcatttttatcgatggtggactctgtcaatcagactacgggtgcgagcgcagccatggttgcagtgattgattccatctcttcagcgctggacaggcttaccgggaaaactgcatcggcagctgcccaaatctctgatctgaacagcactgcggaaatgttcgaacgccgcgcccgaacttattcatggcttggcctcgatgggtgggaggcgcaaagtaaagctcttgtcggacttagcaacaaggctgccatgctggttggcgacctggatgctgttaagaaagcctccaacattgtagcaaatacaaagccaattgagataaaggctgtcgccgctgccagcaccggaaaaacgaaaaagacccaagcagaaaaagacgctgaaacatacgccaaagctcaggaatcagttaacgaaaaactggatgagttgaagcagaaggctgatctttctgcagatagcgtcgaaggactatcccgggcgcatgccatcctgaatgctgagcagtccctcggaaattccgccaccaaagaccaaataaagctcgcgggagggtatgccgccagaatatgggacacaaccaacgccctgaaaatgcgtcagcaggcggagcaggcctcccgtttcatcagccaggaggtctctgcctctaagatgcagcgtgatccctatacgggcgaagcgcaggaccccgcagcgcaggtcaacgaggaagagcagcgtaagcttgaggctctgactaaataccagcagatgggtgtgataaacgcacagcagttcgaagacgggaaaacagccatcgcaaggcaggcttctaacgaccgcatcagcattgctcagcaggaagctaagcgtcaggttgacgtgatgaacatgctgcttggtgggattggcgaggggttctctggcctggctgaaatcgtgtccaaaagcgctggcgaaagcaatgctgcgtataaaacgctattcgccatcagcaaagcttttgccgtcgcacagtccactctgaaccttcagcttgcactttcaaacgccatggcatcggggcctttcccctggaacatggctgcaatggcgcaagtcgccgcagccggtggacaggtgatttcctctatcggagcaatgtcatatggcggcgggcgagaacacggcggcccggtatctgccagttcaatgtaccgggttggcgagggaggcaagcctgagattttcaaagccagcaatggcagccagtacatgatcccaggcgataacggtcgcgtcattagcaaccgtgatattggcggcggtggcggggcgttcaattacagcccggtcattcaggtcaacggcgatccgacggagcagacgcttgccatgcttgaggcggctgttaagcgcggggcgcagcagggctatgccatggccgtcagggatgtcgccagcggcaaaggtaagctctccaacgcgctttccagcaacttcaacaccagtcaacgcatcacataa

SEQ ID NO: 166019 - DNA, 471 bp, Enterobacter cloacae
atggggatcagcagcaccattgatttcccgcaccagtacctgccgatgccacagcgttccgggcatggattcaccccggtcagccccctccagcgcaccaccatgacatccggccgcacgcggcagcggagaaagtacacctcggttccgactgaagcgtcggtttcgtgggtgtttactgatgcccaggcacagctgtttgaggtttggttcagggatgtgatcactgacggggcggcgtggttcaacatgcgcatgcgtacgccgatgggtgtcggcgactacgtgtgccggtttaaggatatctacgacgggccggtgctgtacgggttagggttctggaaattcacagcaacgcttgagttgtgggagcgtccaattctgccgcctggctggggtaacttccctgagtttatcgtcggacagagcattattgattacgcgcttaacaaggagtggcctgaggcatga

SEQ ID NO: 166020 - DNA, 489 bp, Enterobacter cloacae
atgactagtgcgattttaaacaggctttacaccagtgacggcagcgaaatcatccttaatacgttgcagattaatgtcggcggccagaattactggctggttgaaaacttcgaggatatcaccgcggttacagaggcgggggcagcagtgacattccaggctgcagccatggccgtcgcgctacctgccagaaacaaagacggtacgcaggatctgcagttcgccatcagcaacatagacggcatcgtttctactgcgatacgcaatgctttggccagcttgaatagcggcacgctgataatgcggcaatacatctcgaccgatttgagcgccccggcatctcctccgatggtcttacagattaaggatggatactggaacgcgtccgaggtgcaaattactgccgggttcctcaatatcctgaaaaccgcgtggcctcgctaccgctacacgctgccgaacttcccgggcctccgttacctccagtag

SEQ ID NO: 166021 - DNA, 381 bp, Enterobacter cloacae
atgttcaatcctgataaataccgttctgtcgagtggcagaagggcggacgcgcttaccccgcgctggactgctttggcatcgtcaatgaaatcaggcgcgatctgggtctggtgcagtggcctgatttcgccggggtcacgaaagatgataacggcctcgatcgggaggcgcgtgggttgatggctgacctgcaacgttgtgaacctgcgccgggtgctggcattgcctgttattccggttcagtggtgacgcacgttgccatcgtggttgaaattgacggccagttgtgcgccgctgagtgcaacccccgcactaacgtaaccttcctgccgttggcgcggtttgcgcgccgctttgtccgcgtggagtattatcagtga

SEQ ID NO: 166022 - DNA, 3087 bp, Enterobacter cloacae
gtgacgatacgaatctacccctcccggttgcagggagagccgctggaaacgcacgaacacgagaccatgaacctcagcgcctggtttgcgcagaacgttcagggctggaagccggatcagcagcacccggtagcggttgaaattgacggcatgcctgtctctccttcagattggccgctgtgcgttatcaaacgtgaaactgacgtcaggatgttcccggtgccatacggtactggtgctgaaatcgcgatttgggttgctgtcagcgtagctgtcgcttctgcggcgtacagcatctacatgatgagtacgatgtcccagcccggcggcagcggagcccaggcggccagcggcgatcagattgaccttaacccggccaaagcgaacgcggcgaaactgggtgatcccatccgggaaatcttcgggaaataccgggtctggcctgattacgtgatgcagccggtaagccggttcgtcaacgagaccagcatggaaaccagcatgtttctgtgcgtgggcgtcggcgacatggtgattaaccagtccgacatcaagataggcaatacgccgatctccgcgttcggtactgacgtgcgctataccctctatccacctggcgccacggtatccggcgatacccgcaccgaaaactggttcaactcaccagaggtggggaatacgggttccggtaccgccggtctggatctgggttcaagcggcccggaaacagtgagtatcatcgcggatgctctggtcgtgtccggcaacaccatcaccctggttgacgtatcggcatccggcggtgatgaggaaattccgccttcgtggacggtcggaacggtgatcaccgtgctggcccccaactcctataccgtcgtgtcttccggcggatacagcgtcatttatggcgggatagaggagcttgctccctcagttggcctgccggtgacgctgaactataacggcaatgactatgacctggtgatcgccagctatgcaccgggcgttccggcggtaccgggggtgggtgggagtgccgcaaccttaaccgccagcgccgcgccgacgacatacgatttcagcaccgcgccggtgaccttcagcatcagttggcagggcacgacctatccggtatcgctggtaaccaactacgtcacaatgtcgggactgatttcgtcgatcacctcgcagctctcaggttctggccttgttgcccgcgataacagtggccggcttgaaatcggtgagtccagcagcccctttgctggcgggtccattaccaacagcccgttacccgctgctgtgttcggcgatgcgccagtcaataaggcgggcgtgaaatcaacgggcggcacggcggaaatcagggcgcacattaccctggcgtataacagcgccgccggaacgccgtttacaggactgcctgagggcattcagcgcttctcgctggggctttacgggaatcagttccgtattacggctgtcgacagtcagacggtcacggttgagcggttgacgatcaccaccggacctgggggcgagacggtcaccacacctgacccatcgtggccaggcttcaccgaacgcacgctactggatgccaccgtgacgggtgtcagcgatgactatgagtgggtcgggccgtttcttgcctgccctgatggagagacgcttgacgcattcgaggtgaacatcaacttccagagcggtctggtgcgttataccgatcaggggaacaagcgttccatgcctgtacgcctggtgatccagtatcgcaaggttggcaccaccacctggtctcagcagtcaccgttctattcgcgcagcaccgaaaaccagatcgggtttactcaccgctacaacgtgtcgccggggcagtatgagatccgcatgcgccgcaccgagcctgtcaagggtggcagcacccgtgatcaggtgttctggcaggcgctgcgctcacggctgagcaaacgtcccacgaagtacgaaggggtaaccaccatggccctgaccgtacgcaccgggaaccgcctggcggccatgtccgatcgccggataagcgtcacgccaacgcggatttacagcggcggcagagcggcacggagtatcagcggcgcgctgtaccacgtgcttgagtcgctggggttcaccgccagccagattgacacggcggcgatcaacgtgcttgagcaaacctactggaccccccgcggcgaaaagttcgactgggccagcggtgagagcaagtcggcgcttgaggtgctgcagaaaatcaccaatgccgggatggggtacttcctgttgtcggatggactggcctctgccggcagggaagggattaagccctgggtaggcatgatcaccccacaggaaacaaccgaggaactgcagaccgcgtttaaagccccgtcacaggacgattacgacggcgtggacgtgacgtatatcaacggcacaacatgggccgaagaaaccgtgcaatgccgccagcctggcaatcctacaccgatgaaagtggagagctacacgctggatggcgttctggatgaggaccgtgcttaccgcattggcatgcgccggttgctgggctaccagctgcaacgcctgcagcacaccacttcaaccgagatggatgcgctctgctacgagttcatggatcgcattgtaatggccgacgatatccctggcggtcagcagctgagctgcctgattaccgatatgacgtatgacagcagcaaaatcaccctgacactcagtgagccgccggagtggtcgttccagaacccgcgcgtgattatccgccaccaggacggccgggcatcggcaatggtagtgccgacacgcatcgacgacttcactatctcggtgccgtacagcccagcgctggagcctgaactgtgggcgatgaacgatccatacattgagccaccgcggctgctcttctgttcatcagtacgtgtcccgtatgacgcactgatcggggagattacgccgggcaacgacggtatcagccaggtgacggcgattcagtatcacccaggcaaatatgcctatgacgacgccacctatcccggcgatgtcgcttaa

SEQ ID NO: 166023 - DNA, 2343 bp, Enterobacter cloacae
atgaccacatacgccactaataatccgattgggtcaatggatccgaaggacctgttcgataacgcccagaatatggactttgcggtaaacgatattacgcagctaatttggttggatcgttttggtaaaagtcgaaaaacattctggggcatggagcaagatttttcagctcagttgctcaaccagcagcagcggtttaataactttattcaaagctctggttacaaggttattggtgaatacaccaatggccctttgacgatcactgattataaccagcttattcgttatcagaatgaactatggaaactgactgccgcaaccagcatcccttataccactaccggtaatgactcagcctcatgggcaaatgatgctgttcattttgttagcgttggcgatgcagctttgcgccaggaactggccgattccaatggtgcgggtcttattgggatcaggcagtcaaatgtttacaaagaaactccattcgtatcgcctgaaatgtacggcgcccaagctacaatttcggctgctgatacacaggctctcatcgacgcatttagtgcagcaaagactatgggggtcggcgtaaaattatcgcgcctgtatacctgtgcgagcaacataacccttactgcgtttatttcagatgtctttggcttagggcagggccagacaggtattatattcgaagcgggtttcggtattgttgtcgataactcctcgatatctggcacccgcaaagcgatgcggattgttaatacgtctttacgtaccaggggaaaccgaaatgcaaccgcgctgaaatttaccggcacacacacggctaaatacggcgagcagctgaaactgacggacgttctttttgctacagacgaaactggagcctttggttgggactgctgcgtgcatcttgaccaagcaagccaggtatttatcgatcactgctctatgagtggtcttgatgccgtgccaaccaactgctgtatacgattaactaaccagtctcgaaatattaattttactaactgctgcgcaagtgattttctagatttcatggatgtcacaagtagttctgaaggggtgacggttgctttcaaccatataattgcagggcaaagaggtgttatttcgcatgacacgggcgggaatatgattttcgtccttggtaaccattttaatacttcaatatctgcggttgaacttggcgaggggacaggactagggagcaatcactgcaagatcgctaataacttctgtatcgtatataacaagccaggtgatgaaagcaaaccatacgttgcgttcgatatttgctctaatgaaaatgctctttcatcgaacgatgttctgctcactggcttcacaaaagatgcaactcatacccggctgaggcgtaatgcctcggcttccagatcagcgtctaacaacacaattgcgaaccctatttcaaacgggttgactctcagcgtggtgatagcgacgggtgcagctaacaaccaggtctatggaaaccagcgcattggtatgaatctggttaacgacattatcgataatggcacaaataccagatactggttgctggattcagacactaatgctttcctgacgagcgacataaagcttgccagactagggttggctgggacgagacaaatacgtgcacataccggactagatactacggttgcaagtggcattatacgttttgttggtggtgccgatggcgttgctaacgatgctattgccgagatcacatgtcgtgaaactgtcactaaaaccataaggccatccacgactaacgcttatagttgtggtgtttcaggctcagcatggtccggtggatttactcagaccgctttcacggtcacctctgatgaacgatctaaaactgccccggtagagataacagactcaatgctggatgcgtggtctgaggttaactggtgccagtataaattcctggacagggtaaaggagaaaggggaggacgccaggtggcattttggcgttgttgcccagcgagctgtggaggcattttctcgccatggccttgacgccttcgagttcggattcgcctgctatgacgaatggggtgatcaggaagaggtagttcaacattacgaagccacgccagaccatattggtgagaatggagaactgattgcaggcaacccagcttatgatgaagttattacaccagccagaaaagcaggttcaaaatatgggatccgttatgaggaagcgttcgcgttggaggctgaattgcaacgtaggaactatagacgtttggcattgaaatacgtagagcttgagtcacgcatttcggccctggaaaagtaa

SEQ ID NO: 166024 - DNA, 1116 bp, Enterobacter cloacae
atgagcgcaagcactagaaagtacagagccaatcttgattctcaaagcggctcattcatcagagggtggtgttgtgccacagatgctaccgcggcgagcgtgactgttttaatcaacgatgtggcggtagcaacatttccggcataccaagaacgtcaagatttaaaaaagcacaatatatgctctcagggtggcggtttcgaggcggatatttcaagcttcattaaatatggcgaaaatgttgttaaggttgttgaccctgacggcatgacaataccaaacggacagttcaccattacaagccgaaaatggatacaaggagaatctgagcatttatttgattcttcaccaaaaaaaattggcgtatacgggaacaaagacattgccaccaacatgaagaacggttttgttcttcctcagttaatacactgccttaacctttccgtttccgatggtaatgacggcgatgaagattgcaacatttggtttgacatcccggcaggggataaacctaagtctgtagtcaatctcatcaacaaagatcttaacgacattcagaagtcttcaatagacattcaccataaggctgtctttggtcgtggtgtttgcgtgacaaaaagtgaaatagtttctgataaactttatgtcctaaagtctgatgaaaacgccgctcatgatgggaaagttatcaaaggagaggaggcgctaactggagagtttaacggcagtgtaatacaaaaccttattgataacagacttaatgaaaatgaagttcttgatatcagggttcctgttattggtggcagcatcccatttgcatacttaaaagttcgcccaatctctattagattctcgaaccagaactctcgttgcagtattgcaatggttgacaccgtcttctctaaagaagaagtgtcccaaattactgaatttgccaagctcaataacattgattacgcagagctggatatattgagagatgcaaactcaaaagatatatggatcgtggatgttaacaacactccggccggccctccaaatgggttacacaaaatagagaagaaccttgctataagggaaatgtctctgcttttctatgaaaagttcatagcttag

SEQ ID NO: 166025 - DNA, 273 bp, Enterobacter cloacae
atgctcctgacgggcatttttatactggtgttttccgggctgacaactgctcaggttcagatttttcatcagacgcccggcacagtaacggctcatcgggacgccgtgttgggtcagcatttcagccagagtacgcgcccccgcagtaccccgactctggttccacgcccgccgtatttcactgcacagcctgactcgcgccggattaaccgtatcacgtcgttttcgccagtaccggtaactgatgcggtgtatttccagagcagaacatag

SEQ ID NO: 166026 - DNA, 474 bp, Enterobacter cloacae
atgaaaatgactgagtttgtttattccgccttgattggcgttgtcgccagctgccgctctatgacgccgatggcggctctcgcagcagcacgccttgccaggcgcgacacaacgggcaaactcatgctgctggaccgtccgctattcaaatatggcgcgttagcgatgggtgtaggtgagctgtttggcgacaagatgaagtcagcgcctgaccgaaccgtgtttttaggtttgtcagcacgtgtggccagtgcggggattgcgggcgccgcgttggcacccatgggagaagaaaaaaccggggccgggatcgctatctctgccgctgtgccacttgcctatctcacacttgcggcacgcaaaaaggccatggcaaaaattgggcagaccaagagtggcatgattgaagatacgctcatcgtcgctatcggagctgcggttatcttctttgcaacacgccccaaacgtatttaa

SEQ ID NO: 166027 - DNA, 1728 bp, Enterobacter cloacae
ttgaaactatcaaaggagcagataaatattatagaagcaccgttagggccaattgctgtcactgcgtgcgcaggaagcgggaagacagctacagccattcggcgcctgatcgccattcggcagaaaatgcaaaacagtcgcggccgagttgtactgttgtctttctccaatgttgctgtcaataccttcaatgcaggatatgcgcagctcgctgctggcctaccagacgatgctaatcgtcgaagggtggaagtcgatacacttgacggtttttttaccaaacatattttacgtccccatgcttacaggactatggccgcacctcaggcagcatatttggtgtcaggttcggagccttttcttgccaggtttaaatattggcgtgaaggtcacccccctttgccattaaaagacataaaaataatcatactggatggggattttgtcttttattccgatacaagaaatgaccctgagattcttgataaaggtaaggttttaaagatcattcatgacctgggtcgtttaggtgcttacactcatgagattggtcgatactgggtgtataggaccctagattctcaacctgcagtattgagggcgctggcagcccgctacccgcaaatacttgtcgatgagtctcaggatttgggaacactgcataaagaaatcctaaagctactcattactgcaggggttcaggttacgcttatcggggatgttaatcaggggatttatggcttcgctggtgctgacggtgagttcctgaagagctacgaggatcgtgcagaggtgactggctacaaacttactcgcaattatcgttccctgcctccaatcataaatatcgccaacatcctctgtgggcgtcatgacgaaccagaccggctggaggagcacggcggagcatatttcattggatacaaggattcagaactttccaaattaactgaagccttcaaggctcatattgatgagttaggtatgcaatatcacaatgcggtgatcctctgccggggtgcagacagggccgcagtaattgcgggtaaaagccctccgccgggacaaggtatagtcaaggttttagcagaggcatcattgttaagggatcagcatagtgactatcatggatgctttaaattggtctgtcgggctatcattaacttactggaggatgtacctcatggcctcagttccagacttcaggggttatcacttgatgacgagatgaaagaacttaaacggctactatggcgtttcagtcgcagcgctgatgtgggactcccttcgtctgccctaatcgcgaaaacagactggcactgcaagctattaacgaatgtcagagtgcttctcgcagagattgaaaaacactacggatataaagttgctggcaaggtaggcactaagctcacaaaaaaattattaccagaccaaccattggtaagtgtagcttcggctcaaggacatggactcagagttgagacggttcaccaggttaagggggagtctatcgacgcggttatgtatgtggctaagaaagccaatattaaagcgctcctttcaggtacaggtgatgaagaaggacgtatcgggtatgttgcaatcactagggcaaaaaacttgttctggctggctgttccacaatcatgccttaaagaattaaaagaagatctcattaaagctggttttcaggaatgggtcaaacttgccgtcattaatcctgcctga

SEQ ID NO: 166028 - DNA, 801 bp, Enterobacter cloacae
atgcttaaacctgttctcaatcaaacgccccgcagctcgttccaggtgctgcgcgatgtaacgtttggcctgcttatccgtgaactgaaaacacgatttgggagttaccggctggggtatgcctgggcgctgttggatccgttgttgatgattggtctgtttagcgcgatttttgggatgcgtagtcaaagtggatttggcggtgtacctgtgcaggtatttataactgctggctatttgccattcatgttttttaataaagtggtcagccagttaaaatcagcagttaatgccaatatggggttgttctgctatcggcaagttacaccttttgccaccttcgttgcccgtttcatcctcgaatccatcatcggactggtggtcggtgtcatattagtattggggttaatgtggtttggttttgatgctatacccagcgatcctttagaggtcattcttatctattgcctgctcatgatcttttcattttcattaggtatcgttttttgtgtgctgagcagtttattcaaggaagcagataagtttctgagtctaataatgatgccactaatgtttgtttcctgcgtcatgtatccccttgcaaccgtacctacacagtttcagcactggtttttatggaatccattggtgcatgccattgagctgattcgctctggctggattgcaggttatgccagcccgaatgtcagttgggtttatttgtctgctgtcacattggtgctgctgacttttgcgatgagttgctatcgtctgagccatcgtcgcctgatagccagctaa

SEQ ID NO: 166029 - DNA, 1203 bp, Enterobacter cloacae
atgattcagccaacccgctctaacaaatcctccggtttgatgcgcaagctaaataaattaaagaccaaacccaaacatttcattgttgactccagcggtttcaagcttgcccaccgctcatggaaaaagagccttaaactcggcagttttttatgggtagtagtgtgttttgctattgctgcgctttatttttgcgtcattgtgtccgatcgctatgtcagtcgggccgagctggtagttaagcaggcggatcaaattaagatactgcccgatgccctttcaatgctgggaattggaggcagtaaccatgaagatatactgatcatccaggattatcttaaatcccccgatctgctcaacaagctcgataaggagctgggcctgaaagctcattatcaaagccacaaaatcgattatttttcccgcctgccagataatgtaagccgggaagagttcattaaatattaccgtcagcacctgtcattgcacctggatgaactgtccggtgtgctgacaattgagttacaggcctttgatcctgcctatggccagcgcgtcgttgcattgatgcttcaggaatctgaccgctttatcaataaattaggtcatcaggtagcactggaacaactggcctttgtcgagaaagaagtcgatcgcgcctatcagcgtgtacagacggaaaaagccaaagtactggacttccagaataaccatcatttgatcagcccggaatcaacaagcagtgcccgccttggtgtggtgagtcagatagaagctcaactggcacagcaacaggcccagttaaaacagctacaaagctatatgaaagaaaccgcgcctgcggttgtttctgtgcaggccagggttgatgccttaacgcagcaactggctcaggaacaatccagacttaccggtgctgataaagatgcaatgaacgaagtgacggctcgctatatggatgttcaaacccaggcgaccctggctgcggatctgtacaaatccggacttattagcctggagcaggctcgtgtagaagcgtatcgcaagcttaagcacctgttagtcatcagccaaccaacattggcagaagacgcagagtatccacgtcgtctttataacctgcttactacaggagtactgctgtgtcttctgtatggcctgattgtgatgggtatagcaaccctgcgtgagcatcaggactaa

SEQ ID NO: 166030 - DNA, 2610 bp, Enterobacter cloacae
atgggcactcagcaaagcagccgttcacaggcgcgcctgaagcaagcatccgaaaaacaaaccaataccgagctggattttatttttaagcgccctattttttggcgcccgtcttacattgcgcaatccgcctggttagaacatattccgtttgctttctggttaatcgataccctgcaacctcgtaagattgttgaactgggcacccattacggcagctcctatttttctttctgccaggccgtgacgaagctggatcttcagacccaatgctatgcggtagatacctggggcggtgatgaacatgcgggccagtatggcgaagaggtttatcgccaggtatccgaatacaaccagcaacattactctgacttttccacccttgtacgcagcacattcgaccaggcactggaacacttcccgcaaggcagtattgatttgctgcatatcgatggcctgcataccctcgaagctgtacgtcatgattttgaaagctggttgccgaagctctctgacagagccgttgtcatcatgcatgacaccaacgtacgtgagcgcggctttggggtattccagcttctggatgagcttaagcagcagtatcctcattttgagtttgcccatggtcacgggctgggcgtgattggtgtcggcagcgagcaatcctcagagatgatgagcctgtacggtctctcagataatccatctgcgaccagacaggtacaagaagtcttctctcgcctgggtaaagcctgtggttacagctgggaaaacagcgaaataaagcgtcagatggtcgcgctgcaagcaacccagcaagcagaaacccaggatgtgatggagcaacaggccctggaaaggggacgcctggcagagcgcatcaccgcgcagcatcacaccataaaagcgcaggaagaaaagctcgcacaacatgccgatcaaaccgctgaactcacccttcaaaagcagcaggttagcgcgttaaccgcagagttggagacatctaaccagcatgccgccgaattgcaaactagcctcgccgtctgtgaacaacaacgagatgaaagtctggcgagccttcaaaacctgaaaactcaactctcagaaacccgggagcaatttacccagacggttgccgaacgcgatctgattgcacaagaaaagcaaacgctgctggcgcaacaaacagaagcgcaagaacagcagagcgctctgcaacagcaactgcatgagcaagcattgcaccttaatgaagagacccagcgtgccgcacagctgactctcgcactcaataaaaacaacgttgtgcttagtgagtactcgcaacagctcagcgcgttgcagcagcatattgatgagctgaccaccgcgttgactactgcgcaccagcaacaggatgagctcagccagaccctggcgaccgaagccagccaatggcaacagaaggtcaacgagctgacgactgcattgactgcagcacatcagcagcaggatgaactcagtcagactctggcgaccgaagccagtcaatggcaacagcagaagcaaattctgactgaagccaatgatgagctacagaataagtgtgatgtcctgaccaccgatctcgcggcaagtcgcgctgtactggagcagtttgaagcggcacagcaagtctggcagacacgtgagcaggatttggatagcgccttaaatgctcgtgagcgtgaaattgctcacctgaaccaaagccttgcagaaagcaatcaggcaattgataaacagaatagtgagcttgaactggcccgtgatgaactcgcggtattgcttcagcggcaccatgcagagcaagcagaatctcagcaacagttgagccagttaaatcaaagcctgagcgaacgattcactgagattgcaacgctgactcaatggctggaagagcgtgaccaggcggccatcaaggcggcagaagaatatcacctgcatcagcaagcatggcgtgcagagcaagccagcatggctcaggcgaatgcagacctgcaacaggagctaacgacgctccaacagcaagccactcagcagcaagctcagcttggaacccggattaatgagctagttaagcaaaacgaagcgctggaatccagtatcaacgaacgtttccgcgaactggcgaccatgacacgccataccgagcaattaactcgcgaactgcaacaaaaagaacagcaacttcagaaagcgaaagatcgtgcgcaaaacctgaagcagaccgtgtcctggaaactgaccgcgcctgtgcgtgccctgggccgtacctttaaagagaacccaaccgccacaccagcggtttccatgagcaatgcagaacgtattgcggcatctggcctgttcgacgagctgtggtatctgcatcgttatccggaagtagcgggctccggtctgtcggctattgaacactttatccaggttggcgctgataaaggttacagcccaagtgctttatttgatacgcgctggtacttgcaaacttatgcggacgtagcgcaaggctctatcaatcctttacttcactacatactgcacggaaaggcagaacagcgtcattgcctgccagacaacacgagaaaataa

SEQ ID NO: 166031 - DNA, 2406 bp, Enterobacter cloacae
atgacagttgaatacaataaggacgaactgctcacacattttgatgagcaatggtatctacagacctatcgggacgtaagccagacaggattacctgccagagaacatttcaaacgctatggtagattgctgggacgtaaaccttgttctgattgggcctcatcagtacaaaaaccggcagtatatttaccctgggtcgcgctgaaccaactttccgcagatcctgagcgtatgcatggatggaaatcagaagggagtgatccctacttcatacttgatttaaggcatctacctaaaacagaaaaagggtggtatcagtttaacctgacgctggactgctccaaaaaacagggattagccaagttctatctggataccggaaaaggatttaatgaatttgaaaccgtgactctgccctacaaaaaagcagtaacggcgagccgccttttttatctcgattctccgctggtcgcgctgcgttttgatcccctggaacaggagggcccattctcggtcagtcagttcgaaatcacggcaatcagcgacagccaaatagagcccgcattgctggcacgtattcagcaggaacaccaaagctatcgtaatatggaattgactaagattaaggagtctatttcttctgaaagcggtagcctgtccatggatcgcctggtatctctctataacgagacctttagtttcacgctaccctccgtggactatgaagagtggattgaaaccgtcgaaacaccatcgcttcctgataaggcagaagttgccacgatactggcgaagctggctacaccgcctgttatttcagtagtgatgccggtctataacccggcagaaatctacttacgcgcctgtttagactctgtcattgcgcaaagttacccttactgggagctgtgcatcgctgacgacaaatcaccaaaagagcatgttcagcgtgtactgcgtgaatacgaagctaaagataagcgtattaatgtggtctaccgtcaacagaatgggcacatttcggcagcgtctaacagcgctctggaaattgccaaaggcgattttgtggcgctactggatcacgatgatgccctgcctgaacatgcactgttgtttatggcacaagcgatttgtgcacagccagaaacccagattctttacagtgatgaagataagctcaacggccgcggtgaacgttttgatcctcatttcaaaagcgactggaacccggacctgttcttctcacaaaactacgtttctcaccttggggtttatcgccgcaatctgcttcagcgaatcggcggattccgtctaggtgtagaaggcagtcaggatcaggatctactgctacgttgcctgccgcatgtgcaagctgatcagatcgtgcatattcctcgcgtgctgtatcactggcgtactattgaaggctctacagcattggcttcaggtgagaaaagctataccaccgatgcgggcattaaagctttacgcgattattttgcaacccagcaagcgggcgtagaagttgatgccggtctggtaccaaacacctatcgggttcgttacccaatacccgagcctgcgccactggttagcttgttaattcctactcgtgaccgccgttcactgactgagactgccgtgcgcagtatcctcgagaaaagtacttataccaatttcgagattcttattctggataacggtagcgtcgaagccgaaaccctggagtttttccgcgagatccagttggaagatcgtcgcgttaaagtgctggcgtacgacttcccgtttaattattcagcaattaataacttcggcgcccgccatgctaaaggctccgttattggcttggtcaataatgatgtcgaggtgatcaatccagaatggttaactgaaatggtcagccaatgtctgcgtcctgaaattggttgtgtcggtgccaagctctattacagcaacgataccgtacagcacggtggcgttattcttgggattggtggtgtcggcgggcattcacataaacacttccctcgccagcatcctggctatttcagtcgccttgtgctgactcaatcactttctgcgattactgccgcctgtttacttatccgtaaagaagtatttgatctcgtatctggtcttgatgaagagaatctcaaagttgcatttaacgacgttgatttttgccttaaggtacgtgaagccggatatcgtaacctatggactccctatgcagaactctatcattacgagtcaattagtcgtggtgcagaggactccccagagaaaatagctcgattcaccagagaggttaattttatgaaatcaaaatggggcaagcatcttgagattgatcctttttatagccagaacctgacaaaagacagagaagatttttcaatttaa

SEQ ID NO: 166032 - DNA, 909 bp, Enterobacter cloacae
atgagacaaataaaaataacgccttacggcggcattggaaaccagatctttcaatattttttggcattagctataaaatccagaagtaatgtgccagtgcatatttctggtttagacatgccagcttttggcataaaaaatagtaaagcaattgatcaagcattttgcatagatattaaaagccatattttccctcttgaagcagttataaaactcattaaagacgttcaacatatcgacattaatctaaagtgtttaagcacaagaatgtcatattattcaaaacatctaccagaattcaggcgatatttaaaagcgaagaacaccgttcaaaatggttatgatgaaaaccacttagtgattaatataagaggagcggagatatctacgggagttcatcaaaactacttacctgttccaataagcttttatgatgagataattaagaaaacaaatttacgacctgtatttgtcggtcagttaggtaatgacaaatactcggaacatcttaagactaaatttccagaggcattatttccaatatttaacacatgggaagatgattttaatgtaattagaacctcggtaaatataattccagcagttagtacattttcatggctagcgagttggctatctgaaacagcaaaaaacatatattttccaattatggggttatatcacccattagccagaccagatgtggatatgcttcccatagatgatgaccgatatcatttttatctgtctgacttgcttacttggggtaatccagaggaaacaataaattcattaattaataaacaggtagattttgatattttggaagggaacgatctcattgaaaaattaccttcaaccgttactactgaaggagaaaacatagttggatttcgactcgccaaataa

SEQ ID NO: 166033 - DNA, 1218 bp, Enterobacter cloacae
atgttatcaattgcagctattcttaaaaatgaacaaccctatatattagaatggctagcctatcatatggtgctggggatagaagatttttatattgctgataatatcagctctgacggcggtagtgagttattgtatcaacttgataaggcaaatttcataacccgaattgagcatccgaccaaaaacaatgaaccacctcaattaagcgcctacagcaaagtactatctatgcttgatcaaaacaaatgggttgcatttattgatgcagatgaatttatatacccaaataatttcgaacatgggctagatagaataaaccatctatttgaagatgaatctaatggtgcaatatcattaaactgggcagtctatggttcttcccattcaattttgccggacaatggacttgtaattgaacgttttattaagcgcgcaacagaagaacatcctgttaataaacattataaatcgattgtacgtgttggtgacgtaataagcaccggattaactcctcatgcatttaaaattaagcctggcaaaaaatttgttatgccaaatgggaaaatacaagaaaaaaatgaggggattagcgatattactgactggtcagaaatcagacttaatcattatgttataaaatccaaagcagagttttttaataaaaaagcttctcgagggcgtgccaccacaatgaatgagggccttagcaggaatatagcctttttcaaccatcatgatttaaatgaagtagaccaatcaatacctttgtggtttttgaaaaaagtcaaagataaaattaatgacataaaaaacgagttagtaaactacggttaccaaacggtacccgagagaaataaaactgctttatatcgtacatctgataattatggcaaaggtgtaattgattcactaaaaaaagaaaaccatcaacttaccgtaaatggttgggctgtaaatagcactaaggcagcactatataacatcgcaatcgtaataaataatgaagttttactttaccctacaaatactgtattacatgaccgtcctgacgttcaaaaagcaggcataagcgacagtgctaagtgtggatttcaatcctacataacccttcctgacatcacaattacagacataaaaatatatgctacagataaaaatggattagtctgcaccgaattaaatttaggtgatcatttcacaaaattatttatttaa

SEQ ID NO: 166034 - DNA, 1167 bp, Enterobacter cloacae
atgaacattacaatcgccggaaccggctatgtcggcctttccaatgctgtacttcttgcccagcatcaccaggttattgcccttgacgtcgtacctgagaaagtcgagctgattaaccaacgactttcacccattgctgataaagagcttgaagagtatttagccaacaagccactcaatcttcgtgccaccctggataaattcgaagcctatgagagtgcagaatttgtcattattgctaccccgactgattacgatcctgagaccaattacttcaacacgaataccgtcgaagccgtgatccgcgatgtgatgagcattaacccgcatgccgttatggttatcaagtccaccattccggtgggctttactgagcggatgcgtcaggagtgtggtaccgaaaatctgattttctcacctgagtttctgcgtgaagggcgtgctctgtatgacaaccttcatccgtcccgcatcgtggtgggtgaatgcagcgaacgtgcgcagcgttttgccgatctgctgaaagaaggtgccatcaaaaaagatgtccaggtgctgttaaccggcagtaccgaagccgaggccatcaagctgtttgctaatacctacctcgccatgcgagttgcgtatttcaacgaactggatacctacgcccagtctcatggactcgacagccgtcagattatcgaaggtatcggtttggatccgcgtatcggcacgcactataataacccttcgtttggctatggtggctactgcctgccgaaagataccaagcagctattggcaaactaccaggaagtgccgaacaacctgatccgcgctattgtcgatgctaataccacccgtaaggattttatcgccgatagcgtgatcgcccgaaaacccaaggttgtagggatccatcgtctggttatgaaagcaggttctgataacttccgctcttccgccattcaggggattatgaagcggataaaagccaaggggatcgaggtggtggtgtttgaacccaccatcaaagcagacagcttctttaactcccgtgtcatccgcgagctggatggatttaaagccattagcgacgtgatactttgcaacaggatggcgagcgagttaagtgacgtagcggagaaagtctacacaagagatctttttggatctgattga

SEQ ID NO: 166035 - DNA, 378 bp, Enterobacter cloacae
atgacaaaccgttacacgctttctgcaacaccattgattgcctctaatgcgcagttgcgctggaacattgattcatcgtccaacaaggcacccttaacgctgacccatggtcgcgttgaagtttgtggctggctactggcagacggcgaacgtgctccacgtgtcgccattaagaacgattacgctacctatagctatccgttcaatgtcaaacgccctgatgtaatagctgccatcctgcaggaacccgcggataatcattcccgcttaggctgtggcttcaggattaatgtgcccttctcgtctcaaatcaccattgggctggagcctgatggcttgattacctggctgacggagttaaatttctccccagcctga

SEQ ID NO: 166036 - DNA, 909 bp, Enterobacter cloacae
gtgaacctttatattgccgccatcgttaaagatgaatttgcaggcctgcttgaatggatagcgtatcaccgggttttgggcgtaaccggatttatgattgccgacaatggcagtcgtgacggaagccgcgagctgctctcttccctggcgcgtctagggatagtaaaagttctcgatcaaccagatgtgattaatcaaaaaccgcaacttccggcatacgagcgcattttacgtacctgtgcccacgatattgacctgctcgcctttatcgatgctgatgagtttttattgcccctatcggctgaagtgaatctggtcgatttccttacttcacattttagtgacgaaagcgtcagcgccattgcgcttaactgggccatttttggttccagtggcgagctctttgctgaagacggcctggtaacggagcgttttactcatcgcgcgccgattaaatttaacgtccaccacaacgtgaaaagcgtggtgaaacccgagcgcgttaaccattttcataacccacattttgccgacctccgctacggtcgctatatcgatgcgctgggcgatgacatggttttacacccaaaacatggtccaggcgtcagtgccgaagtggtctggaacggtgtacgagtcaaccattacgcggttaaatccctggaagagtttttactcggtaaacacctgcgcggcagtgcagcctcggctaaccgtgtaaaacacaaagcctacttcaaagcccacgatcgcaacgacgaaacctgcctgctggcggcggctctggcccctaaagtcaaagcagaaatggcagcaatacaggcgcagctggatgccttgcccgcagaagagagtccacagaaaagcgactcctggctggctacccgcgtcaaaaagttaatcggctaa

SEQ ID NO: 166037 - DNA, 2010 bp, Enterobacter cloacae
atgcaaagcgattaccattggcaccctctggcgctgccagactcttctttatcccgtgcgggctggttcctgatccagggcaccctgcgtgcccgtcagccgcggggtgaaacccgcctgcgctggcagtgtcagggcgtctggcatgagcagatcctgcctatcacccgccgcggtaccctgcaggagctagtctggttgccggtgggcgccactcaggtggggctgctcgccagcagcgaaggggcggaatgtgagcttaacattgcccgttttgcccaggtgtcggcagcaaacagcctctggcgccgtctgcgccgggtgtggcctttttatcagcgcctgaatgcgcaaaagcgcaaacgtctggggctgtcgtggcacctgtggtttaccgatttacagcaggcttacatgctggtgggcaaaatccgcgacgacaggccgctgcacgcctatgaacactggctggcgaatttcgatatcgtgcagcccggtgaacgccgtctgatcgatcgcctgctggcccgctggggcaacctgccccgcgtctgcctgcatctggtgaacggcggcgatgaggcatcacgccagcgcacgctcgacagcatcgcgacactctgttacccggccacgcatatcaccgtgctggagcacccctctgatagtgtcaggccagagggagaatggcagtgggccattccggttgggacggaactcgctccggccgcattagtgtggctggcgcatcagctgcgccagacgccagaggcaaaatggatctacggcgatcacgatctgctggatgaaaaaggaaaacgccactcgccggacttcaaaccggactggaacgaaaccctgctgcacagccagaactatatcggctggagtggcctctggcgggaacagggtaccttcgccatcccgcaggacgggggtgaaaactaccgcggctggttgcagctggcccggcagctcgcgcccaaagatatcgcgcatatccccgccctgctgatgcacgtctcggacgcgctggtgcagcacgatggctacgaaaccctggcaaaccagctgcaagatttacccgtcggggtaacgctggagtcagctccgcacggcatctgccgctggcgctggccgctgccggaacagcttccccgggtgtcggtgatcatccccacccgcaacggactggcgtatctcaggccgtgtatcgaaagcctggtgcagcacacccgctacccgaatatcgaaatcatggtgatggataaccagagcgacgatcccgacatgctggcttattttggctacattacccgggagtacggggtgcgggttatcgcctgggaccatccgtttaactactctgcgatcaacaatgcgggggtgcgcgaggccacgggcgagcttatctgcctgctcaataacgacaccgaggtgattaacccgcagtggctggatgagatggtctcccacctgctgcgcccgggcgtcggcatcgtgggggcaaggctcttctacggcgatggccgggtccagcatgcgggcgatgccgtcgggccgggtggctgcgccgatcattttcacagtgggctggccgccgatgaacccggctaccagcgcagggcggtgagcgcccaggagctctccgccgtaacggcggcctgtctgctcacccatcgccagctctttttgtcccttaacggcttagatgaagttaacctgccggtggcctttaacgatgtggattactgtctgcgggtcggcgaggctggctggcgtatcgtctggacgccctttgcggagctgtatcaccacgagttggtctcccgcggcaaagatgtcacgccagaacagctggcgcgctcccagggtgagctgcgctatatgaaaaaacgctgggcgcagcggctcacacacgatcccgcatacaatcccaacctgagctatgaccgacccgatttctcattaagtcatgctcctaatgtggtgctgccatggacgaactga

SEQ ID NO: 166038 - DNA, 1023 bp, Enterobacter cloacae
atggacgaactgatcagaaaggcactctttaaaccgtatctgaagttgaataagcaaagcagcgagacgcctgctgacaactgggcgtgccgctctctgttgattctgcatgaagggaattcaccgacgctggcctattttgaagcggccatccggagtcgctttcccggcgcggtctgtcagctggtggataccttaaccacgcccactatcgacgtggataaaggggcggccattgtggttatccgctttatctccgccgagtggcagcgcgaaattgcgcgcaacatcgacgatctctcccaggtggtctacttcatggatgacgatctgtttgacccgtccgcgttaggggcgctacccaaagcctaccggacgaagatcattcgtcgttctgcggcccagcatcgctggatcacctcgcactgcgacagtatttgggtgtcgacgccctacctggccagtaaatatgcccacctcaaccccgatgtggtgcccgcgcagcccacgccgctgctgctggccgttaagcaaccggtaaaaattgcttaccacggctccagctcgcaccaggccgaaaagtactggctgcgtgaggtgatggacggggtgctggcccagtgcccgcaggccagcttcgaaatctttggcgaacacgaaatctataagctctatcgcgatctgccgcgcgtgacggtactgcatcccatgagctggcagaactatctggattacacccagcatcaccgaatcgatatcggtctggcgccgttactggcgtcagaatttaatatggcgcgcgggccggtaaaattttatgatttcgttcgcatgggcgcagtgggggtttacagcaactgcgcgccctacagtgactttatagagcaaaatatcaatggcgtgctgctgaataacgatccacagaagtggatcgataccctggcgctgctggtgaattccgggcaaaaacgtcagacgctggcgaaaaatgcgaaggaatactcgtactcgttaatcagttaa

SEQ ID NO: 166039 - DNA, 1086 bp, Enterobacter cloacae
atgaaaatccttgtaaccggtggagccggttttatcggttctgctgttgttcgccatatcatccgggatacgcaggatgcggtgatcaaccttgataagcttacctacgcgggcaatctggaatcgctggccgaggtcgcagcgagcgaccgttacgccttcgaacaggtggatatctgcaatcgtgcagagctggatcgggtctttgccacccataaaccggatgcggtgatgcatctggccgccgagagccatgtggatcgctccattaccggcccggctgattttatcgaaaccaatatcgttggcacctacacgctgctggaagcggctcgcgcttactggagcgagctggatgaatcccgcaagcaggcgttccgtttccaccacatctccaccgacgaagtgtatggcgacctgccgcacccggatgaagtgagtacgggtagtgagctgccgctctttaccgagaccacgccgtacgcgccaagcagcccgtactccgcgtcgaaagcctccagcgatcacctggtgcgcgcgtggcgtcgtacctatggcctgccgaccatcgtcaccaactgctccaacaactacggcccgtatcacttccctgagaagctgatcccgctggtgatcctcaatgcgctggatggcaaagcgctgcccatctacggcaaaggcgatcagatccgcgactggctgtatgtggaagatcacgcccgtgcgctctacaccgtggtcactaccggcgtggtgggcgagacttacaatatcggcggccataacgagaagcagaacctggacgtggtccacaccatctgcgacctgctcgacgagatggtgccgaaggccggttcctaccgcgaccagatcacctacgtgactgaccgcccgggccacgaccgtcgctacgccatcgatgccagcaaaatgagccatgagctgaactggcagccgcaggaaactttcgattccggtatccgcaaaaccgtgcagtggtatctggataaccagcagtgggtcaacaacgcgaaaagcggcagttatcaggactggatcgcgaagaactatcaggagcgtaactga

SEQ ID NO: 166040 - DNA, 888 bp, Enterobacter cloacae
atgcatattctgctgttcggtaaaaatggccaggtgggctgggagctgcagcgcgcgctgttgccgctgggtcgcatcaccgcggtggattttgactccaccgactactgcggcgacttcagtaaccctgaaggcgtggctgagaccgtgcgtctgctgaagccggacgtgatcgtcaatgccgccgcccataccgcggtggataaagccgagagcgagcgcgactttgccgagctgctcaacgccaccagcgtagccgccatcgctaaagaagcggatgcgctgggcgcctggctggtgcactactccaccgactacgtcttcgatggcagcggtgaaaaaccctgggtggagacagaccagaccgcgccgctgaacgtctacggcgaaaccaagctggcgggcgagcaggcggctgcgctctgctcccgtcacctgatcttccgcaccagctgggtctatgccgctcgtggcgctaacttcgccaaaaccatgctgcgctttggcaaagagcgcagcgaaatgtcggtgatcaacgatcagtttggcgcgccgaccggggcagagctgctggccgactgcacggcgcatgcgatccgtatcgcccaggataagccggaggtcgccggcctttatcacctgatcgcctccggcaccaccacctggttcgactatgcccagcgggtgttcgcgactgcacgggcggcaggcgttgagctggcggtcaaccaggtgaatgcagtgccgaccagcgcgttcccgacgccggcgaaacgtccgcataactcacgcctcgataccagcaagttccagcgcaccttcgggctgacgctgccggactggaccctcggcgtcgatcgcatgcttgccgaaacccttggaaagtaa

SEQ ID NO: 166041 - DNA, 873 bp, Enterobacter cloacae
atgaacaagcgtaaaggtattattctggccggtgggtcagggactcgtctctatccggtcaccatggcggtgagcaaacagctgctgccaatctacgacaagccgatgatctactacccgctgagcaccctgatgctggccggtatccgcgacatcctgatcatcagcaccccgcaggatacgccgcgctttgagcaactgctgggcgacggcagccagtggggcctgaacctgcagtacaaagtgcaaccaagcccggacggcctggcgcaggccttcatcctcggcgaagagtttatcggcggcgacgactgcgcgctggtgctgggcgacaacatcttctacggccacgacctgcaaaaacagctggaagccgccgcagccaaacctgcgggcgccaccgtctttgcctatcatgtacacgatcctgagcgttatggcgtggtggagttcgaccgtgaaggcaccgcgatctccctggaagagaaaccgctggaaccgaagagcaactatgcggtaaccggtctctacttctatgacaaccgcgtggttgagattgccaaaagcctgaaaccgtccccgcgcggcgagctggaaatcaccgacgtgaaccgcatctaccttgagcagggcgatctgtcggtcgccatgatgggccgtggttatgcctggcttgataccggcacccatgagagcctgattgaggccagcaacttcatccagaccattgaaacccgccaggggctgaaagtggcctgtcctgaagagattgcttaccgtctgaagtttatcgatgccgaccaggtgcgcaagttagctgcgccgctggcgaagaatgcttacgggcaatatctgctgaaaatgctcaagtag

SEQ ID NO: 166042 - DNA, 549 bp, Enterobacter cloacae
atgaacgtaattcagaccgcaatccccgacgtctttatctttgagccaaaagtgtttggcgatgaccgtggctttttcttcgaaagctttaaccaccagcagttcgaagctgccattggccgcagcgtcaacttcgtgcaggacaaccactctaaatcctcaaaaggcgttctgcgtggcctgcactaccagctggcgccacatgcgcagggcaaactggtgcgttgcgtggcgggtgaagtcttcgacgtggcggtggatatccgtaaaagctccccgaccttcggtcagtgggtgggtgtgcatctgtctggcgagaacaagcgccagctgtggatcccggaaggtttcgcccacggctttatgaccctgagcgactccgcagagttcctgtataaaaccaccaactactacgcgccggagagcgaccgcggcatccgctggaacgatgagaccattggtattacctggccagaaatcgacagcgagatcctcacctccgccaaagacagcgttgccaaatccttccctgacgcagagtacttctga

SEQ ID NO: 166043 - DNA, 2004 bp, Enterobacter cloacae
atgacattctatacaggttcagccgggatcctggcgcgaaaagcgcagcttgagccgatgctgggccacccgttacacgcctttaaaaccaacacagaactggcgcaagacgatgtcctggtcggctggggccaaaaagccaatacccgccaaatcagacaaaaagcccacgatctaggcctgccgtactggcagcttgaggatggctttatcgggtatattggccatcccgccagggggggcaaagccgtctccctgatcgccgatcctgtgggaatttactacgatgcccgccagccgagccgccttgaagagctgatcgcgaccccctgcgatgacagcatgctggcgcgtgccgaaacgctcacagctgaactgctgcgtctcggcatcaccaagtacaactgctataccgcagatagcggcctgccggatacgctgacggcccgcctgcatagcgacccgcgccctaaagtgctgctgattgaccaagtggcaggggatctctccattcctggtgcgctggcaagcgaagaggattttgtcgcaatggtggcggcggcccgccgtaatcaccccgatgcccgcctgctgctgcgtactcacccggatacccggctgggtaaaaaaagcggcgtgctggcgcggctggcgctggacgacgtggaggtagtggccgaacactgccatccccacgccctgctgaatagcgtagaggcggtttataccgtctcctcccagatgggctttgaagcgctgctgctcgggaaagcggtccactgcttcggcatgccgttttacgcgggctgggggctgacccacgacagcaaaacctgcccgcgccgtcaggggccgatcgccctgccccagctggtggctgcggcgctgatcctctacccgcgctatctggacccgatcctgggccagcgctgcgaagtggaacaggtgctcgacattattgccggtcagcagagcccagccccgcgctatcgccgcctctatatggtgggcttctcgctgtggaagcgcgcctttatgcgcgccttctgccagccgctggccgaagagctgcgctttgtgcgcaagctgcctgaaacgctggccgacgacgaacaggtgctggtgtggggcagccgccatcctgaacgccagaacgccatccgggtggaagatggttttatccgctcccgggggctgggctcaaacctgtgccgcccttcgtcgctctccatcgacccggtggggatctacttcgacagccgccgtccaagcgggctggagcagttgctaaatcagcatgagcttaccgaccaggagctggctcgcggcgagacgctggtggatctgctccgccagcatggggtgagcaaatataacgttggcaccatcaaaccgttcaccccacctgctgatggccgttcgctggtgctggtggtgggccaggtggatggcgatgcctcgatcctcaccggcagtccggttatccgcagcaacgaagcgctgctatgggcggtacgtgacgccagaccggaggcgcacatcctctttaaaccgcacccggacgtggtggcgggcaaccgggccggggctatctctgccgaatgtctggcccactgcgttgacagccaggtgctggatctcggcctgaccagtctctatccccatgtggatgagctgcacaccatgacgtcgctgagcggctttgaagcgctggtgcagggggtgaacgtcaccacctggggccagccgttctacagcggctggggactgaccgaagacagacatcctgccccgcgtcgtcagcgccctctgccactggcggcgctggtctatctgaccctggtggcctatccgcgctatatcgactggcagagcgggctgtggatgagcccggagcagttgatacgccagttggccgcgcagggtcactcctcatcgcaaaaagccagccgctggcagcgctggcagttaaaactgagctatctcgcgcagacgcttcgctag

SEQ ID NO: 166044 - DNA, 1248 bp, Enterobacter cloacae
atggaagagcaagccatacgccatttattaaatggccgccgatatcttttattacaaggaccgatgggcccctgctttgcacgtctggcgacctggctgcagcacaaccaccgcgaagtgaagcaggtctgctttaatgccggagacgcctggtatgccgcaaaagagacgtcgctgcactacaccggcccggtgaaaaattttgccttctggctgcgcgatctgcacaaagagtacgccttcgacaccatcgtctgtttcggggattgccgcccgatgcatgtcgaagcgaagaagtgggcgcgcggtaaagccatcgactttctcgcctttgaggaggggtatttccggccattttatatcaccctggaaaaaggcggcgtgaacgccttctcctcgatgcccatcgatgcgaaatactatcgcgagcagccgctgccggagctgaaaaccccgacgccatggaagcccagcgcctttaaccgtgccgcccacgccatgctctactacgcggcaggctggtttggtcgccatcgctatcgcggctaccgccaccacaagtcattctccccgtggtatgagatgcgctgctgggtccgtgccggccgtcgtaagctgtggtatcgctggaagcagcgccacatgttgagccatatcaccgaaacgctggacaacgcgtactacctgacgattttgcaggtctacaacgacagccagattattcaccacagcccgtataaagatgtgcgtgactatatcgaaaccgtgatccgctcctttgcccgccatgcgccgaaagaacaccatctggtgttcaagcatcacccgatggatcgtggtcaccgctattatggtgtgctgattaatacgctgtgcgagaagtacggcattacgacagaccgggtgatctatatccacgatctctccctgcccgccctgctgacccatacccggggggtgatcaccgttaacagcactgcggggctgtcggcgctgatccacaacaagccgctcaaggtgatgggcaaagcgctgtatgacatcgaaggcttaacctggcaggggccgttgaaccagttctggcaaacggatttcgcgcctgacaaacagctgttccaccgttttcgtacccacctgctctacaacacgcagatcaacgccgtgttttacggtaagtccgactggcttaacgtcccgaccgaactccccctgccggattctattatcgattccgaactcgaacgctaa

SEQ ID NO: 166045 - DNA, 273 bp, Enterobacter cloacae
atgactaaccagccagcgacggccagccagaaaacagacgaagtcgcaaacaaaactaccccgtcagtgattacagacactatattttcgggcactggtttcagtcctcttcagtgtgtggctatggaacgggaacattcatgcccccaacatccacttgataaagtccagaaaagtcaccacgcccccccagaacaggatcaggtcgcggtatttatcccacaggttaaaaaagggatgtgcctgcaggtcaacgagctcctcactttgtga

SEQ ID NO: 166046 - DNA, 171 bp, Enterobacter cloacae
atggctattgattgtaacggatatatcgctctgccaaatcacaatagctttcagccgacctactcgcgggtactggaacatgttgtaaaatcgttaaccttctgttttcctacattaatacatagcctttatgtttatggaagcggtaatgctgccaacttactgatttag

SEQ ID NO: 166047 - DNA, 1011 bp, Enterobacter cloacae
atgaagcctatgccagttggtatcgacattgccaaaaacgtaatgcaggttcacttcgtaaatacagatacaggcgaaatttttaacaaggcaatcaagcgcgcgaagtttattgagtttttcaccaatcgttcaccctgcctcattggtatggaagcctgtggcggcgcacatcactgggcccggcagttaagcaggctcggccatcaggtgaaactgatgccgggcgaattcgtcaaagccttcaatatccgtaacaagaatgatacggcagatgctcaggcaatctggcgagccgttcagcaaccgggcaaagccgtagcggtgaagacggaggatcaacaggccatgcttgcccagcaccggatacgttcacagctgatgaagttccggctgatgcagaccaatgccctgcacggtttactctcggaatacggtgaagtgatgcgtaaaggacatgtcagcctcgtcagaaacgtccccgagatacttgcccgcctgtccggacggttaccggctgtgctcatagacagtctgcgcgaacagctgggtgaagtgaaacgaactgacactcgtattacggacatcgaaagacggatacgcgaactgaacaaaaacgatcccggcgtaaaagctataagcgaaatccccggcgtaggactactgaccgccaccgctgcggttgcctcaatgggggatgcggacaccttccgttcaggccgggagtttgcttcctgggtggggctcgttccgagacagaccggaacgggcgggaagatccagttgctggggattcgtaagcgaggcgacaagtacctgcgaaaactgctggtcaacggcgctcacagcgtcatacagaatgcccgtgagccgggtccctgggtcacagacttgctgaagcggcgtccgataaacgtcgtctccgtagcgctggccaacaaaatggcacgaatcatatgggctgtgctggcgcacggcaggccctatcggaaggaagctgctcataactga

SEQ ID NO: 166048 - DNA, 207 bp, Enterobacter cloacae
atggaacgcttcttccgtagtctgaaaaacgagtgggtgccggtgacaggttatataaactttagcgaagctgctcatgcgatcacagactatatcgtcaggtattacagctcgctaaggtcgcatgactataacggtggattacccccaaacgaatcggaaaaccgatactggaaaaactctaaagcggtggccagttttagttga

SEQ ID NO: 166049 - DNA, 228 bp, Enterobacter cloacae
atgtcattctcgccggacagcaagctgaccatcaaagcgctggaaatggcgtgggaagctcgcggtaaaccagccggagtgatgttccatagtgaccagggtagcctctatacaagcaggcagttccggcagttactgtggagttgccggatcgggcagagtatgagccgacgtggaaactgttgggacactcattctaatatactttcaaataccggatcggactga

SEQ ID NO: 166050 - DNA, 699 bp, Enterobacter cloacae
atgtatgaactgaatatccagaccatctgtgctgaaaccagttcagccaaaggacgagtcgaacgcgcgcatctcactctgcaggaccgaccggtcaaagaaatgcgtcttagaaacatatcttccatcgctgaatcaaatgattttgctgaggaatttattgatgattacaatcggcgctttgccaaagcgccacgtcatgattttgatgtccatcgtcccctcaaggctgatgatttactagataatatcttcacctggagagagccacggaaggtttcaagtaaattgaccattcaacatgacaaaattttgtatttaatagaagacaatgaatatagccgacgtgctataggaaaatatatcgatacatggttataccctgatgatcatttagaactgaggctgaatggcgtcgcccttccctaccttatctatgatcggctttcacaagtcgatcagggtgacattaccgacaacaaacgcctgggacatgtgctgcatgtggctatgctggttcaggataaaagatataatgctcgttcgaggtcaattccatcagtggatgggcctgatttcaccagaaatcgtaatcgcaataggaaaaaatctcaacgctctctgaacgaagacgatttgcttgatgcaattgtaaaattacagggacgctctgagtcgatatttggcaagaaagtctag

SEQ ID NO: 166051 - DNA, 1011 bp, Enterobacter cloacae
atgaatgaagtccagctcgctcatggcagcggtggtcaggcaatgcaacagcttatcagccagctgtttatagaagctttcgccaatccgtggttggcagaacaggaagatcaggcgcgtctggatctggccgggttggccgcagaaggagatcgtctggcgttctccaccgacagttatgttattgatccgctgttctttcctggaggaaatattggcaagctggcggtgtgtggtaccgccaatgacatcgctgtcagcggtgctattccgcgctatctctcctgtgggtttattcttgaagaaggcctgccgatggcggcgctgaaatccatcgtcgacagcatggcctccaccgcccgcgcggccagtatcgcgattgtcaccggtgataccaaagttgtgccgcgaggagcggcggataagttgtttatcaatacctctggtattggtgctattccatgttctgttcactgggcagcgcagtcgctacaacctggagatgtaatactgacaagtggtacgcttggggagcatggcgcaactatcctgaatttgcgtgaagggctggggttggatggtgagttctcaagcgactgtgcggtgctgacgcctttgatcgccaccctgcgcgatatccgcggcgtgaaagcattgcgcgatgcgacacgcggcggcgtgaatgccgtgatgcatgaatttgtagctgcatgtggatttggtatcgaactgaacgaagccgatataccggtgaaacaagcggttcgtggcgtttgcgagctgctggggttggatgtgctcaattttgctaatgagggtaaactgatcattggggtagagcgacagatgtcggaacaagtgcttgccacgttgcgtgctcacccgctgggctgtgatgccgcacgtattggtgaggtggtagagcgaaaaggggtacggcttgcaggattatatggcgtgaagcgagtccttgatttgccatatacggaaccgttcccgcgtatttgctaa

SEQ ID NO: 166052 - DNA, 1122 bp, Enterobacter cloacae
atgcgttttgttgatgaataccgcgagccgaaacaggtaatgcagctgattgcccacctgcacgagctggccgtccaccttgtttacacccccgtgcatccgctgcgcatcatggaggtatgcggtggccatacccattctatctataaattcggcctggatcagctgttgccgaacaatattgaatttattcacgggcctggttgcccggtgtgtgtcctgcctatggggcgcatcgatacctgcgtggagatcgccagtcgtccggaagtgatcttctgcacctttggcgacgccatccgcgtaccggggaaaaatggttctctgttacaggcgaaagcgcgtggtgctgatgtgcgcatcgtctattcaccgatggacgcgctggcgctggcagaaaaaaatccacagcgcaaggtggtgttcttcggccttggtttcgaaaccaccatgcccgccacggcgatcacgttgcagcaggcgaaagcccgcaacatcagcaacttctggtttttctgccagcacattacgctgatcccgacgctgcgtagtttgctgaaacaaccggataatggtatcgacgcattccttgcccccggccatgtcagcatggtgatcgggaccgacgcctatacctttattgccgaagagtttcggtgtccattggtggtcgccgggtttgaaccgctggatctgttgcagggcgtggtaatgctggtggagcagaaaatcactgcacaaaaccgggtggaaaaccagtaccggcgcgtcgtaccggacgaaggcaaccacctggcgcaggctgtcattgccgatgtgtttgctgtcagcggcgacagtgagtggcgcggcctgggtatgattggtggatcccgcgtgcatttgacgctggcttatcagcagtttgatgccgaagcacactttcggccggtcgttcagcaggtgtatgacgatccgcgagcccgctgcggcgatgtgcttactggccgctgcaagccacaccagtgcaagctgttcggcaacatctgtaacccacaaagtgcctttggcgcactgatggtctcatctgaaggggcctgcgcggcatggtaccagttccgcactcaggagtgtgaagtatga

SEQ ID NO: 166053 - DNA, 591 bp, Enterobacter cloacae
atgaatattaatatcaaagctgcgccagttttcgtactggccctgtttccgatgatggcttttgcccatgtgggcaccgatggcggcacgcatcatgtattaagttttaccgagggctttattcacccgctgaccggaatggatcacatggtggcgatggtactggtcggcgtctggagcgccatgaatacccgccagtggtggctggcaccgctggcgttcgctggtttgttattgactggtgcgttagctggtatggcgggcgtgatgattgccggtacggagtatattgtcgcgggttctctgctgggtattggcgcgatggtggctcttcaactgaaactgcgcgaagggatcggcgcgttgatcattggcgttttcgctattttccacggtctggcacatggcgctgagctgtctcattccaccgctgcgctctccggtatggttactgccacagccgggcttcacctgactggtctggggattggatcgctggtgactgtttcgtccactcgtcacctgtggtcgcgtgtgcttggtggctgttcgtcactgctggggattggtttgatggctggtgttatctga

SEQ ID NO: 166054 - DNA, 762 bp, Enterobacter cloacae
atgtgcgataactgtgggtgcaatattccgcaccggagtcatatcagccccgggagcggggttatccatgccatcatgcccactaaaagtgaagcgtctcatacggtgcaggtgctgaaaaacctgatgcaggataacgaccagagagctttacacaatcggcagcattttgatgcccacggcacccgggtcttcaacctgatgtcctctcctggtagcggcaagacatcgctgctggagatcaccatcgagcaactgctggcgcggggtttgcgcgtggcggtgatcgaaggggatctggagaccgaaaacgatgctgttcgtctgcggcgaaaaggtgttccggtggtgcagatcacgaccggaatggcctgccacctggacgcgcggatgatccataatgcctggcacactctcagccgtgacccggtggatattctgtttattgaaaacgtcggcaatctggtctgcccggcgagtttcgatctcgggcaacaccataacgttgtgttgctgtcggtaccggaaggggacgacaaaccggagaaatacccggtgatgtttcgcctggcggaagctgtactgctcaccaaggtcgacctgttaccatacttcacggagttcagcacagatcgcgtacgaaaggaaatcgacgtgctggcaccgggagcagaagtcctgatgctttcaaccaaaattcagcaggacaggacacgttgggtggagtggttactggataaaatgcagcagagagcgggataa

SEQ ID NO: 166055 - DNA, 249 bp, Enterobacter cloacae
atgactgaagttccgctgttaaagaaactgcacgttctggtgccccactggcgcgcgcacaatgacgagcatatcgccgaaatggaaaagtacctgcacgcactggaggcggaagggcagaactcgctggcgaaccgctgccgggaaaccctggtgcagatgacgctggtgagcgaaaaactggcgctgatggcgcaacagcttaagccggtgaaactgccggagccgggggaacgtgatgtgcgataa

SEQ ID NO: 166056 - DNA, 216 bp, Enterobacter cloacae
atgtgtcaactgcgcgtgcgcgtattactggcggataacgacgaagatcttctgcttgatgaagtcacccacatcacctgcgatgcgggcaacgtgacaatttcacgcctgtttgaaccggaccgcgagctgtccggttttgagattaaagagattgactgcatgcagagccgggtgctggtgactccgcgtgcatccagctcaggaaggggataa

SEQ ID NO: 166057 - DNA, 771 bp, Enterobacter cloacae
atgaaaatagccattgcaggtaaaggcggcgtgggcaaaaccacgctggcggggctgttagcccgttcatgggcggcacaggggaaacaggtgctggctattgatgctgatccggatgctaatctggcctctgcgttgggcattcccgccgaactctgcgccgggctgcagcccttttcacgcatgaaagagctggcaatggagcgcaccggggcgggggcaggctatggcagcctgtttatcctcaatccgaaagtagatgacctgccggacatgttctgcgtacaccatgaaggtgtgcgcctgctgcaaatgggtaccgtcgagcatggaggtacaggttgcgtctgtccggaacatacgctggtgcgccgcctgatgagtcatctgctgcttgagcgcgatgacgtggtggtgatggatatggaagcagggattgaacatcttggccgcgctactgcagaggcagtggatgtgctggtggtggtggttgaacccggccagcgcagtatccagaccgccagacaaattggccagctggcggcggatatcggtatccgcaagctggcgtatgtcggcagcaaaattgccagtccctgcgataaaacgttcctgcaatcggcgttgaatgaagcgcagatcctgggatacctgtcgcttagcgaaaccatccgtagtgcggatttaagcggcagcgcgccgttcgatctcggcggtgagtttatgacggaactggaggtcatcggacaacggctgacggccctgtgctaa

SEQ ID NO: 166058 - DNA, 1911 bp, Enterobacter cloacae
atggatatcaaaaccagaacgagcgatccggcaaccatcgccctgtgcccggtagcagaacaagagggcattgcaaccgtattcgatcgtcatcagatacaacaaccccagtgcggttttggtagcctcgggttgtgttgccgtatctgctggaaagggccttgccgtgttgatccatttggcgacgggccgcagtacggtatttgtggtgccaacaaagataccattgtggcgcgtaacctgatccgtatgatggccgcaggggcggcaggccactccgagcatggccgccatattgccctggcgatgcaacgggtaggtaaaggcgaactgccggattaccagattcgtgacccggaaaaactgcgtggagtggctaaacgtctcaccatcgaagtggaagggcgcaccacgcaggaaatcgcctacgacgtggcgactaaaacgctggaagattaccagaatcaggacagcaaaaagccgtgccactggctgagcgcctccctgccgccacgccgcctgtcgctgctgggcaaactcggcgttctgccgcataacatcgacgccaccgtagcgcagattatggcgcgtacacacattggctgcgatgcggatccaaccaacctggtgctcggcggtttacgtggggcgctgtcggattttgacggcatggtactggccaccgaactgtcggatgccatgtttggcacgccaaaaccggtgatcacccaggccaacatcggcgtgatcaagaagaccgccgttaacattgcggtgaacggtcataatccgctgctcagcgaagtaatttgcgacgtggcaggcgaaatgcagagcatcgcgcgtgatgccggggccgttgacggcattaacatcgtcggtatctgctgtaccggtaacgaagtgatgatgcgccacggtattccgctggcgactaactatctgtcgcaggagatggcgattttcaccggtgcgctcgatgcgatggtggtggacgtgcagtgcattatgccgtcactgtcggccatcagtgagtgttaccacaccgagttcatcaccaccgcagatgagaacaaaatccagggctcgcgccacatcagcttccacgaagaccacgcccgtgaaacggcacgcaaaatcgtgcagtacgccattgacgcctacggtcgccgtgacaacaaccgcgtgaaaatcccggatatcagacagaccgcaattgtgggtttcagtaccgaagcggtgatggatgcgctggcattgctgaacccggacgatccgctggccccgctggtggagaatattgccagcggcaatattctcggcgtggcgctgtttgcgggttgcaacaccacccgcgtaaagcaggatgacagcttccagaccatggccagaatcctcgcgcgtaataacgtgctgatgctggcaactggctgtggcgcaggggccttcgccaaaaacgggctgatgaaccagcaggctaccgaagcatgggccggggattcgctcaaggcggtactgaccgccatcggcaccgccgccgggctggaaggaccgctgccgttagtgctgcatatgggttcgtgcgtcgacaacagtcgtgccgtcctgctggcaacggcgctggcggaaaaactgaatgtcgatctgagcgatctgccgctggtggcatcggcaccggaagcgatgtctgaaaaagccatcgcaatcgcttcctggggagtcgctcttggtttgcccacacatctgggcgttgtgccgcatgtgaccggttcgaaagtggtgaccgatcttatcaccgaacagtccaaagagttgctagatggttatttcctggtggaaaccgacccggccctggcggcggaaaaactggtggcggtaatcaaagagaaacgacgggctctgggtatttaa

SEQ ID NO: 166059 - DNA, 579 bp, Enterobacter cloacae
atgaaaaaaaaggaaaatgtcatgatttacgccaatgcgcagaagtgccttggctgccatagctgtgaaatggcctgtgcggtcagtcacggcggggataacgggttgtttgatgcgattcgggaccagcttccactccatccgcgcatgagggtggtggcgacgggtgaggtcaatattccgatgcagtgccggcagtgtgataacgccccctgcgcgatggtctgccccacaggggcctgtcgtcagacggacggacaggtgtttatcaacgaggccaactgtgtcggctgcaagctgtgtgtgatggtctgcccgtttggctccatcaccgtgcggcgtactgagcagcaaagcgcctggagtgtgacgaaccagggcgtggcacaaaaatgtgacctctgcgtttcctggcgtaaagaaaatggcaaagaacacaccgcgtgcgtcgaggcttgcccgacaaaagcgataagcctggtggatatgcagacttatcgtcaggcactcattaaggccagagccaaagagctggcccagtcccagaaaaatatcgacctggtcttaaggggaatgtaa

SEQ ID NO: 166060 - DNA, 339 bp, Enterobacter cloacae
atgcatgaagcggcattaactcagggactggtgaagattctgattgccgaggccgagcgccatcaggtggaacgtatcacccgggtgcggctgaaaatcggaaaaatgcgcgcggtagagccgcagtcgatgaccttctgttttgccgcgtttgccgccggaaccctggcggaagatgcggagctggttatcgacgcgctgcccgccgtcgcacggtgtcaggcctgtggtaacgattttgaagtgatcaaattccattttcaatgtgccctttgtcatagtcgggatgtccagcttatccagggtgatgaactctacattgaaagttttgatgcgtga

SEQ ID NO: 166061 - DNA, 246 bp, Enterobacter cloacae
atgtgtttggggatcccagggcaaattctggaaataaaagatgccgacaacctgctggccgtggtgtcggtggccggggtgaagcgggaggtcaatatcgcctgtctgattggcccgcagcagacgcctcaggactgcgtgggcttctgggtgctggtgcacgtggggttcgccatggcgcggattgatgagcaggaagcggccgggatgcttatcgcactgagcgaactcgatgagctcgggtaa

SEQ ID NO: 166062 - DNA, 3789 bp, Enterobacter cloacae
atgggagtatcatcgttcagcattccattactcgcctggtcaggcacattaatattactggccggtgagataatggcattattgcatatccgcaatctgtccaggctgctgttcttttccacgctggcagagctgggctatgtattgctgggatttggtcttgatagcgcatcgggtgaaactggcgcgctgatgcatctggggttacaggtggtcatgcgtctgctgactatcctcagtgcggcatatcttattaagcgtaacggctcaaatgagctcgataagctggcaggcagcgggtcccgctggccgctggcgtcattgctgtttggtttcggcctgttctccgtgatgggcttgtccccctttaaaggttcattcagcaagtttctgattttatatggcgcgatggaacaaggagaatgggccattgccgcgatagcgacactggcaactattctggcgtcaatttactatattattgttattcagcgcgtgtgccttgaatctgataataatgccgcatctgtgacgtcgttcacagcggaattattgtcggcacgctggatcctgatgtttatactagccggtgttacggtgtatctcagcctgatgccggagccgttattacaccttgccgaacactatgcgacagcttcggtaaaaaccccggtaccgaatttcgaaactccgtggcattactgggtaatattgccttatatcggcggatttgtgctgtacgcgctgggaaaaataaatgctatattacgcgactgttgcgccgtggttattgccctggtgacgctcgtgcttgtctggcagcataataccggtgacagcctctcccatttattctcagtgctgtttgccgggctgattacggtggcagtcatctattctcaggcgtatatgcgccatgataagcacgcaaaccgctattatttcttcctgttcttaatggccggttccttgattggcgtcgcttccgctgaggactttggcaatttctacctgttctgggaattaatgacctggagctcgtatttccttgtcgttcacgaacgcacgccagacgccttaaaagccgggcgaaagtacttcctgatgtgctgtaccggcgcgtacatcatgcacttcggcattctggtctgccatacccgtttcggcagcttcgacatgtcgattatcgccgcgcaggccacacagctgactccggcgtttgctgccgttatcgggctctgtttcctgattggcctgggcgttaaagcaggcctgtggccgatgcacggctggctgccggatgctcacccggttgccccgtcgtctgtctccgcgctgatgtccggcattttgaccaaagccggtgtgttcgggctggtgaaaatctttcttatcgtccttggcaccagtctgaccgggcacctgctggcggtgggtgcccacccggcgtttggcatggtggtcaccgggcttggctgtatgacggtgatttacggggaagtgatggccctgcgcgagcagaaccttaagcgcattctggctttttccacgctggcacaggtaggtgaaatcctcgccatgctggggctgttgaccagcctgagcgttgccagtgcgctgctgcacgtgatgaaccacgccatcttcaaaaacctgctgttcttagccgcaggcggcctgattgcccgcgctgccgggaagaagctgtcggacatcgcaggcctgggccgggcgatgccgtttaccgccctgtgtttcgccattggcgcgctggcggtgatgggcttaccgcctttcagcggcttctttagcaagttcatgatgatctacgcggcggtcaaagccgacgcgctggccgttgctgccttgttcctggcaggcagcgtattaggggcgatttactacctgcgcattgtccgcgtgctgttcttctccccgtggaagggtggcgcggtggaagacgcaccgctggcgatgcgagttgccaccggcatcctcgccgcgatggtgattctgggtggcctgttcccggattacggtttgcaacagtgggttcgcccggttatcgcgcagattgccgaacatcagcagtgggccgtccctgccctgccaacgctcaatctcgactggtccccggcggcgctcattgcgattgtcggcgcgattgcgacctttgtgctgggtaaacgtgcgccgcgccgcgccggtacgctcgctgttgtggtaatggccctgacgctggccgccgtgctggccgatgccggacgctacgatctgctctcctggtggtttgccgcgttgatcgcaggcgttgggatgatcaacctctgctataccatcggctatatggaccacgcccacagccagcaccgctttttcttcttcttcgtctttatgattggcggcctgcttggtgttaccgccagcaaggacctgttcaacttcttcgccttctgggaaatcatgagtagctggacgctctacttcgtgatcatccacgacgaaaccgaagaggcgctgcgtgaaggctttaagtacttcatcttcaactttgtcggcgccacctgcatgttcctcggcgtggcgatgctttgtgcccgcagcgacggtttcagctttgaagccatcgcacacgctgccagcaccatgtcactgccgtggctaggtgcgggtttagtgttcgtccttaccgggatgttgatgaaagcagcacagctgccatggcgcatcgattaccagatgcacccgccaacagcgccgacgccggtcagtggatacatctctgccgtgctgctgaaaagcgggatctatggggtgcttaagctgttcgccctcggtggcgcgggcctgctgtttgttcgctttggcgagctgggcagcaccaatacgctgatgtacgccattgccattatcgccaccctcacgctgctgtacgccggggcgctggcgctgatccagaacggcatcaaacgtctgctgatttacagcaccgtgagccagcttggctacatcctgctggggctggcgctaaccacgccggaagggattgccggggggttgatgcacctggtgaaccatatgctgctcaaagacattttgttcctcgccgcgggttgcatactggcgcaggtgcacgtgtcgagtctggatgagctgggcggtctggggcgcaaaatgccgctgaccttcgggatgttcctgtttgccgggctgtcgctttcgggtattccgccgttaaacggcttcgcttcgaaatggctgatttaccaggcggcattccagagcgggcactatctgctgggactgggcgcgatgatgtcgagcctgttcaccctggcggcggtgctgaaattcgcccatgcggcctttatgggaacgcctgcgccacacctggaaaaagtcaaagaagcaccgctgagcatgctgctgccgatggggctgctcagcctggccgcgctggttgtcagccttctgcctggcgtgctgctggtgccaattagccatctgatggcagtcagtggtcttgggcagattagcgtcacctgggccgggccactgccgggcaccaacggctggcacccgctgaccctgtggatgctggtagcggtggtttccgttgtgggctggctgttctatcgcctcagcaaccgtcagtcgcagtcgattcatttacaccagggcggcgtttccgacctgaccccggcgcaggcgcacgttccggcttctgcgctgtatcagacgcctgaacggttaatccgccaggtgctgcgcccccaggggaaggaataa

SEQ ID NO: 166063 - DNA, 954 bp, Enterobacter cloacae
atgatgacgtcacttttcgcgccgctgatgattttgccgctgggcgcggcggccctgatttttggcctgttgctcaaaggggtagatcgtatcgttgtggcgcgtctgcagcgccgcatcggccccccgctgctgcaaccttttttcgacatcatcaaactgatgcgcaagcagacgttagtaccggatggcgcaccgcgccgtctgttcctggcgctgccggccattggcgtgggcagcatgctgattgccatcgccctgctccctgtcgccaatgtctaccaaccggcgaccgggcttggggatctgctggtgctgctgtatctgatcaccgtcccggccgtggtgctgatgctggccggttcctgctcgggttcggtttacggcgcggtgggcttctctcgcgaaatggtgctgatcctcgcctatgaaggaccgttattgctggcgctggcaagcgtggcaatgaaagtcgggcaggcacagggcggctgggtcaccttctccctgggcgagatcgtggcttaccaacaagagcacggtgccttcctgttcgacccgtggatgtggcctgcgctggcggcctatgtgctgtttatgccagccaaccttgggatcgctccgttcgatattcccgaggcggaatccgaagtgctggaagggccgattctggaatacaccggaccgggactggcgctgtttcatctgatgtcggcgctgaaaacactggtagtggtgggactgggcatcacgctctttttccccaacgggcctgcgggcatcgcgggcgtgctggtgctgctggtgaaatgccttgttgtggcctgtctgtgtaaaacgctgctgcgcgccatggtgggcaggatgcgtatcgatcaggccttttggttctatctgaagtggcctgaactgctgggcattattggccttatcagcgtgctggctcaggcatag

SEQ ID NO: 166064 - DNA, 429 bp, Enterobacter cloacae
atgacgttattaaactctatcgctacccgctccccctggctgtaccgcatcaatgcgggctcctgtaacggctgcgatgtggaactggcgaccaccgcctgtattccgcgctacgacgtggagcgtcttggctgccagtactgtggcagcccgaaacatgcggatatcgtgctgattaccggcccactgaccatgaaggtcaaagagaaagtcctgcgcgtatatcaggagatccccgaaccgaaagtgacggtggcgattggcatctgcccgatatccggcggcgtattccgcgacagctatgccgtcgccgggcccatggactgttacctgccgattgatgtcaacgtaccgggctgcccgccccgcccgcaggccatcatcgaagggatcgccatggctatcgacatctggcgtcaacgcatttag

SEQ ID NO: 166065 - DNA, 579 bp, Enterobacter cloacae
atgaattttcttaaagtcctgattcgcaacctgcgccaggggccgtcaaccgaccccttcccctttggcgaggcctttacgccagaggccctgcgtgggcgcatcgcctttgatgcctcgcgctgttcggtgtgtcgcatgtgcgagcacgtctgtgccggtggcgccattcattttgaagagacgccgcaaggggtggagtttgtgctctggcacaacacctgcaccttctgcggcctgtgcgagcactactgcgtgcccaaagcgattcacctgaccaacaactggcatctggcgcataagcaggaagacaaataccgcatgattgaagagggcaccatgctcttcaaaacctgtgtgtcctgtagcacctcgtttctgcctgccagcccggcactgatggacaaggtttaccacacgccgacggccattgacccggcaatgagcgaactctgcccggactgtcgccgtgcccgctccgccgcgcagcaaaatacgccgggcatcgacctgattagcgatcccgggattacccaacgggatccgcgccttaaccaccacgagaagcgccatgattga

SEQ ID NO: 166066 - DNA, 531 bp, Enterobacter cloacae
atgattgacgatatcaagcaggcagaagccctgtttaaccagaacgtgccgccgggttttagctttaaaacccaggtcaacaagtggggggtggcgacctcctgggtaaaactgaccaggctggggcaactgctgcctgccgcccggagcatcaaacagctgggtggccgtctgcacaccatcagcgcctatcagcgtgtggaaggcaagcccacggagatccacgagattgcctaccactttgatctcgacggctcggcgctgaccctgacggtgttcctcgccgaaggccagcgcgatatcccgtcgctgaccccggtgtttcacaatgccgactggaacgagcgcgagtttatggagctctacgacctgaacgcggtgggacaccctaacccaacccgcctgtttattgatgagaacattgatgcggcggtgctgcaaaaattcattccgttctcggacatggtgaacgccgccagcactaaggcactgtgggaaaaaatcatgcagcaacgtggagagaaacaatga

SEQ ID NO: 166067 - DNA, 1083 bp, Enterobacter cloacae
atgacccgttatcaaatgccggttggcccgctgcacgtggcgctggaagagccgatgtactttaagctcgacctcgaaggggaaaccattaaagggctgcatatctctgccgggcacgtacaccgtggcatggaatatctggtgatgaagcgcaacttctaccagaacattaccctgaccgagcgtatctgttccctgtgctccaacagccaccccaccaccttttgcatggcgctggaagagattgccggtatcgacgtcccgcctcgcggccactatctgcgcgttatcgccgatgagatcaaacgtgtggcgtcaaacctgtttaacgtcggcatcatggcgcacatcatcggctttacgtcgctgttcatgcacgtgctggaaacgcgtgaaatcgtgcaggacatcaaagagaccctgtacggcaaccgtatggatctgggggcaaactgcattggcggcgtgaaatataacctcaatgccgagagcatcgcctacctgctcaagcgactggatgaagtagccccggcggtggatgagatccaccagatttacaccacccacagtagtattctgacccgtacccgtggcgtcggcgtgttgcacagagagattgcgctggcgtatggcctgattggccctgtagcacgcgcatccggcgtggaatatgacgtgcgcgccaaaacaccgtacgccatctacccggagctggattttgccaccatgacccgccctgacggtgacgtctggtcacgcgcgatggtgcgccttgatgaggtgaaaattgccatagccctgatccgccagtgcctggcacaactgccggaagggcccgtggccatttcaggtatgccaactgttccggcgggagaagcggtggcgaaaaccgaagccccgcgcggtgagttgatttactatctgcgcaccaacggtactgatatgccggagcgtttgaaatggcgtgtaccaagctatccgaactgggatgcactgccggtgatgatgcacgataatacagtggccgatgtggcgctgattgtgaacagcatcgacccctgcatttcctgtaccgagcgttaa

SEQ ID NO: 166068 - DNA, 324 bp, Enterobacter cloacae
atgacaggaatacttggcgatatgttaggcagctcatgggatatcattgaaagcattactttccacgatgccagaacccggctgattgactttattgtatcgcagggtaaagagcgcggtgtggtcacggagactgggacagaatttgaatgcgacctcaccatggaagaaatttcattgattattggttcgacccggcagaccacttcatccttatttaatgtcttaatcaaagatggtgatattttgcgaacgggtaaaaataaatatgtcatcggtgatattacggcactgagtgcccggctcgcggagtataaatcctga

SEQ ID NO: 166069 - DNA, 144 bp, Enterobacter cloacae
atgcttgtcagaggcgcccgtctggaggttgttccgcttgtcccaggccacaacatactggcgggaagaagtaatgaactggttattctcccggctatcagcgatgaacttgccatcagggataaggaatttgtcaccatgtga

SEQ ID NO: 166070 - DNA, 282 bp, Enterobacter cloacae
gtgattattaaacatgaggcgttaaattattttgcttgtgagcttgcaaatataaaaagtgagtataagtcgggtaaaaacgttaacctgatattagcctctgtgattgaactttctgttgaagtctctgatatgatgaaagctgttccgcctgggcaaagggaggatacatggatagtattacagagcttactcgccccgaaatggtggcagactgatcctgtatggcgggaagtggctaatgtcgggatcaagctgctaaatagaagtcgtttttcctga

SEQ ID NO: 166071 - DNA, 573 bp, Enterobacter cloacae
atgttgtggcgttatttacaaaaaaaaatctgggaaatgactttggcagtgatgggttgtcttggtgtcattagtgcgatttatacggatgtgtttatcttatctgaccaattgcaggaagcatccgtgacagagataagccaggagttgatattattggctacagcaatgcaactgttgagcaatgcccgacgggataaggctcgacgaccagttttgcttcttatgtctggtttttttacagttttgctcatacgtgaaatggattttgccttagatctactggcgcatggctgctggctgtggtttgcattagtcataacttttgtttcgctctttcaggcttttttatacggccaacaaacactcaacggacttgccgattttatgtgccgcgctgcctggggacaaatgtgtgccggtctgattactgtcctgatattttctcgttttatgggaataaatgacttgtggcaatgtctcctgggcaaagattttccccgtatggccaaaaatatggtcgaagaaggcacagagctgttcgggtacatgctctgcttttttttctgttaa

SEQ ID NO: 166072 - DNA, 531 bp, Enterobacter cloacae
atgagggtcatcaagattcaggcggtcattggtcagagtctgccaggcgttgaccctgggacggtcagcccggtcatagtagggttgcaggcgtttcccgctctgcaattcgatgttcgggatcacaaaattcagctccagcctgtccttgtcccggtgctccacccaaaggcaggcgtactggtcgccatccagaccgggcaacagtgtctgctcgaactcctccatcagacgctctttctcatcgtcagggaggttttcttcccggaacgacaacaccccggaggtgtaggcgcgggcaaaatcacaaccatcaatcagttgcctgatacgctcaggctcaccgcgcagcaccaccgctttttccctgtctcgttctttccccagcaggtaatccaccgggccactgcctgcacccgcaccccggctatgaattttgacgatcacgctgtgtctccagaagctcagataactggcgatcaagactggtcagtaccgccagaagagagacctgctgataggccgggatag

SEQ ID NO: 166073 - DNA, 336 bp, Enterobacter cloacae
atggacaagcgaacgaaagagataaaaatccgcctgactgagagtgaacatgagcgactactggcacgttgtgatcgtgctcatctcgctgaatggctgcgctcgctcggtttgggtgaacatgtattacgtcgtcggcgtgtgcctgacgtagatccggcactgcttcgccaggtgaccggcatcggaaataaccttaatcagatagcccgtaagctgcatggtctggacgctatcccggcctatcagcaggtctctcttctggcggtactgaccagtcttgatcgccagttatctgagcttctggagacacagcgtgatcgtcaaaattcatag

SEQ ID NO: 166074 - DNA, 156 bp, Enterobacter cloacae
atgaaagaaaaaaaacatgaatgtagccatagtaatttagagaaagaatatatttcaggaatggctacaggagattacaagtgtgttgattgtggtgctgtcggttggggtaaaaactggcctgaaaatgagcaggatcgcaaagaagataagtag

SEQ ID NO: 166075 - DNA, 927 bp, Enterobacter cloacae
ttgagtaaccaggcactcgacctttttaacgagcggcttccccgcaaaccctattttaccgatgaactccagttcggcgtccgcattgccgggaaagagcgcgcaattcttgcgaaatacatccagttcaaccagccacacgcgatgttctggctcggttttgacgttgaccgccccggcgcggcgatagactggagcgaccggaacgctcctgcaccgactctcaccatcatgaacccggaaaacgggcacgcccacttactgtatgcgctgaaaacagcggtgcgcacggcacctgacggcaaaattaaaccgctgaagtatgcggcagcggttgagcatgcgctgtgtaaaaaactggacgctgatactggctattcgggactaatctgcaagaatccgaaccacaatcactggcagcttgccgtctggcagccggaactctacacactggactggctagcggattcactcgacctgagtgcggcaaacgacaaagagattattcccgattacggtttaggccgtaactgcactctgttcgataaaacccgcaagtgggcttaccgtgccattcgtcagggctggcctgattacgaacaatggctgcaagcctgctatgagcgtgccagcgcctacaatcttcaatttgcatcgcctcttgatgataaagaggtgaaaggaattgttaaaagtattgctaagtggactaataaacagtttacccctgaatcatttcacgagtatgtaataagaactcattcaaaagatattcaatctataagaggcaccaaaggaggggcgattagcaaaggtggtggtagaaaaatagatcctttatccgtggaatctttaaaaccatggaatgatcttggtgtcagtcgaagaacttattataggatgttatatgaaagaaaaaaaacatga

SEQ ID NO: 166076 - DNA, 924 bp, Enterobacter cloacae
atggaacaatgggggcgtatgcaggatctcaatgatttcgtatggtttgtgaaggtggtggagcatggcggctttgcggcggcggggcgggcgctcgatcagccaaagtcgaaactgagccgtcggattgcgcagctggaagaacgcctgggtgttcggttgatacaacgtaccacgcggcagtttgcggtgactgaagtggggcagacgttctatcagcactgtaaagccatgctggtggaggctgaagctgcggaggaggcggtggctgctttacaggctgagccgcgcggtatggtcaggatcacttgccccgtaaccctactgcacgttcacgtggggcccatgctggcgaggtttatggcgcgctatccgggaattaacctccagcttgaagccaccaaccgccgggtcgatctggtgggggagggggtggatgtggcgatccgcgttcgtccgcgcccgtttgatgacagcgatttggtattaagggtgctggcggacaggggtcactgtctggttgccgggccgacactgattgaacggatgggcaacccggcgatgccttctgagctcagcgaatggccgggtttaagtatgggcgctggtaaacacctgcataagtgggagctgagcgggccggagggggcgaaagcagacattcacttcacgccgcgcctggtgactaccgatatgctggcgctgcgggaggcagcgatggcgggcgtgggcgtggtacagttgcccattttgatggtgaaggatcagctggcttcaggtgagcttgttcgggtgatgaacgcgtgggagccaagacgggaagtgattcacgcagtatatccttcccggcgcggtttactgccgtcggtcaggacgctggtggattttctaaccgaagaatatgcccggatggtggaggagtaa

SEQ ID NO: 166077 - DNA, 861 bp, Enterobacter cloacae
atgaaaaacgtaacaggcgtgtataccgcacctcgtccgcactgggtcggtgatggttttccggttcgttcgatgttttcttaccagacgcacggcgaaccgctgagcccgttcctgctgcttgactacgccggaccacataccttcccggcggatggcgcaaaacgcggcgtgggcgagcatcctcatcgcggttttgaaacggtgaccatcgtctactcaggcgaagttgagcaccgtgattccaccggcagaggcggcgttattggtccaggcgatgtgcagtggatgacggcaggcgcaggcattttgcacgaggagttccactccagcgcgttctcgctgaaaggcggtgaactgaaaatgatgcagctgtgggtcaacctgcccgccaaagacaaaatggcgacgcctggctaccagagcatcactcaggcggatatcccggtggtcaccctgccggataacagcggaacaatgcgcgtgattgctggccgctttggagaggtaaccggcccggcgcataccttctcaccgcttaacgtatgggatctcgcgctgcaccagggcagccacctgacgctcaatcagcccgaaggctggagcacggcgctggttgttgttgagggcagcgtgacggtgaacggcaccacgcctgcgggtgaggcgcagctggtcgtgctgagtcagagcggcgacaagctgcatctcgaagccagcagcgatgccaaagtgttgctgatggccggggagccactgaatgaacccatcgtgggctatggcccgtttgtgatgaacagtaaaaccgaaatcgccgaagctattcgcgatttcaactccggccgctttggccaaatctaa

SEQ ID NO: 166078 - DNA, 258 bp, Enterobacter cloacae
atgaaaactccatatgacgaaccaaaaaataaagaagtcaacacatccagcctcaaggaacaagatactctaccctcagactcgaagagaaaaaagaaaccaaggtgtaagatgctggcattgatcgtttttgtattaatcctgttaattgttgccatatatgaatacttcgccctagggaaacaattaaataacacatcaatcacctttcttattgtgatgtttttttcattggcaataataatcaaaaaaaaataa

SEQ ID NO: 166079 - DNA, 477 bp, Enterobacter cloacae
atgtctggaaaaaatccgttttggaattatgattataatgcagcgcaacgtaatagagaaattgtagactcttaccaacaggcaaatgaggcaaggctggattctcaacagtcgcagtttgaagcgtctatggctaatgacagggttagtagaatacagatgcagttgaataacacaatcaatagccataagaaggttgtcgctgattatgagcaacgtctacagaagactaaaacggtagcatttaaattggctattcgttctaatattttcaaaagaaccttagtcaaactgacagaagaatggcctgagaaaaaagaccatatccttgatgaaatccagcgccaaaaaaatcactgcacaacacaagagtatagagacaactggtggggttgggtaagtcagaacgatccttcttcagataatagttatcttgattttccatttcccgacagggagctaaaacataagccataa

SEQ ID NO: 166080 - DNA, 309 bp, Enterobacter cloacae
atgtcccatatgagcaaactcgtaaccggtatcgcgcccggtacttccggcggcaccatccagaacggtgttctcacaaaactgaaaactgatgaatggggtgccgttggcgtgctgactggtatcgcgggaattctcatcaacgggcttattaactggtatttcaaactaaagctggcgtctgtacagtgtgcgattatcacaacgggcgcgatattgcccggcgcaaaatcaaaactgaccgggaatgcgatgccctgctgtggaaagacctgcaatgcgctaagcgcaccgttgactaactggtga

SEQ ID NO: 166081 - DNA, 288 bp, Enterobacter cloacae
atgtccgcgctctccaatagtgactatctgttacagcttatcagatactatggaagcacaactattaaaagtctttatagcgtaagatcttcattgttcgctcttaccagtatctgcagggacaatgcacccttgggccgaatgatccgtaaatcgccgtccgaccagcttataatatggcagggtaaaagcgtggtgttacattgtgccttaacttcctgtgcgaacgcgcacggcatggcgattttactgataccattcgagagcctgtttcagtcctttgattga

SEQ ID NO: 166082 - DNA, 756 bp, Enterobacter cloacae
gtgagcaatatccatcacctggaacgcagcctgcgaaaactgcgcctgacacgcgttggcgcggaatggcatgcgctggaaaaacgtgcgctggcagaggggtggaccccgtcacgctatctgctgacgctgtgtaatgaagaactgctgtggcgtgaaagcgaaaagctgcgccgctataaaaaggaagcccggttgccggtcgcgaaaaccctgggtgaatatgacttcgcccaggtgccggagctgaatgcagctcagttccggcagctctgcgaaacgacagactgggttgatgcaggtgaaaacgtcctgctgttcggcgccagcgggctggggaaaagccatctggcggcagcgatcgtggatggcgttgtaggtcagggctaccgggcccggttctacagcgcgggagagctgttgcaggaactgcgtaaagccagagctcagctgaaactgaatgagctgttactgaaactggatcgctatcgggtgatagtggtggatgacctcggttatgtcaaacgcgacaacgcggaaaccggtgtgctgttcgagttaatcgctcatcgctatgaacgagggagtctggtgatcaccagtaaccatccgttcagcacatggggcagcatcttcgtggatgagacgatggcagtagcggcggccgacaggctgatccaccacggatatatgttcgaactgaagggagaaagctacaggaaaaagacggcaaaggcagtaaccagcgcgacttaa

SEQ ID NO: 166083 - DNA, 135 bp, Enterobacter cloacae
atgaacggggataccgtcaccgtggatcaggcgtggcgcattgccaatgatatggaggagcttgccctcgctatggaacacaccaccgttgaactcggagagcttgccatccagatcgcggaagaatgcgcataa

SEQ ID NO: 166084 - DNA, 342 bp, Enterobacter cloacae
atggaaatcttcgaaaaagatcaagaaatcgcttttgttgactcgtgcaacgatgctgttttgtcttacgaatacgaacaggcgggcttcacaatcaacttaatgaaacgctcggttcttctctttaaccatgttctaaacagcacatttatatattcatatagcaacatcagggagatcaattactcgttgcctgattgtaagtacagtcatgccgagatctgtattatgactgatgacgtatcaaatccagtctggacgctcagcgttccatttgacgcacattatatttgcgagcaatgtgtggaggtatttaataaccgaattttatttggcccatag

SEQ ID NO: 166085 - DNA, 654 bp, Enterobacter cloacae
gtggcggagcagcccgccgccgttcagggtagctggcgggatgatttcgacggcagcacgcttgaccctgaattgcagactctgcgcattccgttcgacgacaccctcggctcgctcaccgcgcgccccggctatttacggttgtacggcaacgactcgctcaactcgacctttacccagtcgaccgtggcgcgccgctggcagcacttcaccttccgggcggagacgcggatgcagttctcgccggttcacttccagcagagcgcggggctgacctgctactacaacagcaaaaactggagctactgctttgtggattacgaggaggggcaggggagaacgattaaggttattcagctcgaccacaacgtgccgtcgtggccgctgcacgagcagcccattcccgtgccggagagtgcggagagcgtctggctaagggtggatgtggatgcgctggtctaccgctacagctactcgttcgacggcgagacgtggcacaccgtgccggtgacgtatgaggcgtggaagctgtcggacgactatatcggcgggcgcggcttcttcaccggcgcgtttgtgggactgcactgcgaggacatcagcggcgacggctgccacgctgacttcgactacttcacctacgagccggtctga

SEQ ID NO: 166086 - DNA, 150 bp, Enterobacter cloacae
atgttttggatccaagaagtaaccaaagtcatgctcaattttgacgtaatatgcgtatgcgtcagtcacttaccctacccctgtaaacaaattttgcaaaactgcgcttgcaaacagttagagtgctatttgatatctcaacagtattaa

SEQ ID NO: 166087 - DNA, 2457 bp, Enterobacter cloacae; identical to SEQ ID NO: 105688

SEQ ID NO: 166088 - DNA, 576 bp, Enterobacter cloacae
gtgacattttcctatgatccgtgtgaggttattcgttacatcggccagataggggagatgcctgatattgtatcgcatcagttttacccttcatcttgccgaatcagcgaatatgtatattccctgctcggtgcaggggaaggggataccctcctggagcctaatattggccatgcggatttgcttaaatcattccctgccggtgtgatcgttactggcatcgagcttgatactttgaattgccttatctcccgggctaagggatacgatacgacagaagctgacttcctcacatggtctaagtctaatcaacagaagaagtttgattatgtcgtgatgaacccaccttttgccgataaccgggccaggctgcatctccaggcagctgcatctcatctcgcagccgggggatctctagcagccgttcttccattatctcttcaggggctcgataaccttctgggggaagaattccggacggaatggatggacgtttttgagaacgagtttgaaaacacgaccgtttcggttcgcatcctgtacgccgaacgtattcaacaagaggaagtcctatga

SEQ ID NO: 166089 - DNA, 153 bp, Enterobacter cloacae; identical to SEQ ID NO: 127262

SEQ ID NO: 166090 - DNA, 384 bp, Enterobacter cloacae
atggaagaatcagatcaggaaaaacgagagcgcgagctaatggaggtgctttggcgaaaatttagagcgctatcacctgaattactgtctcaattcctagcagaacgaggcgttccaatcgtctcatgccctatatgtggcagtgcagatatggccgtaccacaggccagcgagcaaatttatgacggagataagccgactggagaatggtttacgtatgtaaacccatcaaaagtaagctcatttgggtttgaaccattacactccttgcttcagtacaactaccgcataatttgcaaaaattgcggatatgaaaacagattctctgcgcacccagttctatcgtggctggagaagaatgacaaaaaaactaatgccgagtag

SEQ ID NO: 166091 - DNA, 300 bp, Enterobacter cloacae
atggataacacaaccacacgaaacaaagaccaggctcgaaaaattgagtcatggatcctgaatcagattgctattcgcggggcctccaatgttgcaaaggcgctggggatggataagtcgggcattacccgctggaaggaaagcatgttgccgaagctgtcgatgttactggcggtgctggagtggggcgtcgttgatgacgacatggcgcggctggcaaagcaggttgcagagattctcaccaataaaaaacgcccggcggcaaccgagcgttatgaccagatgaatatgaacttctaa

SEQ ID NO: 166092 - DNA, 702 bp, Enterobacter cloacae
atgccaggaattatgatctcaggcaacaatgccaaaattggcactgatgagcttctttccattatcaatcaggcccgattagagcatggagaaaagccagttcgtaacaatgattttatccctcgggtcaaggatgagcttgaaggggagcactacgaaactttcgtagttcaaaattcaaacggcacaaaatcagaaaaccttgtggtatccaacgaccaggcagtattgattggcatgagggagtcgaaggcggttcgccgaactgtcctcacaaaactaaaggaaaaggagcctccattattgcctcaaacgctgcctgaggcgttgagacttgcagctgatttagctgaagagaaaattcagttagagagtcagttagccattgccgccccgaaagcacaattcgtggatagctacgtcaatgcatctggatctctcggcttccgcgagacctgcaaattactccacatcaaagaaaacgccttccgtcagttcctgctcgaaagtgaaatcatgtacctgcttgcaggcaagctaacgccgtatgcgcagcatattgatgctgggcgtttcactgtgaaaacaggcgagaaccagaataacggccacgccttcacccaaaacaaattcacgcccaagggcatccagtggatcgccggactgtgggcggcacatcaaatcggagacaaggcggcatga

SEQ ID NO: 166093 - DNA, 384 bp, Enterobacter cloacae
atgacgccattgatgcacgagcgggtgcgaaacatgttcggagatgcaggactaacgactggtttcgcagtgcagcagttgatgtacgacgaccctggtgatctgtcgaaggctgtcatggtattcaggccaagcggcggaacagcaattcgtaccgatcttggttctgaatattacgtacttgtcgacgtcgtcggcgcaaaagacaagcgaaaagacgcgctcagcgccgtgcagcgcatcgtcgattacgtccaggccaaccctatggctgacgagtgcgtcggctacatccagaacatgggcgcaattcccgcgccggtgctcacagaagaagggcgaatagtcttccgactccagttcgcctgcacttacggcgaatag

SEQ ID NO: 166094 - DNA, 357 bp, Enterobacter cloacae
atgtcgtctactgcttcatggtcatacaacaagccatgcacgatatggcgcaagggagcgggcggtaatgacgagttgggcgatcctgtcgacccatatgaaccgcctgaaaccatcatgtgcgactacatcggcggcctgtctgcaaagctcggctccatcggtaaagaggttgtcgtaaaaaacaccttctttactgcgtatgcgttagctgatgagggcgattacatcctgattggtgttagtgctgagcaggatccggtcgtagcaggtgctgatgaggtccgtcacgtgacgccctggaacgacactctcgacggtctggaagatgactgggcgataattacgggagtgtag

SEQ ID NO: 166095 - DNA, 846 bp, Enterobacter cloacae
atggcaaacgaattaacaatcacggcgagtgcgctggcggaaaaaggtatcgacgtcgctacctggagcgcgctgaagaacagtatctaccctggcgccaaagacgaatcggtaatgatggcgctcgattactgccgtgcccgccagttggatccgttgctgaagcctgttcacctcgtgccgatgagcgtcaaagactcaagaacgggtaaaagcgaatggcgcgacgtggtcatgccaggaatcgggctttaccgcattcaggcagaccgttctggcgattatgccggggcccgggagcctgagttcggacccgatgtaactcagactcttactggtgtcgaggtgaccttccctcagtggtgcaaatacaccgtctacaagcgcatgcccagcggcgagatcgtcgagttcagcgccaaagaatactggattgaaaactacgccaccggcggccgcgacaccacggcgccgaatgcgatgtggaaaaagcgcccgtatggacagctggcgaaatgcgcagaagcccaggcgttgcgtaaggcctggcctgagattggacagcagcctaccgcagaagaaatggaaggcaaatcactggacgtagatatccgtgacgtcacgccgcgcagcaccacagaagcgcttccaccagcagcaagcgaagaaacgcttcaggcgataaccgatctcttgacgaccctggataaagactgggagaaagacttccttccactgtgcagcgacatcttcaaacggcaaattcttgaggcgtcagagctcactgaagaagaggcacagaaagggtttggcttccttcagaaaagagctaaggcggcagcatga

SEQ ID NO: 166096 - DNA, 609 bp, Enterobacter cloacae
atgcgttcgctcgggaatacgatgctgaatagcgtggtaaatgcgctagtccaggttggggttgaggctctcaaaaacttcattatcggtcagacattgggcgcagcagctactgctgccagtgcgacggaggctgtatttctggctaaagcatgggctccggcagcagcctttgccagtcttgcctcttttggtgggaactcagttcctgccatgaccggaattgcttcaacggtaggcctggcacagggccttgctttaaccggtatgcgttacaatggcggcccggtgaatgcaggaggtctttatcaggtcggtgagcgagggaagcctgagatttaccgggccagcaccggaaagcagtacatgatccctggcgataacggtagagtgatcagcaacaaagacatgcagggtggaaacggcataataataaataatattgtgcagaattacacttcagcaaccgttgactctcagggcgcggttaattctgacggtacagtcaccatcgaaacgattgtggcggatttgaataatggcgggcctattagccaggcaattaccagtaatcataacgtcaaacgaaccccaaggggacagagttaa

SEQ ID NO: 166097 - DNA, 372 bp, Enterobacter cloacae
ttgctggtctggggtggtagattcttcgagattgacgacctcgatttcgacctcatcaccctcagcgttaacgaagatgccaaccccctcctccggcgtaccggcgcctggctcatcaagcagcacagccacatggtcgaacatcatgttggtggcgatctcgttgtactttttgcccttcgactcgccgttggcggcgataccggaatacagcaggccggtggagatatggatcgggtcggagttggtaccggacagcatctcatccaggcgattaatcaggcgcttacccttctcgctggattcggcgtactgccggttaacatacatgtcgccagtcaccttcccgtctttgtggctgacgttctgtaa

SEQ ID NO: 166098 - DNA, 348 bp, Enterobacter cloacae
atgcgcaccgcgtgctcccctgacggcctttgcagtaacgatttcggcctcgaattgaaatgcccgttcacctcccgcgatttcatgaaattccgccttggcggtttcgaagccatcaagtctgcctacatgacccaggtgcagtacagcatgtgggttaccgggaaagacgcctggttctttgccaattacgacccacgaatgaagcgagaaggcattcaccatgtcgtcgttgaacgggatccgcagtacatgaccgacttcaacgaaatggtgccggagtttatcgagaagatggacgaggcactggcggtaataggcttcgcgttcggggagcagtggaaatga

SEQ ID NO: 166099 - DNA, 408 bp, Enterobacter cloacae
gtgagcccagccgcggccaccggtacgagcataatcgtaacgagactgctcgattcgcacggagcgagaaagcggcatcaaatcgttcaacagagtgaactcggtattcggctcgaactgctgaagcacagtcgtgtcgaaagcgcgatacaggcgacggatatcgtcaactgcgttcaccgcgtcgagataaggagcattttctgcatcgccacggaactgagtgcgcgcaagaaaatcagccgcagcctgtgcgctggcgtttcgctcaacttcaagggcgcgccattgcgcctggttaaccgcgaggttaccggtcttttcaccgatagacttagagaatacaaacatatctgctccttacttaattacgacacgaagcagatctcctgccgccgttgtgtatga

SEQ ID NO: 166100 - DNA, 978 bp, Enterobacter cloacae
atgaaagaaaataacgctaactggctatggcaggagcttacggatgaatattttttctgtaaatcactgcgtgaagatacagagtggagttataataaagttattcgtggcttcaggaagcatattggggacaactgttcaccttataacataacaacccgcgatgtgcttgaatggcgtagaaatgtattaaagaaacaggggctctctgcacatacctggaataataaagttagccatatgcgtgcactttataattttgctatatctactcacctcacaaacttaagtaagaatccttttaatggtgtttcagttaaacaggacaggaaacgcaaaaagaccctgacaaaaaatcaaatgacaaaaatttggcttatcatgcaacagttcgagacagagcaaggcactgagacaaaatgtgctttgcgccctacctggtattggttggccgttctcgatacgctacgttatacaggtatgcgacagaatcaactgctgcatatccgtctgaaagacgtctgtcttgaagatggctggattgagctcagagccgaaggcagtaaaacctatcgggagtggcgagtccccgttgtcagccacttgcgcccgcgtttggaagagctgttaaagcgtgccaaagactgtggcgctggaaataatgatgcattatttcattatgaacgcttcgtctcttcactaactgaacgagatgttctttcagaaaggccttccctacaaccattacgctctttttttcgcaggctgtcaaaagagtgcgggtttgatgtttctccccaccggttccggcacacccttgccacgacactgatgagctcaccagaacggaatctgcaacttgtaaaaggacttctgggacacagtaatgtgagcacgacaatggaatacgttgatattagtatggatatcgtgagtcaggctcttgagagggaaatggcgctttacactgacaagtga

SEQ ID NO: 166101 - DNA, 1656 bp, Enterobacter cloacae
atgctcaacagaatcaaaacattcagggctttgttttcaaaagaagagccgacagtaaactcattatctggtgcggagcctcccgctggatactactcaccccattgccctgacttgctaatgggcagaacactgagaaaacgatgtctccagcagatatgggagaacaactctctgtccgctgaagtgtaccagcgtctctatctgttcccgctcaggaatcttctgtcgcatgtacagaacgtgcctgctgcccggcaaggacactggtccctggcgcacggttttggtgatttgacactgcagtttactagctatgcagtcagacttgcaaagggttacatgtttccaccaggtgcagccccggaggaacaggcagtgcaaaacgttatgtggaatgccgttatttactggtcagcacttttttggcatttacctctgttgctctctctggaaggagaattggttagcggattgggttggcaaccaggtattgccgtaccggatgtgccttaccgatttcgatttagggaaaaaactccagaaggagaagatgctctggctttcgcatcgttagtctcgggacaactgatgcccggggaagcgtttaactggctggcaggtaaccagtctgcgttgcagaacctttctggtgcgttgtggaaccgacatccaatcatgccagttatgcgtaacctgctgaatcaggcggcagagaaagttggatcaccattgaatatggacaattcaattacagtcgaaagcctccggaccgaagacctcaggatgcaattacaggaaagaactaatcccttagaaaattttaaactacagccatcagcagaacgttcaggcatggcaacttctgctgatacatcttttataataccttcaacccagggttttacatttggcaccggaattgaagatacctctgaagcaacggatttccttcagagtggaggtactacagaggagaaaatgtttttcagtgttgacgaacacaattcacaggagtccctttcagaaacggatgaattattatcactttttaccctctctacatcacaggaaaacgtcaaagaaatagagaaaactatgatgggtattactcctgctgtacgacatggagtagggggtgttgaaagggatgaggtagaaaatatgtctattcagaaaggtaaagtcatgaccacccagcaagattataataatcttcataatacagttgttaataatggagataaaaaaacagcttctattcctgtagatattaacgttgctgacatagtggaaggagaactattttggacatggtttcgggatggggtcagtagtggaaagatcagttttaacaacaaggaagataaaatccatattatttccggctatatatttttacccattcctggggttttttttgattatctcaaggccattggtaaaccgggggaataccgggaaaatcttcaggtttcttttgagcgactgaacttacataaacgtcatggtcacaggcgattttattttgctcggctttacgatacacccgacaaggccggaaagtttaaacgagtgaaaggctatctgttgaaaagcaaggatatattcaggaaagcggtaccccaggacagtcagttcctttcgttctcatga

SEQ ID NO: 166102 - DNA, 681 bp, Enterobacter cloacae
atgccggtttcagacagagcttccagggaagcaaaaaacaacaataaaaacctgccttctgaaggtactccagctgtatcagcgaaagcgcagaaggtccttgcgggggcgaaatcgatatttctggcacgaggctactcggccgcgacaacagatatgatccagcaggctgccggggtttccaaatcaaccgtttatgcgtattaccccaacaaggaagcattgtttactgcggtggttgaacagcaatgcggacggttccttcagacggtgcacgacgtcaaaatcacagggaaagatattgctgataagctggataaactcgccagactctatctggatattgtgctttcagaagatggcctggcactttatcgtgttgttgcctctgaagccccgcgatttccggaattaggccggcgcttttatctggcgggccctgacagaatgaacaatattgttgccgatgtcttaaaggatgcagagttaaaaggagaaatatttcttggtggtatcggatgcgcttctgcagcctctctctttgtgaatatggtcaggggagagccacaaatgcagtgtctgatgcatccggcctccctggcatccgcagcccagcgtgacttctgggcaaaagatgcggtatcagcgtttttgctcgctttctgtaaagccgggaaatga

SEQ ID NO: 166103 - DNA, 663 bp, Enterobacter cloacae
atgagcatgacagaaacagtcagactcactacatcggctcaacgcagagaggctatcttactggctgcagccgatgtgtttttcgaaaggggttacgcagccacgagtgtcgatgcgattgtcgcaagggtcgggggatccaagcggagcatttacgctgaatttggtaacaaggaaggattgtttactgcactggtttcccgccatgcccgttatgcgctgtcggcacttgaggagcaggatgaaagccccggaaaaacgattgaacagcagttactgacatttggtcgtcgtctgatggatatttacttttcacccgcgctgctggggatcttccgggcaatcatggctgagggcgcgcgttttcctgagttaacccgtgtcttttacgagcagggccccgcccacgccgccattcgtctttctgaagtaattaatgaagctgcatcacacaatgaggttgaggttgatgatccagtcacggtagccagccacttcatcggaatgttgagggataacctgcacttaagtgtcgttctgggcctcaggccggtgccctcggaggctgaggcggaaaaacacgtcgtatctgccgttcagatattcctcagagggatttcttatcaatccgtgaacagcagctcccggggacagctaacatga

SEQ ID NO: 166104 - DNA, 1806 bp, Enterobacter cloacae
atggcagcgaaaatcgaagaatacgccatgataggcgactgcagaactgctgctcttgtctccctgaccggttcaatagactggctgtgtctgccccggtttgattcgatggcctgtttcgccggtattgtcggtacgtccggtaatggccggtggcgtatagcaccggttaatacccgttatacagccagccggacttatcttgatggcagtctcattctccggacccggtttcagactgaagacggggcggtggaactgacagattttatgcccgtcgaacaggaaaacagccatattgtgcggatgatcacctgctcagagggttccgtttcactggaatcagagttacttgtccgttttgattatggcctgacacccccctggatcagaaagacagatgacagaaccacgacgatgatttccggtcccgatcttctcgtccttcgctcagaacttgcaactgacattacggatgaaaaggtcactgcaacattcgatgttcacaagggcgataaattcattttcattctcagccacggcccgtcgcatcttcctcccccgtccaccattgagccggagcggctgtttcagcgaacaaaagcctggtggaaaggatggtccgggcggtgtgaggaggcaggccgatggacggagattgtacgacgctcactgattaccctgaagggcctgacttatgttccgacaggcgggatcatcgcggcaccgaccacgtctttacctgaatgtatcggcagcagccgtaactgggattaccggtattgctggcttcgggatgcgacatttaccctgtcggctttactgaccgcaggttatgaggaagaggctgatgcatggcgtgcctggctgttacgtgcggctgcaggagatcctgctcagatccagataatgtacggcgtcgcgggtgaaaaacgactggaagagtggacagtcccctggctttccggctacgaaggctctgtgccggtacgcatcggtaaccaggccgcggagcagcttcagcttgatatttacggtgagcttttcaatgccatgtcagtggcctcccggagtggattactccccctttcgcgtggatttgagttgcgtacggccttgcttgagcatcttgaaaaaacctggtctgatccggatgcaggtatatgggaaatccgtggtgaaccacaacatttcacccattccagggtgatgacatgggtggctttcgaccgtgcggcaaccgatgagcaatacagtgcggaccctgccactcgccagaaataccggcgtattgccgacgaaatacatcgcaacgtttgtgaaaacgctgttgaccaggaacgcggctgttttgtacaggcttacggcagtgagcaccttgacgccagcctgctacttatacctgttgtgggattccttcccgctgatgacgaacgggtacgtaatacggtttctgaaatagaacgacggttgatgaaggacggtcttgtgttgcggtacgaaactggcaccaacgttgacggtttacccggccatgaaggcgtctttcttgcctgtagtttctggctggttgataactacattctgcagggcaacctgaaaaaagcagaatccctgtttgagcgccttatttctcttagtaacgacgtggggctgctggcagaggaatatgatccctccgcaaaacgccagcttgggaattttccacaggcgttcagccatgtggccctggttaattcggcatttgcgctggcacgggcaggggaaattaaacatccggtagcacagcgggcttctgaacgatga

SEQ ID NO: 166105 - DNA, 645 bp, Enterobacter cloacae
atgacaaaagtactcattctctactattcagcgggcggacatactgaggcgctggcaaaggcagtctttgaaggcgcggattcgacaggcgcggaagtcacactgaagcgggttccagacttagcaggggaaaacgcctctgagcacaggcatacggatacagaagaagccactcctgatgagcttgttgaatatgacgctattattattggcagtcccacccgctttggacgtttatgcgcccaggtcgccaattttctggatcagaccacccggttatggaaggaaggcaagctaatcggcaaagttgggggggcctttacctgtacggccagccagcacggtggttcggaatccactatattttcaatcctcacttcaatgatgcaccatggttttatcattgtgggcctcccctattcttatgaaggccttcttgaaatgaaagaagtcgcgggaggttctccgtatggagcaacgtccgttacaggttcagatggttcccggtatccctctgaaaatgaacttgatggtgcccgctaccagggagcacatattgcaaaggtggcacatgccttaacttcgggaaaggcttttctgaatcttttggataatggcaaggtacgacccgacgatgatatttag

SEQ ID NO: 166106 - DNA, 768 bp, Enterobacter cloacae
atgcgaatgcaaaataatgtcgtgctggtgacaggtgctggtcagggaattggccgtgcaatagccagccggctggccagtgaaggtgcttacattatcattaacgacctgtacgaaaacgataataccagggaaacgctcagggaagtacagggtgccggcagtaacggatgtatcatcgccggcgatgtcagcgatccggttatatgccgtgatattatcgctgaaggtttcagctgggcagggggtattgatgtacttgtgaataatgccggaattgaacgaaatgcagaattccttgacgtgacagagaaggattttgacgctgtaatgaatgttaacctgaagggagcctttttcatgacgcaggcgtttgctcagcattttcgtaacactaagcgtaaaggacgcattattaatatcagctcagtgcatgaggaactccccttccctcatttcaccagttactgcataagtaaaggtggaatgaaaatgatgatgcgaaatctttccattgaactcgcccccctgggaataaccataaataatgtagcgcctggcgcgatagagacaccgattaacaagagcctgctaaataatccacagcagcttgcagaactgacacataatattcccgccggacgcctggggaaaccacttgatgtggccaatgcggtactctggcttgcctcagatgaagctgattacgtgacaggctcgactgtttatattgatggagggttactctggaactatcaggaacaataa

SEQ ID NO: 166107 - DNA, 237 bp, Enterobacter cloacae
atgaaaaccatgttcattttccagccaacttataaaacgtttacgttccagttcctgtgtgtcctgttttttgcggagagtcctgacagcgtaaactgtattcatactggattcacttttttgaagcaatcctttacgggttatggcaatatgggcattaagtacctgcctccagctgaaaccatatttttttacaacagcttcacttgcctgcatacgtttatgccatggatttaa

SEQ ID NO: 166108 - DNA, 255 bp, Enterobacter cloacae
atggtgtgctctggtggcactaagactggagagccagagaaaggcacactatgtgaagatcaggaaaatatttttctgatagggtggctgactaacgctctgaaacagtgctgtttttctgaagaagtggttcctgatattaaacggttgctgaaagaaggccgagagaggggagaactcgcaaccaaacttgagtgtctgtggctttccagcacgttggttttatctgattccaattgtgattcacgcccctga

SEQ ID NO: 166109 - DNA, 186 bp, Enterobacter cloacae
atgaaaggtatgaatgaatcatctgcagccgattttgattttatagcattgagcatcgccagaatgaaccattgtgggataaagattgatatcaaaaaagtgataggaaatatggatgaagaatgcaggataatgtttcttaatcgttatgagtactatcttggtcaattaaatgataaagaatga

SEQ ID NO: 166110 - DNA, 1050 bp, Enterobacter cloacae
atgacaattcaagcgattacagagtccctttctacagccaggttctcaacataccaaatacctatcctaggcggggcttcgccagaacaatgccttggcatctatctttggaataagcaacttgcgagtgcttttttaccagcacttcaaatcattgaaatttcgcttcgcaacgctatctatcagtcctggatagcacacgaagaagagcaggttgagctgaatttccagccgcatgattgggtgaaagaaaaagctaaaattgacaaactttggtttgttaatacattcacaaagcaaaataactttatcgcatggagtaatatccaaacagcggtaaaacagcttaattatgaaaataaacctttgaccgcagaaaatttcatatcaaagttaactttgggcttttgggtatctctggtacaaaaagatttcgacgtacaaaaaaactcttatctcaaattatggccacatttaaggcaccgtgtattcccgaatgctatcgattcaacctccggctctgcattatcaataaatagcataggtaatgaactcaaggatatcaataagataagaaaccgcctctctcatcatgagcctttgtggcgcaataagaaagcatatcaagtcgaggatgtaataaacaaagtaattgaacattatgacagatgtttaaaagtaatctattggataaatccctctaatctcaaattacttgacataattgagagcaatacaagaatgtctgaactttgttccttacatgctctctggaagaataaacaactccctgcaggaattcccactttgctagtgagaaaagactggtcaaaaggagttaaaattaatcctgaacacacgggagaaataataaatattactgcagcaaatgtgctggttaagagtgaaaaaaatcaggcaattttttatggagcggataaggctatgctgggcggaatcaatacctttgcccttaatgataaggttcgattcacgccagaagcaagctccgcaaaatatcctaatgcaaagaacatcaggaagctttaa

SEQ ID NO: 166111 - DNA, 612 bp, Enterobacter cloacae
atgtttagagggataattaataggtttagcaaaagtgtaaattatgaggcagagttcatctctgctgtaaaacgctctaggaagtggaagcttgatgtgcctgatatcacattgagtaaaactccgcttctgactggagaaaaaagtgaagctgcgataaaggttattcaggacattgcttcaaagcatactcccgaacaagtctcacaacaatgctttggttatatgtatttcgttcaggggtctttagaagaagttttacaaactccactttattacactttaggttatgttgattatgagaagcggccagttttttatacgagtgaagagaagttaaaaagtaatctgggtaatcatatgtcaggtgtgggggcgataaatttacatgcgtggttgacgacgccaaacatggaaataatcgaccttacgtttgccaccacatatggcattgtgaatgatgttccatcagtaattggtcgctgttcatttcaacactactctgcatttaatgaaaacatgacttatcgtcctcagttggtcggcgaagattatttgaaacggattggtgccttcgttgattttagggcgttaaatgtatttgtaatatag

SEQ ID NO: 166112 - DNA, 1320 bp, Enterobacter cloacae
gtgcaaaagatcacctctctccctgccgatgatgtactgcctggatggtatcacaccagtccatcgcgtatccctcgccctgctcacgtagggcaaaaacatgcccgctgggcgatagtcggtgccgggttaaccgggctggcgaccgcccgtcagatggcactcaactttccggatgatgaaatcgtgttgattgaggcgcaggaaatcggctacggttcctccgggcgtaatgcgggttttgctatcgacgtgccgcacgacatcggtgcaaaggactacatcggcgacgtgaaaacggccagcctgatcctgaagctcaatacgctggggcagaattatttgcgctctatcgtgcaggagcatggcattgagtgccagatgtcagaggctgggaaataccaggctgcagttggtgagcagggcatcgcaatcctggaagcgtatcgcagcgggctggcgaagattggccgtgagacagagatgatcgcgggccaggatctgccggaccatattggtacatcgtactacaagcaggcgctctatattcccggcacaatcctgctgcagccgtcggcgctggtgaaaggtctggcggagagcctgccaccgaacgtgacgttgtacgaatacacgccgatcaccgccatcaactatggcgttaaagtgacgctggtgcatgacaaaggcagcattacagcagataagctgattctggcaaacaatgcgtttgcctcacactttggtttcctgcgtggacgtctgctgccaaccttcctgtatggcagcctgacgcgccctctgaccagcgacgagcaggcgcagctgggcggcaagccggtatggggcgtcatccctgcgcatccgtttggcagtaccgtacgccggacggtggataaccgtattctggtacgcaacagtttcagctttcacccggatggtcgcccgcgtgagcaccatctgaagaactttatcgctaaccaccgtaaatcctttgaacgccgcttcccgaagcttaaccgggttgattttgaatactcctggagcggggcgatttgtctgtcagaaaatcacgaaggcttcttcggccagctggccccgaacgtctatggcgcgctgtgctgtaacggacttgggatcacccgtggtacggcgaccggcaaactgctggcggatatgatcatgggcgagcgcaacgatctaattgacttccttgtggcatctccgggcccgaacaaaacggctccggagccgttcctctccatcggcgttaattcggtgctgaaatggggacaatacagagctggactggaggtttag

SEQ ID NO: 166113 - DNA, 306 bp, Enterobacter cloacae
atgtgcctgaagacaacgcctgatgccgtgttttacggcctggaagagagagtgcatttctacttctgtcttctggtagcagtggggctgtcaagaaagcagggacgcattcgttctaaccggcagaaaaatgcctttattatgaagtggctaaaaaatgccgtgcggatgagggcttttcgccacggcgcagacagtgaaattgcttggctgcgaggggagatcctgcgtcatccaccagatcgggatccggagccgctcctgctgttgatttaccagactgccagtgaaatgtgcagaacctga

SEQ ID NO: 166114 - DNA, 1503 bp, Enterobacter cloacae
atgaaacaacttcagacgctcaatgacgtcacgcgcgtggcgcaggaacttcggttttcgggcaacgcgtttatcaacggccgttttgcgcccgcgctatcaggaaacacgcttgcaacgcgcaacccggcgaccggtgaaatgattacacatatcgccgcctgcgatgcggctgatgtgaacgcggcagtcagtgcggcacgatcggtttttgaagccggtagctggagcaaactggcgccaggcgagcgtaaaacggtgttgttaacactggcggcgctgctggaacaggagcgtgagacgctggcggtactggaaagtctcgacagcggcaagccggtcagcgaatgtctggcggtggacgtgccggagacgatccatgtgctgaagtggaatgccgaagccattgacaagatttacgatcacactgcgccagtggggaacagtgcgatggcacttgtggtccgtgagccgattggcgtggtgggctgcgtcctgccgtggaatttcccgctgttgatgctggcctggaaaataggacccgcactggcgaccgggtgttcgctggtggtgaaaccagccgagcagacgtcattgaccgcgctgcgcgtggcggagctggcagtcgaggccggtgttccagcaggcgtgctgaatatcgtcaccggtatcgggaaagaggtgggcgagccgataggtttgcatccggatatcgatatggtgagctttaccggctccacggcaaccggccgtcgcttcctgcactatgcggcggagtccaatctcaaaaaagtggtactggagtgcggcggcaaaaacccggccgtagtgtttaacgatgccgatgatgttgctgccgttgccggacatgtacttaatggcgcgttatggaatatgggtgagaactgctctgccacctcacgcctgcttgtacaggaagaggttaaagaagcgctgctggcggagatggtgaagcagatcggcaactggacgatgggcaacccgctcgatcctaacaaccgtctggggacgatggtttccccggagcatttcagtaaagtgagtcactacctcgacaccgcgcgccaggaaggactgcgcgtgctgcatggaggtaacacggagcagggtgcttatgttcagccgaccattatcgacggcgtaacgcctgaaagtgcactgttccgggaagagatttttggcccggttctgtgcgtcaccaccttcaaaactgaagccgatgccattgcgctggcaaacgacaccccgtacgggctggcagcatcggtctataccggtaagcttagtcgtgccatccgtgtctcccgtgctattcgcgccgggacggtgaccgtgaactgctttggggaaggggacgcaacgacgccgtttggcggctataagcagtcgggcttcggtgggcgtgataaatcggtattcgcgctcgatcagtacaccgaactgaagaccatctggattgatgtgcctgaagacaacgcctga

SEQ ID NO: 166115 - DNA, 918 bp, Enterobacter cloacae
atgtcccagaagaaagcgacactcaccggactgatagctatcctgctgtggagcgcgatagttgggttgatcaaaagcgtgagcgaaggttttggtccggtgggtggcgcggcgctgatctatacctgtagtgcgattctgctgctttttacggtaggcttcccgaaactgcaacagtttccactgagctatctgatcatcggcagcatgctcttcgtctgctatgaactctgtctgtcgctctcgctgggcttcactcacaccggtcgtcaggcaattgaagtcgggatggtgaactacctctggccaagcatgaccattttgctgacggtgatcgttaatcgccagaaaaccagcttgctgattattccgggcgttattttagccgttgcaggaatatgccgggtactgagtggcgatcagggtttctcattcagcgagatggccaataatgtgatggagaatccgcttagttatggcctcgcctttagcggtgccattatttgggcaatgtactgtgtggtaacgaaaattatcgccaaaggaaataacggtatcaccctgttctttatgttgaccgccctgacattatgggtgaaatacctgtcctcgccgcagcctgaatttgtcctctcctggcacgcgtggatcagcctgctgctggcggccatcgccatgggctttggctatgcggcctggaacgtcggtattctgcacggtaacgtgacagtgctggcagctgcctcgtactttatcccgattatctcggcggtgctggctgcgtttatgttgaattcgcacctggcactctcattctggcaagggaccgccatggtgagtctgggatcgctgatttgctggtggtctacccgcattgttacagtgaaaaaaatacccgcaataaatgaaagtaagtaa

SEQ ID NO: 166116 - DNA, 1386 bp, Enterobacter cloacae
atgtcaaataccatttctgtagaagaccttccacttagccgcttccatcggttgctgaccgtacgttcaggcggcggatcctttgttgatggctatgtgctgagtatcatcggcatcgccatgatgaaagtctcaccagccctgggcctcagcgccttctgggaaggtctgattgccgcctccgcactgatcggcatcttctttggtggctttattggcggtgcgctgaccgatcgtctggggcgccgcctgctctattttgtgggaccaacgctgttcgtcgtctgctctgtggcgcaatactgggtgcaaagcggagagatgctgtttgctctgcgctttatgaacggcgtcgccgtggggattgaatatccggtggcaaccgcattcctggtcgagtttctgccgaagaaaaaccgggggccgtgtctcgccacgctgaccattttatggttcgcgggtgcggccgctgcttacctgactggtgaagcacttctgaattttggtggccctgacgcctggcgcctgacactggccagcactgccgtcatcggcatcctgctgttcgtcgtgcgtctgggcaccccggagtccccgcgctggctgatgagcaaagggcgtcatgctgaagccgaagcaattattcgtcgcgtctatggtccggaatttaacctcgataatctgcctgtgcatgcggaaagcaaaaatctctcctttgccagcctgcttcattcaggctacggcaagcgcatggcctttgtgacagtcttctggacctgctcggtaatcccggtctttgccgtctacgcttttgccccaaaagtgctggatgcgctgcacctgagcggcggctgggcttcttacggttcggttgccattaccctgctgttcgtggtgggctgcatcatcgccacccgcctggtgaataccctcggacgtcgtaagttattgttacacagcttcctgtggtccgggctggctctgatgctgctaggtttcctccgtgacggaccgtctgcggtgatcctgctgatgtttggtctttacgccctgttcatcggtggcgcgcaggtattgcaactggtctacccaaacgagattttcccgaccgagatccgcgccggagcggtgggcgtagggacatcactgtcgcgtgtaggggcggcagtggggacctggctggtgcctgtttctctgcagaatatcgggattggcccgacaatgtatattgctgcggcgatcaccttctttgggctggtggtgtcgtggttcctggccccagagaccaatgcccgtagtctggaagatgcttcgtcgctggaggagaagcacccgcttgacaaggaatcaatgcaggccgtgatgccggaacgacacagcctttaa

SEQ ID NO: 166117 - DNA, 1014 bp, Enterobacter cloacae
atgcctttaccccacgttgagccaaaaccggatttgaccatcggcttcttgctgatgcgtcagtttacattggcctctgtcgccgggctggtagaatcgctgcgctttgcagctgatgaatccttctcaagtcgacaaatattttgccgttgggagtggatgacctgcgatgatcaacaggtgacggccagctgtgggctaccggtctcgcccacggcgaagctcgattttgccaaatcgtgggactatttcgtggtggcgggcgggctgctggaagagacgcgccatccaccggaatggctgttgcaggcactgtgtgagttgcatgcgcggaacatccccataatcactctgtgcagtggcgcatttgtggcagggaatgccgggttgctggacgggcgtcactgtgcgatccactttaccacccgcgatgagttccgcatgcggtttccggaagcgatcccggtgattgataaaacctacatcaaagacggtggaattatctcctgtccgggcggaacggcgatcgatctggcggccgatctaatccgtcagcattgtggcgtggtaagggtgcagaaggtgctgaaatatctgttggtggatgaccatccgcagcctgtccgcaagacgaaacagaacgcttcacttaacgcaccggaggtgtatgagaacgaactggtgagcaagatcattgcgtttatgaaacatcatcttgattcacccatcccgcttgctgaggttgcggattttgcaggagtgaccttccgccagctgaacctgatcttcaccaaatgcaccggccattcggctgccgtttactggcgcaatatgcgccttgagcaggcgcggaagctgatggcggattcgagcaacagtattcatgccatcgccagcgcaacggggttttcagatgcttcacacctgatctcgtggtttcgcaagcagtacggtgaaacgccgagttcattcaggaaacggcgcagggaagtggagaaactggtgaaggaataa

SEQ ID NO: 166118 - DNA, 849 bp, Enterobacter cloacae
ttggcagagagaaaaattatcaatggggatgtatacaaatacgcttcaatcgaagaagcattattatcatcaacccgaattacaaacctcaaaactggtgagtcagtaaagctaatcggtaacgccaaattagcatatatgatcctccggaagaggttccatttattcaccgaccaatcaacagacaataagtattatacaactggtaagcactacgacaccattgaaagcatcgctgaggcaatcggtgtttctgacgttggtacagtgagcagtgcaattggcagaatggaagcagccggactgctaaccaaaaagaaatttggaaaaacttacgaatggactgttatcgatctctccccagaattattccttctcgaacgtaacgcaggaacatcaaaaaagcctgtctgggtggattgtctgaaacatccagtgtttggcaacgctaaagaagacgtagcgccagaggtgcaggaagaaaagcaacagtctgttccagaagccgatccgatgtgcgagtttgacgatacgccggaagaggaagcgccagcgccggaaaaagtggagccagcaccgaagccaaagcccacgaagaaaccagcggcaaggaaagcaccagacaaacagcaaaccctttccccattcgagtttaaaacgccacgagatgaaaaccgggattggtggtatttggaacgctacaaccatgcagatcagtttactggatttaatgactttgatttgccttatctggcaatgtttgagagtcaggggaagctaaccaacccgaaagccatagaacatctgaaaacgaagaggaatctcttcgaaagaacagggcgcttgtag

SEQ ID NO: 166119 - DNA, 123 bp, Enterobacter cloacae
atgtacatgcaggataaaggggagctgatggcgatgctgaagcgcgggaccgaatgggcgcagggggtgacgcaggagacgttgagggaggtgaaggttgggctgggggtgccggtgttttga

SEQ ID NO: 166120 - DNA, 462 bp, Enterobacter cloacae
atgttagataaagcttcggaattattagagcagtttatagcaattgagagtcgtgaacttagtaaaatggacatgcctcatatgccaacattaggttctgcttatgaagagattaccaaacaaggaatcgatcaggaatttatcatacctaaaggtctaaatcttaaagtcgtttcaggtttcatttctataggggataagttattaaaacaacaaatagatggaatgctagttcacggcgaagggaagcaatatggaagaacatctgagtatatttattctatagatcaagtcctttgtatttttgaagtcaagaaaactcttaataaaagtgattacatcgatgcttttgatcatcttcggataattaggaatgagtattcagagtattttgaatcaaaatttcaagatccagattttgaacccgatatcagttttgcaagtaaacattttctcaaataa

SEQ ID NO: 166121 - DNA, 285 bp, Enterobacter cloacae
atggcacttttaaacagaagcgaccttcaatttcaatacgcatggtcagccttatctcccgatgacccgcgtataacgggaaaaccggatagtacattgcttaaccgccatgaagggtatgaggttctttcgttccttaaccgcttagctcatgcaagtaagtgggataccaaatcgccagcactcaaagcagaaaggctgatcaagaaccatctgcccggtgacgtgcgtagtcacaagaatgtctggcaatggctcgtggataactggaacagatatcagtaa

SEQ ID NO: 166122 - DNA, 564 bp, Enterobacter cloacae
atgaaaactttcgggtatgtgcgggtaagtagcaaagatcagaatgaggcgcgtcaagttgaagtgctggcgacgaaggctgacgaaattttgatcgataaagctagcggtaaggatgcagacaggccagctctaaaagagctaatgagtaaagttcgccctggcgacacagttcgagttaaaagcgttgaccgtttggcgcgtaatacccgcgatctgctggaaattctggaggaattgaccacaaatggtgtgagagttgagtttatcgataatcacatggtgtttgatgattcgcccaccagcaaatttatgatcacaatgctcggagccgtcggtgaactggagcgctcttttattcgtcagcgccagaatgaaggcatcaagatcgcgcaggcgaaaggagtattcaaagggcgacaaaaagacgacgagactcgcaggaaggtcgctgagtatttggctaaggggacatactctaacgaagagatttataagctggtgggatgtgggcgggctacgtttttccgcatcaaaaaggaactagctgaagcgccgttgtga

SEQ ID NO: 166123 - DNA, 1113 bp, Enterobacter cloacae
atgtttaattcagagcgtttacgtatagcaagagaacggagaggcctgactcaaagagcgctagctgaagctgctggattaaccagcaagaccatttctaactatgaaaaagcaggcatcttcgagccaattgccagcgatagcatggaaagaatctcttctgttttggaatatccgatcgaatttttcttcgatcgggatgttccttcattgacgcccgaagctgtcagttttcgtgcaatgacaaagttaagcgcacagaagcgtgattcagcacttggcgcaggcaaactagcacaggaattatcggcatggattgatgggcaattcaagttaccaaaacctaacattcctgattgtagtttcgacggatattccgaaccggagcgtgcagctagagcagttagagaagcttggggtattggtgaactatcaatttcaaacataattcatttactcgaggttaatggagttagggtattctcacttgctgagaattgcgttgaagtggacgctttttcattctggatgaacgaaaaacccttcgttctactcaatacgatgaaaactccagaacgtagccgctttgacgctgctcatgagcttggtcatttggttcttcacaagcactcgagtaacaatggtcgccaagctgaacaggatgcagatcgttttgcttcggcatttttgatgcctgagcgtagtatcttagcctcggttccaaggatgcctagtctcgaccaactaattttattgaagaagaactggaaagtctccctggcggcattagttcgacgtacctttgatgttggtttgtcttctgagtggcattatcgacaactggcgattgagcttaaccgtcgtggttatcgcacagcggaaccccaaggtatgccagaacgagagaaatcattgattttggaaaaggttttttcagcgttacactcccaaggtgttaaacgtgccgaaatccttaggcaactgtgtttccctgctgatgaaataagtgcacttacatttaacaatcgtttcttcatggaagcaattataggtgatggcattctgacacctagcgaacgcaaccgaccacctcatttaagtcttgtcaaatag

SEQ ID NO: 166124 - DNA, 735 bp, Enterobacter cloacae
atgaggtctttaccaatgtactcccataatctcgctaaaaccgttgtactggatgatccaaatgatatcgaatcttacttacaaccaatgaacctcagccaaaacgatcttatacgtattcttgagcgtggtttgtcaggtcgctattccactacacaaaatcaccctgtaacgtctcgcgggcagtacttttatggcgaaggagtaagcgcggctagagatatccttgctccgaagggatacaagcgactgtctttacgaaacgttgaattgacgattaatgagaaggtagcgatttatctctgccgtggctgcgatcaaactggtttggtgcatggctaccctgagtcacgtatgaagaaaggagactttactcgtgagctcatggggttaatccataataacaatccaggccaagggaaactaatgctggatgatactcagctcaaattagatttagacctcccagaaggtgagattgtcccattgcttccgaataaaatcggacgggacttatggttcttgctatacgattttgatgaactggatgaattcaaccgtgtaggtattcgcgcggagctgtcccggccagtttcctacaatgacaaaaacgtggttaacagcttttctactcgtttgattcttgatgtccatcaacctgatccaatggttcagggcggtgagactcctcagtttacaccagatatcgatcttgaaatattgaaaacaggctaa

SEQ ID NO: 166125 - DNA, 210 bp, Enterobacter cloacae
atggtaagaaaagtgctgttgatgggttttattcttattgcattcagtgccagtgccggacgcataactatgagtaacccagagcagacgaccaccgcaagtgggcaaaccttgtgcatctacagcaacagcatttacacctttacctacgtcaccaagtcgaagcattgtccgtacagcaaaagtttcgatacggttgatagagtgtaa

SEQ ID NO: 166126 - DNA, 1590 bp, Enterobacter cloacae
atgacacagttaatttctaccatccttgagaaaacgggcccctgtttgagctcggttctcgtagaagagatggtaaaaaaatcgacgataaacagcgtgactgcacgaaagcaggtttcacgtgcggtaactactggtcagctacactgcgttgaccgcctctttccaaagcgcgaacgtttcatctatctggctaaacagtatagttcggggcgttactggcgaaacctgactactgcactgcttgaatccggttcagcatatgggctggcattgagctgcctaagggcacgtggggggattctcaaactcgagcattttgcagcagcttgtggctcgccgatagccatgaaaaagagactttcgtggaccaccgtcctggaaggattagtccagcataagatggtaaggatagtgaatctggtttcagttggcgattgtgtcgcactaacagaaaagaatgacgaagcatatcatcgtgctatcccttacttaaaagcacgtctgacgactgaatctgttctgatgaaagctgtcggacaatgggtgaaaaacaccggtatcatcagctacgataccttgcggacccgcgagacagttacgtcagatcagatgccatgtgtctcgagtttctgtttcgatatctcagccgcctcgtacctaaacccactcctccattttacgaagacaggggaaacccgtccgggattctttgtgtgtgatctgttgttgggtttcactctgagtttgcagcacgtgcagcccttccttacgaaatgccgttcaatcagcagccttaaaaacagtccccgatgtctttttatgttcattgcgaatgaatactctgcggaagcattccaggcactaaagcaggcaggaatcatcccggccacacctgaatcactatttggccaagatcttgctgaggcgcttatccagctacaagcactgattagccacatgtcactgaacttgggagagaatataactgctgtcgacgaaattatgtctaagctctcgcgaatagaaggtgcaactacacagttgcagggggatttgttcgagtacatcgtggccgaagctgttcgtatggaccaccctattgttgatgttgggagattatgcatatcaggcgacggaaaacaggctgactgtgatgtttttgcacggcaaggaaatgcccgagttaccttcatcgaatgcaagggctacaagccatattcaacggtcagagatgaggatgttaaacactggatagggcatcagattaaggtattcagaatgcatgcactccgcgaatattcaggggctgatattgccgtagaactatggaccaccggaaagttcagtgatgatacccgcgcaaggctgagcaagtttaaggaacaaaatgccattaatcagcggtacagcgtaaatatccttgagcctcatgatgtgcgcaacagaatcaatgccacacgcaacgcttcgctcatccgggtgttcgaaaagcatttcatcgacaatgtattcaaagtgaccagcagaaatacacgcgaaccgttcaggtttgcggggcatgatgtagccgatgaatacgacttttaa

SEQ ID NO: 166127 - DNA, 444 bp, Enterobacter cloacae
atgtcattcgataacgttttagagcagttctgggtttgcatcgtaatagcgctgatgtccagttgtacttcaatcaccgtcacgcaacaggaaatgttccgtcttttgcgagaacgaatggtcaagataaataccatgacaggttgtctcctcagttgcttttattgtttcagtcactgggtggttttagtgggtatggcaatctacaggcctgttctccttaattcaggattttggttagttgacctcgctgttactgctttctttaccatcggtttaacgtccatattcagaggtattattctactgatgatgagaaatgccattgccaaggcgattgaagaaaaggacatgaaagacaactttgtttatagcatgtacaacaccatacgatatatttttcttcgcaaggatcgccacctctgcgccaggtatgttgagtaa

SEQ ID NO: 166128 - DNA, 294 bp, Enterobacter cloacae; identical to SEQ ID NO: 76660

SEQ ID NO: 166129 - DNA, 588 bp, Enterobacter cloacae
atgattccattaattaattacaccatcttaactgatgcgttgcacgctctgaaagttggggatattcgtcactgcgagtccctcggattcactttcgacgaaatgaatgctcttaatgagttatcactcgatgaactgtttgctgtcagccgggcggcggctccctttgtttcggtcagtgtccgccatgatgttctgcatcatttactggcgcaggcccgacaggaacaccgacaacagcagcagattaaccgggctatccggctgggcggttctatcgcgttgctcaaccactactttggcctgacgtctaatgatgtctgccttcgccgacggttgctgggtgtcagcgtgccatatggacgtacacctgagccggatgaagagacagatgccgagatctggcggcaatggcagaagtgccggatggaaaaccttgaatcccccgacgcgctgatggccattatgcaggttactgaactcttgctaccaaggttcctgggactgtcactcaccatggtatggagacgtatcacgctttgtgaaaaggaagttgccgctaacaggagggcaccagatgccggatga

SEQ ID NO: 166130 - DNA, 1197 bp, Enterobacter cloacae
atggctacgctgaataaagcactcacgcggcctgccgccattatgggcattcctctcgtgccgttcgttctcgtcagcggggctatcgtcctgctggcggtctatgtcagctattacctggcactgttgctgatcccggcctgggcggaaatgaaaaataaagcccgaaaggacattcattatttcagtctgctctggcttgcgtttaaaacccgtggacgacttttcaccaatacccattttggcgcgaatgcccttctggcgaatcagtacgataatgttgatgtctcggagtttattcagaaaatgaaattaaacgagcgtattacgctggataaatatattccgtattcctcccatattcaccctcacatcatcagaaaccgtcaccgtgattttattgccacctgggagctgggcggcacagtctttgaatgtgaagacgaacatcacctgaccctgatggccacacatctgaacaatattatccgctcgtatgaaggtctgccggtaacattttatattcaccggctccgtgaaaaataccatgatgcttttgaagcctgttcgggtattcccttttccgatgacgtgacccggcggtattaccagccggtaaaagaaaaaccgttctggcggcaccggctgtttttcaccgtctgctacgcaccgttctctcagatcgagaagaaaacaatgaaagcgcagtcgcacggtaaacgccagccagttctggatgacgcgctcaaaatcatgctggaataccgtgaagcactgggatcctcattatcccgctacatggcaacgccgctggggatatatgaagaaaacgggcgggtgtattcctcgcaactggcgttcttccaccgcctgatcaccggacagtggcagaaggtggccgtaacgcgctcgccgttttatgaaacattaagcacgccggacgtgtttttcactaccgacaccggtgaatgccagacggtcagcggttcccgcttcttccgcagcctggagattaaggattattccccggaaacccataccggtatgctggatgcgctgctgtacgccgaaagcgagtatgttctgacgcagtcctttacctgcatggcgcgggatgaagcgcagcatcatatccggctggcggaaaacggcttaactccacggacgacgacgcgatttcccagcgcgaagagttga

SEQ ID NO: 166131 - DNA, 399 bp, Enterobacter cloacae
atgaaaagtctttctgagcagatggtcagcatagaccgtgaaaattttgcgcgcatagcacgcggcatgcctgaattgccggatgcgcaggacacgcccgctgagcagaccgctgaaatcttcaacgcgctgtttagcgccttgcgtgcaacattcccggccagcgtgcatacggaattcaaagctatcgccgataaaaacgtatttccctgcgtaaaatgtgaagtctcctttccccatagcgccattagaattaccaccgcacagaatgcgtgcgtcatagtcgttagtgccaaggaaatggaaatccacaaagcttgcagtagagggttttttggcaccaatttcgaggcttccaaagttggctgtgttgctctctcccaaaccgacgttttatag

SEQ ID NO: 166132 - DNA, 906 bp, Enterobacter cloacae
atggcaaacctgaacctcgatcacctggctactttcagactggtcgtcagccggggcagtttctccggagcggctgaagcacttggtctgtcgcagccggcagtgagcctgcagataagacaactggagcaggcgcttcaggtccggcttattgagcgaaccagccggggagtaaggcccacgtctgccgggctgactctcgttgagcacagcatgaaaattgatgcagtggtaagtacagcagttgaatcggtgtgccagcattccgatgagataaccggcactgttactgttggcacaggcgcaacggcctgtattcatctactgccccccttactgcagcaactgcggcaggcccatcccctgctgaaggtagacgtacgcacaggtaacacttccgatattgtgcggggcgtggaggaaaatcgtatagatattggcctggtgactctaccagccgcaggtaaaaacctgagcatcatcgcgctgggtacggatgagtttgttgtcatcatggaaaaggatgcatcagagcagagcgcgaaaatattgactccaggcgccttgctgccgctgccgctgattatctttgaaccgggaagcgggacacgcgccctgattgaccagtggttccgggaggcgggacatattgcctgcccggtcatggagcttggcagtatcgaggctattaaaagaatggtccgtgcaggtcttggctacagtattgttccccgaatgtccgttgcaagcatcgaggaaagatcggggttcaatctttactctgtgacgccctctcttcaccggactctcggggcagttatgcgggaggaccggattgtaagcagagggatcaatgaagtgctgaaaagcctaaacagcagttttgcaaaaaacgaaaccagataa

SEQ ID NO: 166133 - DNA, 528 bp, Enterobacter cloacae
atggaaataaccgaagcagatgaacgacatattcctgccatccagcagatttatgcttatcacgtattgcatggcaccgccacttttgaaaccgaaccgccggatctggctgaaatgacagcccgcctgaaaaaggtgcgtgcagcaggactgccctggtttgtggcgcttgaggacggcaatgtccgcggatactgctacctgtcactctaccgggaacggtgtgcctacagattcaccctggaggactctgtatatattgcccccaactttcagggccaggggatcgggaaaaagctgttattgagtgcggtcacatgggcagaggctcgtagctttcgccagctcgtggccgtagttggaaacagtgaaaatatcgcctctcttgccctgcatcgcgcggcaggcttcagcattacaggaacgctcagatctgtgggcttcaagcacggacgctggcttgatacggtcatcctgcagcgtacgctcgggcagggcgacgccacatttccggagagcacagcttga

SEQ ID NO: 166134 - DNA, 1227 bp, Enterobacter cloacae
ttgactgacgggcatctgacagatcgcaccattttctgcattggcatgacgcagctaatcaactggggtatcacattctatatgccgggggtcttcgggaccgccatcatggcggagacaggctggtcaccggttgtgacattctccgggctgactactgccatgcttgttatgggacttgtttcgccgcttaccggcccccttatagcccgtaccggcggacgtacgatgatgatggcaggaaccttcgccattgtcctcggttgttttctgatggcttttacccattcaacagcatcgtgggttgccgtctggctcctgacgggagccggcatgcgacttgctctgtatgatgccgcgtttgctctgcttgtagaaaccgcaggtgcaggggcccgccgggcagtctccctagtcacactgctgggtggcctcgcttcagccgcgttctggcctgctggcacggcgctactgcacattaccgactggcggcatgccgttatcgtttacggctgtgcgggccttgtcagcttgctttttctgtccaccgttccgacagggcatcggagtgaacctcccgttgccgggcagcccgctcttccggcgatcggaacagcagaagaccgaaaagcattcatcagcggcctgtggtacgccacgctaatagcgctgataagctttgtttccaccggcatgtccactcattttcctcagatactggccgcttatggtatgcccgccgtggcgggtatgttgtggggagtgggacaggtaagcgcccgtctgctggacgtggcttctggcgcatgtacctctgcgatccgtctgaacctgattaccggcattctgctgccattttgctttctggccggccttgcgggtaatgttacccctgtggctacagccatctttattctgagttacggagctgtgaacggactgagtacggtagttaaggccgtactacctcttgtgctgtttgatccgcagcagtatgcccgtaaaacaggcgtactgctgtcaccagcttttttgctcgcggcgctcgctccgtcagcttacgccatgctgctggagcgatacggcatacccggcacgctgcttttatctgccatccttaccctgttcatcacggcgatttccatagtgatctggcgtcgccatccttcctctgctggacagagccgggataagaacgtgccatccatttcggggaaaaatatttga

SEQ ID NO: 166135 - DNA, 333 bp, Enterobacter cloacae
atggatttaaatacagcagcaaatgcgcttcgggagctggggcacccgacccgtctcagcgtgtaccgggagctggtgagagcgggtcatgacggcctgccggttggtgttctgcagaagcgcctcggtattcctccctccacgctcagtcatcatatttccgcgctgatgtcggccgggctggtcagccaggagcggcagagccgtaccctgttctgcagaccctgctatgcgcagcttgaacagctgatggcctttctgacagaagaatgctgtgcaggtggcaactgcagcctgtcaaccgtgacgactcatgaagagacctcattgtga

SEQ ID NO: 166136 - DNA, 354 bp, Enterobacter cloacae
atgcctcaatttcagcctcttcagcttttcaaaaatctctctgatgaaacacgactcagtctggtgctgctgttgcgcgaaaaaggagagctttgcgtctgtgaactcacgtcaatgctgaaagaaagtcagcctaaagtttcccggcatctggcgttactcagagacgccggtctgcttatcgacaggcgtgacggcaagtggatctattaccggttgtcaccacacatgcccgcctgggctgctgcagtaattgagcaggcttacctgtgtcagcgcgatgatattctgaaactcagccagcaggctgaaaggaataacgcgaccaccaacggcaagcctgtctgcatttaa

SEQ ID NO: 166137 - DNA, 897 bp, Enterobacter cloacae
atggacagatttatcagcatgcagatttttatcgcggcagtggaagatggaagttttgcggcggctgcaagacgttttaaactttcagcggcaatggcaggaaaacatgtcagtgctatcgaatccgatttgaatgcccgacttattcagcgttccacacgccgtctgagcctgacggatgtggggcagcgatattatgaacgttgcaaatttattcttgaggctgtggaagatgcgaacagagaagcgagtgatgttcaggcaacaccgcgcgggttacttcgcatcgctgcgcctgtcgccttcggtgctatgcatcttggtgcgatcgtgtcacgctatctggaacaatttccggaggtcagtctggatgttgtgcttgaagataaatacgcagacctgcttgaaaatcgaattgatgtcgccatcagggttgggagtcttgacgatccgtcgctggttacccggcggctggcaccctgcaagatggttttatgtgcatcaccagagtatctgaaaaaacacggcacgccagatacgccggaagatatttcccacgcgccgcgtctggcgttcagccaggcggtttcagcgggagactggacaatttgcgaccctgcgggcagtttgcaccgtatcgaaagtgcatgccgaatcacgtccaataatattcagttgcttctggaatccgccctggccggaacaggcatagcatatggtcccagttttgttttttgtgatcatataaaacagggcaggctgattgagctgctgccagcgtacaagacaacggaacttactattcaggcagtgtatcccagtgcgatccgtattcctttcaaggttcgtagctttgtagattttattgctgaagctttaagagatacgcagttgtaa

SEQ ID NO: 166138 - DNA, 1164 bp, Enterobacter cloacae
atgaaaattaacgtgaacgatacgggtattaatgtacagctacagggcagcggtgaacttgcgctggtttttttgcactattatggaggctcatcccgtacatgggagagcgtgacaggtcagttaccagaccgctaccgcacggttgccatcgatcatcgtggctggggcttgtcagacgctcctgaatcgggatacaggattgaagatcttgcaagggatgctgaaggcgttatttcagcacttaagctgaaacgctacattctggttggccattcaatgggggggaaagttgcccaattaatggcatcgcgccggcccgaagggcttgagggtctggttctcattgcaccctccccaccttcacctatgctgctttcctcagaggaacgcgacagattatccagcgcctataacagccgcgaatcagtcgggtttgtcatcgacaatgtcctgacggcgcggccgctcagccccgcgcttcgagagcaggtcatcgaggacagtttaagagcgtcagccggagccaaagcaggctggcccggtgtagcgatcagcgaggacatcaccggggaagtcgcctccattaatgttccggtcagagtcatctcaggagaactggaccgggtcgataccccggaaactttgcaaagagagttgctaccccgtattcctcacgcagcgatgtatattattcccggtacgggacacctttcaccgcttgaatcacccggtgagatcgccagttgcatatcagccttcgctgcatcgattgaaaagagtgccgcggtttatcactcacctggtgaaaccatcgccgcctttgatgaagcatttaatgagggaaaaattgataacttaatgtctgttttcagtaaccgcgccaccatgaaaatgactgatggtgctgtcattgaaagtaatcctgaagcactacggatggctttaatcacgctcacagcatcacggccggttatcaggaaccagatacgtactctcatctctgctggtgatctcgttctcgctctcatcgactggtcgctgacgacgacttcagatgacggcactcaacacgttgagcacggtatcgccacgcagatattggagcagggggcggacaagggctggcggatacgtatttcaaacccatcagggattgtctga

SEQ ID NO: 166139 - DNA, 525 bp, Enterobacter cloacae
atggccaggcaggaacagtttattgagatcaaccaggaggagtttgaaagctttctgcgcatagaagcgcgtatcatgccaggtcggcgtgctggttcatggtcggtcatgctggcgaagctcgctgaactgaaaaacccgttcgggcgcattgtggtttataaaggaaggcttaaatcggttctggttaatgacttcattgagtcatcgcggccaaagagtaacagcgccaaagcctgggctaagcacgccatgggtgatgtaaatagccgtatgtcacgccggttgaaaagggcactagtgacgaatgaaacggagctattcaacaagggtgaagtctgggcgtattggccctcttgtgtggctgcactgggtgagataatcgcagagttgaagccagagaaagcaacgaagaaggagatggctgtaagccagttcgtcgagtcgaagccgagtagaaagcgtaattcccggcgattaacaaggcgcgaacaggcacgtccgaagcgtaaacgtcggggttga

SEQ ID NO: 166140 - DNA, 981 bp, Enterobacter cloacae
atggtgaccattggtgttttcgccttactgtttaccttgatcattgtcgctatctttatcctgctgcgtcgccgtgttctttcgccgctggatgccgcacgtttgcactgccagaagatggcggcaggggagttgcacactcctgttgtttacggttctaaagacgagattggcgacatgctcggttcgctggagcaaatgcgtcttgctcttctggaaatcattgcccaggtgcgtaattccagccagagcgtggcccatgcggcagaagaaatcgctgccggtaataccgatctctcggcccgtaccgaagagcaggcggcttctcttgggcagaccgctgccagcatggaacagctgacttcaacggttaagcacacctccgaaaacacacagcaggcaaatacccttgcgacggcgatgcgcagctccgcgcaggaagggaatacgattgttgaaaaagcagtgatgtcgatgaaagagatcgaatccagcgctggcaaaatcgacaccatcatttccttaatcgaagacattgctttccagaccaatatcctggcactcaacgcagcggtggaagcggcaagagccggcgagcaggggcgcgggtttgccgtcgtggcaagcgaagtccgtaatctggcgcagcgttcgtcactcgcggcgaaagagatcaaagtgcttattgaggaatccggccgacaggtgctgctgggtagcgaaagggtgtcgcaggcgggcaaaagcatgcaacgcattatcagcacagttaagcaggtttctgaactgatggcggaaattgcgctctcgaccggtgaacagagtcgcggtattgagcagataaaccaggctgttgcgcagatggacacggtaacgcaacagaacgccgcgttagtcgaagaagcatcagcagcagcgcattcgcttaaagagcagtctcaattactggaagagacggtagccgtttttaaactgagctaa

SEQ ID NO: 166141 - DNA, 468 bp, Enterobacter cloacae
atggcaggagatttcagaatttattatctcattgggaatgaggaacattctcttaaaaagtggttggagactgacgcaccaacacagcagagcgaagaagttgttagtgcagttatggaggttgttccagatggcaaagcgcccagcatcttacgcctggtagacttggatacagatggaaaaccaatgatttatgacgagtatctcattcaaggctttggaggcattatcttcggactaatttatcgtcgagtggggcatgatggttggttctatcttgcagatccccaaatgtacggttttagagaggggagcaaaattacggataataaattaaccgttgtagcgaacactcgttatttattttctaataaagctgatttcccggtaatagctaccatcgattgggacaggcgcagtttacgttatggaaataaggagctttacttaatccccacatcggcttag

SEQ ID NO: 166142 - DNA, 810 bp, Enterobacter cloacae
atgaccgacattataaacggagacatttacaagtattttggtacagaagaagcattcatcgaagcgagccacattaccaaccttaaaacaggtgagcgcgtggaactctccaacgatgcaaaagtattatactcgcgtatgcgcaagcgttatcatttctttaccacgtcaagcactggcgggaataaagggatctaccatgacaacgtagaagagttgaaagaaagtgctaatctctcgaagagcacaacgctacgatgtttgaaggtgttaaaacaagttggtttagtggttgccacgctgtcaggccgatctaaccaatggactgtagccaacattacaccagattctttcttgcttgagcggaacgcagggacggcaaaaaatcctgtctgggtggactgtctgaagcatcccgtgtttggtaacgccaaagaagacgcgccagccgttcagccggaggagcaacgcgaagaggcgaaagccgatccgatgtgcgaccttgacgaagcaccaacgccggaaaaggtgaaggcaacacctaagcccacgaagaaaccagcgccaaagaaaacaccagccttaccgcaagctatttccccattcgagtttaaaacgccacgagatgaacgttttgatgggaaagcctttgaaagattaaacgacgcatctgatcgctttcaggtattccaggatttcgatctaccctacctcgcattatttgagaaccaggggaaattaaccaatccgaaagccatagaacatcttgcaatgaagagaaatctcttcgaaagaatggggcgattatag

SEQ ID NO: 166143 - DNA, 390 bp, Enterobacter cloacae
atgggacgaaaagaacgaaatccgattaaacggatagaacaagcgacacgcgccagcaaacgtaaatacacctattctctacaagacctcgcacgagagtctattccaggggaatggattaccgaagtaatagaataccctccaacggttccaaccggatcagagtttgaattattgcaggatgttctatcgtcaacggacaacgtttattacaagccacgacgtagaaaagaatacataattgacagtagccagcttaaaccctggcaaattatcggatttgaaaattactccgattatgtcgggtattcacaaactaacggcctgagtggtcacactgccgatttggattttttatttaatgacgataaggaaaattataatgactaa

SEQ ID NO: 166144 - DNA, 225 bp, Enterobacter cloacae
atgtttctgatgaactatgaccgtgtgatcactcacaaatcctcttcacttatcctcactgaaaagatgatgaaacaggcggcgcatgtattaggcgtaagtgttgaagagattcgagaggttacagaaaaattctggcctacagccacgatcacaaaatcacatacccctcacccatcatcagggcttgaggaacgattaaaactattagcaaaaggaaaataa

SEQ ID NO: 166145 - DNA, 1194 bp, Enterobacter cloacae
atgcctgctcgaatattatgccagaaatttttccgtggtgctctgaacccgtttcatcaatatcgtcaaaatgctcttcttgatgcaaccgtggctttaactcgtggtgcatcacttactctgacaagcatcggtcgctaccttcctggttcagcacaagtcaaaaacaagataaaacgcgttgaccgcctgttaggtaatacttctttgcatgaagatatcccgttgatattccgtaacattacatcactccttactcgccagttttcctggtgtgtgatcgctgttgactggagcggttacccatcccaggaataccacatccttcgtgccagtatcgtctgtgatgggcgttcaatccctctgcttagtcggcttgtgccttctgcaaagcaaaataattcactgatacaaaaagaatttctcaatgaacttcaccggtgcgtaaatccggaggcaaaagtcatactcattacagatgcggggtttcagagtgcatggtttcgccacataaaatcactgggatgggactttattggccgcataagaggaacggttcaattcagtctgctgcatgatgacgaaagatggctgaaaataacggatgttcggggtaaagcaagcccggaatatctcggcgcaggatggcttgcccgggcggaatatgcccggtgttcaggccatttttatcttcataaaaggaaaaccaaagaacgtaaaaatcaacgttccagaggacgattatccagcccaacgacagaaaaggagaaacaggcctcagcgaaagagccctggctgatatttaccagtacagaagaatttaaaccacgagaaatcatgaagttatatagtagaagaatgcaaatggagcagaatttccgcgacgagaaaagcgaacgctttgggttcggcttgcgggccagttacagccgttcagccgggcggctgctagtcctgagccttctggcgacactgagcacaatcgtgctgtggcttataggatatcatgctgagaacagagggttacatctgagataccaggctaatagcattaaatcacggcgggttatctcatatctgacattagcggagaatgtcctgcgacactctccgctaattttgaagcgaacagcgttagacaccgttcttaatcacctcgccagaacctaccgaagtatggtgctgatttattag

SEQ ID NO: 166146 - DNA, 318 bp, Enterobacter cloacae
atgaatacactggcatttgattctttattactcgttaaacataacagcaacgaatggcaccagatgtggagtaaactggcaaagcataagtccaaccgctcacttcaggacccgactgttgctgataatgatggtgaagtctggcagtacatggagacagtggaaaaacgcgttctttggtttggaaaaggctacatccatcgttttcgtcatcgttatcacccagcctgcggttgcgccatgagaattaacattccagccagccgtacctttaacccggacgatccggataacgctttatatcatcactttggttag

SEQ ID NO: 166147 - DNA, 906 bp, Enterobacter cloacae
gtggataaactgggatcaatgcaggtctatgtcagcgtggtggacgcgcatggctttgcgagagcagcagaagtactgggtctgccacgttcaacggtttccagggttatccaggaactggagtcctggcttggaatccaactcttgcagcgtaccacccgcaagctcagcgtcacggcgggtggccagcgctactacaacgaatgcaaaaggatacttacggatattgccgccatggagtcttcatttcccacccgatctgggcagcccagtggtcgtttcaaagtggggatgccccagtccctcgcccggcattgcattatccccgaactcccggtctttctccgccagtatcccgggctggaagtgatgctgtgctcaagcgataatgtggaagatatcattcaggaaggatatgactgtgtgatccgtactggcaggatcgaagattcaacgactttggttgcccgttctctgcccaactttacctgggtcgttctggccgcgccggcttacattgacacctttggcaacccgcagaaactggatgatctggaaaagcatcgcgcggttggctacctgaatcaccgcaccggacgtaccactgaatggttttttacgctcgatgagggcgatcgggcgatccgtatgagagagacactggttgttgacgatactgatgcctatattcaggctggaatacaaggggttgggttaatccgtgttgccagttatctggctatgccttatctgcaaagtggagaactggtatcctgtctggaaaactatacctttgaattaccgttatccttggtatatccgtatagtcagtatataccaccttcggttcgcgctttttatgactggagcagaatgacgttaagccccccggataatcgttcgtaa

SEQ ID NO: 166148 - DNA, 942 bp, Enterobacter cloacae
atggtagagcataaattacacacgggggaaaaagtactggtgctgggcgcgggacaactgggggaggcggtactgcagcatctgctcccggcggtcactcagcgtgatggcgccgtgtacgttatcgtttcgccaatctcctgggatgaacaaggtcaattgcgatctgccacgcatcaaaaatatacggatgccggggcaaaatttatccctctggacatcgctgccagcacggcggagtctctgaaagatcagtttaaagagtttgataccgttatcaattgcatgggttttgttgccggtgaaggtacccagataaaaatcacccgcgcagtgctggaagctggggttaaccgctactttccctggcagtttggtgttaactacgatgtcgtcggcaaaggcagcggccagccggtttgggacgagcagtatgatgtcaggaccttactgcgcgaacagcgcactactgagtggatcattatctccaccggtatgtttaccagctttctcttcgagcctgcattcgatgtggtgaatttatccgcacggaccatcaatgcgctcggggcatgggatacacaggttacggttacttccccggaagatatcggccgactgctcaccgacatttatgtacatcagccgcgtattgccaacgaagtggtatttgttgcaggagaaacgacttcctatgcagaactggcagaaacggtcgagcgcgtgacacaacaaacctttgcaaaaacagtcctgaccctaccgaccctgctggaggaactgcagataaacccggatgaccagatgcttcgctatcgcgcggccttcgcccggggcgacgggatgtggtggccgatgaacgacacctggaatgcgcagaataatatttccacacagaatatcgctgcctggcttaaatcatccattatattagggcattaa

SEQ ID NO: 166149 - DNA, 219 bp, Enterobacter cloacae
atgaaaaccaccatgacgttgttattcgtttcttttatcctgcctttttcggtctgtgctcagaccatcacggcaacaggcgacacactggagcagacggaagcaaagattcgccagcaggctgataagctgggtggcagagactataaaatcattgaagcccgcctggggaataaagtacatatcacggcagaaatcctaaatcctataccggaataa

SEQ ID NO: 166150 - DNA, 276 bp, Enterobacter cloacae
gtgcagctttgctacctgtgctttctcagcatcatcctttgcatcgatcagccactgtttctgcctttactaaagctggtcgccaatcagctcaaggtcagcatcgaaagctggaacgagtatggacagtgggagcagacccggcgcaaacacctggtcgagttacaaatcgtgttcggcttccagtccttcactatgagctactaccgacaagctgttgtgcctacgcttaccgagctgaccataaagaccgacaaggatgtcagttcgctttag

SEQ ID NO: 166151 - DNA, 1461 bp, Enterobacter cloacae
atgatcaccatgaaagctattgtacgttcgcgcatgtcgcttacgacactggcctccagcctgcttctggccagttgtacccttgccccaacttacgagcgtccgatcgttccgattccagagcagtggactgatggtgtcgtaatcaccacggccgatagccatgcgagccagccggtccattcgtcggcgacactcgactggaaagcgttcgttgacgacgaacatctgcgcacactgatcgatctggcgattagaaataaccgagacctacgacagtctctgctcaatatcgaggccgcacgcgtgcaatatcgggtgcagcgtgccgaccggtttcccgagcttgaaggacaaggcgcggggatgcggcaacgtgtgcctggtgatctgagcaacgccggcgggtctggtattcaggagaactaccaagctggtataggactgacctcgtttgaggtggatcttttcgggcgcgtacgtaatctatctgaggccgccttacgggagttcttggcgacggaagaagttgctctcggtgttcagatcagcctgattgcggaagtcattcagacctacttggcgcgcgttagcgctcagcaccgttatctgttgaccgtgcacacagtagatgctcgcaaattttcgttgcatcttatcggtcagcggcgtcaggctggcaccgcctcagcgctggactatcaggaagcacaggggctggctgagcaggcacaggcggaacttgagcgcatagatcgagagttccgccaagacggtaatgcgctagcgctgcttgtcggcattgcagacgtacgaccttacctacccgaacttccgagtgaggatttctcagttgtgcgggatatcgctccggggctcccgtctgagttgttgatttatcgtccggatatccgggcggcagaacatcaattgcttgcacgcaatgctagcattggtgcggcgcgagcggcattcttcccgcaaatttcgctgaccgggatgttcggtagcgccagtacagatctgtcggatttattctcctatggccagcgagcgtggacctttgcgccgcaactaacgctgccgatcttcgacggtggacgtaacagcgcgaatctcgaccttgcgcaggtgcgtaagaacatcgctgtcgtggcttatgaacaggctatccagacagctttccgcgaagtttctgacgcgcttgcggctattgataccctacgtcgagaagagagggctttgagtgcgctggcggaatcgagcgccgaagccttaaagctttccgaggcaaggtatcgggccggcgtggacgatcacctgcgctatctggacgctcagcggcagaacttcgccaaccagacctcactcatccagatccgtagcgaaagacaagttgctcttgcaaccttgtacagggcgttgggcggtggctggaccgagcatactaaagcgaactga

SEQ ID NO: 166152 - DNA, 3153 bp, Enterobacter cloacae
atgtctaaattttttatcacccggcctaatttcgccttggtgatcgccatattcattaccctcgcaggcttattgacgatacctgcgctgcccgtttcgcagtaccctaacgtggctccgccacagatcgtggtcaccacgacctatccgggagcatcggccgagacggtgatcgattcggtcattggtgttatcgaggaagagctcaatggtgccaaggggcttgtgtattacgaatcgaccggtagttcgtctggcacgggtgaaatcactgtcaccttcgagtctggtactgatcctgatctggcccaggtggatgtgcaaaaccgcatccaacgggctgaggctcgattgccgaccacagtgacccaacaagggttgaggatcgagcaggccagcagcggttttctggtaatttacacattgcgctataagggtgacgctgctgacaaagacattgtaggcctggccgactatgctgcccgcaacatcaccaacgaaatccgccgtatcgatggtgtaggcagggttagggtatttggcgctgaggctgcgatgcgggtgtgggtcgatccacgaaagttggtgggctacggcctgtcggtaaccgaagtcaatcgtgcaatagccgcccagaacctgcaggttcccgccggtagctttggcagtcgccccggttccgccgaacaggaactaacggccactattgcggttaagggcatgcttgacacacctgaggaattcggtcggatcgtcctgcgtgctaatgccgatggttccagagtcaccctggctgatgtagcacgcctagaaatcggggcgcaggactacaacttcgaagttcgtagtactggtagcaatgcagtaggcttcgccgtccagctcgcacccggcggcaatgcacttcaaactgccgggctcgttaaggcgaggctggtcgagttgtcccagacgtttccgccggacatcgagtacgcggtgccactggacacatcacgctttgtcgacgtcgccatagataaggtgttgcagacgctggctgaagccgtggcgttggtgttcctagtgatgttcctgttcctgcagaacttccgctacaccctgatcccaactattgtggtgccggtatgtttggctgggacgctggcggtgatgtacgcacttgggttttcggtcaacatgatgacgatgttcggcatggtgctggccatcgggatcttggtcgatgatgccatcgtggtggtcgagaatgtcgaacggatcatggccgaggaagggctgttgccgcgtgaggccacggtcaaggctatgcagcaggtttccggtgcgatcatcggcatcacgctggtgctgacggccgtattccttcccctggccttcatgggaggctctgtaggggtgatctaccgccagttctcgttgtcgctggccgtatcgatcctgttctccggttttatggcgctgacgttgacgcctgcactgtgcgcgtcactgctcaagcctatcgccaaagaccaacacgcagataagaagggtttctttggctggttcaaccgccgtttctctggcctcactcaacgctatggacggttgaattctcgcctgatccagcgctctgggcgctacatgttggtgtacctcggtgtggttgttgttgttggtttcctcttcgtgagactgcccgaagccttcgttccgattgaggatcagggccgcttcatcgtcgatgtccagttgccgcccggtgcgacctacacgcgcacacaggccgtcaccatggagatcgaagagtacctgctttcgcgcgacatcgtgacttccactaccatggtgatgggattcagcttctccggaacgggccagaacgctggagtaggcttcccggtgctcagtgactggtccgaacgtggtcgcggccagagcgtgaacgacgaggtcatggcgctcaatacgcgctttgctagcatacccgatgggcgcgtcatggcggtgaatccgccacctatcgatggcatgggcaacgccagcggcttcgcattacgcctacaagaccgcggcggagtaggccgtcagacactgctggccgcccgcgatcagtttctccagaaggccaacgcgtcgccggcaattctctacgcacgaatggagggtctggaggacgcaccacaattgcggctgagcattgaccgagagaaggctgaggcgctgggcgttaatttcggcaccatcagtgatgtgctatccaccgcttacggctctaccactgctgccgatttcgccaatgcgggacgtctgcagcgtgtcgtcgtgcaggcagatatgcctgctcgcatgacccctgaaagcatcatggaattgcacgtgcctagctcccaaggcgacccggtgcctctctccgcctttgccaccgccacatgggagtatggcccgatacagatcgctcgttacaacggctacccagccatcaacatctccggtgatgcagcgcccggtagcagtacgggtgaggccatgacggaacttgaacgcattgcctccgagctgcccacaggagtcagtctggaatggacgggcctgtcacttgaagagcgcgcggccggatcccaggcaccgatcctgcttatcctagccctgctggtggtgttcctggtgctggtggcgctgtatgaaagctgggctatccccgcctcggtgatgctgatagttccaattggtgcgctagggtcaattctggcggtgactgcactggatatgcccaacgatgtctacttcaaagttggtttgatcaccatcattggcttgtcggcgaagaatggcatcctgatcgtggaatttgctagggatctgcgtgcccaggggtactcgttggtcgacgcggcagttgaggccgcccggctacgttttcgcccgatcatcatgacctcattggcgttcatcttgggtgtggtaccgctggcaatcgccacaggtgctggcgcagccagccagcgtgctattggaacgggtgttatcggcggcatgctcaccgcgaccgcaatgggcgtgatcttcgtgcctatcttcttcgtctgggttctcacccggttcaagcgctatcgagaggtgccagacgccttgtctgcacagccatcgtctgaagaggaaacgaaatga

SEQ ID NO: 166153 - DNA, 1164 bp, Enterobacter cloacae
atgatcagatgtcagagcgcacgcgggtggcttgcattggccacagttgttttcgtaacaggttgtggagaaattgaaagccaggcagagggctcttccgcgtcctctgtcctggtcgtaacggttcagaccgaaccgctcgtccagtccatcgaactcccgggccgtgttgagcctgtgcgcatagccgaagttcgcgctcgggtggcgggcattgtgttaagccgccacttcgaagaaggtgccgacgtcaaggcgggggatgtgctgtttcgcattgatccgcgtcctttccgtgcggcgctgtcgcgtgcgcatggcgaactggctcgaaccgaagcggctctctccgaggcgcaagccgttgtcaaacgctacgcgccgttggtgaagattgaggcggtgagccagcaggactttgatgcggctcaggccgctttccagcgagctagggctgatagacagtccgcccaggccaacgtcgataccgcgcaactggatctgcagtacgccacagtgacagcacctatttccggtcgcgtgggtcgtgccctggtcacagaaggggcacttgttggcctgggcgaggccacgccgctggcgctcatccagcaactcgatcctatctatgcagacttccgccaatccgttgcagacgtgctgcggctgcgtgcagcactcgccgaaggacgcgtccaagactacgaggataagggcgcacgtatctccatcaccgtcgacggcacaaacgaaacgcgtgaaggccatttgatgttctctgatatcagtgttgaccgtagcacgggtcaggtgtccttgcgcggtcagttcgacaatgctgacggcctgcttttgcccggcatgtatgtgcgcgtacacactccacaaggtgtgagtccgcaggccattcttctgccgcaacgggccgtcaggcgcgggctggacggcaaggcgcaggtgctggtagtggacaaggatagcaacgcacagacgcgcgaggtcgaaacaggcgtgatgcggggagcggagtggcatatcgtcagtggtcttcaggccggcgagagggtgattgtcggcggttcagcgcgcccgggcgcgccggtcacgatcgccaccgcggttcctgagaacaatacagcgcctgccagcgagctaggtcgttaa

SEQ ID NO: 166154 - DNA, 558 bp, Enterobacter cloacae
gtggctgccacgagcatgcaaatagatgacaaccagcttctcgcctccctggcggtagcgatggtcgagcggcctcgtggtacgctgatggagttggccaaggcagttggcattagcaaggcaactctctaccgctactgtcgaacccgcgatgaattagtttcgaggctgatggaacacagcaccacattgctgatcaatgcaatctgtctggctgagctggatacatctccaccgctggaagcactaaggcgcctgaacaccagttatatggagcatcgggagctgatcgcgtttctggtttacttcagaagagagaaagacgcagcaagagatccgaatgcagaacctgagtgggaggttgcgatggacgctttttttctgcgggggcagcgagaaggcgtgttccgtatcgacattgcagcaccgggattgaccgagatctgggcagccactatgatcggattggtggatgccgaacggcgtggacgcattgccagaacagggctggttgccatgatggaacatacgtttcttgatggcgtatcggcgaggtga

SEQ ID NO: 166155 - DNA, 1425 bp, Enterobacter cloacae
atgtcaaactcaacctcgtttcacctatctctacgcgaatggctgatcctctccacggtcgcactggtacaattactagttgtgctggacggtacgatcgtcgcagtcgctttaccccacgcgcagatggagcttggactgacgaatgcggcccgctcgtgggtcatcacaagttacgcactaacgtttggctcgcttttgctgttggggggcctgttggcaagccgttggggcatgaaatctgcattggtgattggcctgctgggattttccgtggcctctggttacggtgccattgtccatgatggtaccgaactcatcgcagcgcggggtattcagggtgtgtttgctgccctgatggcacctgcaggtctggctattctcacgacctctttctccagcgggccaggacgggccatcgccttcgccgtgttcgggatgtgcgctggtattggtgccgcgatcggtttgttgctggggggcgttctcaccgaatatgtaagctggcgctggacgcttttattcaacgtacccattgcgcttgccgttatgctgatgggactatgggcactgccgccctcgcagcccgtgcatggcaaacaggtggactatctggggctcattttgatcggtgtgggtctgggtacactcgtctacgggttgaccttggccgagcatggatggtttaccactgatgtgcttacattcattacaatcggcatcacgctgatcattactttcgtcatcgtggaagcccgggtttccgaccctctgctgcctctctggatcataactgaccggataaggggatttgcaatttttatgcatggtcttactggtgtgatgatgatcggttccatgatttacctggcttttcagttgcaattggtcatgaaaatgcctccgtttctctctggtctggctgtcattccacaaaccatcaccattttgttcgtaataggccgggcggttcgacagttggagcgtattggtccgaagcgttttctggtactggggtcgatgatcacagcaggaagcctgtactacctttctttcgtcaacccgaacggcagttatctcacgcacgtgctcccgtttttgatcgccagcggcgttggtatgggtttgatctacatgcctttgcaaaatgtggctatgcgaggtgtgggggcggcagacgctggtgtcgccggcgcagtgctcaacgcatccatccaggtgggtggttctctaggactggccgtctttacttcgctcgcggcttctgtagcggcagacagcgcagaacgtgtggctgccagttactccgccgtatttcttgccagcgctgttattcaactggctggcggcattctgggagctctcgttctgccgggtcgcgtagatctggctaaagggaatgcggtaccagtcgggattcactag

SEQ ID NO: 166156 - DNA, 675 bp, Enterobacter cloacae
atggtggaacaactcacccgctcgccgaggcatcgcacagccaagggcgcccagcggctacgggacttggtttcggtcgcagcggagctgtttcttgaacgagggttcgacggcgttgctgtcgatgatttgatctctcgtgtcggtggctcaaggagcaatgtctacagccacttcggaagcaaggaagggcttttcaaggaggcgatgacatgcctgtgtttagaggtggcgaagccgttggagcagttgaaccttgctgaccgcgaagctagcgacttgctgctgtccttaggccggcaactgttaacatcggccatcgagccgcgcacattggcattgcaccgccttctggttaacgagggcaagcgattccctgaaatcgcgcaggcgatgtgggatgtcagctacggccgggccgtcaatatcctagcgacctggattgcatttcagcagcgcgaacccgggctaaagatttcaagtgaagtccctgccaaggcactggccggacagttcatcagcatggtgaccagcgacgcaaagctacgtgcatctgtcggtctgatttctccgccattgcccgatatcgaagtcgatcacatcgtaaacaatgccgtcagtacctttctctttggagtctcgtgccgagcgcagggacaaggacgcggtaaatga

SEQ ID NO: 166157 - DNA, 1245 bp, Enterobacter cloacae
atgaaggctcaaaacaggaattcggccagcgcaaacgagaaaaaagaaagctcggattcgagcgctccggcatttgctggaaaacattgggcgcagcccaactttttcaatgacaacgcattgatcgatgcattgttgaagcacgtcttgagcctgatgccctacggtatgaccgacttcggggaagtcatggacgtgatccatcaactcagaggcagcaatgaagaggtctggatcactgcctggagcgcactggcgcaacggttgcaagttcgggctgaaatggcagacaggacgagcaaacatgtgactgcatccaccgcctacctccgggcctccacctactggcgctgcgcattgctgtacttcagccggcctgaagatgcgcgcatgaaggcttatgcagccgctagctcagcggcctaccaacgctatctcgaactatccggctatcccggggagcgcctcgaaatcccttacgggggcagttttcttcccggctatttctacagatctctctgcgcgggagacaaagctccgctgctcattatcacgccaggccgggacacctgggccgacgatacacgatgggtttacgaaggcgcgcttcgccgcgggattcactgcctgacctacgatggccccggtcaggggtttgcgctgagactgaacaatctcacattccgccatgactgggagcaagtcgtcagtcccttgatcgactacgtgctggaccgatttagccaaatcgatgcttcccgcatcgcgctaatgggtttgagcttcggcggctatttagcgccgcgtgctgcagcgttcgacaaacgcatcaaggtttgcatcgccgatcccggcaatatcagttggggccgtacggtcattgagcaactgcaacacttcgccaactatgcgcccgatacgctgccggaagagcttagaaacacggtgcgcgactacgcctggaaacatggtgtaccgaattcggtcaagagcgtgatagatactctcaagccttatgacaacaccgagattctggaaaaaataacctgcgaaacactggtcatggatggaacgggcgaggtgtttcacggggcgaagcccttttacgacgccctgcaatgcccaaaggactacctgctgttcgatgctgcatcgacggcgcagtcacattgccagataggcggctatgcctctgccaccgagcatatcttcgactggctcgccgaacggctggaacgtgcctga

SEQ ID NO: 166158 - DNA, 930 bp, Enterobacter cloacae
atgatgagagttcaatatatacgctacggtggtcctgaagacatgtcgatcgcggagcacacactgcccgaccttgggccgggtatggtgcgcgttcgggtgaaagccgcagcgatcaacccgctcgactggaagttgcgtctgggcatgatgaagttcgtcactggtaggaaatttccgagggcaatgggatcagactttgctggcgtggtcgagacaatcggaagcggcgttaccagccatcgagcgggagatgaggttttcggtgtcgtcgacatcaagcggcagggtgcctttgccgagttggtcgatgtcgatgccagccttgtggtccgcaaacccgcagtactgtcattcagcgaagctgcttgccttccaatcccagctactaccgcttgggcagccatcgtcaacatcgcacaagccaagagcggttcgcggattttcgtcaacggatgcagtggcgccgttggcagcttcgccgtgcaactggcgcttgcgcagggggcaatcgtctcaggctcctgcggcgctgcctcgacagccagcgtcagagtcaccggcatccattcggtgttcggctatggagacacggccgcgttcgcatcgaacgggccgtatgacgctgttttcgataccttaggaacgctgcccatcgccgaggggctatcgctgttgaagcttaagggccgctttctcgacatcaatcccaccccaggcaggatgatgcgtggcttcctttcagggcgctacaagctggtgttctccacgatgggcaacaagagcctgccggacatcgctaatgcagccgcagagggaaaacttcgcccgactattggcctggaggcaccgttcgtagacgcacttttggttatcaagagtgtagaactcggccagcggccgcatggacgggtggtccttctgatgtag

SEQ ID NO: 166159 - DNA, 585 bp, Enterobacter cloacae
atgtcggacactaaacaaccatcaatcttagtgaccggagccagcggacaattgggtcgtcgcgttgtagagctattgttggacatcggaaccccaaacctcattgctgctagccgtaccctggaacggatcgccgacctctcggctcgcggcatggaggtgcgcctggcggactttgacgatccgacggctctgcaatctgcattcaccagcgtagatcggatcctgatcatgtctacggtgggcactaccaaagaccaaccacaccgcttgcgtcagcacttgatggcagttgatgtggcggtcaaagctggaagccgccatattgtgtatacctctatgttgaatctcgagcctaggtcaccagtcccattcgcgccagaccactatggtaccgaacagccaatcgaaaaaagcgacacccttttttactatctagcgcccgagttgatatacggacagcttgttaatgtggctgccgagggtgctggacggtggcttacggcagcaggtgaagggtacagatataacccacgggtaagttcgcccgacttctgggcgacatgctgcttagtgctagcatag

SEQ ID NO: 166160 - DNA, 225 bp, Enterobacter cloacae
atggtgcaacgggcaggtgatcgcccacctagctggtcacgtcttaacgacctgtttagtatcttaacgattttttgcatggcctccattgctacgtcttgttgcctttgggaacacaaatttagagaaaagaaatccaagggtaccatggaaacatgttttaaaattcttcaatccatgttcgaccagatgccgttgaacctaaccttagttcagattaaataa

SEQ ID NO: 166161 - DNA, 1389 bp, Enterobacter cloacae
atgaacacatttccagcaggattcctttggggtggttctatggcagctaaccaagttgaaggcgcatggaatatagatgggaagggtgtatcgacttctgaccttcagtcgcagggtctacatggtccgataactgaacgaactgaaaacctgagttgcattaaagatattgctatcgatttctatcatcaatacccgcaagacattaagttatttgctgaaatgggatttaaagtactaagaacttcaatcgcctggacccggatttatcctgaaggagatgaacaagaagcgaatgaagcaggtctggcgttttacgatcgcttatttgatgagatggccaaatatcaaattaagccattaataacattatcccattacgaaatgccttatagtctggttaaaaacttgggaggatggggcaaccgcgcaactattaaccatttcgaaaaatatgcccgaaccgtgtttactcgctacaaagagaaggttaaacattggctaacttttaatgaaatcaacatggcaatacactccccctttacaggagtggggctaagcggcgaaccgtcaaaacaggatatatatcaggcaattcatcatcaacttgttgctagcgctcgggcagtgaaagcctgtcatgacatcatccctgatgcaaaaattggcaatatgctacttggtgcattacgatatcctatgacatgtcacccaaaagatgtgctggaagcactgacgaaaaatagggaatggctttttttcggtgatgttcaggcgcgtggcacctatccgagctggatgacccgttattttaaagaaaacgatattgctctagaaataacagagcaagacctgagtgatttacagcataccgtagattttgtctccttcagttattatatgagcggctgtgcaacttatgagcctgaaaaatatcaatcttcacgcggaaatatcctccgactgatccccaatccacaccttaaagcgtcggaatggggatggcaaatagaccctgaaggccttcgtatcctattaaacgaactgcatgacagatatgaaaagcctctttttatagtcgaaaacggattgggggcacgtgacgtaatggagagtgatggctgtatccacgacaactatcgcattgattatttacgccagcacctgactcaagtgcgtgaagctattcatgacggagtcgaactgctgggattcgcctgttgggggccaatcgatttggtgagcgcaggaacagcccagatgtcaaaacgctacggctttatttatgttgatcgtgatgacgaaggaaaagggacgctggaacgtcggcgcaaagatagtttttactggtataaagatattatccacagcaatggtgaattgctgtaa

SEQ ID NO: 166162 - DNA, 1623 bp, Enterobacter cloacae
atgattttacttgatgatgttggttattctgatattggggcatttggttctgaaataaaaactcctaatatagataaacttgctaaaacggggttgcgctataatcgttttgacactgcctcaatgtgtgcacctacacgtgcagcgcttttaacaggacgcaatagccaaacagtaaacatggaggagttacctcctaaaaacaaaaaatctcctggacctaatgttcctttaggctccggccttgctaatagtggagaaataccgccgaatgctcaaaacgtagctcaagctctcaagagtgcaggatatgcgacatatgcactggggaaatggcatatagctccagaatataacgatgatctgcaaagaaaccagaaattttggcctaaacaacgcggatttgattactattatggttacttaagtggccatacatctcagtatcatccagacttggtagaaaataataatgggctgtcaaaaccaaatgatccaaaatatcatttgtctatcgacttagtcgatcgtgctattggagcattccaggaaaagaaaaattcaccaaaatttgtctatcttgcgtttggtgctgcgcactcgcctctgcaagtgccaaaaccttatattgatgcttataaaggacattatgaccaggggtgggataaattacgtttgtctcgctttgaacgccagaaaatgcttggcgtcattccggcaaataccattctccctccgcgggagaatggcgatgcctcatgggactcacttgaccagcaacataagcgtgtgttcagccgttttatggaaacttatgctggttttcttacacatacagacgagcaaattggtcgcttagtcaattatcttgaaacctccaatcagttgaaaaatacagtcattgtattcgcaactgataatggagccgcttcagaaggaggagaaaatggaggtttccgtcgagcttacagggatacaacatctgtggcagaaatggatgcgtctttggatgaagcaggcaatgaaaatacagatatgctctatcagcgcccttggtcatatgccggcagtaccccgttccgacgttataaattgtggccgcacctagggggcgtacgtactcccttgatcatttcatggcctgggcatatcaacactccaggtgctatcaggcatcagtatgtgaatgttattgatttggggccgactatgctagacattgctggaacccagttttcggaaactgtcgatggaataaaacaacttccgattgcggggaagtctattttggaaacattcaattctgataacgctaaaacgcgtgatactcaatattttgaattgcgtggacaacgagcgatcactcagggcaaatggagagcggtggctatgcatcgtatcgacacaaatcactcagaagatcaatggcagttatttgatactaagaatgatttttctgaatcacaagatctttctactaaatatccggagaaattaaatgagttgaagaaaatttggtgggaagaagccaataagtatagtaccccccctattattgaaccagttccattcttttatcaattaaatcggatggaagatggtttttcaaaaccaacaaaataa

SEQ ID NO: 166163 - DNA, 585 bp, Enterobacter cloacae
atgaagtatttgtctacttctttagccagtataaaatttgaggttaaagatgctcttaaggaagacgacttcaaagtatggcaagctgaaaaaataaaacaaatcgcagaaggaacttctaaagacaaattagaatatagagaatattattttaatgaaaagatgtctgatgagaaaggttatatacttctagatcgccagctaaaaaaaataccatccttacgtgataatggcaaggactacaatgttgaagttgcagatctttataaaaatggagagattattgctgtaaagatatcagataaaccgcatgatctaatttataatattgaacagtcaaaaaccacaattcaaactatagtaagaggagtagtaaaatttgaagagacaattactgatgtggttttatggatctcaactactacaaaagctaaaaaattaattgacatcaattctattcaatttttattagcggttcaaacttggaaggaagttgttgaaggatttaatctgaaaccaaagatatattattcacatcacgacaaaccccaaaagaaaaagggaaagaaaaaaaacgcatcttaa

SEQ ID NO: 166164 - DNA, 282 bp, Enterobacter cloacae
atgtttgaattattcaccaagcgtattaccgcagagctttcaggatttctttgtcaggacaatttccggaacaagctgattcctttagcttccgaactggagtctcgtttgatgcaagcatcagcgttaagccagctaaaaatcgacggagaaccagacgaaacaggtctgactccttggcagaaaatgacagcttggattgtgttacagttgggagaaattcatcaattggagatactttcagaggaggagcataaactttatagcgcgacgttgtcgtag

SEQ ID NO: 166165 - DNA, 912 bp, Enterobacter cloacae
atgaaaaaagcagtacctcattcttacgacaatatgcgctggataaatgatggtgagttccagatgggatccaacacgcattacccggaagagcgtccagtaagatttgtgcaagttcaaggtttttggattgatattactcctgtaacaaataagcaatttgctcaattcgttaatgacacaggttacatcaccaccgcggaaaaaaaacctaccgtagaggattttcctgatgccgacccagctcttcttgttcctggctctctcgttttccagagtccgtcgccaggctgtcgccccaagcatttttcagagtggtggttttacgtaccgaatgcgtcctggcggtttccggatggaaaaactctactcacgccaaaagatgatgacaaacccgtagtccacgtttgttgggatgatgcgatggcatatgccaaatgggccggtaaatctctacctactgaagctgaatgggaattcgccgctcggggggggctagataatatgccttatgcttgggggaatgagtttcagcctggaggtaaggtaatggccaatacatggcaaggtgatttcccctttcctggagagtcggggccagataactattatggaacatcgtcggttggctcctttccccctaatccatacggactttttgatatgattgggaatgtatgggaatggacatcagatgaatggcagccagatcatagcatgcaaaaacggagctgttgtatggctgcagcccacaataacgcgggtcgtatccttcaaaaagttctgaaaggtggctcacatttatgcgcgccaaattattgtcagcgctaccgccctgccgcccgccatgctcaaacaacggacagtgcaacaactcatattggattcagatgtatcatacgccctgactga

SEQ ID NO: 166166 - DNA, 174 bp, Enterobacter cloacae
atgttcacggcggccctatgcagttttgccctgaatcatacggatgacttctatccgaaaagcggaatccttagcactcgatacccactcaggtacttcctgctcttgtcgtttagcgcatcagtggtattgtcaggtttatgttatctgatagaactatggtttatctcttaa

SEQ ID NO: 166167 - DNA, 1788 bp, Enterobacter cloacae
atgaaaccggccccctctgcccacagatcatgccagctatcgttgacagatcaactctttcaacgtaccaggattaccgcgatcggcgcgtttgtcctcgcagccatcgcagctacgccttccgctctcgccacctcacacacggctccgaatgaaaaagagaatgtgttgctgattgtacttgatgatgtcgggtttgctgacctcggagcatttggatcagaaattaaaacacccaacattgacgccctggccagttcaggcgtcagatacaatcagtttgatacgaaagctatgtgctcgccatcaagagcatctctactgaccggtcgaaacaaccatacgatcaatatggctgacctcccaccgaaagggaagccggcaccgtcgcaagatgttccactgggctcagggccgtctaacagtggggaaataccactgaacgcgcagaatatagcgcaagttcttaaggccgacgggtattcaacttatgcgtttggtaaatggcatatggctcctttgtataaagacaatacagagcggaatagacccttttacccacggcaacgcgggtttgactatttttacggttttttaagcggccactctgaccagtatcatcctgatctggtagaaaataatacagttttaccgaaagttgaacacccgatcggttaccatttttctaccgatattgttaatcacgcgattgatgctataaaaaaagatgcaaaaaagccgaagcttgtatacctagcattcggcgctgctcatgcaccttatcaggtaccggacacctttattgagcaatataaaggattatactcacagggctgggacgagttacggcgccagcgttacgaacgtcagataaaaatgggtatcatccctgccaatactaaattaccgccgcgggaaaacggcgatgctgcctggaactcgttaaatccaaccgaaaaaagggttttttcaaggtttatggaaacttacgcgggtttcctcacccataccgatcatgagattggtcgagtaattgatacgcttaaaaaaacgggtcagtacgataatacaatgattgtatttttaaccgataacggcgcggcatcagaaggaggcccacatggtggtttccaggtcggctataatgatacaacgtcggttgaagaaatggacagacgccttgacgaagccggcagcgcttcaacatatatgctgtatcagcgtccctgggcctatgccggtactactccgttccgcagatataagctctggccatatttaggtggaatcaggactccattaattatttcctggcctcagcatattgataatcccggtgttattcggcatcaatatgtcaacatcgtcgatttggcaccaacgattctgcaagccacaggaacaaaattctctgtttccgtgggcagccaggagcaactaccagtcgccggaaaatccattcttgctacattaaattccgatacggtgagaactcgtgatacccagtactttgagttacgtggacaacgagctattacctggggaaaatggcgcgcggttgccatgcatgaagtgaatactgatttttctcaggataaatgggaattgtttgataccgaaaatgacttttctgaatccactgatttgacaagccaacacccggaaattttgtcaaaaatgaaggaaatgtggcaaaaagaggcagaaaaatatagccagccaacggcatttcaacctgatcccacactttataaaaacaacagcatgcaggatggcataagaaaatga

SEQ ID NO: 166168 - DNA, 1227 bp, Enterobacter cloacae
atgaatcgcccttttcatttgatggctaaacccgtcagctatcaatgcaatatcgcctgtgattactgcttttatcttgggaaaaagggagtagtaaagccctgtaaagaacaaagacatatggacgacgcaacgctggaggcttatgtgcgtcagtatattgaggccaacccgatgtccgagatcgagttcacctggcaggggggagaacccacgctggcgggaatcgaattctataagaaagcgatcatgctgcaacagaagtatgctagaggcaaagcgatcgctaatagctttcagaccaatggggtacttatcgacgatgaatgggcttctttttttgcccaacacaaattccttgtaggactttctatcgatggcccgcagtggcttcacgaccaataccgtaaatcaaacagcaataaatcagtgtttaataaagtcatgagggcaatggactcgcttcaacggcacagggttgaagttaacgtattaacggtcgtcaataacatcacatccaatcacccacttgaaatatataaatttttaacccaagagctgaaagccgaatacattcagtttattccggcagtggaacagcgccctggcgctgaaaagttcggtgagcttctctatccgcaaacattatccggaggggtggttacagagtggtcagtatcgggagaacagtacggttattttatcaatactatttttgactattgggtccgccatgacgttggtcgcgtatttattcagctattcgacaacgctctggccgcctgggctggtgaacagccctcgctatgcgttatgcgctcttcatgcggcagagggcttgttgtcgagcaaaatggagacgtttatagctgcgatcattatgtctatccctcgcaccgactgggtaacttgcaacatgataacctagtccagatggcgaacggcaaacagcagcgcaaattcggactggcaaaaaaccagttgtcagccgaatgcgagcgctgtccgtggcgttttgcctgccagggaggctgcccgaaacaccgtatccacaaaacgagcgaacgctggcataaccacctatgttcaggatataaagccattttcagccacatagatccctatatgaaatttatggcataccaattaaagctacaccttcccccttctaacgtcatgcatgctgcagcagccattgctgcgacacaaacaactttaaataagtaa

SEQ ID NO: 166169 - DNA, 1548 bp, Enterobacter cloacae
atgagtaaactgttcgctggggcacaaaacctgggtaaatcgttcatgttgcccattgccatcttacctgctgccgggctgttgcttgggtttggcggcgttttcaccaatccggtaacgatcgaaacctaccccattctggacaaccatattgttcagatgatcttcactgtaatgaaactctgcggcagcgtggtatttgataaccttgcgcttttgtttgccgtggggattgccgttggtatggcccgaagcgataaaggaactgcggggctggctgcggttctgagcttccttgtcatgaacaaagcaatcaatgcgttgctattgttgagtggcaaactggctagtgaaaatatgaacgcggtcggccaggccagtgttctgggtataaccactctgcaaacgggcgtgatgggcggagtgatgagtggccttcttgcctggtgggtacaaaaacgttttggtaaaaccgagctgccgaatatgctggcattctttagtggctcgcgatttgtaccaattgtcacctctttttttgctatttttctgggggctgcactattctgggcgtggccaccggtccaggacgggataacccatttaggtggtctggtggaacggaccggttatgttggaactttgttctacggcatgatcctgaagtgccttatcccgttaggactgcatcatctcttttatttgccattctggctgaccagtgtcggaggagaggtgatggtgaatggccatcttgtgcagggtacacaaaaaatattctttgcacagttggctgatcccagtgtaacccaatactacatcggtgtttctcgttttatggccgggcgatttgccgacttcatgttcggtttgccgggagccgcactcgccatttatcaatcttctcgtcccgaaaaccgtaaacgcgtcgccagcctgatgttatcagctgctttgacggcattcgtaacgggtatcactgagcctatggagtttgccttcatgttttgtgcaccacttctttacggtgtgcatatcgtcctcactggcgtagcgtttatgtttacacatattctgcaaataacggtaggccagactttttcggggggattgattgatttcctcttattcggcgtgctccaggggaacgcgaaaaccaactggttactgatgctaccgctcggtgccgtgatgttctgcctgtattactttagcttccgcttcctcatttcatggcgtcatttaaaaacgcctgggcgtgaggacgataccgacaccacgatatcggaggaaagcggtacttcgacacaggatcaacgcgcagcgggcatcgtggaagcgctggggggaaaaaacaatatcgtcgatgttgactgctgtgcaaccagactgcgcgtgaccgttaaggatccaacctatgtgaaagttgatgatttcaaacggtggggcagcaagggcgcttttgtaaaaggtgaaggggtgcaggtggtctatggacctcatgtcacgctgattaagaacgaagtagaagaatttattggtttgtaa

SEQ ID NO: 166170 - DNA, 1761 bp, Enterobacter cloacae
atgaaagccgttatgttgatgtttgacacactgactcgccatcatctcgcaccctatggcggcgaggcgagcacgccgaattttactcgcctggcggcggaatcggtacagtttgataacttttatgtcggcagcatgccatgcatgcctgcccgacgggaattgcataccggacgttacaattttctgcaccggagttggggtccgttggaaccgtttgattattcagtcatgcaggaattacacaaggcagggattcactcccatcttgtcacagaccataaacactactggcgcgacgggggcgccacctaccatacacgatactcgacttttgaatttatccgtgggcaggagggagataactggatagggcaggtagaaaagcccgaggttaactggcaaggggcagaagatgaggaaacccgccgccgcagaaccgtcagaatgacacaggacttgattaaccggtccgcgatgcccaggcaggaagaccattatacccatcgcaccattggtgccggcatggaattccttgagaggaacaaggaccaggaaaactggttcctgcagattgaatgttttgaccctcatgaacctttttttgtgccggcaaagtatctggcacagtacgactgtaagccggaagattttaacggttgggttccttattattgtggctctcccggcgggccagaggatgacaaaacaaagaaattctatcaagccctgatcaccatgtgcgatgactaccttggtcaggtgatggataaaatgaaagaattaaatatctgggaggagactttacttattgtctgtaccgaccatggttttttactgggtgagcaccagtggtggggaaaaaatattatgccggtctataacgagattgctaatacccctttctttattcgtgacccgcgtaatgatgtgcagggtatccggaaagatatgcttgctcaaactattgatattcctgcaaccttgctggattacttcaatataccacttcccaaaacaatgaccggcaggtcattgctcccggcgatagagaaaaatgagttagttcggaattatgctctctatggttattttggcgggcatatcaatatcactgatggtgattatgtttatatgcgctgcccgcgcgaaaaagggaaagattcactgtatgagtacactttgatgccaacacgtatagacagtcctttcaaactgtccgagttgcgtgaaattactatccatccgggtttcaattttacccggggcgcacaggtaatgaaaattcctgcgtcgttcagttaccttaacccgtggcgctttggcgataaattattcgatttaaaagccgatccagctcagaagcaatcgcttaatgatgtggataaaacgcttcattatgcacaagcgatggtgtcgttaatgaaagagcacgaggcaccggatgaactatataaacgtttcgaactggatccactttcgcgctcgtgcgagttggcatttgccgcctacagaaatgagcaaaacaggctccagaattcttcgctgcgctgtgccgatccgggggttaaggaggcgctagcatttgtttccgaggcctgcggggaacaagggaaaaaactgtcggatatcgaagcgttattctctgaggggaaagtcataactgagctggatattttcagactgattgatacgtttttcaccggcgaccgacataaggcactgatgtatcaggctcgtttacttttgcgtaccgaatag

SEQ ID NO: 166171 - DNA, 516 bp, Enterobacter cloacae
atgaactatgcagtgtgtgggacaaacaacgggaaagagaatggatctggcagcccaggcaaggagtatggaacaactctgcgacctgtctcttccccgtggtgggcaggcttatccataatggatggcggcaggatggccgtttctttgcgctacctgcacacggttttttacgcgatcagctgttcttctgtgttcatcaggatgatacgcagctggtgctcaccgcgagcgccagcgaagaaactcgccttaactggccgtggcgctggcgggtggatagccactgggaactggatgagcaaggcgttcaactttgctttaaggtccagaacgaagatacggcagcttttgcctactctatggggtggcatcctggttttaacttgccgatttcgtcacagcccggttggctggttgattttgcgggaaaacaggttgttggcccactgccaacacaagatcgcacattatcaattccgcgccatgtgccgggaacaatggcatttccgctga

SEQ ID NO: 166172 - DNA, 882 bp, Enterobacter cloacae
atgggcgtaaataaagaaaatgtgcgaatatatattagcaatattcttaatagtctgaagcaatcagaccgacaaatagccgagtttattcttcaaaacccggctcaattcgcgcaaatgccagtaaagaaacttgctggagaaatatcccttagcgaggccacaatagttcggttttgtaaaaaaattggttatagtggtcttttgaacctaaaaagtgacttaaagcgagaactactcgccgaaagtgatttatcgttaccttcggcccctgatatttaccttaatgattcacgaattgatgtcgcctataaaattgcgctgaccgtcgacacaactctgaaagaaaccatcgggctattggatatgaaggttgtaaaacccgtggtggaaaggttactaaaagcaaaccgtgtaatttttgtcgggtttggagcgtcgggcttatctgctcttgaagccagagataagatgaatcgtctgggagtcgagtccgaagcttatacggatcggttcactatcacactcaagctttctaatttaaaacaagacgatattgtacttgcgttttctcattcgggagaaacgccggaagtggttaatgctttccggctggctcaaaaagcttcagcttatcggctggcgataacccataataccatttctccacttgcagaattggcaagtaccattctactcaccagtggaacggaaggtcccttgcagggagattcgatcacaactagggcatcccaactttttattatagaatttctgtgtacggaagttactcgctacagattccgggaaagtgcttctatggggctgtcaatcaaagaactccttattaaagaaaggataaaacacacttcatccgaataa

SEQ ID NO: 166173 - DNA, 1854 bp, Enterobacter cloacae
atgagaacgctcgtgacaacgattgataaagacagacaagacacttttgtcgctccacgtcgggacaatgatactcaacaaagtcacggtcccttcaccccgccacggaaaaaattactcaacgtcctggcggcaggcacggcgatggcaagtatgctgatggcgtctttttcggcagcaggccagacacaatccacggcagagaaaacaaaacagcagcctaacgtcgtgatgattgtgcttgatgatatgggctttggtgacatcggcgcctttggttctgagatcaaaacccctaacattgatttactggcttattcggggctgcgctataaccgattcgataccagttccatgtgtgcgccaacgcgtgcagcgctgatgacggggcggaataatcagaccgtcaatatggaagagctgcctccgaaaggcacgaatgcacctgcgacagaagcgccattgggagctggtccagccaacagtggtgaaatgccaatgaatgcgcaaactgttgctcaggccctgcagtctgccggttacgctacttatgctctgggtaaatggcatatggcacctgaatacaaggatgcgcctgaacgcaaccaaaaatactggccacggcagcggggttttgattactactacggattcctgagcggccattcaccgcaatatcacccggatttggtggaaaacaataaagaactccccaaaccggacaaaccgggctatcacctttccgtcgatctggtcgatcatgcgattaatgcgtttaaagaaaaatcggataagcctaaatttgtctatctggctttcggtgctgcgcattcgccattgcaggtgcctcaaccctatatcgatgcttacaaaggtaagtacagtcagggttgggataagttgcgcctcgaacgctttgagcgccagaaaaaactgggcattattccggcaaataccgttcttccgccacgcgaaaaaggggatgcagcctgggattcgctggatgagcaacatcagcgcgttttcagtcgctttatggaaacatacgcaggatttatcacccacacggatgaacaaatcggccgactggtacagtatcttaaatcgaccaatcagtacgataacaccgtggtcatgtttattaccgataatggcgcggcttccgagggcggaccgaacggaggtttccgtcgtgcatatggcgataaaactaccatcgcagaaatggattctcatcttgatgaggctggcggcccagatacggatatgctctaccagcgtccctgggcttatgccggcagtacccctttccgccgctataaattgtggccttatctggggggtatccgcacaccgcttattgtctcatggccgaaacagatccagaaaccgggtgctattcgccaccagtacgtcagtgttatcgacctggcacccaccattctggatgccgccgggactaattttgccaatgtcgttgatggcgtgaagcaaattcctgtcgcaggcaaatcattcctgccgacgctgaattcagataccgcaaaaacccgcgatgttcagtatttcgaattacgcggtcagagagcgatcactcagggcgactggcgtgcagtagccatgcatcgaatagataccgattatgcaaacgaccagtggcagttgtttaataccgccaacgattattcggaatcaacagatctggcgacaaaatatccacaaaaattggaggagatgaaaaaactgtggcaacaggaagctcaaaaatatagtaaccctgctgtaattgatccaattccatggctttataaatttaaccgaatggaagatggtatgaaaacaaaacaagaataa

SEQ ID NO: 166174 - DNA, 1170 bp, Enterobacter cloacae
atgaacataaaaacgacgcgcacttttctctctttgataattacttcaacactctttgttggttcagtatacgcgcaggaaaataatgccaacaaacgtgacgatgtcgtggaaaattacctttatcctaataaagggagcacagtacctgctttgaccgatttgtcgaaagactcacgctggtatgcaacatttcgcgctaaaggttcatacacgaacgaaaatgcacgtaatgctgaatatcttcaactgaatggccgacttcggggaaaaacatacttcgcggataaaactgcgctggtcggtgatttctggatgcgggcgcaggaaaattacagccgcctgcatggagaaaccatcaatgaatttaatgactttgatgataacgtcaaatgggagcaattcagggtaggcatctcgcatgacgaccttggtgcgtttatgtatggtaaacatacagcgacatggagcttctttgcggtagatatgggctcgcaagggttgctggatacacaggccgatgccggtgtgaaaaatgcgggtaaattcctgtataagaaacagttccctaacgatctgttcctcgcgggaagttatgatcgcaactccaaaatctatggtgtggatatcggttatcagacaaatgacctctacagtttccgccccggtgattacggcgtatatgcctcaatgcataacggccagccctcggtcacggtaggcagtaccagcattgtgggtaatgtcgatatcgctgcaacacgtcgcggcgatatcaaaaatgcagattctaaatatgcacgagacagtacctcgctctatacctgggcgctcgcgggatatgccaatattggcaatcaatatcgccttgtcggccagacggcttattccaaacgtgataaaagcgaatccaaagagctgattaaaaaacgcggttgggcaaaaggtggcctcggttattcagcgactgtcggcgcacaaatgttccctgaaaaggcttccggattcagctacatcctgtacaacacgtacgatgaatttggcggagcctcaattaccccacaactggaatactggtttggttcccctaacctgcgcgcatggctgtcgtacacctgggaagaaaaagctgacgatattacccgtcttgaattccagtgggatttttaa

SEQ ID NO: 166175 - DNA, 1728 bp, Enterobacter cloacae
atgaaaaaaatactggtcccgggattgctggcaatatgcattgcgcagcaggtgcaagcggcggattttcccgctcaggtgaacagccagcggccaaacattgtgttgatccttgccgaagatatgaatccccggctgggtgcttacggtgatcctaacgcggtaacgccgaatattgatgccctggcaaaggaatctgttttatttaccaatgcgttcaccatggcgggggttagcgcaccgtcccgcgccgggctgattactggtatgccacaacaggcgactggtctgcttcatatgagaacctcgacttataaacataaataccagggcgtaccgccttcttatgtaaaagcgtatccggaattgctgcgcgcaaatggctattttacttataacgacaccaaaaccgattatcagtttacggatggtcatgcggatgtcgggccatttactatctggagcgcacacggctcttattcgaatctggatgatttaatggttccggctgcgtgggaaaattatgaccttaacggaaaaccgttcttcattaatctcaacccgcaaataacccacgaatcaggcatttttaccgctgagaatgttgctaaaattcagcccgcttttaaagaattacccgctttatgggataaacttcgtgcccattatactttgcctgatatcgatccggcgaagttgcaagtagatccctactggaaagacaccagacaggtcagaaatgaacttgcattattctataagaatattagtgtcatggatcagcaagtgggtaatatcgttaatcgtctgaagaaagatggcttgtgggataatactatcgtcatttttgctgctgacaacggggatggtctacctcgtcataaacgcgaaggttatgattcaggaacgcatgttccattaattattcatatcccggaaaaatatacgcctgtgggctggaaatcagccggtgaaaaagatgataggctagtttcttttgaagatctggcgccgacgatgcttggttttaccgggactaaaatacccttctatatgaaagggattaatctttcacaggataatgcccctgaacggcagtatattttttctgccagaggacgaatggatgatatttatcttaggtcatattatgtccgtgacaagaatttccagtatgtacagaacatcgataaaaccccgaacggggaacatattgcttttcgtgacgttctggataccaccagagcgctgaatgaagctcatcagcagggtacacttaatgcggaacaggagcagtggtttagccgcaagcctgctgaggaactttatgatctgcaaaaagatccctggcaattacacaatattgccggtgatgccgcagccagacctgctctcgcgctgtttcgtcagaaactggaacagtggcgtgacgaaacgaacgatatgggggttatccccgaagcacaaatggtgaaagatttacaggacgcaaacggccaggcacgtgtgacattggccccggttgctgaactgaatccgctgaccaacaaaatttacattgccaacagaacggatggcgcgtctattggttacagcctggacggcaaaaactgggagttgtatagcggcgcatttaccgcaccagcaggcattaactcacttttcatcaaggcagttcgttatggctggaaagagagtgagacgcagaagtttatgttatccagataa

SEQ ID NO: 166176 - DNA, 1227 bp, Enterobacter cloacae
atgggccagaaattcaccaatttccagttgatggcaaagccttctggctcagtctgtaatcttgactgtacctactgtttttatctggagaaagagcacctctacccagagcgaaaagcgcactggaagatggatgccactacgctggaaaattacgtacggaaaaatattcagtcgcaaaataatgaggtagtggattttctctggcaaggaggagaaccaacccttatggggctggagtatttccgcgaagccgttcgtctgcagaatcagtaccggggttttaaacagataaataactacttccagaccaatggtacgaatcttaacgacgactgggcgagattccttaaagagaatcgttttctggtgggcttgtcgatagatggagacaggatcagtaacgatacttaccgcctcacacgctcaggtaaaagcactttcgatgctgtgatgaacgggctggaagcgcttaagcggcataaggtggagtttaatacgcttaccgtggtgaatgcggaaaatgttaaacgaccaatggatgtttacaattttcttaagcggatcggcagtcgctatatgcagtttattcccctggttgaacgggctgcagcggagccggatgccaatggtttaacgctgattcaacctgatttctccgggcagtgtggtgtgactgaatggtcggtgcctgcaaaagcctggggacagtttatgaaccgtatattcgatcattgggttcagcacgatatcggtgacgtttttgtcatgaattttgagcagacgatggcgaagatgtgtgggcaactcagcgcatgtgtcataaatgaaacctgcggcaccaaccttatcgtcgaagcgaatggcgatgtttattcctgtgatcactttgtctatccggagaataaactcggtaatctcaacgaagatgatttgctggagctggttaacactccgcaaaatattgcctttgggcagaataaaaagagtggcatcagcaaagattgcctcaactgtatggtccgtccggtttgtaacggcggttgccctaagcatcgttttgaagtttccagtgacggtcgacccaataagaactatctgtgcgaggggtttgcaacccatttatttcatgtggtacccaaaatgaaggcattgctatcgatgttgcgatccgatatgccgccaggaaaaattcgccgggaaataaagcaacactattaccggtga

SEQ ID NO: 166177 - DNA, 834 bp, Enterobacter cloacae
atgaaaatcgccagagtgcttaataacaacgttgttgttgttctggatgaacaacaacgggaacaggtcgttatggggcggggactggcctttaaaaaacgcgttggtgaagatctggatgaagacaaaattgaaaaagtcttttcactgcaaaacgatgaaatggtgcgtcatcttggtgaattgctcagccagatcccactggaagtgatgaccacttgcgatcgtatcatcacgctggcaactcagcgtcttggcagattgcaggagagtttgtatatcactttaactgatcactgctggtttgctattgaacgtcatcataaaggcgttgagataaaaaatgttctgctatgggagattaaacgtctctacccgaaagagtttgcattggggcgggaagcgctggccatcattgccaacaggctccatgtagagttgcctgaggatgaagccggttttattgcattgcatttagttaccgcgcagcttaacagcgagatgccggaagtcatgcacgtaacgcgtgtgatgcaggaaatcctgcaactggtgaaatatcagttaaagatcgaatacaacgaagagtcgttgagttatcagcgctttgtcacgcacttgaaattctttgcccagcgtatgctcacccgcactgtggtgcctgatgacgacatctcgcttcacatcgcggtaaaagagaattatgcgaaggcgtggaaatgtgctgaaaaaattgcgcggcatttgctggccacttaccagcgggaattaacaacggaagagatcatgtttctcgctattcatattgaacgggtgagaaaagagagacattaa

SEQ ID NO: 166178 - DNA, 1863 bp, Enterobacter cloacae
atgacatatcaagctctggcgcaggatatactcagccacgtggggggacgggagaacatcgtcagcctggtgcattgcgcaacgcggttacgtttcagacttaaagataataaaaaagcggatgctgaagggcttaaaaccaacccgggtgtgattatggtggtggaaagcggcggacaatttcaggttgtgattggcaataacgtcaatgaggtctggctggctgtccgcagtgaggcggggctgaccgatgacactccggccgcggacgatgagcaaatcgagaaacctaatctgctgggacggttaattgatatcgtgtccggaatttttacgccttttatcggcatcctcgctgcgtccgggatcctgaaagggctactggcgctggccgtggtctgcaactggctcacggttgatagtggaacatataaaatctggttcgcggccagcgacgcactgttttttttctttccattagtgctgggttataccgcagggaaaaaatttggtggtagtccgtttatcacgatggtgattggcggcgcactgacgcatccgctgatgttacaggcttttgacgccagtcgggtaaccggcgcaccagctgatttttttctggggatccccatcagttggttcaattacagcgcatcggttattccgattatcctcgccgcctgggtcagttgctggctggagaaacagggcaaaaaattccttccttctgcggtaaaaaatttcttcacaccactgatttgtcttgcggtgacagtgccattgacctttctggtgattggccccgtcgcgacatggtttagccaacttttggctgcgggatatcagatgatctacggggtggcaccctggctggcgggggcggcaatgggggcggcctggcaggtctgtgtgatttttggtctgcactgggggctggtgccgctgatgatcaacaacctgtcggtgttgggacaagattcgatggtaccgatgctgcttcctgcggtaatggggcaggtcggcgccgcctttggcgtttttctgcgtacgcgcgacacgcgtcagaaagtgctggcaggctctgctgcaacggccggtatttttggtatcaccgagcccgccgtgtacggcgttaatttaccgctacgtcggccgttcatttttggttgtgtggcgggatctattggcggcgccatcgtcggattcagcaatagccacgtctattcattcggtttcgccaatatctttacgcttgcgcagatgatcccgccaggtggtgtggatgcgacgttgtggggaggcatcttgggtacgctggtcgccatggccctgagttttgtgctgacgctggtggcagggttgcctgctcgttcggctgcacaatcatcggtcaacatcgtggtcggtgaaaatgaaattcacgcaccaatgagcggcactgtgttagcgctcgaccaggttccggacagcacatttgccagtggtttattgggggagggggtcgcaattattccctcaggaaacagcgtgattgctcccttcgccggtgaagtcgcgtcgctttttcagaccaaacacgcgattggcctcctcagcgaaagtggcattgaagtgctgatccacgttggcatcgacaccgtaaaactgggtggtgagcctttcaccgcctatgtaaaagtcggtgacagggttcaggccggggatctgttgctcgaatttgatcgtaaagccattctcgctgccgggtttgatctggcaacgcccatcattatcagcaacagcgatagctatcgctctgtcaccacagtggacgccacatccgtcgaagccggaatgccactgctgaccgtaaatcgtaactaa

SEQ ID NO: 166179 - DNA, 1395 bp, Enterobacter cloacae
atgaaaactttcccggagaaatttttatggggtggcgcaattgccgccaatcaggtcgaaggcgcttatcaggaagcggggaaaggtctgtcgacatcagatgtacaaccgcagggcgtatttgggccggtgatcgagcgtgtggcaggcgaccatggcattaaagatgtggcgatcgatttttaccatcgctacccggaagatattacgttatttgctgaaatgggtttcagttgcctgcgtgtttctatcgcctggacaagaatctttcccaatggcgacgaagagttacccaatgaagcagggctggctttttatgaccggttatttgatgagctggctaatcagggcataacgccgctggtgaccttatcgcattatgaaatgccctggggactggtgaaacagtacggcggctggggaagccggaaagtcatagggttcttcgaacgttatgcacgcacggtatttacccgttatcaacaaaaggtgaagttatggctcacctttaatgaaatcaatatgtccctgcatgcaccgatgacaggggttggcctgcctgaaaccagcagcaaagcgcaagtgtatcaggctattcatcatcagctggtagccagtgctctggcggtaaaagcctgccatgacattattccggatgcgaagatcggcaatatgttgttgggaggtctggtctatccgttgacatgcaaaccggcagatgtatttaaggcattgcaagaaaaccggacctggcaattctttggtgatgtccagtgtcgtggcgcgtatccggggtatatgaagcgttatttccgcgataacgccattgatcttgatattactgacgcagacctggcggcgctgcggcacaccgtcgattttatttcatttagttattatatgacgggctgtgtaaccgctgatgaagagctcaacaaacaagcgcgcggcaatattctgagtatggtgccgaacccacatttagccgcatcggagtggggctggcaaattgacccggtcggtctgcgcacgctgctgaatgacttgtgggatcgctatcagaaacccttatttattgtggaaaatgggctgggcgctaaagataaagtcgatgcggatggcagtattcaggatgactaccgaatccgttatctgaatgatcatttagtacaggtgcgcgaagccattgaagatggtgttgaggtaatgggatacacttcatggggacccattgacctcgtcagcgcttctaaggcggaactttccaaacgttatggctttatctatgtcgaccgggatgacaacgggaatggcagcttagctcgtagtcgtaaaaaaagtttttactggtataaagatgtcatagcaagcaacggagcgtcacttaggaaatag

SEQ ID NO: 166180 - DNA, 1902 bp, Enterobacter cloacae
atgaatagccataagctagcagtaaatatactaaatttggttggaggtgaaactaacgtctcgactttggttcattgcgcaacgcgtttgcggtttaagattgtagattatgaaaaagtggatcttgctgcgcttgaggcgttagacggtattattacggttgttaaaaactctgggcaattacaggtagtggttggaaacagggtgccggaagtttatcgagcttttggcggtatttccgggttattagaggataaagataccaaacgtccagaggttgatagtgagaaatccgcttctgttatggggagactaatagatctggttgcgggaatctttactcctctacttggtgctatggccgcagctggggtattgaaaggcatattggctatcgttattgcgatgggatggttggacactagggaaagtacctacatcattttacatgcagcttctgatagtatgttttattttctgccgctgttgctagcaattacctccgcacgaaaatttgaaaccaatatttttatcgccgtgtcaattgcgggtgcattggtttatccgacgattcaagagctatttaatactggccaatctgtgacattcttcggcttgccggttgtaatgatgaaatatacatctacggtactcccaattatcttcagtgtgtggttgatgtcatactttgaacgtttcttggttagccatattcatgaaagcgtgcgtaatattttgacaccattccttctgctgatattgatggtgccgttaacgctgatgactattggacctgttggcatcgcggccagtaatctcctcgcgtcggtgtttgtcagtatctataattttaacccaattattgctggggctctggttgcagcatcatggcaaattctggtcatctttggtgtccactgggggtttgttactgtatttatcaacgatatttcagtcatgggacgcagttatcttaaagctgcatccagtccgtcaattttcgcgcagtctggtgctatattaggtgtgatgttgcgtactaaggataaaaaacttaaggcgctggctggtagttcttttattgcctctctttttggcatcacagaacctggagtgtatggcgttacgttgaagctaaaaaaaccatttgtctgtgcagtaatcgctgcagcaatggggggggctgtggcgggatacgcgaaaagttcagcaatatctatggggatgcccggtttattaacactaccaattttttatggggagggttttgtcggattcgtcataggatgcgtcatcgcttttgttgtcagcttgattttgacaatggttgttgggtttgaagacccgatccagtctgtcaatgactcgccagtggcaactactgaaacttccatttcggttgtaagtaaaagtacgcagcaaaccactcaactgaaggatgtccctgacacggcggagcagttaggttcgccagttaaaggtgaattggttccactgacacaagtgaatgacaaagtattttcttctggtgtcgttggacagggggtagccattcttccacaagagggtcgtatttattcccctgttgatggtgttattgccagtacatttgctagtggacatgctgtcggtatccgttcgtacaatggtgcagaaatactgatccatgtaggcattaatacggtgcaactggaaggaaaatattatcagatgcatgttgcagaaggtgataatgtcagcaaagggcaattgttattggaattcgatttggttgagatcctgaaggaaggttttgatattgtgacaccagtggttgtcacgaatgctgaggaatatcgtgtgcttagcgtatctacagaacgtcaccagcaggctggagacacgataattgcattagcgtaa

SEQ ID NO: 166181 - DNA, 885 bp, Enterobacter cloacae
atggcaaaactgaataataatttaaaaacacttgccagacaggctggcggaagttttaaaactgtttctgaccgtatgaaaatagcggacaggtttgctgaacgtttattaaggcttaacgtccagattcgagatattaagaacatcaagacggggcatattgagttgtatatgaaaagccgtatttccgaagagatttccagtcgaacacttcagaatgaaatgtcggctatacgggctttgctacggattgcaggtaaaacatttatggctaatccggctcatgaaaaactgagcaaccaggctctgggtatttcagaaaccagccgcgatggaacaaaggctgccattcccgacaattatttccgccaggtactgatgggtgtggaaaaaaaagatgaaggtgttgcgtgtgcattgaggttatcccgcttacttggtttgcgaacggaagaaacagtacagtccgcaaaatcattacgaacctggcaaaaagccttgtccaatggtgacgaaaaaatacgtgttgtattcgggacaaaaggaggacgtcccagagatacgacagtgttagatcgtgaggcaacgctttccgcaatcaatgctgctctgaaatatctgaaagataataacgggaagttaatcgataagccttcattacacacagctatcgaacgttatcgcaatgtggttcgtgaagctggcctaacagggaaatatgcaccgcatagtctgcgttatgcttactctgttgatgttatgaattttcatatgaaaaatggtttcagtaaagaagaggcacaagctcttacatcaatggatttggggcatggtgatggaagaggacactacgttgcgcgtatctacaataaggttgacgagtaa

SEQ ID NO: 166182 - DNA, 1146 bp, Enterobacter cloacae
atgttcagattcacacagttactacaaagcctgatcaaaacggggaacatggttgctgaggaccgcatatcacaactggaagagacatccgttaaggaattaactacagtccgactccgtcccgaaacaaaggcctacttgcagtcacaaagcgaaactcttggcgtttcactttctcaggtaattaatatgatccttgatggcgtggtttcaatggaaatgaaaccagcagctgataacaaaatcaaagaaatatatgacaggattatgtcgctgtttgaattgcataacatcaatacagttgatatggcgaaaatgctctccggttatggtatcaagctatcgcatcttcgaaacccggataagtttattgatattctttcaatggatatgattaaggagatagctgactggttttctattaattacaaatggattataggagaagcaaacgagttatattctcctcgggataacacctggtataaggattcctatggtttctcgctactgttgctggagaaatcattccgacattctgatcttaaggtttctgtagttaaggcaaataacgtatcttttgagaacgctgagaaacttgaagaacaatattccaggttgtatgtcggatttatattaagttatacatctaagattaatggtgtatcttttacaaaatacgaagtttgcgagttccagagatggaattatgataaatgtcgtggttatttaaggttcattttttattttctggattctgtcaggacgaaaataaactgccagggcgtatcattcaatgaggagattgttgatggtttgatggcaggtaggttatttccatcaacaattaaagggatgttatcagaaacctggttcattgctgatcgaataggtcatatagaaagtaattacgatgtggagataaatccagttgagtatttaaacagatttaacagacttatacgtttattatgtttcggtagttctgtgacaatttcagagattgaatatacaacgaaagacttttcatatggatggattataaagtactcatgtaatggggaatatcatacggagttttaccatagtctggccactggtctggacgatatttatgataagttcatcgtcgagaatccatcataa

SEQ ID NO: 166183 - DNA, 810 bp, Enterobacter cloacae
atgggaagaatgaaagaactgctctttgatatgcaagaagaacgcacgaatgaatggattgcagaaaattaccctgaggcagaagaaggtaccgaagagtttgatgtcgccgcccaagcgtacagtttgatgcttgatgaccttgccgaacaggcagaacgacggtggtttctggaatctctaaatgatcttgacgaccgttaccgccatgcagtcagtgaactgaatgagctcagtagcctggttgctttagaaaagccaagtattgtgctccggctggcttacgttcataccgtgacggtgatggaagcatttctgatgtactctgcgagggcactgctgaatgagccggcacatctggaacgattttactcccgggttgcccctgcttttaaaaagaaaatacagcactgtgaggaagtggttgcccaacatttgcagaaattgccggaggatatcttatctgatgaatcctggttgcagcgtagcagcgcgcagttgtttatcagcgagcagacctttcataacctgaatcacctgcagcgctacttctcgttggtactgaaaacatcattcgactggcctacggagtccctggaaagtattgttgagacccggcaggatctggttcaccggaatggcgtcagtaaggatgatgagcctgtacggatcggcacatggcatctgacaaacgccatcgcagcggtgcgcaccttcattgatgctgttgctgtgaccctgcgccgggaaaccgggcgggatgaaatactccccaatatatctggcttttatgacagtgatgaattctga

SEQ ID NO: 166184 - DNA, 294 bp, Enterobacter cloacae
gtgggcgtaagaaagcaggttgagatacacgaaatttttgaagcgctgaaatgtttaggtcacacccgtctctggctccgtgataatggaaagtacaatcgccttattattacctgggacaatctggtcgccgccagctatgacccatacctcaaaagctggaactttcgcaaaaatgcctgtcgggtgaatgacaacgccaaaaatgaaacacctcaaggaaagtcatcagttttgactgagctcgcagattcaggtcatgcatggcagcaaatgcttgttggagactggtag

SEQ ID NO: 166185 - DNA, 285 bp, Enterobacter cloacae
atgaaggcagaaagtgcacgtcagattcaggaactgattgagctcgagaaatttaaccctgaaacactgtgttcgggcgagagctggatggcaccttcagccagtgaagtcagtgtggtccgggcgctgatcccgctgacggacatccaactggccaatcggctggatgtggacgaacgcaccatccgcaagtggaaatccggcgagaccagtatggtgttcgccacttggtgctgtctgtgctggctggccgggctggggatgctgctggaagaaccggcttag

SEQ ID NO: 166186 - DNA, 276 bp, Enterobacter cloacae
atggaagcgcttaagctcccggaagcaagatctctacacaaacggctcgaaaagttgcgggatgaagctgaatatgctgaacacatggatgccctgatggcgctcaaatggctgggcaatgccggcagccatgaactggaccgggtgagcagccaggacattgaagatgcgtatcagattattgagtctgtgcttgataaaatttatgcaggatctaaagagtctctggatgcgctgatcgctcgcatgacccgtgtgtttgcacccaaaaaatag

SEQ ID NO: 166187 - DNA, 606 bp, Enterobacter cloacae
atgactgataccgcagcaaatgagatagcaccacacttacccttaatctttgaaaatgaagccaatgggattcttcaggatctgatcggtactccagccctgatggggatgatgatgtttgcgaccgaggaagaagtaatagccgcgcgtagctatatcattggtgtatttgaagagtgttaccgtgtcggacatttacgcatcatgggggccgctgatgaaggaatcttgtttgggtactccttgatttttgggcatccatcggcaaattattcgttgtactgccataaaatttatgtgtttgagcaatatcgtggtaatggaattggtagccagatgctggccggaattcttgcccttccaaatgaagtaggtctgatttgctcgtctgatctaattcctttttacgaatctgccggaatgcactttaaaggaaatttcactacgccatcagatgctggtttcacgaaaactcgcggtatgtatgaaggtctttgcgtaatgagcactcataacagtggcgaggctaatggtctgcccatcttcatgatgaacgatagcgacattgataacatcatacaggccatggcatcagccaaaaaatga

SEQ ID NO: 166188 - DNA, 639 bp, Enterobacter cloacae
atgcataccttcttaacggagtatttcatgactaacctgcctgctgacaccgtccgtcggatcgaggacgccgccgccgcactcattgccgccggcaacccgaacccgaccaacgaacaggtccgccagcacctcggtggcggctccctgtcccacatttccccggtgatgcgggaatttcgggcacgccagcgcgcactggccagcgaacggacgccggctctgccgccagagctggcgcagctgctcaccggccagttggccctgctgtggcaggccgcagtgaaacaggcagaagccgggacactggcggcccgggaacaggccgacaccgatatcgcccgggccgaccaggaacgcgacgaggcgctggcgaaagtgaccacactggaaagtgaactggcggtgcttcgggaggtggtgaccgaacgtgaccggttgcttgatgaggtacgcgggctacgcgcagaggcgctgccgctgcgcgagcaggtagcccgtctgaccgctaccggcgaacacctggcggcgcagttgcaggacaccaaagcggagttgaaggaaacccgggaggatggccgtgcgctgcaggtcgagctgctggccctggcacgccatgacgggaaggcgaagaaatga

SEQ ID NO: 166189 - DNA, 744 bp, Enterobacter cloacae
atgcgtgaaagatgcaaggagacgtaccgatttctcagatcggtagatgcgctttatcattggatcgggctcggtagtctggttgtattgctgttcaaggtggcggttctgaactgtataccagctccgctgcattttatgtctgcagtcagcccggtggtggaaggcattcttggctcggtaatagccagctacattttttatatgttctgtattcacccgccagtgtttgcagaaaaaaaaaccagtgcggcttttgttaattttatactgacacggataaaaaaagggtttgatgaacatttgcgcaatgtgtcctccacgctgagctatgactcaaccgaacaggatttttatgcgacatttacgggtatcaatccctttgcacgtaacgcacctttactccttcaggcacacccaaagctgatatatgcagactggttcgagttttttcaaaaccataatgtgcatataaagaaagaaatctcgcgcctgctggattcgcggctaaccttggatatagagacaatctacattctgaatctgattaacgactgcagctggttcatgattaccgaaaagctggctggactgaaagggcagatgacaaatggtcataacccttttgtaaatccaaaccagccagcaatttcttgctgctcaagcatgtatgagttgaaggagtttatcagaagcctacaacctgcaatcgatgcaacggataaactggcaggtagagtctga

SEQ ID NO: 166190 - DNA, 282 bp, Enterobacter cloacae
atgagcgaggacggtttcaataaagatgacctgagcagcacctttgcgcgtttcaccacaaaacgccgcaatatcgtttgtgatgaatccaagctgaagcggaaaaaacctgagccggtaaaactttcgagtgcaacacaagaaattggttgtgtgatttcatctgtgctcgcctctacctctaaagcggatgtcacaaaagacaaacaggaccaatataaatctcctatccgttacagctgggagaaaaaaggtattaacggtggttctaacaatttttaa

SEQ ID NO: 166191 - DNA, 153 bp, Enterobacter cloacae
atggcgacaataattgggctgggtgtcatcctgctagcgttacttgggcatatatggtcccagacaaaaagaatagaaaagctggaatggaacaactggcggttatcagcagaaaatgaaaagctgaaaagtgagcttaccgctagggactaa

SEQ ID NO: 166192 - DNA, 603 bp, Enterobacter cloacae
atggttgcaaaatctcgtaacgttaatagtgaaaaaacagttatatgtggtactcgctacggtaatgtgatggcttcccgcggttcagttattcccttgttcgttgatttgatcaaagcaggaaaagcgctgacaatcactgacccaaatatgacccgttttatgatgacgcttgaagatgctgtcgatctggtcctatatgcctttgagcatggtaataatggcgatatttttgttcaaaaagcgccagcagcaacgatcgaaacattagccattgccctgaaagagttactcaacgttgaacaacaccccgtcaatgttatcggcacgcggcatggtgaaaagctttatgaagcgctgttaagccgtgaagaaatgattgcggctattgatatgggtgattactactgtgttccacctgacctgcgcgatctcaactatggaaaatatgtagaacagggtgatagccgtatctctgctgttgaggattataactcgcacaatacgcagagactggatgttgaagggatgaaaacacttcttctgaaattacctttaattcgcgcattgcgcgcgggtgaacattacgatctggacgcctga

SEQ ID NO: 166193 - DNA, 1104 bp, Enterobacter cloacae
atgaaaatcctgattactggagctgatggctttatcggacgtaacttgtgcttacgccttcaggaagcagggtacagtgaccttgttaagattgaccgcggttcaagtgcggctgagctggaaaatggcctgcaagaagctgaatttgtctatcatctcgcgggtatcaatcgacctaaaaacgtcgaagagtttgccgaggggaatagcaatctgactcaacagattgtggatactcttttagccaagaataaaagcatacctattatgatcagttcttccattcaggctgaactggataatgcttatggtcaaagtaaagctgcagctgaaaaacaaattgaacggtatgcagctgaaagcggtgcatcatactttatttatcgttacccgaatgtttttggtaaatggtgcaagcctaattacaattcgttcgtggcaaccttctgccataatattgccaacaatatcgatattacgatcaacgattcttccgcgcctgttaatcttgtatatattgatgatgtttgtactgatgctataaagctcttgtctgaaaaggttaaaagtgggtacaaaactgttgagccagtatattctacgacagtaggtgaggtggcggatttactttatcgcttcaaaaaaagccgttccactcttgccaccgaggccgtaggtacagggttcacccgcgcgctttattcgacgtggttaagttatctacctgccgataagtttgcgtactctgttccctcttacggagacgcccgaggggtcttttgcgagatgttaaaaaccccttcagcagggcagttttcatttttcaccgcacatcccggcattacacgtggtggtcattatcatcacaccaaaaatgaaaagtttctggtcattcgcggccaggcatgcttcaagtttgaacatgtgattaccggtgagcgatatgagctgaatgtttcctcagatgatttcaaaatcgttgaaacagtccccggctggacgcatgacgttacaaatattggaaatgatgaattgatagtcatgctctgggcaaacgaaattttcaatcgtgatgagcctgatactattgcgagacctctgtaa

SEQ ID NO: 166194 - DNA, 135 bp, Enterobacter cloacae
atggtcgacgatgcgtcgattggtctcttctgggacgcgctgatcgaaacaacggttgccggcttccatatggaagataggcactttacggcgcttggccgggatagcagaaatacaggagttagtatcacctag

SEQ ID NO: 166195 - DNA, 1425 bp, Enterobacter cloacae
atgcgtactgcgagtcggcctgggggaggatacataggtgtgccaccctcttatattaaaggctatcctgagttgttacgccgtagtggttactttacttataacgacaccaaaacggattatcaatttacggcgggacatgctgatacggggccgttttctctctggacacgtcacggacaatacagcaatattgatgatctgcatatacaattggcttggcgtaattatgatttacagaataaaccatttttcatgaattttaacccgcaaataacacatgagtcagcgttattttcaacagaaaatcatcctgcgggttcggaatatttagttaaacgctggtcagagttccgcaaaaaatatagttatacacctactgatcccgacacactgaaattagaaccatattttcaagatacctttcggacgcgtcgcgaattggcgcaacactatgacaatatcaagattatggacatgcaagttggtaaattgattaatggactaaagaaagacgggttatgggacaataccattgttatttttactgctgataatggggatggtattccgcggcataaacgagaaggttatgattccggaacgcatgtcccgttgatgatatacattccagaaaaatatcgtcctttgggatggttgtctgatggcagctatgataaacgtctggtgtcttttgaagatctggctcccacaattttagggtttgcagctgtaaatcaaccggattatatgcacggcataaacttggcaaaggattttgctccgcaacggcagttcgtctatggcatgcgtggtcgaatggatgaagtaaatatgcgttcatattttgttcgcgaccataattatcaatatgtacgaaacttggataataccccaggtggtgtaagtatcctatttcgtgatggattaggttctatgaaggatttgaatcttgcgaataaagagaaccgacttaacgctgaacaacatagctggtttgctaacaggtctgcagaggaattatatgatcttaaaagagatcctcagcaactgcataacttggcttcagatcctgcccatcttgcaatgctgattcgcttgcgtgaagaaatggaccgttggcgtaaccattctaatgatatgaatctggtaccagaaaaccagatggtaggggatttactgaatgaacaaggtaaacaacataagaccctgatgcctgtagcacagtgggatcaggtcagccacaaaatttatctagcgaatcgtactcaggatgcttctattggttatagctgggatggtaaagagtgggagttgtatacaggcagtatttcaccacaaaaaagtgcgcaagagctgcattttaaagcaattcgctatggctggcaggagagccaaataggtacgctatttctacagcaatga

SEQ ID NO: 166196 - DNA, 234 bp, Enterobacter cloacae
ttgagtttttcggggagcttcagcaccaaaatcgacgacagaaagcccccatgttgtcaggtgtttcccatacataaaggcccccagtacatcatgttctacaccgaccctaaactgttcccatttaactccttcatcaaaatcgtcaaagtcattcgtcgttatgctcccgtctttattgtaattttcttgggcacgaacgaaaaaatcgccaatgaaagctgtctgttctga

SEQ ID NO: 166197 - DNA, 183 bp, Enterobacter cloacae
atgacctctttatcctggcaaatttttgccgcagtgcaagtgattacacgattacagcgtcaggtgtgcgagattgcgctcaaccagcgcgctgcccatacccggcacctgcttgagatcgtcaagggttttgaaagggccatactcttcacgatagctgacgatggcctgcgctttttatag

SEQ ID NO: 166198 - DNA, 564 bp, Enterobacter cloacae
atgtcattaacttatgagcaatgccctttcgtaaatgatttttggtttggtaatgtaccagaatgcgttgaagttaataagcgtagatggaatattataaaaagtttcaaagaaagaaagaatatcattatctcagcaaattattatttcttccgggagggtaagcttgcaacaaacaatcctctggaagacggtaggaataatttgagctacggcattagagccaatgaggatgaggtatggcagtctttttctaagaatattgaaactcttcaggcattgggtcacaatgtaatcgttatttaccctatccttgacggtattatatacgagaaaaatatcaaagggaaagccgatgctatagaatttgctaagaaattagattctgtaatcgttaataaagaaaacctaactataattaggcctgttgattttatttgtgataataaaggatgcaaaataatcactaccgaaggatctctatataacagtgggagtcatctgtcaaatattggtgttaaattattatttagcaaaaccgatttcaatggggctaatcgttga

SEQ ID NO: 166199 - DNA, 267 bp, Enterobacter cloacae
atgactaagcacagccttggcgaagaaacagtaaacagcatcattgaagaagaaaaaacattatcggaacaggtgcagattattgaagggcacattgttatcaatgttgcgtatgagtacaacatcccgcttaattcatgttcaacacatcagcaaattttgcactgggtgtggcacctgactgaaaaaacatggatgacgcaaaaggtgactcgtcgcttcattgaagtagcttgcggatatcataagttagagtatcgccactaa

SEQ ID NO: 166200 - DNA, 291 bp, Enterobacter cloacae
atggcatccagttcaccctggcaccgactctataacaccaaacgttggtaccggctccgttatcaccagcttcagaagcagccactctgtgagtttcatctcaaacgaaaccaggtgatatccgcatctgttgtcgaccacatcaccccgcacaagggcgatgagatcctcttccatgacccggataatttgcagagcttatgcaaacgctgccacgactcggttaagcaacgcatggagaagggcggcacggtaactgagttcgacaacgatggccgggttatctggtaa

SEQ ID NO: 166201 - DNA, 210 bp, Enterobacter cloacae
atgcaagacctgaagattgaataccgcgatggcaagctggtagaactgagcattgatagtgtgagctttaaaaccgtcaccgcgatcaccttcaaccatgaagtcggcgagacgctgccaaccctcagcctgaccttcccgctcggagtcggcgaacggctggtgcccgccaccctctcccgcgaaaacctgcggatcattgaaaaatga

SEQ ID NO: 166202 - DNA, 1278 bp, Enterobacter cloacae
atggcagataccgattacagcattgacctgcgaacgcgatcgccattctgggcgcgcatggcctccatcctgaccggtggcagactggttacaccagagaaaggctctcagatggctggcacctctgcgcacggcgttgttggtgaatccgttgtcactgatgagcgaaacatgcaaatcagcacggtgtgggcctgtatccgtctcatttctacagtcactgcatctttaccgcttgatgtttacgagaccaaagacgatcagcgcagcaaggttcctggcaaccatcctctcgcaaaactactgaggttccggccaaacaatttcatgaccgctctggagttccgcgaagccatgaccatgcagttgtgcgcctacggtaatgcttacgcgcatgtggagcgaaacagcgtcggcgacgttatcagtatggttcctctgatgagcgccaatatggaagtgcggctcagtgaaaacggcaaaaccattatctaccgctatcgtcgtgacacggaatacgccaacttttcacagaaagaaattttccatctcaagggatttggcttcaacgggctaaccggcctgtctccgctggcgttcagcgcgaagtctgcaggtgtcgccattgccatggaagataatcagcgtgagttcttcgcgaacggcgcgaagtctccgcagatcctgatgactgatggcaaggtgctgactaaagagcagcgcggtcagctggaggagaactttaaggagattgcaggcggaccggttaaaaagcggttgtggatcctggagagcgggtttactacgcaggctataggggtttcgcctcaggattcggaaatactggctgcacgaaaatttcaggtcgccgaactggcccgcttttacggtgtgcctccgcatctggtaggcgatgttgataaaaccacctcctggggctcgggaattgagcatcaaaacctgggttttcttcagtacacgctaaaaccctaccttgaccgttgggagtacagcattgagcgctggctggtgaaagagtcagaacagggcgctattcatgccgaacataacctcgacgggctgttacgcggcgactcaacaagccgggcatcattcatgcagatcatggtcaataccggcattcgcaccgttaacgaggttcgacggctggataacctgccaccactgcctggcggtgacgtggcgacgcgccagtcgcagaacgtacccattaccgatcttggatcaagcaaagagccccgcaatgacggggcttaa

SEQ ID NO: 166203 - DNA, 1164 bp, Enterobacter cloacae
atgtctgaattagcaaccctggaaaaagcgatcgagaactcccagaaagaagtgaaggagcttatcgaggagcagcgtaaatccatcaaccagaacggcgaaatcaacaagcagctgcagaccgatctggctaaagcccaggatgaactgaaaacgaccggtacccgcctgttcgatcttgagcagaagctggctggcaactcgcctgaacagaccgccaagaagtcctttgcagagcgcgtatccgaagacctgatgaaaggctgggacggctcacgcaccaaagcgaaagtgaccagttttgataaagcgattgggtctggcgccaactccgccggcgccctggttctgccgcagcagaatcctggtatcttgatgcctggcctgcgccgactgactgtccgtgaccttctggcccagggccgaatttccagtaacgcgcttgaatacgtgcgagaaaacgtcttcaccaatgccgccgctcctgtggccgagggcaccctgaagccggaaagtaacatcaccttcaccaaagagacggcgaacgtcaaaaccatcgcccactggatccaggcatcgcgccagattatggacgatgcgccagcgcttcagtcctatatcaatacccgcatgatgtatggcctggcgctggcggaagaaaaccagatgctcaacggcgacggtaccggcgataatctggaaggactcaacgtggttgcaaatgattatgagactgcgctgaatgcctcgggtgatactggtgcggatgtgctggcgcacgctatctatcaggtatcactgagtgaatttgaagccgatggcatcgtccttaacccggcagactggcaccggattgcgttgctgaaagacgccaacggcaactacatcctcggtggcccacaggcgtttgcgtcaaaagtgctgtgggggctgcctgttgtctccaccacggcgcaggcggcgggtaaatttaccgttggcgcgttcggcctggcctctcaggtctgggatcgcatggatgcaactatcgaaatcagcaaccaggaccgcgacaactttatccgcaacatgctgaccattctgtgcgaagagcgcctggcgctggcgcactaccgtcctgccgccatcgtcaccggcgatattgcggtttcttccggcgaataa

SEQ ID NO: 166204 - DNA, 333 bp, Enterobacter cloacae
atgaaaattaaagctctccgtatgttctcgcattatcacctgggcactgtatcccagggcgaaacccgcatcgtgaaaaaagaggttggcgagatgctggtaaaaatgtacctggctgaagaggttgaacctgagaaggtgaaaaactccagtcctgaacagcctgaacagcctgaacagcctgaacagcctgaacagcctgaacagcctgaacagcctgaacagcctgaacagcctgaacagcctgaacagccacaaaaagccaaaaccgggggtaaaggtggaaataagcgcggagcagatggcgctgataaagacgcatctgagggttga

SEQ ID NO: 166205 - DNA, 327 bp, Enterobacter cloacae
gtggaaataagcgcggagcagatggcgctgataaagacgcatctgagggttgataacgacgccgaagactctcttatcactgcctacaccacggcggccgtcgattatgttgagaaattttgcgacggttcgctggtggaatccctttcgccgccccctgaagacaaagagcctccccgggaggttctttttacgcccgggatctgggcggcaatgcttctgctgattggccactggtatgcgaaccgggaagccgcgtcgcagaatctggcggaaaccccgctgggcgttgaggcgttgctgatacagcaccgtcggtggcactga

SEQ ID NO: 166206 - DNA, 333 bp, Enterobacter cloacae
atgcaggccggaaaacttcgtcaccgcgttacattgcagaggcctgttaaaacccagaatccggctaccggagccatcattaacggctgggctgacgttgctaccctgtgggccagtgttgtcgatctgtccgcgcgtgagtttgtagcggcccaggcagggcagagcgaagtcacgacgcggatcactattcgctggcgcgatgatgtaaccagtaagcaccgaatcctttatctcggccgtgtttataacgtccatggcgttctgtccgacgataaaagcgggcgcgaatatctgacacttccatgttcgcagggggttaacgatggctga

SEQ ID NO: 166207 - DNA, 486 bp, Enterobacter cloacae
atggctgatggtattgagttcagcattactggcgtcgattctttgctgggaaaactggatgccgtcagcgtcgatctgcgtcgcaaaggtggcagggctgcgctcaggcgtgccggcaacatcatcgtcgagaaagcgaagactaacgcccgtcgcgttgatgacccgggcaccggcaggagcatcgcagataacatcgccatgcgctggaatggccgtctttttaagcgtacgggcgatctcagttttcgcattggcgttcttcacggcgcggtccttaaaaagcaccccgatcttggcaggaatgcacccactcctcactggcgccttattgagttcggtaccgaaaatgttcgtgcccagccaattatgcgcccggcagcggaaagcagcatcggcgaggtgataaatacctttggcactgattatgaaaaggccattgaccgtgccattaagcgcgctcagaaaaaaggaataccaccatga

SEQ ID NO: 166208 - DNA, 366 bp, Enterobacter cloacae
atgattgcgcccatatttggtgtatgcgcggcaagtgcggcggtaaccgcgctaatcggctctgatcctgttcgactataccccttcggccagcaggatgatgctgtcgtttacccgtatgcggtgtggcagaacgtcactggcttgacggaaaactatctggcgcatcggccggatgcagactccttttcgctgcaggtagatgcgtacgccgacacggtggacgaggttatcgccgtcgcctctgcgctgcgtgatgccattgagccgcacgcgtacatcacacgccttggcgagcaggagaaagacccggaaacaaagcgctatcgctactcattcgatgttgactggatagtcactagataa

SEQ ID NO: 166209 - DNA, 486 bp, Enterobacter cloacae
atgaaattaacacttgatgcactcaaggagtccggcgcgtttaccggtcgcccggttgagaaagaaatcacctggactcagggtgataaaaaaatcaccgcgaccgtgtatgtccgcccgatgggttatcacacagcaacgtccgatgtgctggcttttgggggtaaggtcgatggtgtggcagggcgtatcgccgcatccatctgcgatgaacagggtaaacccatcttcaccccggctgacattactggtgaggccgatcctgaacgtggagcactcgatggtggcctgacggtagcactgcttctggccattcaggaagttaacgatctgggaaagacttcgagctcagcgccgaagacgaattctggtgcgagctcgtcctcaacggaatcggaggcagaacaatcgccgaagcgcgggaatcgctctccttcaaagagtcgcagctctgggcaaagtaccgggaacgatacggaagtctga

SEQ ID NO: 166210 - DNA, 2460 bp, Enterobacter cloacae
atggcttccaaatcacttggtacgctgacaatcgacctgattgcaaaaacgggcggttttgtctccggccttaatcaggcagaacgcgcctctgcaaagtggagcaaacaggtacaggatgatgcagcatccgccagcgctgcactggcgggtattggtgcggcagccgtaactgctagtctgggtgttggagcggctggttttcagttactgaaaagcacttccaagcagattaccgaaacagaccgctgggcaaagtcgctaaggatatcaactcaggagcttttagcatggcagtttgctgctgaaaaggcaggggtgtccggcgatcagatggctgatatttttaaggatatcggcgataagataggtgacgctgtcctgaacaagtcgggtgaagcagttgatgcccttaattccctgggtttgtccgctgagaaattatccaaagtaagtcctgaaaaacagctcctggcaattggtgaatcacttggcaagatcggcacgaatgccgaaaagacaaccatacttgaaagcctgggcaatgacctttcaaaacttcttccgttgttcgataacaataatgagaaactgaaacggtttattgatctggctaaggattatggggtagcgccagacccatcttccattgatgacctggttaaagttaaccagctattcgaagacatggaggctcaggttgctggcctgaagatggagattgccgcaggtctggcaaaggttgaccttggacaactgcaaaactctcttgatgaacttcacaatgttttaactgatcctgctgtcctgcagggtatctctgatctggtgtctgaagttgcacagcttgctggatggcttgtaaaagccgccgccggcgctggtcaactcgccgcaagcaccggcaacagatttgccgctctgagcggtaaaattgacctcaaaaatatcgatcaggtaaatgagcgcattgcttatttgcaaaaaaaccttgaaggaagaaagggtttttattcgcaggacaaatcaatgttcgcctggttcactggtgggaatgatagtgtaaaagcactcaacgatgaactgaacacccttatcgaaaccagaaacaggctgtcaaaacctgctgttggcattcttccgcttggtgctgctactgtcggaattgggaaaccattctcccttccaccgggcgagactaacggcaaagttacgcctgatgcaagcgcaagaaaactggaaagctctttcaaatccatggagatgggttacctgcgccagattgcgctcatcgataccaccggcaaaaaaacggtggaggtgaccgagcaacagaaactccagttcgatttggcggagggaaagctcaccggaattaacaacgcgcaaaaaatacggcttcaacagttggctcaggaagtggatcgcctgaacgccgtcaaaaaagccaacgaagaaaatgccagggtggcggcgtttgtggcaaatctgcaggcacaaaacgagaatgcacgtgcaaatttgggcgtggatgtgcagggtgccggaatcggcaataagcagcgtgagcggctcagggaacgcctgagtattgagcgcgacttcctcgaccagcagcgggagctgcaaaagcagtatcagtcccgtgatataagccagacggtttatgaccgggaaactcaggccctgaaggatgcgcaggccgaaaggatcgaagttcaggaggattactacaagaaagttgatgcgctacaggctgactgggtaacaggcgcccgtgacggacttgccgactgggtggatgattccacgaactatgcaatgcaggctgccgacgtcatgaaaaccgcactttcagggatcagcagcaacattgtcgagatgctcaacggcaataaagcgagctggaaagactggggtatcagcgttctgaaaatcatagaacaggtgatggtaaatatgatgatcgcgaacgccgccagctctatcggttcgctgtttagcggtgccgcctcatcctcagccagtagcggaacagcaatccagaactacggtgctaacctgcaattaaacgccaaaggcggcgtttactcttcagccgatctcagtcagtacagtaactctgtcgtcagttcaccgacgctgtttgcgtttgcaaaaggtgccggcctgatgggagaggcgggtcctgaagccattatgcctcttacccgcgcgtctgatggttcactggctgtccgcgccgtgggaaatggcggcgtcacgccaggcagtggaggggcgccacaggtatatatcactattgacggaaacggcaatacatctactcagggctcagctggcttcgaacagtttggcgctgaagtcgggcggttcgtggatcaacgatataaacaaaacatgatgcgcgatattcgccctggcggtgatatctggaatcttgcaaaaggaggccgctga

SEQ ID NO: 166211 - DNA, 339 bp, Enterobacter cloacae
atggctcttgaaacattcagctggtgcccacgcatcaacgcggagcaggaggtaacgttccgccggcgctccgcaaaatttggtgacggatatgaacaggtggccggtgacggattaaatccgcgttcacaaaagtggaatttacagtttaccggtaccgaagcgtatatcggggccattaaaaactttctcgatcgccatcagggaacaaagtcttttcagtggcacccaccgcttgaaccactggggttgtatcgctgtgatacttacactccttcgccgcttggcgctgggctcttcaacctttcagcaacttttgagcagacctataaaccatga

SEQ ID NO: 166212 - DNA, 240 bp, Enterobacter cloacae
atgaaaaatgagatcattgatatctttgcgaataaaaaaatatctacatttgatctcggtcagattgaaaatatgaatagcttaatacctctttctcaactggcaaactcccctatattctctttaaaaggtaaagatggtgtagttggctctcattttacaaaggtgagcgatgctagggcgctttatggcgaaatatgccgtaaacttcttaaaaacatagggttgttaaatgattaa

SEQ ID NO: 166213 - DNA, 291 bp, Enterobacter cloacae
ttgattatctcttgctgttcagtacaggcaagtgtggttctcggtggcacgcgaattatttatccatcgaataaatccgaagtacaaatagcactcaaaaataaagaccctcatactcgatatctggtgcaaagctgggtgagttaccccaacgatgcaaaagcacctttcatcattacgccgcctgtctataaattacaggaaaatcgtcagacccttttgcacatcatttttaccggcgataaaaaaatctgcccgcagatcgcgaatctttatttctggcgaatgtga

SEQ ID NO: 166214 - DNA, 462 bp, Enterobacter cloacae
atggcagtgcgtcagctctgccagttttgcgctgcgcgcgtcacttggtactcgtttcactcgtgcacaagtgacgccgcgctcctctgctctcaatgcaaccgtggaagatgcccaaatgtgccaaatggtcatacccacgccgcaaagttcgcaacggcctgcagcgtcataaagagtgaaaacgataagaaaattgcacccagacagcggctgcaagacgtatctgaaaacagatacagaagtgaaagggaccttaatcgccagattcaaactgtatgcgatcttcgttttcaaagggtaaacgaagttaccgcccgaaggcgccacctctcaggttacggtggcattggcatggcgatcacccgaaggcgcctctctcagatcaccgaggcattggcgtgttgcatacaacgcaacggtacaacgagtaagatattagatcggagagcgatcctttaa

SEQ ID NO: 166215 - DNA, 246 bp, Enterobacter cloacae
atgagtaaaagcatttttgtttctggtgaggatttgtttattggtcgtgtgtttttgggatggaaggaaaggatttcacgtattatcgacaggggacattacgaggtggcctgttcacaggaggctcatgcgcattacggcgacaaattcacccgtactgatgcctgtctttatttcatctatggcgcactgtctgaaagtttcaggaaatctctgagagaaaaagaaaacgctcatgatatgtaa

SEQ ID NO: 166216 - DNA, 372 bp, Enterobacter cloacae
atgtatgaatcacgcacgttgtccgcttattactcatctcatcatgccagcgagcagatcgctcacaaaattacgctggcaaaagcggaaggcgagctgctgagtatcgcagcgctacgccgccttgaccttaataccgggacagatgaagacggttttcagttttacgtctgggatatggctgctgttgcccgtgacctggctgagttgtctgtccggaaactcatacctgactcatgggtaacattctatgacagcctctgtcgtctggcagaaagcatcgataaagcagcctgggattttttttatcaggttgccattaaagatgaagaggcctttctgacgatggaaagccacgacgctgatttctga

SEQ ID NO: 166217 - DNA, 309 bp, Enterobacter cloacae
atgctcaaccataccgttaacgcgatctgtcttgtcagaccggacagtcccgaatggcaccacatgtgggcagaactgtccgcgtgtggcccgaatcgtgatttaccggaccccactgccgctgaaaactttggtgaagtgtggcagtacatggaaacgcaggaggtcagttccctgtggtccgggaaacgacatcttcactgctttcgccaccggctgcatcctgtaaaaggggctgattaccggttaagaattccggcaagccgggattttgaacctgatgaaatgcagtcatcttttcatccgtaa

SEQ ID NO: 166218 - DNA, 147 bp, Enterobacter cloacae
atgtccgccggcgttgcaccgggccagtcggcactgataacagctgtttttatcgtaaacgcaggatcctcatcccgcgacagtgcggtaaacgaaaggcagcccgccgccatgatgatcagcaggaaaaaactgaccatctgctga

SEQ ID NO: 166219 - DNA, 1107 bp, Enterobacter cloacae
atgcaatatcacaaaaaacacatcattcagaagccgctcacttcagtttcaggtctgggcgtatgtgcatttagcatgttactgctcctaacgggctgtgatgatagtcaggttgcacctgcttctttgcggccggttaaaacctgggtcgttcaggaggcgcaacatgtccctccattaacctggactggcaccattgagccctcagaagaggttactctccagtttcgtattgacggaaaactggccagaaaactggtagatgtcggcgcgaaagtgacaaaaaaccagcccgttgctctgctgagtggctccatgagccagggcgagaaagcggcggcggtggctgaatatcaggaagccgtagcagcggaacaaaaaggacgtcaggaacttgagaggacaaaaaaactgttcgctataggaacggcatccagagcacagcttgaggaggcggtgtcctctgttgcagcattgaacgcacgtaaagcccgggctcaggctcaaaaagatgcagcgctcaacgaatcggatttcagtacgctgagagcgccttttgatggtgtggtcacgtcgtatctcccttattccggacaaaccatcgctgcgggccaggatatcctaaaagtttcctcttcgaaggctgaggtacagttcagtgtttcgtccgggctggcttcaaaattacatgccggagacccggtatccgtcaacgacggggtctcacggatcaaagggcaaataaggtatatcacaccccagcttgatagcagcacacgtacgagtctggtccgtgcaacgctctctgcagcggaaaacgaacctgtgtttggatctgctgtatcagtcgaactgagtgcgtatgacgataccgttattcctctacctgcctctgcactgacccgggcaggtaaccagcccgctgtatttatcgttgatccgaaactcgggaagctcgtcatccgtccgataaatattgttcgtttctctgacgataaggcctatgtatcctctggcctcaaagcaggcgaaaaagtggttactgccggtgttaatacgctacaggacggcgaaaaggtggatgtcagcgctgaggcaatgaaatga

SEQ ID NO: 166220 - DNA, 1341 bp, Enterobacter cloacae
atgccggattatcacaggccggaaacagcgatcccgttgaagtggaatcaacaggaagtttctcttcagggaacaaacgttgcccgttcttctgcgccttatttcaatgacgaaaaactgcaacaactgatcaaactgaccatcgcaagcaataaagatttgcaggtgtctgctctgaatcttaaaaaggtcggggaacaatatggtgcagaccgtttgtccacgcttcctaatattggtatgactgtcgagaaaacagctgcacatgagcccgcaggaatttatgacacagtcgatacaggagctgttacgtatcatcagttcgatgcgaaactggtttcagcgtcatgggaaattgatttctgggggcgactgcgcagcctgaaagaagcatctctgaatgaatatcttgccgccggtgcaacatcccgggcgctgcgaatcaatttaatagaacaaacagtgagcgcatatttcaattatctgtccagccgtgaggctgcagaaatatccactcagcttctgaagaataagctgacagaaaaagaaatggtgcatcaggcatacctggagggggcactgacacagaatgatgttattgaagccgataaagaagctgaacgcgcacaaacagaactgatgacatttaaattgcaggcacagcagaattacaatgcattacagcttttagtcggtcagccgctgcccgcttcattattcaagaacgtcgcactcagccagaactggcgtttcccccttcttcaaagcggacttccttcggatgtactgctaagacgcccggatgttgtttcagcagaatatgctctgaaagcagctaatgcccgaatcggcgccgcgcgtgccgcattcttcccgtcggtttcaataaccgcggcgggtggctcaacctcagcagagctgagcaacctcctgtccgccggaacggcaagctggagttttgtcccctcgcttaacctgccgatattcgatggcgggaaaaatgccgcaaatctgagcatcgctgaactgaataaacaggtcgaaattgtcaattaccagaaggcgatacagcaggctttcagggatgtatccgatgcacttgcaggacaggcggctatgaaagcccggtatggcaatagtgaggcgatttacacggctgcaatgacacaataccagatgtccgtaatgacgcagacggcaggccagttgagtacagaaggtctggtacataagaacaatgaacttcttgaagcacgtaaacagttactggaatcacgtctgaaataccttatccagggcgtaaaactgtattctgttctgggcggcgatagcgctatctga

SEQ ID NO: 166221 - DNA, 891 bp, Enterobacter cloacae
atgagtcttaaacataccattatggggtgggttccctgtaattatgatgtttacgctgcagcatattataaatttggcggtagcgtgaatatgcaccccgacatggtcatgttttttatgaaccagggccgaatgaagtttcaattctggcattattgtcaaaatgggataactacggcagcttatttcaccgttgataataagaatattggtttaaatgtctggcgcgaatacccggtctccttcgacgaaattatgcttcctgttgcggctgagcaaaaaatctggctacctgaaaagacaaaccggctgtcatctgataaccgggcaaacataattaactctgcttttatctaccgaacgaaaaggcaggtgtgtcgcgttaaagactccttttcggttaaaacaaccaaaaagagaaatagcgaactcagaaagtttttatctcagggaggcgaaagctatcgacttgctgacatatcagcaggagagattgcgcaactttatgtgcatctgtttaaactgcgttttgcagacagagtcagatgctatgaccgacagaaaatttttgaactgctgtcctctgttcgccatatgatttttggcaatgttatgttttttgcaggcgtaccttgtgccatcgatctggttcttgcagcatcgagtgaaaatatgatctattttgatgtgccgaatggggggttggacccacagttttcacagtacagccctggaagcctgctcatgtggtcaaatatctctgacgcccgcagaatatgcgccatacagaataaaaagatggctttttcaatagggatgttcgaaaaaaactgggaatacaaactgagatggtcagaggccactaaaacaggaaaagtgctgtgctattag

SEQ ID NO: 166222 - DNA, 156 bp, Enterobacter cloacae
atgttgtcaggttttattgagagtttcttgtcagcatgcgataaatttgatgatagctgtgtctggattatcattatcgcgattataatttttgtcattcaactttttgtggctatcctcctggacacaagtcactcaaaccggaataaaaaatag

SEQ ID NO: 166223 - DNA, 1188 bp, Enterobacter cloacae
atgaagatggatcaaaacagacaaaaaaaggagccaggaaccttatggtcctggatttgcggccgtctgatatcccttgctgttggctgtatcattctgatcgcttttttgatgtggttacgcttttatgtgcagaacaaatggcatgaataccgcatgccggaagatgtacgggctgaacttgccgtactgataaaaaatccgcgcctgaatataaatcgttatcacgagattattgatacctggtatggcctttcttattccgacccctcaatgggtgtaatggactggctagtactaggagccctgatactgttcttcataccggtgatcgtcctgattacccttaaggccgcgcgccctatttcgcgtcatatcggcagactcgatcgcgcagcccgatcagtttctgaaggtgggttcggctttaaagtgcccgttccggatatcctgccgcttgaattgcaacgtcttagtgaaaacttcaatgatatgtcagtgaagcttgaacgttatgaaaaggatttaaaaaaggcccatgtaacgctggcacatgagcttcgttccccactaaccgctgctacaggtcgcctgcagggtatgattgacggaatatttgagccagacgaagaccagttgaagatggtgatgcgtcagcttaacgagctgaacaggctcgtcgaagatctgcatcttcttaaactggccgatgccggtcagcttaacctggatgttatgccagtaaacctcagtgatattgtacgggaaaaaatcgcgtggataacgccttccgctaaaaaagttggggtggatattatccaccatcagaaacaaacaatcacttgcatggctgatccgtaccgtataggccaggtgttcctgatactgatggataatgcgctacgctatgcagctgacggtggggtccttgatataagctatcgttcttcctctgaagctgttgttgtagtgttcaaagatagcggcccggcagttgctgataacttccttgacagtatcttcactccttttgtgcgtgaagatgtatcccgctcgcgtcatagcgggggatcaggactgggtttatcaattgcgcgggcaatctgtgaagctcatggcggaagactaagcgctgaaaaaaacaaagaaaaaggattatctttctgcataaccctccccaggcattaa

SEQ ID NO: 166224 - DNA, 687 bp, Enterobacter cloacae
atgaaacgtgtcttaattattgaagacgacctcgatgctgcgaatgtgcttgaggcataccttaaacacgatcagtttgtaacggcggtagccagtaatggtcaacatggtctggaactggtctttagctggaaacccgacctcgttttgctggacgtcatgctaccagcaatgagcggaacggacgttctgctggctgtacgccgcaggagtgatgtaccggtgatcatgatcaccgccgtgagcgatggtagcgacaaaatcagtgcgctgcgttttggtgcggatgactatgtcgtaaaaccctacaacccgggcgaggtcgttgcccgtgtacgcgctgttctcagaagatattcgagtgagcgagtcaccaatattattcagttcagaggacttaaagcggatatggagtcgatgcaggcaacggttgaagatgaacagggtgcatctacattattagatctgactccaacggaattctcactacttgtgactttccttaaatcgcccaataaggcgtttacccggcaggcattactggaagcttgcctgcctgacagttatgcactcgaacgtgttgtggacacgcatatttataacttacgcaaaaagcttgagtccgctggtcagacagatctcctcgttaacatcagaggcattggctacaggttttcaaacatatga

SEQ ID NO: 166225 - DNA, 777 bp, Enterobacter cloacae
atgaaggaaataaaatttgccatcgcgacattagttaccttgtcattttcatcgcaggcagcatctgaaaatgccacaccatccctaacgattggactgggtgcacagtatgctccggaatatacgggggctgataaatataacacgaacgtattgccctatattgaatggagtaacgacacctggtttctgaactccgaaaaaggggcgggttatacccggcaatttgataatggtatttatattggtcaggctttaggatattctgtcgggagaactgataaaggtaactcctggattcagtacgggtcgaaaaaactgaaaggcatgggaaaaatcaagccagcaataacgagtacgactactgttggatggtggataaccccctgggtcggttttgaagggaatattattgcaccactgacagacagtcaaggtatgcagtataacgttaaagtcaatctcgttctctttaataatgatacagatacgctgacagttagctcggaaggtaaatacggtgatgcacgatttaatgacacctggtttggtgttaatgaaagacaaagtacaaattcaggttacagaaaatacaatgccggaagcggaatgagcagtattgattatactattaactggcagcatgcattcactgactcctggtcaggatatgctgattttcgttacaccactctaccgaaccgtgtaaacagaagcccgattgttaaaaaggatgattacatcacttttactattggcgcattatataatttttaa

SEQ ID NO: 166226 - DNA, 885 bp, Enterobacter cloacae
atgtttttaagtaaatttaaaatgattgagtatcagttcaaggttttcagaacactgtttgttagcgatgaggagtatcgcaggaaaaaatttaaaaaaatttttggtaaagaagtctccttgacatcaccgaaaacgctgaacgaaaaaattaattacagaatggttaatcagcgaagtgatttctttacgctagttgcagataaaatttccgtacgagattatgttgaacttgccattggtcctgagtatcttgttcctttgttgggcgttttcgaaaagccagaagaaattgaatttagcagacttccattgagtttcgttatgaagtgcaatcatgacagtggaagcgcaattatatgcaataataaatataatcttgatctggaaaatgtcatccgccattttaaacagcatctcaaaagaaatccgtattacaccaaccgtgaatggcagtacaaaaacattaagccgcgtatcttaattgaagaaaaagtagaattgtttcgtggtaaatcgcgggataccacaccagaaatgttcagaatacattgtttccatggcagaccacactttattgaggtcgacttcacgtcgggcaatggcaacgagcatgtaaacatctataacactgaatgggagttggagccatttactctggggtatgccaacacaccgaatccaatcgacaggccagcatccttcaataaaatgcttagcttagccagtaagatagctattgattttgactattgccgtctggattttatggcatctgacgacgctatattttttagtgaaattacactgacaccagaaagcggtcaactaaagtttaatcctccagaatgggacgcaaagcttggccggttgtgggtgctttaa

SEQ ID NO: 166227 - DNA, 612 bp, Enterobacter cloacae
atggacataaccattaaagaagttcaaaagaaagaccatcgcagagccaggcagtttgctatttctggcatgcatctcagctggtacacatcaagtaggctgcatcttttattgtacatacaacactactggaattatgagttattacatgcaactcatcttatgggagcttattcaggggacaagttgtctggtgtacttatagcaaaaatgaacgatcacccagcaatctgtagttccgttttgcggaagattttcgttgcgacattagagtggattataagaaaattatacggtcattccggtgaggaactggacaacctcaatatgaaaatgttacaggaaaattcacattgctctcagttcgatggtgaaattactttttttgccgtcgcccctgaaacgaaaggagctggaattggctccctcctgcttaaagagcttgaggccagggaaaaaggaaaaaaaatttatcttttcaccgatacgggttccacgttccagttttatcagaaaagaggttttcaggaggctggcaaaaagagagtgcacctgaaaataggcccacgaaccctggaggtaacgtcttacctattttgtaaaaggttgtga

SEQ ID NO: 166228 - DNA, 798 bp, Enterobacter cloacae
atgaagatgtctcttcttggtctgccaagcgaatatgttgcccagtcacagcagcttcctgtggctatcgactatccggcggcgctggcgctgcggaagatggctcttttgcatgtcgaactgccgaaatacctgctggcgccggaagtgagcgcgttactccattatgtcccggatctgcaccgcaaaatgctgctagagacgctttggaacatcggcgcgcgcatcaacgaagcgctggcgctgacgaggggcgatttttctttgacgccgccttggccgtttgtacagttggccactctcaagcagcgcacggaaaaagcggccagagcagcagggcgtgcgttagccgacagtcaggtacatcgcttggtccccctctcagataatcagtacgtcagccagctgcagatgttagtggctaccctgaaaattccgctggagcgtaaacacaaacgtaccggcagaatggaaaaggcacgcatctgggagatcaccgaccggacggcaaggacatgggtgaatgaagcggttgaagccgctgcggccgacggcgtgaggttctcagtgccggtgacgcctctcacgttccgtcactcctatgccatgcacatgctgtacgccggtattccgctgaaggtgctacagagtctgatggggcataagtcggtaagctcgacggaggtgtacacgaaggtgtttgcccttgatgtcgctgccagacaccgggttcagtttcagatgcctacagatgaagcagtaagtttgatgaagcagattactcaacatgtggagtaa

SEQ ID NO: 166229 - DNA, 510 bp, Enterobacter cloacae
atgattaaagaaattccattgctctcttttgaatatctgcattacatcgttgatagccttggatggatgctgccggtttatttatatctcttcagttttatttacgcatttattcatgaatccggacatgcccttatggccatgtgcctgggaactcgggtaacgcgctttcaagtggggaaacctgtcttgttccggttcaaaaggggcagacttatcctgaagtttggattgctttttccggacggaggtgtcagttaccactatgcgaatgatgcccccaggtggaaagttatggcggcggcgctggccggtccattattgcccgtgattctgtcagtaccagtttttactcttaccggtattcagccactaatggtcattgccgggttgattgtaatgatactgactctggttaacctaaatcccttcatgatggaaacagatggccagaaagttctcaagcatctgcatgccatagttcaggggcggaaggtcctgaattcctga

SEQ ID NO: 166230 - DNA, 354 bp, Enterobacter cloacae
atggggcgttccactaaggtgattatcaaggggagggagtttccttccaaaaaagcagctgtggggcatttcatggatcagcgtgaaacagtcaaagaagcgggcccgctgaaagagggaaaattgtttgatgaattacgcgagctttatctgcgttactgcgaagtgaccagctttgatcttaatggaaggattatctatgccttcagtgtggattatgagccgcgacagaacggtcagacctgggcatctcacctgtgctactgggtacatttctcgccgaagcagagtttgtccttttcggtcagagaagcggtggatgaaattgcaaaagctgctgctaaacaaatttaa

SEQ ID NO: 166231 - DNA, 774 bp, Enterobacter cloacae
atgttgattctcgattgctcctcacggtctcaggcattgcatacactatctgccggatttggctgtccccctgaaaagctgaaaaaggtgctgctgtcgctcgatctggagcatatctacgaaacagatcaaagtattatagtggatgcaaatcagtttctgaaagattatgtcagcgcggaactgggcgaaccgggtcccttcagaagggcgctgtggtttcatggcaccaggactttcgtcgataatacttttcctgcagggttacttgcgctgaatcattccgaatcgcttgcgatgaagatgctgcttacccatgccccgaacgacatagtccgtaaacacctgcaggaatgggttgttccggggggcgtcccggacgagatgtttcagctcagaacaggcgataaaacgcactggggaccatacggccatttggtccgtgaattacatttccacgccagaaaaaatgggctgcatgattatctccggctgccggaactggtagaggacgtctgtaacgcctatcaggagcagtacggccacgatctgacgccgcattacctcagggtgcttcatccctgtattatctggttccaggcggatattatttatgaaaaaggggcacttgagacggccctagcatatgcctatacatcagtccgggacctcccgccggacacaaacgcaactttaggcatagactgtgagggtaaatcagtgtccagatcggccattgctagaatcgagtttctgccgaccgggcagatttaa

SEQ ID NO: 166232 - DNA, 198 bp, Enterobacter cloacae
atgggaaattattcagattttgagaccgaatttgttcagcgaacactggcatttatcgatcagtataacgaaatgattgaggtgcagggcaagccgttcagggagcagtacaactacacgttgaccctgaattgccttctgggtcttatcgtgttgcgaaagagagggcgctctctttcctgcctgctgaccgtttaa

SEQ ID NO: 166233 - DNA, 228 bp, Enterobacter cloacae
atgaagttttccacatcaaaattaccgttcattggttcggtgtggcttttggtttctttccggattttcatattccggtctgtaatgatttctttgcagatgtttgggttatttcttttcttttatttatttcatgcagtattccgcaaggccacagattctgttcgtttattcctcaaactcaatggtaaaagttttgctccgttccaggggggggcttttatatga

SEQ ID NO: 166234 - DNA, 531 bp, Enterobacter cloacae
atgaaaaaaaatatcgataaatatttcaatggcatcttttgtgtatcactgcttacagcagcgtttagttgttttgcttcgctgacagtggtcggggatctgggcggggagtcaaccagaccattattcgaggcgattaattcaggtgaagagtcgcatttatccgatgtttcctccttgcctggacctccgtcatcgctgtctatttccgatatgttgcccgttaatacacctgaaatgacacccggaaaggtgacgtcacgcccactgcagttactcggtttgcctcctgtttttgtgattggcgatgatgatatttcccgagcctggttgcggcagcgtggtgctgaactgaaagggatgggtgccacaggaatggtagtgaatgttacgactgaaagtgcgctcaacacgcttagaggactcttgccaggtactgagatggtccctgttcgcggcggtgatttggcacagcgattgaaactgacgcattaccctgtcctgattaccgctgatggattagcgcaatga

SEQ ID NO: 166235 - DNA, 393 bp, Enterobacter cloacae; identical to SEQ ID NO: 109390

SEQ ID NO: 166236 - DNA, 504 bp, Enterobacter cloacae; identical to SEQ ID NO: 109391

SEQ ID NO: 166237 - DNA, 447 bp, Enterobacter cloacae; identical to SEQ ID NO: 109392

SEQ ID NO: 166238 - DNA, 516 bp, Enterobacter cloacae; identical to SEQ ID NO: 109393

SEQ ID NO: 166239 - DNA, 822 bp, Enterobacter cloacae; identical to SEQ ID NO: 109401

SEQ ID NO: 166240 - DNA, 456 bp, Enterobacter cloacae
atgcgacagcagttgctcgttgatcttcactcccttacgcttcagagcatcgacagctctttccatatagacggtattccacagggatatggcagctgtcaggagcgtcagtccactggcgcgatagctctgattttccggttttcggtccctgagttctcccagccggtgcataaataccgctcgcgccagcgcgttacgggcttcacctttattcagccccgcctgtacccgccgacgcagtgcaggatcgcggaaccagtcgagcataaacagagttcgttcaatacggccaatttctctcagtgctttggccagcccgttttgcttggggtagctggcaagctttttcagcatcagggatgccgtcacggttccctgctttatcgaggttgccagacgcagcacttcacgccagtgaatttcgatctctttcagattcaggctggttgttga

SEQ ID NO: 166241 - DNA, 228 bp, Enterobacter cloacae; identical to SEQ ID NO: 105755

SEQ ID NO: 166242 - DNA, 342 bp, Enterobacter cloacae
atgaaaacgggcataccgatgtttaatgagtcttacttttttttgtttattgctgtcgtattggaagtaactgcaaacttttttctgaaacgctcagaaggcatgaagcacattgtccctggtgttaccgggattatttgtattcttgcctcatttagcgccctgtcccgggcccttaaggggattgatatggcgacagcttatggcatctgggggggctgcggcgtggtacttaccgcagccattggctgggtagtatttgggcagcgatttgacagaaaagttgccgctggtttggtgcttataaccgcgggtatggttctcatgaaaatggttaattag

SEQ ID NO: 166243 - DNA, 345 bp, Enterobacter cloacae
atgctcaaagcatggctgtttttgatactggccatcacttcagaggtgttcagtgtggtcttcatgaaaatgacctcccacagtgacagcctctcgtctctggcgctgatgtacctgaccattattatatcctttacattaatggctctcgcgctcaagcggatcccgttatccgttgcttatgccacctgggaatcaattgggctaatctgcgttgccgccattggcctgtttttgttcaacgaagcgatttcgccgtttaaagctgtcgcgctgataatgcttgttgccggtgtgatactggttaacatcggagagcatgaaaacgggcataccgatgtttaa

SEQ ID NO: 166244 - DNA, 600 bp, Enterobacter cloacae
atgtcaacggcgattaaacccatgcacacctgtaaaaacatgaggcagcttctcgtggataaaacgacacggctgattcttgttaagggactggacaacgtgaagtccagggatataactgaggccatgaatatttcccgtagccatttatatcactacttcagcaatatgaaagagcttcaagccgagtcgtgcaggcattttctggaggaggaaacccgtcattttcgctgcctgatggccgggatgtcctacgatgagaagctggcggccttcgtagactattatctgcccagtcataaggatgatagctggaatctttacggcgatgtctggcacaaggccgtccgcgactccgattatgcgcagcttgccagccatattcaccatctctggtcggcacttcttagcgagatcttttctgaaatgcatccccccgcactcgtttcccggatggcacgaacggtcatggccgcgctgaacggatacgccagcaccatgatgctgggcgaatatgccagtagtgcgcaggacgcgatggacgacatcctcgtccttatctccgggctatcccggccagggccgactgccctgcgctaa

SEQ ID NO: 166245 - DNA, 639 bp, Enterobacter cloacae
atggatctgaaaccgcaataccgagaactagaagaaaaggactaccaggatgtccttgatcttgttacagaaacatggagctacgcagagtgggttcaaccagatatcattacttccatggctggatacttcctcaatgatgccttgcttgcctctgaccgctgtatcgttgccgaaattgacaggcgcttcgcggggatagtgactgcaagcgttggacaatgcaatcggctggaaggttttctgatgcagcagcagcagaacattcttatgaccctgactgcagacctatcagggagagtcggggtattttatcaatatcttcaaaccaaaaaaattaaccagaatatgctcaacagcgtgaaagtaagatatgacgggcatattccgctgttcatcgtaaaaagcgagtttaaagggttggggctaggatctgctttattcgaacaggtgatggatattttcaggctaaacgaagtgaaaaactactttcttttcagcgacagcgcttctaaccatgatttctaccggcacaaaggtatgacgaagatcagaactcacactttcctgtgggatgaagctgatcccgctacggcagaagattattatctttttgaggggcgggtggcgaaaggataa

SEQ ID NO: 166246 - DNA, 876 bp, Enterobacter cloacae
atgacacgagttcactctatcccacatttgcttgcgtttgaagctgcggctcgtcacgagagcttttctttggccgcggcagagctttgtctgacaaccggagcaatcagtcgccatatcagaaacctggaagctaaactgggcgaggagttgttttaccgggagcataaaaaggtaaaactgacagagaagggaaagacatttgctttgagttgcagaacaatactgggtgatctggcagcggctgaagcgtcttttatggaaagagtcgcaattcagcatgtaaccattaactgcctgcccacttttgccatgtactggttaataccgagactagctgattttcatcaggcctgcccacatattcatatcaacgtcatgaccagcacgggtatggtaactcctggttccgatattgctgttcgacgcgatcccactcattttccggacatggaagctataccttttcttgaagaaaaaagtgtgctggtgtgcagccctgcttatcttctgaagcagaaaggacagccagcagataacacactcatccatatccgcgttcgcaatgatttgtggggtaaatggtctgctcagggtctgacatttccacaaaatgtcacccgtcatctttactttgaccatacttttgccgcaattcaggctgctgaggagaacctgggtatcactcttgttccagttattttttgtgcgaaacacctgatgagcggtcgactcgttcgactggacagcttcgggaccctgatatccggtagctatttcttggttatgcaaaaaagcgaaacgctggccatgcgtgagtttatccgctggctcaagaggaatgtggccactgttcaagaagagtctgatcaatag

SEQ ID NO: 166247 - DNA, 1086 bp, Enterobacter cloacae
atggatgcttcttcagcaggttcgctgcagacgatactgaatatcagcaatgcacttgcgctttttgcctcgtcctggctaagtgactattttggtccccggagagtatatcttacattttcatggctcgggggtatcgcattacttttattcggaatttttgcccattcttatatttctgctgcgttactgataggatttattggtctgacgcaaggaggagcatatacccctgcaattatgctcgcgattcagatgcacagcgctgctaaacgaggttatgccgtgggtatgattctggcttgcggttcccttggatatctcgtttctctttttatttcatcgtgggggtcttcgaactggggaacagcagcggcattttatctgtgtgccggttgtgtttttgtcggcggtattacgagtagccttgcgctaaacaaattttctgatctagtaccaacgaagccaccacattcccgggataaaaataaaattaatagatggaatacgatgactttactcttgttaactggatacatcgctcattgctgggagcttctggggagctgggcgtggacaccaagccttttatatacagctctaatccctgttcagaacagcccggtggtgaatagtatgttgattgcgacggtcattcatctgtcaggtatgctctcgacaattattgttggaaccatttcggattattttaacagaacagctgtgttaattgtaatgggggggatgggggctttgtgttcagtgcttaccggctggtcaattgtatgggggactggttgggtactgctgtgtgctttcatcggaaactttttcattctgggagattcaggcgtactttctgcagctattgcagacaacgtcgaaccgaaggttcttggtcgaataatgggtatccgctccctgttagggttcggtattggttccttctcgccattgtgctttggtcttgttatggatttaacaggtagctgggaattttcctattgcctgctggccgcaggaggagtcgtggcatttttagctgcgataatgatgacatgtaataaaataaagatctgcgcctga

SEQ ID NO: 166248 - DNA, 921 bp, Enterobacter cloacae
atgtggaacaacgtcacgagctccttaacgagcgtatatgaaaacgtcgctggtaatctaagcagggcagttgggtcttccgcaacttctggaggggcaggaggtgctggccagttggcacaggaaacaatgtccagcttcggtataggtcagcttaagcagatggcaatgaagaaagcctacgaattgctaccagatacagttcgtgactttgtctttaagaacgttgctactaccggaggagaggttgtcttctcggctgcggttcaaaactttatgcttgcattaaacgtgatcggttggatttatacagcctatcaggtcactaaaatgcttttagaaatgttggtagcatgcgaccagaaagagatggaagcttctattcataagaatcaaaaatcctgttttacattagatacggaacgatgcgtcaaatatctgaatgttggtttcacaaagaaatgcgttaaaaaagcaacagacatgtgctgttataattccatgttgtcacgcgttattatgcaacaagcttatccgcaattaggaatagaccctgtcgcctctaattgcgtggggctatcaataaagcaaatacagcaactggatttcgataaaattgatctgacggagtggattaatgatgcagttcaggtaggagaagttcctgatcaatattcaaaattctccgaagaatcaattgtggaaaacttaccattccagaatgagaactatcaacttccatcagaacgtaccaaggaagcaatgggcggtgaagaaaatatgataaaggccagacaagaaaatgctcaggctataaaagaggaaaatgtagattgtagctatttacctcgaccggccatatgtgaggtaggttcaactacgctggatccggttacgggcaagcagttgccgaaatattga

SEQ ID NO: 166249 - DNA, 306 bp, Enterobacter cloacae
atgcatcggctgggtgaaatcagagatcgggggctggagaatcagagctatcgagccagcggtctgacgttgctgactgcggcgatctcactgtggaatacggtatatatagaaagagcgatagattctttgagacgaaaagggatcccgattaatgagcaactgattacccatctgtcaccactgggatgggaacatatcaacctgagcggggattacgtctggagaacgaacctcaaactgggacagggtaaataccgcgcattacgctcagtgaatagtaatatgtacaaaaaacaggcttag

SEQ ID NO: 166250 - DNA, 492 bp, Enterobacter cloacae
atgagcagtcttttaacgctggcgaaggacttagagcagcaatcgaaagcgcagcagcagagtaccggcgagatgctgaaagccgcattcagcgagcacgagcagtctgtcagagcggaactgagcgcaagcgcgaggagaatcagcgacgccatcctcgcccacgagcagagtatgagcgaggcgatggagaaaaaccggcggagcgtactgcggactgccgggcggacatggctcaccatcctgatggtgtcagcgctgctgatcggcacgagcgggagcattctgtggtggcaggggcagcagataaccgacaattacacgcatcttcgtcagcaggaagataccctggcgaaaatgaccgcccggacgtggggagtgcgctatcaggagagcagcgacggccggaggtttcttatcctgccgccggggatgcaaaccgaagccatcccctacgacgggacgacatggatccgcctgaaacaggagtag

SEQ ID NO: 166251 - DNA, 138 bp, Enterobacter cloacae
atgacaatagcctttttctgtcatattatgctagtcaaatataaatgtaagaacaataacaccacccatagatatcgtaacatcctgaaagttgtgttgcgatttgatggagcgcatcttgtttttcatttattataa

SEQ ID NO: 166252 - DNA, 138 bp, Enterobacter cloacae
atggctgagggtgtgagcgagcgtattcagctcatcgtaagtgggtgccttgacacgatggaagcgttgcttgccatagtcatcttcggcatagacaccatcgagaaacagcatgtggtagtggacattgagatttag

SEQ ID NO: 166253 - DNA, 666 bp, Enterobacter cloacae
  misc_feature (48)..(57): n is a, c, g, or t
ttgttaatggtggcgatgtctttatttcaactaataccgataaaccannnnnnnnnngataaaccaatcgggattatgttgtctgaagatcaggtacctgaatcgacctataacctgaccctggtaccgcttgatgttcccggtgcgatgatttcagttactacatctttaagcccatctatgcaagccaaacgtgaaacctcattggataagcaaaactatgaggaaatgttggcccgctcccagtcagaagaactggctccaacggatccaaaacaagacgatcataaacaaagaatcattgatttattgactcctgtggctcttggtgaggtcccttcaggattcagtttacaacaggaccgactttctcgtattcctgcgccagagcagtcaccatgtaactttaatatgtatgcaaagctcggtcagagactggttggctcacgtgaacttattgatgtaattcttgtgaaaaacgataaaccatacggtcaaatcgttgctgatcagcagtgtatggcagaaggcgttattgcaagtgctttatttgataaagcatacctgcaaccgggagaagaaacagagctttacatagtccgggataaattgttcaaggaacgcgaggcccgggttacaaccagaccaagtctaatcagaaaataa

SEQ ID NO: 166254 - DNA, 687 bp, Enterobacter cloacae
  misc_feature (673)..(682): n is a, c, g, or t
atgattaaaaaaaagggcttaggcttcaacgcaattacagcattgatcatgctcacgacttcgaactgcgtaatcgctgaagaataccaattgccagcaacaattaataacccggttgtaatgccagttggtgctgacggatttcagaatggagctgcaaaagccattattccgggtcaagctggttctgaacagtcaggtgcacaaacaaaccttagtgaagccggtaatgcgcagggacaaaaacctacaactgatctccctaccgtgcaactttccccagccagcaatgcttcgcctgcggtaagcgctattactggagcattatcaaataatcctagtctccccggatttgacgcacagacccgatctggtgcaattgatagctatgggagaccaacaggtacctcttcccagcagaatgcaaccaatgcgaccgccacgtcaaaagccgatgaactttatgtcgaagctcgtaaccgatataaagaagttcagcgtgtaaatgtgccgcctggtgggaatgtggtactgccagtttcacgaggacttcaaaacagaatatcgaccagcttcaagaatgcttctgtcagtacttctacccctgctgaagaggcaagcatatttgttaatggtggcgatgtctttatttcaactaataccgataaaccannnnnnnnnngataa

SEQ ID NO: 166255 - DNA, 525 bp, Enterobacter cloacae
atggccgtattgaatataaaaattgatggcagactgaaagaatctactgatgcaaaaatgaaagcattgaatattacacctactaaagccattactttactttatcattacatttcagaacataatcgtttacctttcaatgtcagcactggcttaagaaccagcgatgagattaagaaaatcatcgatgataattctgcttctgctgtagcagcactcgccagcatagttaatttgattatcaaagaaggcggcattgagaaattacgtattaatttggctattgccgatttgaaaatgcttcgtgataaattgaaaaccgattgcgacaccatacaattatgcgacaataatgcaatatatttggtgcgggcttgtgaagtaatctcaaaaatcgattcggcgatagctcactgtgaaattataaatgggcagtctaaagaataccttaagattgagtactcgatgactgtaaaaataaatgcaatactggattctttagagcgccagaccgctgctctttag

SEQ ID NO: 166256 - DNA, 696 bp, Enterobacter cloacae
atggcggaaaaacttgaaataatgtcaaaaaatatgcaaatctggaatgctactgttgcacatgagttaagaacgccggtgactattttaaggggaaatttacaagctgttcttgatggtgtgataacttcggacaccgaacatacatcattactcttaaaacagactgataatctcgcttccatcattgatgatttacgaatagtcagccttgctgatactggtcaattcaaactgtaccgggagcatattgctattgatgaaatgttgagtgacatctataaatacatggagccagaattcaagcatcacaataagatcttaaacttagttgcagaacagagtattggatatgttgatgcattacgtttaaaacaagcaattatggcccttctgcataatgctttacagtattcagtagagggaattgtatcgtttggatgtcgtgttattgatgaggaattgataatcacggttgaagacgaggggcctggtatacctgaggattatcgcaaaaaaatattcgaacctttttaccgtattaacgaattccagttcgtagccagaagttcatccgggcttggattatccgtggtgaaagccattgcagatgcacatggtggtaaagtacgatgttcagaaaattcaatgggggggactgcatttagcattgtactctcaatgaattataattga

SEQ ID NO: 166257 - DNA, 492 bp, Enterobacter cloacae; identical to SEQ ID NO: 166250

SEQ ID NO: 166258 - DNA, 492 bp, Enterobacter cloacae; identical to SEQ ID NO: 166250

SEQ ID NO: 166259 - DNA, 492 bp, Enterobacter cloacae; identical to SEQ ID NO: 166250

SEQ ID NO: 166260 - DNA, 330 bp, Enterobacter cloacae
gtgaagaagtggcagatcccgcgattcatcaacacggataaagcgcccgcctatggtcgcgcgcttgctctgctcaaacgcgaaggccggtgcccgtctgacgttgaacaccgacagattaagtaccggaacaacgtgattgaatgcgatcatggcaaactgaaacggataatcggcgccacgctgggatttaaatccatgaagacggcttacgccaccatcaaaggtattgaggtgatgcgtgcactacgcaaaggccaggcctcagcattttattatggtgatcccctgggcgaaatgcgcctggtaagcagagtttttgaaatgtaa

SEQ ID NO: 166261 - DNA, 330 bp, Enterobacter cloacae; identical to SEQ ID NO: 166260

SEQ ID NO: 166262 - DNA, 579 bp, Enterobacter cloacae
gtgatcaccgaattccgttcagaactaccgaccgggtataacgtttcggtgagcggagcatctgaggagtccgataaaggcaacgattctctgatgtcagtattgccggtgaccgttatcgttatgcttggcgtgatgatgattcagttacagagctattcgcgagttatcctcgccacattgatggctccgtttggtttcattggcgtggtaggcgctttactgccaacaggtacgccattgggctttgttgcattgcttggcgtgatagcactcagtgggatgataatccgtaatgcaattatcctgatcagtgaggttgatgaaaaccttaaagcgggacttgcaaaccatgatgccattgtgaacgcagcgaagcacagagcccggcccattatgctgactgcatgtgcggcgattttcggcatgatccccattgcaaggcaggttttctgggggccaatggcttttgcgattatcgggggccttatcgcagcaacattctttactttaaccctcctgccggtcttgctcacctatttactggatcatgagtccagacggcgaaatgaaagctag

SEQ ID NO: 166263 - DNA, 579 bp, Enterobacter cloacae
atgaaaatcgctgagcacaatccccctgactttgttattctcgatataaaaatgcctaaaaaagatggctggcaggtattagccgagttacggagatttactgacgtaccaataatgatgttgactgctatcgatactgacattgataaagtcttcgctctgaaaaccggcgcagatgattacctggttaagccattcaatcctgctgaattaatggcgcgcattcatgtcattttaaaaaggagtcattatcatcagcagaacgaaagcatgactacttttaaaagtaaaaatatggaggtaaacaaaataactcatcaagtgttagtcggttcaggaaaagttgacatatcagcagaattgacttccactgagttcaaaatattatcacatcttattcggcatccaaaacgagtatttacgcgagaagaactcattaatgcatgtctaccggagggtaatgctagtgagcgaaccgtcgacagtcatgtcagtaagctcagaaagaaaattcaacaggcgggggtctattttgtgcctgagagtgtcaggggttttggctatcgtttaggggattaa

SEQ ID NO: 166264 - DNA, 531 bp, Enterobacter cloacae
atgcaatatcccaccgtagcagtaaacggcatttccgttcgtgtcgatgacgaagggcgatacagtcttaacgatcttcatgctgcggcagtagccaacggcgaagccaccgagtcacaaagacccagcgtctttctccgcagcgcccagatcaaacgtttcgtaaaagccctcaaatccaaagcactaaaaagtgctttggaacaaaatcaaccacttagggtaataaaaggtggtgatcaaagtggggcatggggcgttgaacttctggctattcgctacgcggcctggattaagcccgaatttgaaattgaggtatacgaggttttcagaacagtagttcgcctcggcattaatgccatgtctcgcctcaacaaaatcgaccatgtgattaataccgaaaccaaagcgattagccagtgtgccagccagatggcccggtggggagttggcggacgcaaaaagctactccatgcagcgcgtgatcgcgttgctgatgaggtgcagatgtatttgccgggcattcactga

SEQ ID NO: 166265 - DNA, 288 bp, Enterobacter cloacae
atggataagggaatgaaaaaactaccaattattatgatctgcgctgggcttctcgttggttgtgcaggaatcttggaaaagcaggagccaatatgtgaaggcgtggcgatgttaggcggacagaataccattgtgcagatttatggtatccgtaacgtagccaaccagacccagtatcgcgccggctatccgttcaactggcagtgggtatcaaagaataatttctccagcactacctgcgacaagaagccagaggttcgtaacgaccttccaaccaaatctgcctga

SEQ ID NO: 166266 - DNA, 297 bp, Enterobacter cloacae
atgaaaaaaatattgatccctgcaattgctattatcttggctggatgtgtttatatggggaaaaacttcgatgaaactaaactagcgagcatctcaaagggggtgactacaaagcagcaggttgttagtctctttggcgaaccaactacgtccacttatgattctgacggaaaccaaatattgctgtggtcgtatagtgaaggtaatgctctcggtggcgctaattcaaaaatactgagtgtcaaactgcatgacggaaaggttgaatcctactcggtaagtaagtcagcaatataa

SEQ ID NO: 166267 - DNA, 882 bp, Enterobacter cloacae
atgcagcattcaacagagcatgaaactatattattaggaaatctatggattgataaaaaaataccaccattagaatattgttcatttgaacgcgcttccagactattagaatgcgagattgaagatttattacacctatacgaaataggtacttttaatattgcattcaagtcggatggacttgcagttagatttaatgtcaacttcctcaataacaatcagacacttgaaactgatttaattcatcccgtattaactaatcaatcactagagatggagttatcgactatatggtatgatcttaaagatgactcctttgaacattttgaaaatggatttcaaattataggatttgcctgtggtatttggtacgccgatgatatgataagtgacataaaaaatggattagctatagatccagattatgaattcagacttaaaccgataaaaatacgagataatgttttaatggcaacggccacatatgaaggaaataaggacattgatattccatttgaagatcttcttatcatgcgaagagatttagaattaatatggaaatcagtaaaaactggaattcctatgccgaatttacttacgaaaagaatttcatctgaacctaaagcactcaagcgagtaaataatactgctgaacatcatgcaaaaaatagggaggggttattaaatgcagcaatatatatattggcaaaatacccaagcgaatgtcgtggtgaaagaaaagagataagtcctgaaaaatggactaactccataattaaacatttaggagagttacctcctatatttattactaatgaacaagaaattttaagaaaattacgattagcggttaatcatgcgggattaaaaaaaaaggggtag

SEQ ID NO: 166268 - DNA, 1782 bp, Enterobacter cloacae
atgaattttgatgctacaccattaaacattaagaatatactttccgtgaaacagcgttatgtaatcccgaggaatcaaagagaatttagctgggagaaattacaacttgatgaactatggcaagatgtaattcgaaacataaggttaaactccaaaggtgaggagtttgaattcaatgagtattttataggcacaatagtattatcaggcgcagatagcgatgatgtattggaagttgttgatggccaacaacgttttagtgttataactatattgctctccctgatatctagaatcctaagaaaaaatgggaaaactgattttgccgatgatattttcaaaacctatatcgtaacggcgaatcaaacattcaacagaaactctgttaactcaagtggtgagtcggtcgtagagaaactgtctaagaatagtgacagagagtttttcaagcgtagttttcaagataaagacgagcacaaagcagcaataacttgtgacgaagataaaaaaatccattatgctggtatttatttaagcaggaaattaggaaagaaagctttatgcagttcattactacgcgacggggcagcaaaatataaaaaagatgattacattttctgcctccaagcagtttatagcatgattaccaactaccttaagctggtaagaatttcagttggtaaagaagatgatgcttacgatattttcgaggttttgaatgcaagaggtataaacttaagttcaatcgacctaattaaaaataaagtttttcagagctgtgttgaaacatatcctgtagataaagccaaggaaaaatgggattatatagttgctagtattgaggaaagagatagcagttcaaccatggccgattacgtcaggtgttggtggctttcaaaattcaactatattggtgaagatcaattatatagatcttttaaaagggagttgaatgaaggtacttccggaatgactgcgacatcttttcttgatgagttacatagcgatgttgatttatattgcaagataattggtccagatgctgatgactggccgcagcaggatcaaagaaatattttcaactcgcttaaggcattcgagacattcaatgtatcaatcccacgtccatttatattatcgttattaagaaaaagaaaaaacaaatcaaagagtcttacacaagcgcgtttaattgagtgtctatcatgccttgaacgatttcactttagatttaatgccatttgtcgtttgagaccatcgggtattgatgctaagtattccgtactagcagtcagccttaacaaggcagctaacaaacgcgacatcgaatcagttctagatgatgcaacccagtacttcgtaacaaaaggccctagtgaacaaatatttactgatgcattcgtcaaaaatttattttatacaaataagaaaacatcacaacgtaaactcataatgtacatatttgaacgcttagagaaaaacattcgtggcacacaagagcttagattagatttggtttcacttgaacatataggttcacaaagtagttttgacaccgaaatagttggactgatgggtaatttacttccactatgctttactctgaatgagtcttgtagaaattacgatctgagtagaaaagtagtggaatataagaagtcagatcttaagattgttaatgagtttctagaagaagttgctgcaaatggtgattcatgggacgcaaagagagttacagatagaacattgaatttatcagggaaggcattcaatctaatctag

SEQ ID NO: 166269 - DNA, 216 bp, Enterobacter cloacae
gtgagttggtccatcgattttatgcactatgcgctggtgtgcggcaggcgcttacggaccttcaacgtagtggatggttttaatcgcgaagcgctggcgatcgaaattgacctgaatatcccggcgcagcgggtcgtgagagtgctggacaggaacgtggcaaactgcggatacctgctgaaaatgcggatggatagcggcccggagctggtctag

SEQ ID NO: 166270 - DNA, 306 bp, Enterobacter cloacae
atgtccctagatgagatcaccatgcgcaaagccggattaaccgaacaccagatcatcgctgttatgaagtccgtcgaagccaaacgtaccgttaaggatgtctgccgcgatgccgggatctctgaggccttgtactataactggaaagcgaagttcggcgatatggaagtctctgatatcaaaaagatgaaagaacttgaggatgaaaaccgccgactgaaacagatgcttgcgaacctgagtctcgaatgccgcggagtgaaagacgttattgaaaaaagctttaaaaccagcgataaagcgtga

SEQ ID NO: 166271 - DNA, 1086 bp, Enterobacter cloacae
atgaatagtatttttgcaagagaaggagacgaaatccgggttctttcactattttctggctgtggagggatggactttggtattgaatctgccggaggaaagattgtttttgctaacgatatcgttgaaaacgcgtgtaaaacattagccaagtattttcctgatactgatgttaagcatggcgatatctctcaaattcaaacttttccatctgtggatgttgtcgttggtggctacccgtgccagtcattttcgatggctggtaacagaaagcccagcgacgatgcgcggaccaatctttataagcaatttcttcgggtattgaatatcgttcgacctaagtattttgtggctgaaaacgtttcaggattacagcagttgggcgcaggtagctttttagaacaacaagttaacgcctatcgggatgcaggatatcaagttagtcaccatcttgttaatgcaaaatcttacggtgttccacagtcacgcaagcgcctgtttattattggtgtcagaaacgatctggggcaatattttgaatttccggcagcaacgcatggtaaagcgaccttaaagaacccgcacttaaaaccttatgtttcccatggtgaggctatccgcgatttgccattatggccagagggtgagttttacgaacgacctcacgatcccgaggggcacttctcatggtactttatgtccagaaatcgtaaggccaaatgggatagtcctgcttataccgtcgtagcgaactggcgacatgtgacgttgcatccagccagcccaatgatgaagttaacatggtcaaatcttgaggacggctggaagcagcgctgggatttttctgaagaatatgaacatgttgctattgattcaacccggcctaagctggaacaggctaggcgtttgtcatggcgggaatgtgccagaatacagacgtttcgtcatgattttgagcctattggtgatattgaatctcgatttactcagataggcaatgcagttcctccgttactggccgaaatcatttttcaacatctattttctggtgatgggttgaaaatgaatttgaggaagggcggataa

SEQ ID NO: 166272 - DNA, 2778 bp, Enterobacter cloacae
atgagtatatctttccctatttctttagaagagtggaatgcagcactagttaacgccgttttttttgagccttcccgtgcaggtgtatttttgagtcgaatcgatactactggaagaatttttgagcaattggctggttctcgtagtaaagaagaagctaagcaaagctttcttgattcatttggtaaggatgaaagaaaaatacaacgttatctcagagatgattcaacgcttgatagtctgactcgaataaaaggcatcccacctcatttttctattctatatttaacgttacttgccgccagtgctgataatgaaactcatgatgaaggagactttagggttagattttctgtattattgggactgaataggaataagaaatttatttttagagaactgcctagcttatggcgaagagttgaacaatggagtcaaagtaaacagggttgttctcggttatttttaccccatccccaaaatgaaaagctgattgggtattctaagaggctttcttttccttgttatagagatgaaattcgtttgcgagccatactggttcgtaataatctggacagccattcaacatttgaatctgttaataaagtaatacaccagagaattgatggttttagtgaagtattcgtcagtgaattcaaagtattctatacgctattatcaactgcagccatgcagcaggcatatagtagcccgttctggggggctgtgagggatattacgtggcatgaagaaaatcaacaagccacagagaatgggcttttctgcattcacttagacgctaccgatccgcaacttccagaactttatctgttaatggatgatgttggtgctcagactttggataccgttaaaactgaatcgttaccagaaaaattgggaaattacagtagcatttattatcagaccaacgttaatgctacattaacgagtttacttccatttctacaaaaaagaaaaaaaggcttaactggatcgcgggttggcatggcgctacatgctggttgtttaccccttttcagggatgattctgggtttatcagttcggatggtcattattttgacgatggtctggtttgtttgattattcgtcatgaatatgctgtacatatccgcaccatgtttgaacatactggcctgactgttatgacgctaggaaaaaatacaggttctgaagattgggaagttctcgtctttgatacgatgagtagacaggaattaaccgaacttgccaaattacttcctggtgctgctcgtagatttatggttcagagttggatacctgctcgaccttatatcacaggtgcagcccgttttggacagtcaatattacttaacccagccagtacgccggttattcatatggtgggtgccattggcggggaatatgtaatcagagattccaatcatatagaactggtcagcggcatactaacaccaacacaaggtggtgaaggactatttatttctccggaaaaactcacttcattatcaggacaggcgttttgtcgctatcggttaacgcttgagaaacaggttgaaccgttggtttttgacattcacgtcctcgatcatgcgccggatgctccatatcgtaaagttgccgaacaacatgactggcttattgatggtcaacggggaacattagtgccattaaacaatgttgagtcaatggagtgtctgaaaaaccaaaaaactacctcactaggcggatcatggtcgatatggcgacttgatgaacgtgtgcctgtagagagtaaacagtttgatttgcacatgcttcctgccgcatttgactggttagctgaagcactggcactgcgttttcaaaaacgcagtacgctaccatttgatgagcttaatacacatttaacgcccgtatcactagcgacaggtgtacctgcatggcggttgcgccggttgctttttgcctcaggctggctttgcgtaatagaaagacgacatgcgccgtatccggtggtatcactggcaaaacgtacattgtctgtttgtgagaaggtagaaggactcactgcccgagttggcggtatgttgacgaaaagcgagcgtcatcatctgcaaggtttgttgaaagagagtgaacgggtaagacgttggtcaacagtggataataattttgcacttggcagtattgaattgattttgtcaggaaccgatcgcgtaaaagatttgcttgaacagttcaattggcagtttctagccagagaagatttttctgttggcccattaagtggcgtgctgttatccatgactcaaataaagcaagttccagctttgccacccgatatttatgtggcgttctggcagacaaaaaaaaaccaatggtcagaagaaatccagccaacaaatagcgacctgttaatgcgctgtcgggaaaagcaacgtaatcgttattttattcgggcagatacggggtactggcaaactgatagctttgcctgggcgttaatggctcacgtcatgaggtcggaaaaaacgcttggtactcaaagtcactatggcgatctcttctggtctaagtcactaattactttaccgatttctgtcactcagtggtggttacatttcgccggcggttgttgtaccgtcagtgatgacggaaggataatatttgctggtagaggggatgaattgtggggaggcgttgagtgtgatgataatgctgttttcccggttaatcgagcagtcactcggcgggcgagagctttggcgctacgcaggataagcagcatcaattaa

SEQ ID NO: 166273 - DNA, 2814 bp, Enterobacter cloacae
gtgtctaaaaaacaacatatcattaaagaaagattgaggcagatgtatctctttggtgcagagccatttgagttgatgaactgcctgaaagaatcgcagcaaaagctgatcatggctggtgctaaagcggacaatttgccaaaggttccgaacaagattttacattttttgagcgcattaccacctaaggcccattccattgtgctaacctggtttcgtactcacgtacaatttccagaacaaggtgatccccaaaaaatcattcatgagattctgctcgcagaaaataacgataaagatatctcatcaccaaaaccgctatggcgcgcaatccttgggttctacgtcactcagccttgccctaacatcgtcgcacaatttcttcgcggtgaagaaattacactactccataatgatgatcctcatgagtccagcgatagattacctgagcagtcaacgattagtgttactgatgaagatatcgagcagtgtctattcgtaagtcagggacgtgacatatctccttcagatcgaataattccggcgttcgttgctgggcttgttgctacgttgaagggggaaacggaagttgcaggtcagtgggtgtcacagttatccaatcactcactgcctctggggcaaaaatttggtaggctcatctcaacgtttggcgtcgttcgtcctcaggaagaggctgacaacggaatagtattattggcagagcctgttgcgccagacgatatcaatggcgatatcgatggagtgtcctttgtcggtaaagtgacgaaagtgcttccctctggcgtattctttgtttcgcccgttggcctgtttattggcgatgaactgcgggatctttcagatgctcacagccatatgctctatcccgatcgtggcgaagttataggatttttaaatcattttacaaataatgtgacccatggggaattaggcatatggcaagcgagacacaagccatccgataaaacggcccagtgtgcattgactgagtaccagtctcgcgtatattccgttgtcaaaatcccctatgattctggcgaaccggatgcgattcgtgaatggctattaacctgttaccaacctcaagataaatctcctactatcttcttcttaaccgatggtctggcgctaagattacccggagacattcttgatcctaaaaaatatgattttgacgtacctctggattcttatcgggaattaagttgtgtggaactgcgctctcagtcaatcactatagtgcctcaactccccggattgagcgaaaaatatgattgtgcgcctgccattacatggataaaacggctgttaaagttagactattcatcgacagattttcctgttttcagcaaatcacacttacagcgtttagctcactttatggctgaatatgagtcagataatcgaagtgcgtatttacgtgcattgacgcaacttgagaaggttgcggtttcaagagaatttctggacggtagcattcaacaactgttgacgttgccgacaataaagacgcaaatctatgcagagaagcaagtaatactggctcagtatgaaagtgagcaggaacaactcagacagacgattgcatcactgatggataagaaggcgcagttggatgcagaaattaaccgacaggaaaagacgctaaaaagcgaaacaaaccgtataaaaaaagcgctacgccagcaggaagctgagctggattcacgaatcaggcaaacctttgagcaagcgtctcaggcgggtatagaaacgttggcacagacggcgttgttgcgaacgatgatcgctggttcggccacacccacacccgttataccatcagaacgaatcaccgaacccgccttgagccttccgttacctcagtctttactaccgccggaagtaaatgaaataaacagcaaaagagtgctacaggccgcgatcgaagaacaggcagcgattaccggactaagcgaaaatctgttgttcagtttgattgctgccgcaagtgttgtatcagttgtcggattaacaggaaaatacgcccagaaaactgtcgtttctttagccaatattctgtcgggaagcatatggggggaggtctctattcatggtgatctttttagtatcagcgacttaatgaaatcgcctgtgctaatcaggagtacaaatagcacgagctctatgacgctgggtgacttcttagcgcaccaacaatcaagcgggttaatgacgatagtaaaactacgtgggtttaaccgaatgccgccggaaacattacttcccgaacttaacgaatgcctgtttagcagtgaatattctgcgggactatgctggaaggatcaaaataataccttgcggcacctttcgttaagttaccctgtattgtttgtattgacgtttaccgttggtaaaagtacgttcccactacaggggccagttgctaatcagttgcccgtatttatggccgaatatagcagtacacaggttgagcagactgaatactcaccagccgaatatacttcagatattgcgcccgcgtgcgtggcctccaaattatggtcttcgttatacgccgatgctcaccctaaagataatcagcagcaaactatgcgggcggtgttaaacgcattgggttattccgacgaaaaatctcaggcgctggcaatgctggctttcactattgggcgcagtaccacagaaaaaataaccgcagaaattgagccattggctcctgcattgataccttatgttcaggaaatcactcacggtgcatctgcaaccgtgcttgatcatctgttccagctataa

SEQ ID NO: 166274 - DNA, 6015 bp, Enterobacter cloacae
atgaataacccactggaatcatttgaatcaataagggatttttacatcacctatcttgaaactgcttttcgtataggttcacccgatattcaggcatatcgacgtagcttactggaacagcaaggtacattatgtgcagatctttttctggaaccaatgccaagatatcaggattatggtttaaccatcagtgatttacgtaatgtggctgaaggtgaggaatggctgccagggtttaccgagcaacaaagggacgcatttatcgatctttgtctgggagggcttttgcctcgcgataaagccgattccaccaaaggacgttttaaactttatacccaccagctagacatgctgaaaagaggtgtacagcccgcaatgccgggtatcgttacatcaggaacagggtcaggtaaaacagaatcttttctgctgccagttctggctcaaattgtgaaagaagcgagtggttggccgaaaagtccttcgcttaaatgctggcagccgtggtggcatagtggagtaaatactcagcctacgtttatgcgtgaggcagaagcatcagcacggccaaaagccgtacgagcgctaattttgtatccaatgaacgcactggttgaagatcaaatggtgcgtatgcgtcgggcgcttgattcccgagaagcacatgaagcgatggatttacacttgggtggcaaccgtatcttttttggtcgttatactggcgcaacgaaagtcactggctggttaaaccatccccgaccggggagcgaggaaaaagagaaaaaagagaaaaaagagaaaaaagagaaaaaacgggtcgctggtaaaatcactgaattgcgcgaatatcttcaatccgtggaagacactcatcgggaagctgtgcggcaggggattcgggatcatgatgataacctgcaattcaatttccctagtgtatcaggcggagaaatgcttagccgctgggaaatgcaaaaatcacctccggatatactgattactaacaccagtatgctttccacgatgttggtacgggagattgacgatcctatttttgaccaaacccgagaatggattgaacacgatcctgatgcctatttttatcttgtccttgacgaactgcatcttcagcgcggtacagcagggaccgaagtcagttatttgctcaaacatctcataaaccgtctggggctggatcaggaacagcaccgacataagctccgtattctggcatccagtgcctcactgcccgttgatggccctgaaggtaagaaaagcgttgagtatttatgggggatgttcggtcagcgaggactgcctgtgagtgcagcagctaaagactgggcagattgcgtggtgaatggtgccatggtttctccagcacaggataatacgttgcatttccacggagacctcaacgacttctgcaatacggtaagacagctacagggatcctcactgccatctttgcaacactggtcaaacgttgcccgaagtatggggggctatcatgacgagcagtgtatggaaaaactggctaaatgggttgttgtgcaggccgcctgtatgcttgaaaaaggttgctatacatgtgaaaagtctctgcgtgctacatcaataactgctctggcagagcgtatatttccctcccattccgcaggacgtgaggggattcgtgcattaatatggttacgtgctgctacagatagctggcctgagtggttttcacatccctttcccgatgatattccattgccacgttttcgcgcccatgcgtttttacgggctctggaaggattatatgcagcaccgctaccttccccctcaagtgcatcaacagaagaaagagatcagcacttttttgccgatctgacggttgagtctggcctgcgttatggcgagcgtcactatgacaacaaaaaatcacgacgcgtagaattactctactgtgagtgttgcgccacactattttttggcggcaaaccctcttctttctcggcaacggatagccgcgtagagcttttacccaacgatcccgatattgatcaactacctgaacatgcgaaatcggttatggttgaacgacgttccgccgaagaatatgcgttgtttatgccgaccgtcgatcgattctggcctagaggagaaggaactccagccgatgaggactcttttgggaagtggattaaggctggttacgatccgtttactgcggcgattcaacacacgttatcgcctataagatcgattgaacaaactcatattgcaggctggttctattatgtcccatcgggtgatttttccactaggaaaagaggccagtcgtccagccagtcaccggggagtgcgctgcctttccagtgtccggcatgtggtacatcatataaatacggtaaaggtaaactatcacctatccgcagttttcgagtcggctttgcgaaaaccacgcagctcttggccagtacgttgatggctgaattacaacgctctggcgatcgggaacggctggtcacattttctgacagtcggcaggatgctgccaatgcggcgctcgatttggagtcaggtcaccatgatgatgttcgccgtgagattgttgtgcgctcgctgaaggaactgtcagcgagtcagtgctcccataaagaagtgaccatacagttagaacaacttaataaacgcagaaaagaactaattagcaaagagattaaagaggggcggctctctgcggatgaagacaaagaattaggacagctttttggcgaaaaagagcggctgagtgacttattgctactgccacaggcagacagcgtatcgctgagcagcatactggagcctgaagcaccaatcgcaggcaacgtccttaatcctctgttggcaacattagttgacgcgggtattcatcctaccgatcgaacggggatatctcctgtccctgagccctcaaaacaaaaacatgatgaagaaactatcacttttgcatggcagcaattatttgaaaaaaacaaacagaccaaatggtgttggaagaaacatccttcctatgaggataatctggacgttgcccggaaggaaatctcccgcgacctaaaacaactggtcggggaaagcgtgttcagtaaaacctattttgcgctggaagaagcaggatggggttatccctgtcttcctctggctaacaactgctcgcgggaacaattggctgtctatgacgctatgcttcgcgtattggcggatgcctatcgagtcgcaccgtcccagtacacaacaacagaaacgcgctggcatgttgcagaggatgtgaagcctaaaaatcggttgcgccgttttagcgatgagctttgtaaccactccagagccaagacattatcgctgattggggactttctggtgcacctcaaacgctctggtcatcagggcggcattattgacattggaaaagtgcactttcgtttagtagaggctaccgctcctttctggcgctgtagtcactgtggccgcgtccatttgcacaagggggcaaaactttgcacccgctgttatgcgccactacctgaaacatcttctggtaacgcgggggaattacaaacccaaaactatctcggtaaacgtatatcgtatgcttcccgtatcagtagaatgcgttctgaagaactcacgggcatgacggggaatccggcagcgagattacgccgttttaaaagtatcctcattgctgatgatgacgacatattgccaaaagggctggaggacttcgaacctcatcctgagttggatagagccgccagagaggtggatgtactctctgttaccaccacgatggaagtgggggttgatattggcgatctacgcgcagtttttcaggctaacatgccgccgcaacgttttaattaccagcaacgcgtagggcgagcgggacgacgtgggcaggcttttgcatttgtattaacggcatgtcgcagcaagagccatgatttattttacttccgtaacccggaaaagatcaccggcgatctccctccgccacctttcttaactactaaactggaaatgatctgccagcgcttagtgcgcaaaatctggctggtggccgcttttaagtggctcagagagcaagtagtggattcggggcagtcgtggcctgttgatggtgacagacataaacccgacaatcacggagagttttttcaggttcattggctaaaagaaaatcaggcaaactggttgccgcgcattcgtaacgcgctgaaagaaaccatcaacgcgcgtgatgagtttgctcaagcgtgtatgcaacaggatgaaatattctaccgtacaataatccaccctctgacgccggaatgtctaatacaagatattaaatcagtactggacgacgacgctatggcaggaaagggactggcggaagcgttggccgaacagggaaaattccctatgtacggtatgccaacccgaacacgacttctgctgacaaggccggtgagtacggacgaacatgatgtacagttcgccagcatggatcgcgatctggatattgcgattcaggaatttgcaccgggaaaatatctggtacaggacaagcgccgttactttaccgcaggctatgccggaatgctgaagcaaagctacaaaaacccggccgaatttttcactgaagctgacgaaccgggagaatgcagggcgatgaccgtttgcccggtgtgcaaagtctgggtactggtgggctcgaggaccgctgtatgcagcgcctgcggtggggtcatggatggtgctgagcaatattcgtgttacgtacccaacggatttattaccactcttgaagataaatctgcaaaagaagactttgaccaaaccctgacggtggccagcagagtatctattgctgaagcttactcaattgagaatgcagtatctgtacctgactctaatgttgccatccagctaaaatcccaaacctgccttaacaggttaaatcgtggtgtttatgcggacaaaacatggagtggtttcaatgcgatacaaggcaatctacgggttccattcagaaaggcgggagtatatcagccgctatgggcaaaccacgtatggttagacagtaaccttcttgaggctgatttatcacttaaaaaccgctttacccctatgcaggaaagccgagaatcgttttatctctcggcacctaaagtaaccgatttactggcgttgatgttggtggatactccggtggacctccagttacagtacttgcaaggcgcactgactcctgcatttcgggcggccgcgctatctgcttcttttatcatcgtcaactatgcttcgaaagagctacttgatactgatccggaagaaattgaaattctggagcctcgcggacaaattttaaaaaacggtatttctgcaccgatattacaaatggccgatcgtctggttaatggttctggattatgcgagcgactacagcagatcgggagctctggctctccgattgttcttgaagtgatgaatgagattatcaatgacgaaagatcctatccactaaaagagtttttagaaccacagcatcgcgacgtatgttttcaggcatgttattactgcctgcatcgatacggtaatcaggcttatcatggcttgctcgactggcgtctgggactggatgtcattcaattgcttttggataaaacctatgatgccggactacgtggagatttttcatcccccggcataattgactggacggttaatgccaaacgactggccgaagaagcatcgtctttatttaaggggagtgaagtaaaaatcgtgggaaatatcccgctgataggtattagcccacaacgctgggcggcagtactgcatcctttctggagttatgacggggtttttaaagctaatcctgaacttgaggtgctctcgcttgaggaagatatcgtatttacaaacacctttgagctttctcgccgtatgggaactgtgatggcaaaactgtgcacaccacctcgttcgagcgaaaaatga

SEQ ID NO: 166275 - DNA, 1164 bp, Enterobacter cloacae
atgaatataatgacgttggagcgtacccgcccggtgctcccctcaaagctgggcgtatttattacctgcccaatgaggtacttgctggaaagcgagcagcattctttcctgtgtttgcctttgcctcctcaggctgctctggggagtgccgtgcacagactggcaaacacgttgcaaaaaagtggcgagaatagtcctgaatcaatcatacagaggcttgaaaacgactttgtggcgaccttgataaagactcagcaaggagcactggcgctatgggtctgggaacgctatggcattgctggattagtatcgcgtcaggcgttgatcaaatacattcgttacgccaaatctcttgttactccggttgatgaacggggtggacatttgccagatatgataaaaatgcgggaaagtgttattccggtaggtcgggaaaaactgctgaaaagtacttgtttcgatatgcagggacgtgccgatctcatttacagaaaagaaaccgggcagatacgggttgttgactttaaaaccggcgaagtgagagacgaaaaaaatcagccgaaagaagaatatttgttacaaatagcggcatatggcatgatgataaaagagctagctcctgaaattaatattgaactggaactagccggagtagggggtagctggaccggtgtattggataacagcctgcaagaatgcgtcaatcgtgttcttgtctcatttaatgaaatattacctcgtaatacttctttttctgcgcttaatatagctcggccgggtaaacattgtattcagtgtgctggccgttgctcgtgcccgatttactcaaaaaattcatgtcatttcaggcaacaatcctgccctgacgatcgtcattttaacatcgatattcatgggcgattactggaggttgagatggataataattttacgactctacgactcctacttcctgatggttatatggcaaaagtatttcatattccgactcgatttattcctgagtctaatgagatgataggttgcgacgttactctgtatggattgaatgtctttggcgctagttcggagaacaatatcccacgaaatttttatgttgtggatactcaggaacccagaagatcggcatttcagtttttcctgcaatggaagaaaaaccactaa

SEQ ID NO: 166276 - DNA, 1977 bp, Enterobacter cloacae
atggcttctccttcactactgaatgatgcgaacgctctgctctattcggcgaagagttttaccgctgcgatgctcgcatactatattgcattatcaattggcctggagcggccttcctgggcaattatcaccgtatatattgtttcccaaacctccgtcggagcatcgctaagcagaagtttgtatcgtctggtgggaacggtaattggcgctggcatgacggtattaattgtacccacgttcgtgaattcccccgtattttgcagcgtgatactggcaggctggattacattctgcctctatttgtccttgctggaacgtacgccccgggcctatggttttgtccttgctggttacactgcgagtctgattggcttccctgctgtatccgatcctggcgcgatttttgaaatcgctatcactcgggtacaggaaatcatgatcggtatcttctgcgcggcacttatccatcgctatgtattgcccgcgcgcatctcaggccagttcaacagtaaattatcgcagacgctgctcgcggcgcgacagcgtatcgcagagactttaacaggcaaacccgatcctgtttcctcgccgctgcatatggcactggcattgcagttcctgcagggcatcagccatcatatcccttatgattttgcgttctctgtaccggtccggcaagcgagaaaaaggcttcatgacaggcttgcgcgattagtcattgttaactgtgagttacgtgaccgtttagcgctgatagcgaagatacctttcgatgtgcaaattttaatggatgatgttgaggtctggctggcctgcaaagatgaaggaaaatttaaaagcgagggggaagagctcaaaaaacgcagtgaaaaattactgcagcgctatgtcgtacatgagttgacgtttgtagaagcactgcatgtaagttttatgcgctacctgacagaggccattgtcctcgtgcagcagtgctatcgtctttcggatgccattcatcacgcgaatcagatgcctgcgcactcagaaatgaataccgtgaaagggtatgtattccaccgcgatcctcttactgctgcccgcaccgcattgggcgctttcaccatcattttgagcggctgcatggtgtggattttctcggcatggcctgatggcggtacggcagtatctatccttggcgtttgttgcacactgtttggcagcttcgatacgcctgccccgcatattgtgaaatacatcattggttccctctggggagttgtgataagcctgatttacagcttctttctcctaccgcaagtcagtgattttatcgtgctggtagtggttctagctccggtatatctgcttgccggatcgctccaggcaaggccgcccaccacgtttatggcgatggggatcacactgacgctgcctattttgtgcgagctgggtgctcattacagcggggattttgccgtggcggtgaatacctctatcgcattattttctgcaactggctttgcggtattcagcatgggctttctgcagactgtgcaggcagatgcggcaataaatcgcctgcttaaattatgccagcgcgatattaaccgcagcgtgaaaggtgtgttgaatactgatgaaactctctggatcaacctgatgatcgatcgggctgcgttgatactgccacgtttgccgcgcagcggacagtcatcagaacaggcattgaatcatcttttgcacaccctgcgtataggcctgtgtgtaatgcgattacgccgatgggatgcgcatgcagacaaagaaataaaagaggttctcaattgtcttacacactcgacggatattaacaccttacttgaacggattgtcagcctgactgagcgtagcctgtccgtagcagatgaactatcgcggcatcatgttaatcaactggttgatctgtactgcgcattaagcactcaggaaatggagcctgtcgatgatcaatga

SEQ ID NO: 166277 - DNA, 216 bp, Enterobacter cloacae
atgatcaatgatttcaatattgagggcgtttttgtacccggtctactgttaatttccctcgtcgcgctcacctgtacgctattactcgtgcagcttttctcgctaagcaagggttaccgtcgcttgccgtttcgcccgatgatcgatttttccatctttattattactttttacctgttattgcagggactgaccgaactggggtttttaaaatga

SEQ ID NO: 166278 - DNA, 264 bp, Enterobacter cloacae; identical to SEQ ID NO: 164762

SEQ ID NO: 166279 - DNA, 192 bp, Enterobacter cloacae
atgccgagcgttacggtggccaagaaagtcctgaatcagacaggtacccgcgccccgctctgccagtccgaaaccacaagcgtgcctgagcatcttcggatttatttctatggtcatgccggccttttcgccggcctcacgcacaatgcgataggcctgctggcgggacaatccgttgccgcgccgggataa

SEQ ID NO: 166280 - DNA, 687 bp, Enterobacter cloacae
atggtggatagaaagggagtctttaatttcgataaaaatcttattccagagaaattaccatctatagatatagattccttgcgacaagctgtccttgttgatttgactttattcaaagcaagctacccagaaaataatggcgacccttatctgcactttatatctggtcgatctagtagcgaattctttaagcgagcattgggttgtaacccaaaaattgataataatagaagtattgatgaaacaaatagagctgttgatgattttgttaaggtaatgaagttaaagcacatcgatagagttaaagtaaagaaagcagtcgaagctttgatgaaatcaaaagcaaaagatcccaatgatagaaagttaacgattgaagatatagggaattgtatagagaaaacccttcctgaaaataaagaattaaaagggaagtttgtacagttcgcggatgttaatgaatatgttattgatgattttttcgaaccaagtagattttctggaagtagctttggagaaataaagatttctgatgcggaacaggaatatgaatgtaaaatatctgttgatgcaattagcgaggatgatacatcaaatgcaaaagttatatatgatagagctaatggccaattaataatacgattgtcgcataatgcagtaactgaaatcgagaaaatagttggttaa

SEQ ID NO: 166281 - DNA, 405 bp, Enterobacter cloacae
atgagcgactttgatatttcatcaaaagttaaagctcgcaagttacaccgttgctgcgaatgttacggtgccattaatccaggcgatacctacgaaaaggtttttgttgtccaggatggaaatgcgagcaactttaaaacatgccagaaatgcacagaagcgcgtgactggctgcttaacgaaactgattggcctgacgatatagactgcgaaggccattcatatttcttcaccatgctgcgagatcatctccgtgaacaaggccgggaaggtgaccgtaaatacgcatttcgcgcatatcggtttgtcgtctgcatggataaacgccgtatgtcttatgcaaacgcatacaacgcagaaacggtaaaaatacgcgaccgcagccagcaaggagccgcccaatga

SEQ ID NO: 166282 - DNA, 306 bp, Enterobacter cloacae
atgcagacaggggataaacgatacaagctcgagcatttatgtggggttagccactcttcctgtctggttgaaacttcaggtggatacgcgctttttcagcctgaacttgtgcccaccaacggaacacgcgtgctggtgcatgcgttcggacaactacagttcgcggtcgttatgggcggtgcgctcatcaccgaagacggtgaaagcatagagggagatgctttagatgaagtcgatgtcatgggagttgtgaccttttttatcagtggcgctgcggcgttcacagacgacaatccggtgatgtga

SEQ ID NO: 166283 - DNA, 192 bp, Enterobacter cloacae; identical to SEQ ID NO: 146777

SEQ ID NO: 166284 - DNA, 219 bp, Enterobacter cloacae; identical to SEQ ID NO: 162773

SEQ ID NO: 166285 - DNA, 1902 bp, Enterobacter cloacae
atggaagccaacacgcgtaagctagaaagaatttttgatcaaaccatcacctatcaagtgccactattccagcgtccttatgtgtggacgtgtgagaaaaattgggagcctttgtgggaggacatccagacacttcttgataagcaacttaatggtggtagagctcacccccattttttaggggctgtagtattggagcaggtcgcgaacccgacgggatccatcgaaagtcgtcaggtgatcgatggtcaacaacgatttactacgctccagttgttcctgatggcggcgcgtgaccaggcggtagcgcatgaacagattaaatatgtcgaacgcttttcagatctcgtgaccaaccgacgtagcaagatcgatcacgatgacgaagtgttcaaagtatggcctactaatagcaatcgagaagctttcaaagtagttcatgaggctgggtcacctgatgctgttgataagcaaattacactacggccagctctacgtgatggtgctaataatattattgacggttacaaatacttttatgcgcagatagggcagtggttaaacggttcgtttgatgataaggaagatatccaggcattaagtgaaaagtctctcgatgaacgttttgattctctctggcaggttgttaaggactgtcttcagattgttgtgatcgatttggaccagaatgatgagactcaagtcatctttgagacgctgaatgcaagaggggaggaccttcttcctgcagacctgatcaagaattacttgttcaggctcgcagaagccaggggggataatgttgaacagctttatgcaaataactggaaatcattcgagactgactggtggagagaggaagtcagacagggacgaatcacccgcccccgagtggatattttcatcaaccactatttaacgatgatgacgcgtgaagaggtcaggtcttcacatatttttaatgcattcaaggcatttgtcaggcagtctgaatcgagttcggacccggtttctggccctaaaacagcggcagagcacattgcacaactttcgcgttacgctgatgttttcaagagattttatcagtctgatagtcatccccgcttagcgacatttatgcgccgattagatgctgtagatacaaccacagttattccgtttttgttgtatgcatacgctgaattagtccccgccaatgttacggagtttgatgcaattcttgagttgcttgaagcgtatttagtacgtcgcatgatctgtggaatgacaagtaaaaactacaatcgctactttgttgagcttattaaagcattggacaagaaagggatcataacggcagaaaatgtagctggccagatgaataaaagtgctggagatagtactcgattccctgatgatagtgtactggctgcggccattacagatttgcccttttatggccggctggctcaatataaagtgcgaaccatacttgaagcacttgacgcttatgcgtttaacaaaaaaagtgaagcagaaccattaccagttgggttaacgattgagcatgtaatgccgcaaaagtgggcagataattggccactttgccccgatgataaaactgacccactgattgagcagaaggctattcaaaggagagataagctaataaatactataggtaatttaacgcttattactcatagtctgaatcccgcattgtcgaattctgcgtggaccttgaaacgcccagagctgctgaagtttagcaaactcaatttgacgcaatactttcatggcgatcatgctgtgcagtggggggagaaagaaattgaaacccgtacattttatctgactgagcaactcaaaaagatatggccaatgccagcagtttctgaagatgagaaagccacaatggattaa

SEQ ID NO: 166286 - DNA, 630 bp, Enterobacter cloacae
atgaatagtttagcaacatctgatttccgattccaggacgtagagcttcacccagttgaaaggtctggaaacctttggttttcatcatctgatctggctaaagcgcttggctataagaagaccgacgcggtaactcaaatttacagccgttatagcgatgaatttgcagccaatatgtcaacgaccctcagggagagggtcgttaggaaaaccggctcagtggagatggttgtgaggtttttctctctgcgcggcgcgcatttagttgcaatgtttgcctctaccccgaaggccaaagaattccgccgctgggttctggacattcttgacagagaaattcagcgctcgccaatcgctaagcagtttacggacgatgaattatgcaccctcgcatatctttggcgttcagctgcggtgatgtatgaggcttgccgcgaagtacatcctctactgttagttgccgagcatcgactggttcctcgatttagctctattggcacaaattacaaccgggggatcaataaggctcgcgccattcttaagcgcgaaacagatcacatcaaagaacaaccatggggagatagtgactggaaaaacgtcttctcatacgggaaaggaattttgcagtga

SEQ ID NO: 166287 - DNA, 459 bp, Enterobacter cloacae
atgcttaagaaaatggaagctagctatgttggttacgcagggtttctcaacaaacaaaaggcaccaaagaccaacaagttcgagcgtggatatatctatgttttgaagttatcgaatgggtataccaaggtcggcagcactgctgagccagcttcaagaatgaaaagtttgcagcgtgggcttcgttctacagaagtcactctggatcatctttggttaagtgcttcccatatcaattacaaagaaaacgagaagaaagtgctggcgtttttggaggggaaagagcgtgacggtgagttttttaaagtcacttttgaggaggcgctagctgtagtgatgggaatggaaattaagactacgttctcagtagaagaaattgaagcaaaagaggccagcgcagcagcttttatcaattcgctcaatcagcttcacgaacttgcgaaatcacaaaatagttag

SEQ ID NO: 166288 - DNA, 369 bp, Enterobacter cloacae
atgagtaaattccctagccaagagatggaccgtttcaatgtgaggcttccagccggaatgcgtgacgctatagcagatcgcgccaagcgcaatggaagatcgatgaattctgagatagtcgacatcatttccagtgctctgtcacaaccagctctagcacaggaaggaattgagtatttgctgggactcgcagaagaaggtgaggctgaaaagctatccaaaaatgatagagacagagcccggagccttgttttggatgcagcagctattatggcgcataggctggaatcagaaagcaaagatttaagaattctcctgtatctggcttcgaaggatagccccctcaaggagtctgaggatctcaactaa

SEQ ID NO: 166289 - DNA, 189 bp, Enterobacter cloacae
ttggacagttactacataaccattaatgcaatacaaatcatgctcgcgaaaagcaatggttattatttaatcgcttggtctaatcaaaaccgtactgccggttcgaaagatgagttggctaaaattttggcttcggaatttggcatcaccaatcttgaagctaccaactacgttgccgatctgaactaa

SEQ ID NO: 166290 - DNA, 735 bp, Enterobacter cloacae
atgccgggtacgaagtacaaaatcacagaagaatggttacgccagcgttacatggttgacctgatgagaaaagaagatattgccgccgaagctggttgcagcaaggcaaacatcgatcgcttattagccaaatgggggatcaggcgcggaaacgcgcggatctccgctaccccagcctggaatcgtggcaaaaacaaaaataatgacgaacgcataaagcgactctccgaagcccggactggcgctggcaaccctatgtatgggaaaacctcgtggaatgcagggctgcgtgctgataccgatgagcgagtggccaccgtttcgaaaaagctgaccggcagaacaatccgcctagagacgaaggaaaagctggcagctgccaaaggcggaaagaccggagaagaagcgaacaactacaaaggtggtgtcatcataaaaaccaacggctacatgatgcagctggttggtaacaatggcgtttcgcaatacgaatacgttcatcggttgatagcgaaagaacatctcggtcgggagctacgtgacgatgaacatgtccaccacattaaccgcgacacggtagataacgcccctgggaatctggtagcacttccagaagacgctcacattcgtctgcatagcgaaatgcgtgaagaggtatggagctgggagcgccagcgggactggctggtgtccaatgggtatgagttcatgaagattgatgaggtgactgcatga

SEQ ID NO: 166291 - DNA, 342 bp, Enterobacter cloacae
atggcactggatttgaaaatcagcttttacacggagcctttgggtatggacataattaaaaaaatactaattacatcaataagtatcggaatggttggttgtgctttcccggacaaagacggagattacggcgcttacgtctataactgtcagaagtatgcttatggcaaagcctacgcatttgaacacagagattttgcatataaggtttgcaaagatgcggccaaactttggggagatgaagttccagcctatgtcatcaggcaaatccagttgcatccagaaataccagctgatgagataaaatacgcggcgatggccggctcattggggaacaactaa

SEQ ID NO: 166292 - DNA, 738 bp, Enterobacter cloacae
atgccctattttgttctgagagatctaaatcaattaagtgagatgaaaaggaacaatatttcccaagggatcgcggccattaagctgtttattgttatatgcctcaagtctgagaatgatgaaaatagcaacataagtgcgggacttacatacgatgagttcactaagttatgctctttgagccgtaagctagtaaatgagggattacgataccttgagcgaatcaaagtgatccaggttgttggtgtaaggaaaaagcgttatgtattaaacaactgtaagcgtatagataaagaaaataaactgacctactttgacacaactaatggtttttggtgcaagttgccatatagggggcttgttgatgaaaatggcaggataacagcttttgaatcaatgactaataggagtcttattgaattaaattcacttaagttattcctatatctattgatgattcgctcacgaaatgaattgcattcatccgtaacattaaaaactctgagaaagcgattttctatgacataccaagagattgcgacggctatcggttttctccaatcccttggtttgttagagaaagtttcaattggggcaaattcaacgatttcctatgatgatcgtactgctattgaatttcttgtatgcggttggaggactttggagtggaagcccaactatatgaaagatgatcagtgggtacaaaaagagaagcaagtgttggaacgctttgtgtaa

SEQ ID NO: 166293 - DNA, 498 bp, Enterobacter cloacae
atggcacgtcatacgcccctcacctctttcaaaaaacgacctcgttcattacgtctggctttcgccaatgtgttaagcggcggaatttttgcacgtctcgtggagcttgaagagcgagtggctgaactggagcatcgagctaatgcccaggctgacgccattgcccatctgggggcgattgtagccgttaaaaagagaagtgaatccacggtttctcgcgtgctgcgtcaatcccagaagcacatggagagttcggatggaaaactttcaaagaacgcgactgaaaccaatggcctacggtctgatattggcttctctagcagccgcagcaattcccaccggtcagagcatactgaagccggaatcaaccatttctcccatcacaccgtcacagacgataccccagcccgaaagaacacctgtttctctggatgggatgtctctggacacgattcaggcgcgtcctgcgataccggatcttcctcctgctgtgattga

SEQ ID NO: 166294 - DNA, 189 bp, Enterobacter cloacae
atgaagctaagtttccaaaaaatcacatctatttggattggcctgtgcatcgttctgttaggtgggtgggtaatgaatctggtgaagctcattgcgagcggagatctccatttccatgccggcatgactctggcgcgagtggcgggcattttcattgtgccgctcggaagcgtactcggatttttttaa

SEQ ID NO: 166295 - DNA, 426 bp, Enterobacter cloacae
atgttaggttttttaagaaagaagacccgtaaagcggttgtagaagtgaaaaagatggagaaccgcgatgcggttgaggccactgtatggggcgcctacatgatctcctacgccgatggcagttgtgacgctaaagagatcgcagttcttgaaaaaactatcgctgcattgcctgcgttctcgccttttgctggagaaatcgcacagatgagcagcaatatccgctcgcgttacgaggcatcccctcgctctgctaacgctcaggccattcgtgagctgtccgatgttgccggtacaccagaagctgttgatgttctgtgcctatgcatcgatatcgctgatcaggatggcattggtgaagaagaagaagtggttctgaaaaagatcgctcaggcgcttcagctctctctggacgcatacctttaa

SEQ ID NO: 166296 - DNA, 159 bp, Enterobacter cloacae
atgttcgaaaagttcaggttggccatagtttttgcgctgctggctttgactgtgctggtggattttaccggcaagttgatgtccatcgtcacagatggcgtgcttgttggcctggcactctatttcggcagcccacttctccataaacaaaagaattaa

SEQ ID NO: 166297 - DNA, 570 bp, Enterobacter cloacae
atgtgccagaattgcaaagctaaagccgcagaacataatgcaaaattcgaagagatggatgtcgttgagttggtcaaaatgctgggtatcgtgcgcggcactgaacaatcgtccgtaccggggcgactgatggccgttgttgaatttgcttccctttttgaagacccgatgcagatcgtcggtttcgcacaccatctgggcgttcactacctcacggaaaaagatcgtgcagacaagttgcaggcaacactagaaatggtaagcaagccgaagtgctcaccagattcagtcaacgtagatgaaaagagcgccagcaaagatcgtgaaatagccggactgaagtcttctctggcgatgttaatggccgcgttcaaacttatgtcttcccagactgggttcaaaatgcctgagctgaacagcgacgatccgatggccgttcgccagctgctgggggcaatggccgaccagcttgacgacaccaagagccgtcttgaagacatgatgcgcgagctgacccatcgccacgatctgaataaacagccgcaaaagatgcagcctttacatcattga

SEQ ID NO: 166298 - DNA, 417 bp, Enterobacter cloacae
atgatgaagaaaattatattgctgggagttgccagcgcttttgctgtgaatgtctacgccaacaacacagagcaaggctttaaagagaccgacagagcaagcagctatgttaaatgcgctctttatgccgacatatcgaatatctacacagacaaatccagtgcagtgcctgatgaaaatgcaaaacagttcagaattctcgcgctgaaacactggagaaaggcaaatgaattgcttggcaacgttaaaaccggagatgatgaaatcgtcgactttgccgcctatctatcatctcaggaatcagtggcctgggacgttcaccctgaaatgaacaattcaaataatgacagaggcaatccggcaactgcggcatacatgagcgaaaattgcggcttactgttagacgccgcaaagtag

SEQ ID NO: 166299 - DNA, 690 bp, Enterobacter cloacae
atgaaaaatacagtagcgccatttatagcctctgcgagtgtagctgacacgccattcaacttggtgcttcagggcaactcgaacaaacaggtcggcaagattgccatcgacaaagacaaagtgacgttcaccggcgagtttgattccgctgcccaggtgtttgtggaacacattgcaaaacgttggagtcagcaatggagaaacctggaaaaacgcgctaatgagttcgatcggttcatggacgcaatggaaacagctaaagaggcgctggctgccggcactccgttagatctggagtcgctttttaatggcgagctggcctctgcaatgttcggcaccatgttcgccggcgagtttgttcgtcacggcgccagtaactacctggagctaacttacagcgtgccggagctgggtgactttaccgtgacgactcaacgtaaggaaggcaaaacgccaggcgagcgaattgcagaactggaagccgtgattgatcagcgcaatggcgagtgtgatcgtcttattaacgaatgcgccgcactgcgcgaagaaaagctgacaaaaggttcaaacacccgagccgcagccgatatctacttccagctggtagaagagtgccagatcccaccaggtggctcgcttgtgcaatatgttcgcgatctggaagcaaaggctacagaggcctcggcatga

SEQ ID NO: 166300 - DNA, 282 bp, Enterobacter cloacae
atgagtgatctcagcatcaaacgtgtcgcggattttgtccgatgtccactggaacaccccttaacccgcggcgaacagatggagctggcgcagttctttttggagatacaggagcagatcgccacgttcaaagcactgccggatatccctattacagatggtcatatccagcaggtgattaacagccacgaaaaaggctgggcgatgattgtgccatgcaaaattacttacgatctggctaaggaagttcaggcgaacagagcaagtagtaagggagagtaa

SEQ ID NO: 166301 - DNA, 372 bp, Enterobacter cloacae
atgaagtttggaaacgccatttcactgttttgtaccgcactgtttgacggtttccattatcgctactgccctgtctgggacagagggttggcgaagctgatggaagagggagtgctgcttgaggttcggaacggcatcgctttgttcgagtgtgactcaaggctctatgagattttcgtcggcatgggcttccagcactttggtttccttatctcaatggatgctcacgctattgatgagagcgtcaggcgtcgagcgtcttttgccacgatggaaagattgaagcgtcttgtggaagaagagaatgcacgtatcgccaaagagcgggaaagcgagatgcaagtaatgatgaagacgctgcttgctgaataa

SEQ ID NO: 166302 - DNA, 252 bp, Enterobacter cloacae
atgttcggcagcctattttcgaagctaaagattgctctgattaccgcggctgccgttcttttagtgcttataggcgcgtatacgatgggtggtcgtgcggcgcggcaagcaatggaagaaaaggcgcggcaagacgacagaaaacggcttcagaacacagtggatgtgaaaaatgaaacgattaatgaagtcagggctaaggatgcttctgccattcatcgcgagcttcgcgataagtggatgcgtgattaa

SEQ ID NO: 166303 - DNA, 201 bp, Enterobacter cloacae
atgcttctgccattcatcgcgagcttcgcgataagtggatgcgtgattaaaccgcaaactgccggtgtgttgttctgtgacggggccaatcccatttatgtcagccgcaacgattgtttgacagaagagacagagcgcgaaatcctcttccacaacacgatgggagagcggttatgtcactggaacaataaacacggatga

SEQ ID NO: 166304 - DNA, 1200 bp, Enterobacter cloacae
atgacgcagattaaccctaaaaaaagagaaagcatcaagaatacaataactaatattttcaacaacaccatactcaaaaaatatacagcctcattcaagaatccggattatgttaattttgaaaaactagcaaaagaaatttccaaaaataatgactttcagatggatcaaatctcatcgatgtttctttatttggacgcaaccgcgtattacaataaattcataaagccaactcaagagccgacaactgatcttgaaaaattagacgcagaggaaaaaaataatttcatagatttcatatgtgaattttacttaaggtatccattcaactataccattaaaatacctttgaatcatttggaattacctagttatagtgatgggaagacaattaacatttcctatactaagcttgctactgctactcgtggctttggtagtttaggggtatcgaatattgctaaaaccaatgtcgtgatacctgcgattggatattatagcgtttatgaaaaagaatacttcattaaagaaaccacgttatcattaaatgtattgatttacgctctccgtgaaaatgaaattattaaaaggaatcgtaataaatcgatacaaaacgctatgcactggtcgcccgtattcgaaaaaaggcaccaaatcatcgatcatactgccataattgtaaacgactattatcctgctgaggaagacgagtattctttcccaataccatacgctaaatttctgagtgagttagaaatgtgcgatgatatggcaaatcaaacttttcaggaaaaagcgttagaaacaatcaaagaaacgagtatgttactggacaatgaatcagttgaagctaaaaatatagtttcagcaatcgactggtgtgtccaatcagagattaacctcgacatcacaatgggttttatacagacctgcatgggcttagaagctcttcttggcgataatagcaatgaagctggcctaacattaactcttaccgaccgatgtgcctacttaatcggaaaaggcatggctgagcgctcagaaattaagaaagactttaaagcaatttaccagcttcgttcaaagttggtacatggaagagtgaataaaatcagtccaaaagatcgagtgttgtgtgggaaggcaacaaaatatttaaaacgagctattcaaaaagaattaactcacctttttgaatag

SEQ ID NO: 166305 - DNA, 741 bp, Enterobacter cloacae
atgaataaaaaatttatatcggttgttttagcaatattgctggcgataatagcactgctgttaatttttgttttttattttcttgatgcgactatagcctcttcattaaagtggtctgtcggtgctgtaataatttttgttatttcacttactataaaatcaatctcccaaatagctaaattacaaaattttttattaaacaatccaatcggtgtgtttctcaagaaaaattatgaagaagccgaagagcttaatcgaaaaatagctatggcaggggttaaaatcgctctgagatttctgataatgatcggttatatcacagagggtaaaaacaataaagagaaagagaaacagcgtgctaagtctagacaaaagactgtcgtggacttgtatcttcttaacgaaaagaaaaaactcttaaaaggtaagttggcgggtttgttcatggttgctatttctctggcttatataggatattcgaactcttcaatatggtttatagcaccgggtgttattgttttctttgtgaactcaatgaaggaagaggttttaacttacagagttagaaaaggtttttttggacgaaatgtagatgaggcgttgcaattaattaaatttattcatgagaatatcgatgatataaataatgatggcaatggtgaatcaagaagaattttaaacaacaaagaacaaaaagtaaaagagtttgttatggggtggaacggtgaacaaagtgcctga

SEQ ID NO: 166306 - DNA, 420 bp, Enterobacter cloacae
gtgaacaaagtgcctgaattagatgaaattactaaaagattgaacaaggcacttgatattgtcttgctgaaatatcctcagcgcacttcatttggtatccttattggttttatactggtagttttacttcacacctttcgctttgctttgacagcttatggtgtatttgtggattggatgcactatttgttttgtgaagtagcaggggtcttggttatgaatgcaaagtctgtgtacgaggcattcaacggcacagcactcgacgaacggctgggtactcttatgaatgtaattgatgcacgtaaagatttatctaaggctcaaagagatttgttaatctacgaaatcctgaaaaatgaaattgattctttatccgccaatcaagttgaacaagtcggtaaaaaaataactgacaagtaa

SEQ ID NO: 166307 - DNA, 372 bp, Enterobacter cloacae
gtgcatcccgaacgtgccaattggctctacgtaatcccgcagcgtctcttcgtcgaaaacggctcgcttcacgcccattacgtcaaataccccttcacacacaacgactgtttgtttcccgactgcgttgtggccgttgtagagaaacttacccgacgccggcaactgcatcgggaagagataacggcgttcagcattgccggtaatgtcacgcccctggaaggtcttcatcacgccatcaagatcgtaaactggtatcaggatgcgcatgtcgaacacttgacctttgacctggtctgtgtacggatcgacgtatgcgtgcttgccttcaacgcagtaacgcagatcaaagtatttggccagctcaggtga

SEQ ID NO: 166308 - DNA, 1089 bp, Enterobacter cloacae
atgcaagatattcaatcaaatcatacacatcatcctttcattgaggtggcagacgaaactcttgtgtttcgtcaggtagctttagatgacagcacacccaatggctcacagatttcagcagcatctggttttaaacctgatcaaatgcctgttgtgctgatgttgcttccaaatggttctctggaagacatccgtcctgacgaagttgtggatttaggttccgagactcaccggtttattgttgttgagtcagaccggacatattattttacgattaatggtgcacgtctggagtggccatgtcgtttgattagtggttatagcatccgtaagcttggcgacattagcgacgataaaaaattgctcctggagcgagaggatgaagctgatcttgaaatcctgaatgaccagatagtcgatctcggtagtgagggtattgagcgcttcatcagcaggaagataacgtggaaacttaatgttcaaggcaaggaatttacatttgatactccgacagttctcattcgagatgccgttatccgcgcaggcctgaatcccaatcaagcgtggcatatctttcttaaagttgaagggcagcagaagattgaaaaaaacattgatgatgtcatcgatttgcgtacggttggtattgagaaactgcgcctcacgccgaaagatgtaaacaatggcgaagagtcacatgtcactcgccgtgattttagccttcttcccgccgatgagcgctatcttgatgacatggggtatttatgggaaaccagccaagacggtaatgcccgttggcttattctctacgattataaacttcctaatggatataatcacgatcagattaatttggcacttttaattacttccggttatcccgtaaatatgttggatatgttttacgtttatcctcctctcacacggattaatggagccagtattccggcaacagaagctacagtgttaattgatcgtgtcgcctaccagcgatggtcccgccatcgctcatgggatcctgaaactgactctgtaatctctcagttagccatggcggatgggtgcctacaaaatgaggtcggacaatga

SEQ ID NO: 166309 - DNA, 1371 bp, Enterobacter cloacae
atgaacggagaaagtcgactggttttgactgaggaaatgcataaaaccctccagatgcacctgtttcctggtgatgaaaaagaggctgctgcaatcctggtttgtaaccgttatgaaggcactcgtctgaagctgcttgctaaggaacttatccttgttccttatgaagagtgcaaaaccagaacgagagatttcatttcgtggccgggcagctatctggaaaaagccattgattctgccgaagaaacacagatgtccgtcatcctcgtacactctcatccaggcggtctgcttgagttctcagatatggatgatacaagtgatgtccagacgatgttgtcgctttctcagggagttgatgcagttcacggttcggcaatcatgattcctgaaggctatatgcgtgcacgactctatcaggatggtgagcactgtaagaatgtcgaccttgtaaccatcgcgggtgatgatattcactattggtggaatgatattactgaatcacggcagaaacccatcgcttttacctcaggtatgacagacacttttaagagactaactgcagcaatcattggagtatcaggcactggttcgatagttgccgaacaggtcgccagactaggatttggcgaaatcctactagtcgatcatgactgcattgaaaagaaaaatctgaatcgaattctcaattcaactcttgaggatgcattgaacacccgcctaaaggttgatatgttcgcggattctatccggaatatttggggaaaagatattgcatatcccatcccaagtaccattttttcgcgggaagcaattcttgcagtcgcaaatgcggacgtaattttttgttgcgttgatacttttatggcgcgaatgattgcagatcgtatcgcttcttcttttataattccgttgcttgatgtaggagtaaaaattccaacacatgtagatcctgaagatggtcgaaagattacagatgttgttggacggatcgactatgttaaacccggtggctccacattagccgatcgccatgtttatacacctgagcttatttatcaagaaggcctgagtgctgaagagtatgatgatcaggtcgaaaggggatatatcacgggggttcaggaagaggctcccgcagtaataacactgaacatgcgcgctgcgtcaacttgtgtatcggaatttattgcaagatgttttccattccgtgaataccctaataagagatatgcgcgaatattattcagccttgcgggtgttgaagaggagtataccgatgaaagtgcaataaccagggcatttaatagccgtttagcaacaggatataaaaagcctcttttgggcattccacaactggaggataagtaa

SEQ ID NO: 166310 - DNA, 975 bp, Enterobacter cloacae
atgaaaattaatgaaatgtatgatgctttacgtgatgatattgacttggtgaattcatctttgggtattataaagaaatataggttgttttatactacatctgtcgatcccgattattcatactccaatggttatgatggctatgcagaaaagaactattacttcaaaggaaattggggatttgattacgatttctttaaggttcttgaagtggagattgtgaacaagatttttgttttggatgaaataaaacaaaagataaattctgtttgccctgcaactaaatcggctttttctaatataaactcattgaattctgatggctttattaattcatatctcgcgagcaatcctcacaaagaaaatctatctgaatttgatgattgcatattttacatggatggtaataatccgccatatatatcggcgatggaaattgatgctatagataataatttaagcaagattatttatagcggttcatattactctacgggtatggatcatggaaactcagatgaagttgtttgcgagttaaatattgtagcggctaaaaaccaccagcctttttactttgagctactcatagaagcatacgcattactcaatgagaataatttcaaaatgtcctgttttatgtcatatgcggcattagagagttatataaatcaaaaaatatacggtcaagataccgatgagcggttttcagataagtttaaaaaagcatatgatacagtgcctggattaacaacccatgaaactttctctaagttaaattcactgttaagcgattatacacttgttagaaacaccattgcgcatggtagagatgatgatgagataattgataatatagacgttgactcagcaaaagaaatgtatatttacgtttcggctgtgattttagcgattgaaaatggatttcagaagctaaatgatattaaacttcacattaagcctaaaaagaagagataa

SEQ ID NO: 166311 - DNA, 1932 bp, Enterobacter cloacae
atgacctccgggaaagttattgattattggcaccggttagagtcacggcagtcggagtgggcttttcgcgcctacgatcggctgattaagacattaagtcatgacgttcaggaaaggatacaacttaaggaaagcgatgccgaaccgtacgtggtcatatttggtaagacgcaggtcggcaaaaccaccttactgctcgacctgatggatatcgatctgcagcagatggcaacgctatcgcacgtgctacgcggcgggcgggaagccggaaaatcatccaccgccaccgccatggaatatcgtcgttcaacggaccagcgctggggattgtttgtgcaatcgaaaacgcactggtttgcctctgacgacgatatgacagagaccttagcgcagctcagaaagcagatggaacggggtgaactggttgttgattctccctgtattgtgcatattccgaggcgttttttcaggaaaaaaacttcgggagcgcccggcgtgcgtattctggatctgcctggtgataatcccgccaatatggaagagcaaaagcatgtaaatcacatggcgaagacctatcttcccttcgctgatttggtcctgctgattggtcgtggcgacgatttgagcttcctgcagccacaggttatcaccctgccgggtattgaggactggcaggcgatgccgcatcggtttcgtatcgtgacgacctattcttactcagcgcagtcggtgaagacgctgattcgcaacgatccggctatcgatatcgcgcagttacgtcagcgccttattgaacagattgaacgctttagcaacctgagcgacgcggcgaaagatcggaacctctactttccgctcgagtttggcagcagttggctgagtatggccgaaaacgataccgccctttacgcccgggttgcccccatggtcagccacttgcgtagcgaactgttggaacaaattgcaacatcgacaagcccactcggacggctgcgaagtaccctggatacccacctcagcgttaaatatatccaggaggaaaaaacggcggcaatcgaaagagaactgctggggctaaaaaaacagcaacaagagacaaaagataaactggcggtttggaaaaacgctattactcagacgcagcagaaattaaaaaaaacggagaggttattaaaagataacgctttacctgtcagccgacggcttatcgataaagctgcggaagaggccgcaaattttaaattgaagggaagttacagcagtgaaaaatgtaccactttacatagcatgatcgccgactattgctctaaaattaagaatatccagctggatgtgaaaaataaggcggtctactggcaaaaagtggcccgcaacaaagttgaacctacgagacaggcggttcaggatattcttgatgaaaacttcagtgctattcgctataggctcaatgattactggatcgacacctatcttagttctgcgaattatttatcggataaaaacagtgtcatccatgccgctgataatgccaaagtggaagtaattcggttgtggacctcacaatggatggctgccgcagagaacgtccataatcaatacaaaagcgaactcaccaaagatggggtaattctcgaggagttgcgggtagagcagaataaatcccttcagaaacagatatcacttaagcaacaggccgtatcgtgcgaagacgagttaaagagaattgctgttgaatcacaagaggatcttgtccgctgcgagcagtttgttcactttcttgatgaagagtatctcaaaacattaagtacgcgtctggattcagtctttcaggaacgtgatgattgtgatgcgttattacaagttttctcctgcgttgcgttgaaaaatcagcgggaagatttaatgaatttaactgaaaagtattctggataa

SEQ ID NO: 166312 - DNA, 2205 bp, Enterobacter cloacae
atgccaatggaatcacctgaaattcagctcaaggctctgaataatgctttgcgtcgtttacgtggggcctgttccgcacttgacggtgaggagcttgatgaaaaattacttgaggtcatgcgacgactgctgcttgctgaggtgctcgccgatatctggatcgtggcgataggcggctcgcaaggggcgggtaaaacgacgctgatggcgagcctgtataacctgcatcatgacaatagcggctggttacgcagtaatgaaggacgcggcgagaaaatgccggtactgatcctcgagagtcgtgagactaaagtagcgcaaggttatgtccgccgcctggtcgaaactggaaatggtttgacgctggatgatatcggcgtcgacgtcaacgagtttcagcgcgcggtcagcgatcctgatgccggggatttactgccgatactgaaggtaccgcagcgttattttacccgcaataaccaggcctggttactgcttcctggttatgaaaaacaagagcgtgaaaatcgtaagtggcaggaactgatgcgtcaggcgatgatagcggcaggcggttgtattatcgtgaccgatgagacgcgactggcaaaccagcagcagctggaaatcgtcaaagatatgctggaaaaagagcttaagaattgtaaaccttatattgttatctccaagacagaagcgtttcgccacaatccgcaacgtcaagctgaattaagaaaaagcgcggccgaaaccttcaatgtcgctgccgaatatgccgataacaacattattttaaccggcaccgacgatccggaatacgtaacagaatggatgccgcaccttcgtcgggccattgacgactttaacttttccggacaaaccaaccgttatctccagttaacccaccttactgggattgttagtaaggatctgccgcgcgtcatgaatatgatccgcacccagtcacgtctgtattaccacagtgataaaggcggccaggacgatggcagccaggtgctggccgaagctctggaagtgtttgacactgccgtgcaggaactgcgggaggagcataccaaaaaggtaaaaatgtgcatcgctaaaacttttgaggcggcgaaggctaatatggaccgtaggctggtcaaggagcatgagggatttgccaactggatatcgaatgcatttgataccaccagtgagacaaaaggcaaattgcagcaactggttcaggattcatggcaggacgcatcagctgatttcttcgacgactatgtgaacagtctgcaacaattgacggcggcgaaactcaagcccattccaaacggcaacgatcgcccaaacttgcctgcatcactgaagctggagaagctggtagcacttggctatatgaatagcgccgggcagcccgtgaaacacgaacagctggatgcggaaaaaataagtaatatcaaaatgttgttaaatcatgatgccacgtcgaatgcggaaaacatcccagtggtgaataaacagctgaggaagagcgtggaattgatcccggtgctctcgctagagtacacccgccttgtgtacgccatgcctgagatttgcaaagagctgcggccctacgtcacgcttgagcaggacgatggcgagacatccgcgggtaacgtcgcggcagaaggggttcaaactctcaacgaagggattgatcttggcaagaccgcaataaaatcactggccgcggtgctggcgattgacgttgtcagcgatggcgattccgatatcctcggcgcgctctttggccaggataagccttctgctgacccgacggggtcacctcttccccccgcaccggtgatgatgcatcctgctgccgttgcggtaacagccgttgtggcggcggcctacgtgaccgcggctgcagtaacgcgaatgcgtacttttgagaaaaaagcgagcagccaggcacacgtcatgcttgccagtgttcatgaccaccatattgagcatttacgcaatcaattcgatgacacgatgagcgcggcgcgtaagcggattagcgaaacgttacgtgcgcgttatcacatggacgaaatgctgatgcgcaaggatcggctcgcgaaagccatcgccgatgtgaatgcccttatcgacgacctgcgcaatgagctgggttcatcggctacgggcctgcaagtattaatcaccagccgtggtgagtga

SEQ ID NO: 166313 - DNA, 390 bp, Enterobacter cloacae
atgaagaaactcctgcttcttgttccgctcgtgtttgctgctccggtactggcttctgaagtgacggtggggcaggtttgcaaggctgcttctgcggctatgttcggccattatctcaaaatcatgcggctggataaagtcgagtcaggtattgcttacgtacattatatccgacagaacgatggaacccgctgggccatcaagtgcaaacttatcggcaatcaagtgatgtgggcatctggcaatcctgacagcaccggtcgctggcgggatgatcctgcagacagcacggtcagatatgctgttgaggataaaaaaatcattattactgaggcctacagcgacggttccagcagctccaattcttatccgttgaagcaactacagtga

SEQ ID NO: 166314 - DNA, 240 bp, Enterobacter cloacae
atgaaaaacgctattatgacaatactgctttcatctctaattatgtctttctccgttaatgcagagacagttactggatgtggctattcaatcgactcagctgaaaatatgattaaagaaaaagcaaaagaaaaagaaaaagaaaaagaaaaagaaaaagaaaaaggagttacaaattatgtaattacctcagcacacataggtaattataccaccatgagcgcaaaattaattaaataa

SEQ ID NO: 166315 - DNA, 918 bp, Enterobacter cloacae
atgtttttcaatgacgaaagtttgttcagtttcctttacaggactcaacttgtttatggctattataatttcagaaatctaattactcttggcggctgggttgcatataaaataattgccaggaaggagctcttgccagtttaccatcgatttaatgaatttaagttatttaatgttgtaaattcgagtgagcatccacacaccactttttcttccccatattcaaatttgagagagtttaaagaatttactgagcatggtacagcttatattaatggtcggcctgacagaacaatcagattttgcaatgtttgtattttggaaagcaaaaaaaagtatggtgtgggttaccttaaaaaagattgggagttttctcggtattgttttaaacacaaactgccgttgtctgaaatcatttcttgttcatatataaaaacagttaaagctatgagtgatattatgcagggggttttacctgaaaatgatgttcttgttatatctcccctggagaaaatcaaattgaagggaataaaaaaacagaagataacacccttatccactctttatataaaaccgtgtgcttcatttttaatgaaagaatggatttatgcaaacagaattatattaactgaattgcttcagagaaagctatatgatctccaaaaggacgtgctattgaaacagctcacactgtaccctgaatggtacgtctcaaaactttatcacaaaagacacgatgaaagccttgttatttttaaagattatgtagcacagaatacatgtgtaataaaagaaaagtatggagtattacgaaaggatggttttgtttttcggtgtttaaaggcaaagatgataaattgtaaagactgcgctgaaaaattatcgccgagggattgtaagttgcaaaataaattttaa

SEQ ID NO: 166316 - DNA, 492 bp, Enterobacter cloacae
  misc_feature (466)..(475): n is a, c, g, or t
atgctgttcgataccgaaaaaatcaaagaactactacgggaatttcccggccttacgggtaagcagatagctaaaaaacttggatatgctgataaatcagctctgaattcatttttatatagtcattctcagggactcaaacgagttgaatggaaatggtatgtcgaagaagagtacgttctggttctaaatgcagacacctggatagatgagaacgtttttgaagctaatttatcctccggtggatgtctgctgagtgggatagccagtaggtgcagaataagctttccggagaactgtaagattttattggcggccggagcgagagtaattgctctggcaaatcaggcggccttttcaggtaaggctgttgagctggatttcagcaaatgtccttcgacaaaaaactttctggaccgcttaggtttttttgaccatttgcatactgatgttaaggtgaagcctnnnnnnnnnngctttacagttatataa

SEQ ID NO: 166317 - DNA, 336 bp, Enterobacter cloacae
ttgaaacgcaatcttgagaccttttaccctgaggtattcaaggcgcttaagtcttcaaccgaagatactgatgtatttctggttactcaggccttaaaaaaggggggactgagtcagtttggttccgcgcctgataaggccgctcgcggactggggctgaaaagatcacaagagtgggctgcgaaatacgatgcaattgttcttgtccgacaaccaaactttgaacttaaaatcctgtatgagaacggcgaactcatcgagattactatgaaaaaagggctggcgttaattaagggcactcaagtttgttttgattttttcttaggctatgattaa

SEQ ID NO: 166318 - DNA, 375 bp, Enterobacter cloacae
atgtggatgggtgggtgtgatgttctgatgatacatgagaaaatagagaaaaggaaagaaaacttaactagggctgcacaatctggcgggaaaactaggacagggaattatgcaccgctaaaattgaaggttgttgaactccttaaagaaaagatgccggaaggtggctggaaaagtaaagcatcggctattgattctcttgaaaatgatattaataaatttatggacgatgaacagcgtaaactggactcagtcagtaaagggagaaggctaaagtattacgcgccctgggaacaaatgcgcagaaggatttatgactggtcaagaaatgataaggtgatcaaagccgcgtttgacactgttgtgacgaaataa

SEQ ID NO: 166319 - DNA, 276 bp, Enterobacter cloacae
atggtcgcactgatgcacaccgatcctgacgtgttaaccgatcacacacatgtgatttgctccaccagcattgaacgtatcgtcaccggacgtaatgcagcgttgagcctgacagaagtcatcaccattcaacctattgatatttatgcattaatcgacagtattgatgggggtaaagcgaatgaatggggagtgtggcaataccgttacgactattggctgacggaatataacagcgaacggcctcatgaatccctgaataacctgatgccgtaa

SEQ ID NO: 166320 - DNA, 204 bp, Enterobacter cloacae
atgcggacattaaccaccgaagaagccctgcaaatcctgatcgactggctacgggataatatcgactgtgacacaccgattatctttgataacgataaggacaatacgaactccaccatcctgctcccgcacgtggagcaggcattgaatgatgttcgcgatctccgccatctgcagttgatgcaacgggcccggtcagaataa

SEQ ID NO: 166321 - DNA, 477 bp, Enterobacter cloacae
atgaagttatccctcaccgtggaagccgatgccattaacgttctggccctcaacatgggccggattagcgtggatattgatggtattgaactgaccgacctgattaatgtggtctgtgataacggttattcacttcgtgtggttaacgatgatgacaatccactcccgcctgtcgcccggtttaatggtattcagtgcagtaccgcccatatcaccgaagctgataacagcctgctgtatacgctctcgcatcagcatgaagaccacggcgacagtgagtgggtctgctataccggttccggttatctgatccacctcgatgcgtggcagtacccggtacttcagctaaagaaacggggattatcgaaagcctgccgtcggttagttgtgacattaatgtgtcgttatcacattcgcattattcatcttgatgccctgggcgagcagctatccggtttctccacctttgcgtggtga

SEQ ID NO: 166322 - DNA, 378 bp, Enterobacter cloacae
atgcagactcaacccgtaccccacagacgggcggtaccctcacgcccgtcacccgtcaacatctggcaaatgctgctcacgtacctgctggaacagcactacggtcttacgcttaacgatactccgtttggtgatgagcaggtgattgcacagcatatcgatgccggtatctcactggcggatgcgctgaactttatcgtcgaaaaatatgacctggtacgcaccgacaggcccggtttctccatcagtcacccgtctccctttattggccgcattgacatgctccgggccagacgggccaccggcctgatgaaacgtaacgggtacaaagcggtgacagatatcaccaccggcaaatacagcggggtgacacgatga

SEQ ID NO: 166323 - DNA, 243 bp, Enterobacter cloacae
atgacacacgcctgtaaaatcagtgacgtcatcagacatctgcagcagcaccagaatgatgattttgtcctgtactcactctggtacacggatgatgtgcgcagcattgatgcctccgttaccgaagaggaagcgattgcgacgctacagcatgccgaccggcatcacgatgcggaacagggcattaactggtccacactggaagcgtcactggacgccattcgtcagcaaccctcagcgtaa

SEQ ID NO: 166324 - DNA, 372 bp, Enterobacter cloacae
ttgtcgaatacaacacccgcaacagagcatgatattgcagaaccccggtggggactgaaacgcagtatcaccccgtgttttggcgcacgactggttcaggaaggtaaccgccttcattatctggctgaccgcgccagtattaccggtaaattcagtgacgcggatttacgtcatctcgaccaggcatttcctctgctgatgaagcagatggaactgatgctgaccagcggtgaactcactccccgccatcagcactgcgtcacgctgtatgcgaaaggactcacctgcgaggctgactcacttgccagttgtggttatgtctatatcgcaatttatccgacacccgcaccggcagcacaacccggagagtaa

SEQ ID NO: 166325 - DNA, 207 bp, Enterobacter cloacae
atgaagattatcagtaaacgccaggcgatgacgatataccggcaacatccacagtcccggctgtttcgcttctgtacctgcagatatcactggtccggcagcgtctgccattacgcaggtcgggaggtgcaggatacggtattcgcggaacgccgtcaggaccgcagcggcccgtatgtggtcctgcgctgcgtcacacttaattaa

SEQ ID NO: 166326 - DNA, 480 bp, Enterobacter cloacae
atggaacaacagttaccgctgtttgccgctgaattaccggcatccgcgcaacacaccatccggaaggcgctaaccctgctggagcgtcagttacgtgaacccggtgcgccatttacctccagcagttcggtacgtgactggctgcgtctgcaactggcatcactggagagggaggaatttatcgtattgttcctcgataaccagcatcgtcttattacccacgaaaccctcttcaccggcaccatcaaccatacgcaggtccatcccagggaagtggtgaaggcggcactgaaacacaacgctgctgccatcatcattgcacactgccacccttcggggcttgcggaacccagccaggccgaccgccagattacggaacgtcttaaacaggcgctggacctggtggaaattcgcctgcctgaccacctggtggtgggcggaatggatattgtctcctttgctgaacgtggctggctgtaa

SEQ ID NO: 166327 - DNA, 474 bp, Enterobacter cloacae
atgaccgacaatacactgccactgttcaccccggaagcaaccgttccgattgcagcacaacatcagattaccgccacacaggtatccgatgagaaccgcatccgcttctggcctcagcatttcggtggtatcccccagtggatgttgctggagccccgcatctttggccggatggacaggctctgtgacaactaccggggcggtatctggcagtttctcaccctcagcaacggtggcgcgtttatggcaccggaggcagagaacaatgatgaagcctggacgctgtttaacgacatgaacggcaacagtgctgaaatgagtgcggaagccgccggtattgccgcctgccttattgaatacagccaccatgcctgccggaccgaatgcgacgcgatgactgcgcattattaccggctgcgggattacgccctgaatcatgcggaatgtaacgccatcatgcatatcatcgactga

SEQ ID NO: 166328 - DNA, 828 bp, Enterobacter cloacae
atgagattagccagccgcttcgggcgaattaaccagatacgccgtgaccgtccactgactcacgaagaactgatgagtcatgtccccagtatcttcggtgaggacaaacatgcgtcccgcagtgaacgctacacctggataccaaccatcaccatccttgaaaacctgcagcgcgaaggttttcagccgttcttcgcctgtcagacgaaagtgcgtgacgagagtaagcgtgaacacacgaagcacatgctgcgtctgcgtctgcgtcgtgccggacaaatcaccggtcatctggtcccggaaattatcctgctgaactctcatgatggctcatcaagttatcagatgctgcccggtatcttccgcagcgtctgtaccaactcactcgtctgcgggcagtcgtttggcgaagtgcgtgtaccacaccggggcgatgtagtggagaaagtcattgagggggcttatgaagtcctcggtgtgtttgaccgggtggaagagaagcgtgatgccatgcagtcgctgatattgccacccccggcacaacaggcactggcgaatgccgcactgacataccgttatggtgaagaccaccagccggtgacggcaacacagatactgacaccccgccgctatgaagatcgtcagaacgacctgtggacaacgtaccagagactgcaggagaacctgctgaaaggcggtttgcccggacgtaccgcgaagggcaaacgcagccatacccgcgccgttaacggtatcgacggtgacgtgaagctcaaccgtgcgctctgggtgatggcggaaaacatgctgaccaccctcagcaagtaa

SEQ ID NO: 166329 - DNA, 312 bp, Enterobacter cloacae
atggcgcttgttattaaatatttcatgattgcgttcatcattgcgcttgtggttgtgctgtttaacgcgttcagcaacaccggtgcgatacgtgacttctggcagggggcaggatacctgttctggatgaccaccggaccgggagcaggcatgaccctgggcgctttcctgcgtcagtggctgatgcctgaccgtatttatacatcgggtggtgcggcagggttgctgaaagcccgtctgttctggctggccggtccccagtgtattggctggcttgcgggtctgctgactgtgggacagcaactgacataa

SEQ ID NO: 166330 - DNA, 285 bp, Enterobacter cloacae
atgaaaaaccaacaaacgacccggacagcatcacgcggtcttttactgctctgtacgctgttgtcagccgttgtgctcagcggttgtggtgacaaggacgaacgcgagttcattcgtggatgtaaatccggtggcggcagcactgccgtctgcgggtgtatttatgacgacctgaagacccggtacacgcagggagaactgcagaagctgaacacacagtatggatatgtgccaccgggctttatggaaaacatgctgaaggctgcacaacagtgcagaaagtaa

SEQ ID NO: 166331 - DNA, 516 bp, Enterobacter cloacae
atgaacaccgtgaaaaccattacccgccacctgctgctgagtgcagccgtgttattcaccgctgcatcagttttgcatgcagcgacaccggacacgctccgtcagactcatgacccgcactgtgcgcaaccggtattttacgcacagacaatgaaccataaaaaggaagtggagatttgcattgtcaccccgtcggtctcgtattcattcgggaaaacgggcgcgaaaaacaaggagatgaacctcactgttccggcaggcagcaccagttatgcgtacacgaacaatcaggtcatcagcattcagaacttcaccgtcagaaacggcgataccagttaccaggtttcagccggttcggatgatgcgggagagcccttcgcatccctttatgtttataagggagtaccggagagcgggaaactgctggcagaaatcagactcgacccggtgacgatggtgaacaacatcagccattcactggcggaagaaggtattccggaagcagacagcctctga

SEQ ID NO: 166332 - DNA, 606 bp, Enterobacter cloacae
gtgtgcttttatgcccgtgatgacgggtgtctgtaccaaccgggagaccctgagatgaaatcctaccccttattacgtcaggacatatttgcctggtgcctggccgtcgtgctcccgttgctctgggtggtgctgtacctgaactttccgcagaacatggcgcttgtcatttatctggtcgtcgcgctggtctgggtgttgctggaccggacaaacctgatgaagcagggcatcacaccgccgtcatggctgtggtttcccctctattttgtttaccttcgccagcgtgaccagaatcagggcaagccgtggcggcttctgcaggtctgggtgctctgcaccgcgctgtcattcgtggcgttatatcagttcagtaaacagtccgatacggagagtcttgcacagagtgcctgcacggtagtgacgagaattctgcgtgacgatggcagtgatgagcgatgcattcgcgtcattaatatgaaggaagaggtcagcggtcgcttctggcgggcgcaggcgttgctgaacaccggcggtaaggagcccgtgaccattgaagaccgtgggcaggatatctatgtcatgttgccggaaaggggagaataa

SEQ ID NO: 166333 - DNA, 891 bp, Enterobacter cloacae
gtgtcagaccgtattcctaccgggcaaattcctgacgccctgaaacaatccttatcccgtctcccgggcgttctgtcggaagccatggtggagcgcctgctccgctgtgttcactacgaaccggtgattggcatcatgggaaaatcaggcgcaggtaaatccagcctgtgtaataccctgttcagtccgccccccgccagtgttgaccccgtcaggggctgcacgcggcgcgttcaccgttatcaggttacccgtggtccacgaacgcttcatattgccgattttcccggcattgccgaaaccccggaacccgacaggcaatatcgtcgactgtaccgggcatgggccccgaagctggacctgattgtctgggcgctgaaggctgacgaccgtgcctggaaagatgacctgcgctgttaccgcgaactgctgggcgcgggagctgcaccagagcgttttctgtttgttctcacgcaggcggataaaatggagccctgtcgcgaatgggacaatgcaaaccaccagccctcgccacgtcaggctgaaaatcttcatgccaaaactgagcttgctggaacacagtttgcgactgtccatccggtcattgcagtatccgcagcggaaaactatcacctcgaactctgggcagaagcgctgattaaggcgctgccggtgagcagcagtagcgcggttttccgtcatcttagccctgagctgcaaacggaatatgttcagaaaactgcccgcgagcactttgtccaggccactggcgacatctttgatgatgccgtcgcagccatacagacatcaggcaggctggtacgacagctacagcgactccgcctgcggttcctggcggttatccgtgctgtctggcatctcctgttctga

SEQ ID NO: 166334 - DNA, 732 bp, Enterobacter cloacae
atgttaaattatgtatttttatttttccctttgagttatattctgctgattttgattacaaccgtgaaaagccgaaaaaaaaaggaaatcaaatttttttatcataattgctctttgatttctgcccaaaaaatcatcaatgataaactattcataactcgtaccgaaggtcgtgcatacgtatcgacaaacaagaacaataagaatggagttgattcattatcaattaataactacctaaaaaataaacacatgcctttttattgtttaaagagattcactgcaagcgaaccaatggtagacatcacattcagtggtcaaacactatcattattccaccccatatttaatcttctaaagatttatcatatctttaatgtttggggggcatggaaaatgataactgagcaatgggtttcaaaatccttacatgatataaaaattatttcttacaccaccaacggttcaaacgtatttgaaataacacaagcggaagtaatgttaaagaaaggttgggggcttttttctgcattagctagagctgctggaatggtgatacttaacctcgtcatttcagctacttggtgttcattggggttattagcactcccgattaattatcattggatcactttcgaattactccatattttatttatatgcgtgagtatagtagttttatggttcgctataaaaacaatttcagatttgcctgaagatttatttaaataa

SEQ ID NO: 166335 - DNA, 204 bp, Enterobacter cloacae
gtggcagttgtacaaattgcgtgggactggctgcactggaactgccgtcagagctggaaaaatgtccttccagtattccaaagcggtgacgtaagtcaggaagacctgaaacggcggttttatgcactcaggcttaatggtctgttcgctattaagtacccatgcggcatttctccctcgttttacttcagcgaaggaaattaa

SEQ ID NO: 166336 - DNA, 141 bp, Enterobacter cloacae
atgatgagcgtaagcgagttctgccaaatgtcgattgaagggatcatcagtacgatggcgtttattgccgatcagatgcaacagcgcatgcagcaaaagggcatgataatagcgcagaatgtagtgatgctgaaaaaatag

SEQ ID NO: 166337 - DNA, 552 bp, Enterobacter cloacae
atgacattttcaatcgtagcgcgctgcacaactacaggagcgattggcgcagcaacggcaaccgcaggccctgcagtcggggcattggttcttcacggcgcgagcttagctggggctattgcgacacaagccatgaccaatccggtggctggcttgaaggcgacgcaatggctgcagcaggggatcaatgcgcgggcctgtttgcaaatgatgctcgatgaggatgaggggcgagatctaaggcaatggatcgttatcgatagccaagggcagagtgttgattggactggcggctgctgtttgccttggtgcggcagtttatcggaggaaaacctggctatcgccggtaatatgttagccggcgaacaggtgattcaagcgatgcgccaccgctatcggcaacatagcgggtgtgaactggctgacagactgctcttggctatgcaagcaggcgccgaagcgggaggagactatcgcggtataggatcagcggcattaaaagtgtggaataagcgccaatatgccgatattgaggcactgttgcaaagttag

SEQ ID NO: 166338 - DNA, 1560 bp, Enterobacter cloacae
atgaaaatacgtttagggcggtggattgcaggcatgatactgctctctctgttttcacagcccaccttagccacaaagttccctgatgttctgctgttaggccaagttgccgaaccgcaatcacttgacccacaggttgctacggcagcaaacgattcacggattctggttaatatttatgaggggctcgtgcgtaatgccgatggctccttgacgcttgagccggggctggcaacctcatggcaggtcagcgacgatgggctgacttatacctttcaattgcgcgaccatattcagttccacgatggcacatcgtttaatgcgcaagcggtgaaattcacttttgaaagaatgctcgataagcatcacccctactattccaccggcccctttccgctctcttttttcttctccgctatcgatacgattgatacacccgacgatttaaccgtggtgtttaaattaaataaaccttttgccccctttttatctaatttggctacccccgccgggctcattgtgtcccctgctgcggtgaagcgatatggcaaagattttagtcgacatccgaacggtaccggcccctttaagtttgatgagtggaccgccaatcagcgggtggtggtctcggccaatgacaattattggaatggcaagccgagcttaaagcatgtggtatttcgccccataaccgatgccaatacccgggtggcagaaatgctctccgggggcattgatgccattgtggaagtgcctgccgataatgttccgctgtttgccaaagataatcgctttaagctctatgaagccaccgggccacatgtctggtacggcatgttgaatgcctccctcccccccttcgatgatctgcgggtgagacaagcggtgaactacgcggttaataagcaaaatatcgttaaatatattcttcaggggtctgccgatgttgcagaaggcccgatcccttcggcatttgattgggcgtatgatcaacaaaccaccccctatccttatgatcctaaaaaagcgcgggagttgattaaacaggcgggagcggaagggaaaaaaatcattttttatgtcactgaaggagggtcgggaatgttagacccgatcccgatggcaaccgctattcaagctgatttaaaggcggtggggctgtcagtcgatattcagacttttgaatggaatacctatttatctaaagtgaatgcgggcctaaaacaagcgcatatggcggaaatggcatggatgaccaacgatcctgataccttgccatttcttaccttgcattcagcatcttggccagataaaggcgggtttaattcaggttattacagtaataaacaacttgatgccctgctcgataaggcgcggatcaccaatgatcttgcgcagcgtgccgcgctgtatcaacaagtgcaaagaatcgttcatcaagatgcgccttggttatttgtcgccaattggaagcaaaatgccgtcgccagtgaacatgtcgaaaactttaaattacagccgaactttaatctgttactgaaagacgttcgcaagcattaa

SEQ ID NO: 166339 - DNA, 948 bp, Enterobacter cloacae
atgtggatttactgtttaaaacgcattttagcgacgattcccatactgcttggtttgacgctgatcgtttttttaatcatggcgatgatccccggcgacccggctcaagccttactgggcccttgggccacccccgagaacgtgacacgggttaaagccgaactgggtttagataagccactctatcaacaatactttatttggatgcacaacctaatatcgggagactttggccggtcatttgtgctgaatcgtccggttgtcgatgaagtgctcgaacgtttttccgctactctgatcctcggcggctgcgccttattattaagctcgctactggggctactcgcggggatcttttctgccattcgccagtttagctggagcgacagaaccctcacccttgcggttttattggggatctcaatgccctctttttggattgggctattgatgattatggtgttctccgttcagctccagtggtttcctgcctctgggatgtacgacatttggcaaggcggtggtttcagcgacctattgcatcaccttgttttacctgtgatcactttatccctggtggccaccggcgtcatcgcccgtttaacccgcaccgcaatgttagaggttttacgcctcgattttattcgtactgcaagggccaaaggggtgagtgagcggcaggttattttccgtcatgcctttcgcatggcgttggtgtcggtgatccccgttattggcattcaagctggctttgtcttcggcggggctgtctacattgaaaccgtctttcagtggccggggctgggtgcgatgctggtcaaggccgtcgccacacgcgatttattccttgtccaaggcggcgtgttgatcgctgctgcctcttacgtgtttattaatctgtttgccgatgtgctgcaagccatgctagacccgaggttgaaatcatga

SEQ ID NO: 166340 - DNA, 1818 bp, Enterobacter cloacae
atgaaccagacgacaacaccgattattcaacaccgccaacgacagtcgataggcgctctgctgctcgctaaccgactggccaccctgggcttagtgattatttcgctaatcatgatacttgcactgttagccccttggttaccgctggacaatcccgatcaaaccgatctggtcaatcgtttattaccggctttttcgtccggccatttattaggaaccgaccatttaggccgtgatatcttatctcgcctattatggggtacccgggtatcgctgatagtcggaatatccgcgaccctgattgcggctttttttggcaccctgattggattagtcgccggctatgtggggcagcgtaccgatacggtattaatgcgctgtatcgatatgctaatggccttcccctatattttattagcgctggcgattgtcgcggtattgggtcctggactgttgaatgcgctgtatgccattgccttagtgaatatcccgttctttgcgcgaaatattcgcggactcaccgtcgggttacgcgacagagattttgtccaggccgcgcacctgtcaggcaaaaatcatttccaagtcttattgaccgaagttttacccaatgtattaccgattattgtcgtcaccatgtcgaccaccattggttggatgattttagaaactgcggggctctcattcttgggccttggtactcagccacccaatgccgatctcggttccatgttagggcaaggccgcgcgcaaatgtttgttgcccctcacgtagccttagtgccgggcgtgatgattttcttgatagtcatcagctttaacctattgggcgatggggttcgcgatattctcgacccgcgtctaaaatcaggtgccttacagcgctcacagccggtaactgaaaccgatcgcgtcgatattcctgacaaagcgcttggcgagcaggcggtattagaagtcaacgatcttcgggtggcttttcgtcaaggccagcatctgcgccccacggtcaaaggcattagctttagcgttgcccgcggtgagtgtcttggtctgatcggggaaagcggctcgggtaagagcgtaacggcgttatcgatcatgggcctgctggcctctcccccggcggtgatcaccggcggtggaatttatgtcgaacacgaagagatgctctcgttgccgctagctattttacaacgtcgacgcggagcccgtgtgtcgtatattttccaagatccgctcaccacgctacatccccagttctcgataggtgcccagctgcaagaggccattaccgcccaccaagctttaagccatcaagcggcaaaaaaccgggctattgaattacttgatagcgtgggtattcatcatgcggcggagcaatttagcgcttatccccatgagctctcgggaggacaacgccaaagggtcggtattgccatggcattggctaacgatcctatcttgatcatcgccgatgagcccaccaccgctcttgatgttaccgtacaggcgaagatcctcgagttgctcaataaattgcgccgggagcgtggggttgcattgctgtttatcacccatgactttgccgtgatcaatcaaatctgtgaccgggtcgcggtcatgcagcatggcgagattgtcgagacaggcgtcacccaagcggtattgcaaaaccctcagcacccctatacccaacgactgatcgccagcgtaccaaaactgggtgaaggtcgtcagtttcttagccaagttgctgccctttaccgccatcaagctgatgacaaagagcttaaaatagcccaggagacatcatga

SEQ ID NO: 166341 - DNA, 813 bp, Enterobacter cloacae
atgaatcgcgtcattgaagtggatcacgtggtgaaaacatttggtcaacctcgcggcctctttcggccgaaaagtcgacaagtgcatgctctgaaaaatatctcattatcactttatgaaggggaaactttagccattgttggcgagagtggctcaggaaagagtacgctagcgcgaattttagtcggattggaaaatgaaacctctggcaatattcgggttctaggtcaaaccaaggcacagtggaagaagcaaggggctaaagcctttggtcagaaaattcaatatgtttttcaagatcctgtagcatcgcttaatccacgaaaaatcattggcgaaaccttatcggttccgctgaaatatttaaaacagatgacctcgccccagcgcaaccgacgtttggcagagttgctcgaagccgtcaatatgccgctggactcgctggcttgctacccccatgagttttcgggaggacaagctcaacgtttggccattgccagagcgctggctgccgatgcaagaatattggtgcttgatgaaccggtaagcgccttggatgtatcggttcaagcccaagtgctattgctgctagatgagttaaaaacgcagttcgccctgtcgtacttatttattagtcacgatttagcggtggtagaatccattgccgacagagtcgcggtactctatctcggcgagttgcttgaatgccgagaaactcgccaactctttgaatcacctcaacatgagtatactcagaacttaatgtctagtgcgccgcgtatacatattgagccatctaatgaaacctgttaa

SEQ ID NO: 166342 - DNA, 771 bp, Enterobacter cloacae
atgagtatcgataagccatcagccattgatctggttcgtgtcaaacgaaccgatgaaattgtcaatgccattaaagaatcgattgtggcggataatctcaccccgggcgaccgattgccgcaagaaaaagaattgattgagcgctatagcgccagtaaaagcacggtgagagaagcgctgaaatcgcttgaggttcaagggttgatcaggaccaaaaccgggcccggcggtggggcttttattgacgcgatgaccgaatcacgcgccatgagcctgctatctaactttctctttacccgtgatatttccatcaaagatatctacaccctgcgtaaattgctcgaaccggtggtggcggtcagcgcgatggaaaatatcgataatgccggtattcaaaaactgtatgagatcatcgctatctatgaccatgagccggcggatgaagatgaacgctggcggcaacgcatggcagagctcgatttccatgcggttgttgccagctattccgacaatgtgctgttggtatttatctgccattttctgcaaaaattactgaaggatctagcggtttgtaaggacatttacttaaagccagagccggttgatcgatgccaaggtattgaatatcaatatcaattaattgaagccttacgccgaaagaacgcacaaaaagtccatgccgtcatggaggcacatatgaattatgccgaacaagccatgttggcattacaagccaccttacaagaacgttttttaagcgaagataggtaa

SEQ ID NO: 166343 - DNA, 1050 bp, Enterobacter cloacae
atgatcgatacagcatatctgaccaaggtattacgcacgctgctactgacgcccagcccggtaggtatgaccgaaaaagcagttgcccagacccaccagtggttaacagagctgggttttatccctcaatatacccgacgtggcgtgttgtacatcaccttggggtcgcaacagccccggcgcgcgcttgccgcccatttagataccttgggagcgatggtgacgcaattaaaaggcaacggtcgcttagccctgcgcaataccggcacatgggcggcccgctttgctgaaggcgccagagtgacggtgtttagtgataatcaccaatatcgcggcacaattttgccgctgaaggcctctggccatcgttttaataccgaagtagatagccagattgccgactgggacaatctggaaattcgcctagatgccccttgttacagtgagcaggacttaaccgcgcagggtttaaatgtcggggatatggttgccgtcgatgcgcaacctgaatttctcgacaacggctttatcgtctcacgtcatttggatgacaaagcgggctgcgccgtgatgctcgccgccctgaaatcgctggtcgatgatcgggtgcttccggcgatcccatgccaaattatgttcaccatttctgaagaagtcgggatcggcggaacccatggctttggccctcaggttcaagagctcttagccatagataactcggtatcaggacccgatcaaacaacccgagatgacgccctgacattagcctttcgcgatagaaccgggccgtttgatttggctataacgcgtcatttgcttcagttatgccagcagtatgatattcctcatgtccgggataccttcaaacattatcgctcggacagcgccgcggcgattgatgccggatgggatatccgcgcggcgttagcctgttttgccctcgatagctcccacggttgggaaagaacccatctggactccttggtggcattagcgacattggtgagacgttatatagaaagcgatttagtgcccttgccgggacaatga

SEQ ID NO: 166344 - DNA, 1977 bp, Enterobacter cloacae
atgcggttgtttattgccgaaaaaccgagcttggcccgggcgattgccgatgtattaccgaaaccccatcgccgtggtgatggttttattgaatgtggcaacggccaagtggtgacttggtgtattggtcatttgctcgaacaggctcagcccgatgcttatgatgaacgctatgcccgctggaacttggctgacttaccgattgtgccgcaaaagtggcagttacagccgcgtccctcggtgactaaacagctcaatgttatcaaggggctgcttaatcaggcggttgaagtgatccatgcgggagacccggatcgtgagggacaactgctggtggatgaggtgcttgactatttgcagttagcccctgaaaaacgtcagcaggttcagcgttgcctgattaacgatcttaatccgcaagcggtggatcgggcgatttctcggctgcgcgccaacagtgaatttattccgctttgcgtttcggcgctggcgcgggcccgagccgactggctgtacggtattaatatgacgcgcgcttataccattctcggccgtaatgccggttatcagggggtgctatccgtcgggcgggtacaaacgccggtgctcgggctggtggtacgccgagatgaagagatcgaaaattttgtcccgcgcgacttttttgaagtcaaagcccatattatcaccccggcagaggagcgttttgtcgcgctctggcagccgagtgattcctgtgagcctcatcaggatgaagaagggcgcttattaaatcgcaagctggcggaacatgtggtggcgagaattaccggtcagccagccattgtgacggggtaccaagataaacgcgagtcggaaattgccccgctgccgttttcgctctccagtttacagatcgaagcagcaaagcgttttggccttagcgcgcaaaatgtcctcgatatctgtcaaaaactctatgaaacccataaagttatcacctatccgcgctctgacagccgctatctgccggaagaacattttgccggacgccaagcggtactcaacgccattgctatccaaggggattttgagccatttcccgatatcaatagcgatcagcgcaaccgttgctgggatgataaaaaagttgacgcccaccacgccatcattccgacggcgcgtagcagtaaagtgtcgctcaacgacaatgaagctaaggtatacaacctgatagcccggcaatatctgatgcagttttgtagcgatgcgatattccgaaaatgcactattgagctggagatagccggcggcaaatttatggctaaagcgcgttttctagcagaagccggctggcgcacgctattaggcaataaagagcgcgatgaagacaacgacggcaccccgttaccggtggtcgcgaaaggggatgaactgttatgtgagcagggcgaggtggtggataggcaaacccagccgccgcggcatttcaccgatgccacgttactgtcggcgatgaccggcattgcgcgttttgtgcaagataaagaattaaagaaagtgctgcgtgcgaccgatggtttaggaacagaggcgacccgagcgggcattatcgaattactgtttaagcgcgcttttctagaaaagaaaggacgggctattcactcgacgccagcgggacgggcattaattcactcgctgccggagttggccgcacggcccgatatgaccgcccattgggaagccaccctgacgcaaatcagcgagaagaactgtcgttatcaggactttatgcaaccgctggttgaaaccttgtatgagcttatccatcaggcccgtaccacccccgtaagacatgcttttaaggggatcactgctccggatgcaggacgcggtaaatatggtgccaaaaaacagggaaataacaatgctgctcacaaaacgcctgctcgccgccgccgcactactcagtctgccgctactggcgatggcgaataa

SEQ ID NO: 166345 - DNA, 1044 bp, Enterobacter cloacae
atgagtgagcaaactattcgcctgacgcagtatagccacggagctggctgcggctgcaaaatttcccctcaagtattagagactattctccatagcgaacaggcgaaatttattgaccctcatttgctggtaggaaatgaaacgcgggatgatgccgccgtttacgatctcgggaatggcacctgcattatcagtactaccgacttcttcatgccgattgttgattctccttttgattttggtcgtattgcggccaccaatgctatcagtgacatttatgccatgggcggtaaacccattatggcgattgcgatcctcggctggccggtgaatgtccttgatcctaccatcgccagagaagtgattgagggtggacgatttgtttgtcagcaagccgggatctcgctggcgggtggtcactctattgatacccctgaaccgatttttggcctcgcggtgaccgggatcgtgccgaccagcaaagtgaagaaaaacagttcggcgcaagcgggctgtaaactgtatctcaccaagccgctgggcattggcgtgttgaccacagcggaaaaaaaatcgctcctgcaacctgaacatcgaggcctagcggcagaagtaatgtgtcagcttaatcttgccggtaacgagttttctgatattgagggcgtgacggcgatgaccgatgttaccggcttcggcttacttggacatcttagtgagatgtgccaaggggcagacttgcgggcggttatcgattaccaagcggtgcctaaattgccgggagtcgagcactatatcgccgaaggctgtgttcccggtggtaccggccgtaactttgccagctacggtcatttagtgggggagatgtcagcggcatggcgcgatctgctttgcgatccgcaaacctcgggtgggctgttattggccgtgcgtggtgaagcacaatccgccgtgcaagccattgcggaacgtcatgggatctcactgaatgctatcggtgaactctacccgcagcaagcgggccaaccgatgattgaggttcgttga

SEQ ID NO: 166346 - DNA, 552 bp, Enterobacter cloacae
atggatgctcttgaactacttattaatcgccgtagtgcgtcgcgtttagctgaaccggctccgtcaggagaagtattggaaaatattctccgtgctggtatgcgcgccccggatcacggcacgttgcagccatggcgctttgtgattatcgaaggagaagggcgtgagcgctttgctgaggtgttagtggctgcggcgacggcggcaggctttgatgacaaggcgctggaaaaagcccgtaccggacccttacgagctccacaaattattgcggtgattgctcactgcgatccccagcataaagtcccggtttgggaacaaatcgcttccgccagctgcgcggtcatggcgatgcaaatggctgccttagcacaagggttcaacgggatctggcgtagcggtccttggaccgaagatgcctcggtacgtcaagccttaggcggtcgggaacaagataaagtggtgggtttcctctatcttggtacgccgcagctgaaagcatcgagtaccattacccctcccgatacggcacccttcgttcgctatttttag

SEQ ID NO: 166347 - DNA, 801 bp, Enterobacter cloacae
  misc_feature (625)..(634): n is a, c, g, or t
atgaatgcggatagtgttcaagcagttatagaccatacccaggctatcagggcccaaagtaataactctgaagctgtcaacgatataattagaagacgtgatgaaattcaagaaaacgccagccttaatgaagcggctctgaaagctgtggaaaataagccggaagtcatgcgaggacaatctaaaaatatcgaaaaattgtttggttcctcgggcatcacagctgctgacttcgaaagaaaaatggatagcacacgtgaagaagcactatcaactgaaaatggaataacgatctttgcttcatttagcttgccggattatgtactggaagaccttctacgtacggcctcagagcataaagctcgtgtagttttcaatggtctaaagaaaggaactactcggctaccagagacacaggcagcaataaaccaaatgattgtcaaaggaaaatttgaatctcctttgattacaattgatcctgatagcttcagtcagtatcaagtaactcaagtaccgacaattatttctagggagcaagctcgttttgcaaaaatggtaggctccttcaacgttgagttttttcagcgagaacttgctaaaaaacccgatcaggatattttcccgnnnnnnnnnntgctggtaccacttatcccgttgaagaaaagagcatcattaaagaactggaagaacgtgcacaaaaatatgactgggaaggtgcaaaaaaaagggccgtttctgacacatggaaaaatcaatggatggtcgacctccctcctgcccaggaacacaaagaatttttaa

SEQ ID NO: 166348 - DNA, 219 bp, Enterobacter cloacae
atgactaacatagttatccattttaagttgggtaaaaataatcactgtattcttaaaagtacgtcgatggactcgcttatcttctttaatctctccgtcattgtctataagttccccatctttatttattctctttccctcataatttacaagctcacgtttttcattgatatacgcgccgtcagagtttgttcgctttccgttattactgatatatag

SEQ ID NO: 166349 - DNA, 195 bp, Enterobacter cloacae
atgagcaaggttgaggatgcatataaaaatggtcgtaaattacgaaaaaatgacatatttgacttcctaatagttatttctttaaatatgccagatgctttgattttaacacttgataaaggttttttaaaagaccttgaagatcttcatcccaacagctataaaaagtgtctggatttgggctttttaaattaa

SEQ ID NO: 166350 - DNA, 234 bp, Enterobacter cloacae
atgaaacccgtaaagccaagagtaaaaattaataccctgtatggggaaagtgacggttatcagcaaaagcggataaagcaaaccctgacaaaagcactaaacgcacatccaagaacagcgctgatacgctttgatctgcgtttccccctgggaaatgtagtttatagagatgatgcggaggtgatctccggtatatctgaagaaaagagcggagcgtggtgtgagagtccataa

SEQ ID NO: 166351 - DNA, 729 bp, Enterobacter cloacae
atgagagaagagattttagataaatcggaactaatagaaagagtttctcgcttttacaatcgatacggttcagaccttgaacagataagcgaattattaaaaataagattaacacaattgtccctagcatatactatcaaaaacaatttacccccagaagcaataaaagtatccactagagtaaagtctcagtctagttttttgaaaaaactaaaaaagaaaaattggccacaattctattaccccacagatataattaaagatttaataggggctagggttatttgttggtttgttgatgattgccatggggttaagtcttttatttcttcttcaaaacacattatcattagtgaaaatattgaagattacatagcaaaaccaaaagattctgggtatcgttcaatacacttacagggagatattagttatgatgcaataacaagagacaacaagactaaagaaattatcatagggtctaaatatatgacttgtgaaattcaaataaggactaaacttcaagatgcatgggcggatattactcatgaatttcattacaaagcaaaaaatgcaggggttgataaccagatctacgaagaacttctatcagagatatctgatagattaaaaaacgaagataaaacaatgctaaccttaagaaatgcctatcaaaaacttgcagatgaaaaaaccaaagaaaataaaagagaagggtttcaatcaacgtaa

SEQ ID NO: 166352 - DNA, 756 bp, Enterobacter cloacae
atgtcaggacagcctgagtcaaaagaacaagaactgcttgcaacaatcctcgattacttccagaagggtgaagtcccggatacagacactattgcggaaattgagcacgacattgctaaacttccaataagtgagcgcgcacatgcgtatgcatggcttaatggaactctcgggcgtcactctgatgcagtacgtttattcaaagacgcgatgagctctgggagtccaacgatcgcacaaaactacttggcgtatctttctcgttcggctcataactatgagcatcgcgttgagttgtttagaatagttgagcttttcccttcacatgaactgaggcttgtagcaagaaacgctgcattttgtatcggcaacgacaagttggttaaaaagttctccctcaaaatggctgctctttatgatggccaagagcgagaggatataatcaatcagggaaattatatggctgaacagattgttgatttcaaaaacgccacccgtctttcttctcgagaactagaagccctttgcgatcaagctgaagagattgcgaacaagcgcggtattaactgttcaagtgttagctattatcttggtggagatgatgacaatgcattcatcgttagagcccaaactgctgatccgcaggttttagctgaaatgaacatggaactgttggttttgctctcagatgatagttatcggaacagcccttttacatcctggttccaaagcgatgaaaaaagagggatttactga

SEQ ID NO: 166353 - DNA, 405 bp, Enterobacter cloacae; identical to SEQ ID NO: 40106

SEQ ID NO: 166354 - DNA, 600 bp, Enterobacter cloacae
atgtctaaggcggaattaaacagcgatcatattgccgtagtggccggtgatatcaccgtatttaactatgatggcgaaacccgtgaatatctttcctcatccgttgagttcttacccgttggtgtaggtattcccgctaattcgtgcgttgatgcgccgggcactctcaaagaaggctgtacagtttgcagaacggaggatggcaaagcctgggaggttgttaccgaccatcgcggcgagacggtatacagcacagcgacaggtgaaaaggttgttatcaccatgcctggtgattatccagaggataccaccacgctgactcctgccacgccatacgataagtggaacgggcgtgagtgggaaacggacacaaaggcgcagcatgctgcggaagtggccgaggccgaacggcggaaaaacgcgttgctggcggaagcaacggcgataatcactccactggcagatgctcaggctggaggttacatcgacgatgctgatgtgtcacgcctggctgaatggcaacggtaccgctacaaactgactaaagttgataccagtaccgcgccagaaatcagctggccagaacctccggctgtgtag

SEQ ID NO: 166355 - DNA, 183 bp, Enterobacter cloacae
atgagcacatttgcgattgttgtcgatggtgtcgtgaagaaccttgttgaatgggatggcgaatctgactgggctcctgaagaaggagccacagtcttaaccgatggttatgttgacataggctggaaattcgacggtaagaatttcactccacctacacagccggaggttctggccagctga

SEQ ID NO: 166356 - DNA, 684 bp, Enterobacter cloacae
atggtcattctcaaaaatgttggtttaccagaatccattcctggtcgttttttgcggaggcgattcgttacctctagctcaacttatacgccagcgccagaagtaaaggcgatccgggtgcgcgttatcggaggcggtggtggtggcggcgctgccggtgcgactaactcaggctataccgccatcggcggtggcggtggtgcgggaggatattcagagaaaaccatttcaattacagcaggttttcccaccgtcagtataacaatcggcagtggcggcattccgggtgggcagtccggttattctggtggggctggcggcgcatcatcattcgggtcgtattgttctgcgtctggcggtgatggtggcgcaggtacatccgcgacgaataactcctcttacattatgtctggcggtgcgggtgggctggggtctggcggagacgttaacgcttacggacaatcaggctctgtggctattatgccgcctgtaaatggtggaatatcaggtgctggcggagccagtatcatgagcgcagggccgggaggtcgggtcggaaatgcatcgggtaacgatggcgtttatggctccggtgcttccggtgggatcagccaggttgttgcggctacacagtacggaggccgtggaggttcaggtatcgttattattgaggagttttcttga

SEQ ID NO: 166357 - DNA, 792 bp, Enterobacter cloacae
atgacaaacatgatctcatatcagggacttgttcgcaccttccctagtgcaataccaggaatgcctactgctccagatttactaacggccttatgggaaggggcgattggctcctatttctatggtgttcagacctttaacccggtcttgtggacaataaaaaccgaactcataggctctattcttgttcttgtttccgttccgctattgtgcgccacaaggataagatttgttttttatgttattggcattgttattttcagatcagattacctaataggttttgttcttggtgtaatttgtgctgacttgtctataaatatcaaaaaaatcaatgggtttattgtttttttattgatcgttgcgggtgtttacttaggctcatacccttactttataactgataatggcttatggtatagtggcgctgacatcaatctgtttagctttaaaataatatccattgcatttggttcgatgttcatcgtgatcgcggtagacaaagctaaagctgttgcatttatcttcaacaccaagatttgcaaattctttggtgatatatcttactctctttatctggttcacttcccaataattgcttcattgtcgtcgcttctaattataaagttgagtgtgaatggctttagatattctattgctcttgcaattacatttgtagttagcattttaatatctatcgcaattgcatacttgttcaaaaaagccattgatgacaatgcaatttcaatctcaaacaaaatcgcatctagaattttaccttcatcaaaatga

SEQ ID NO: 166358 - DNA, 1023 bp, Enterobacter cloacae
atggcactcacacttttagctgccaacaatgcgcagactgtgctggcggcaggaattagcgcatcagcaacttcgttgactgttaactcaggaaccggatcactgtttcctgcgccatcagacggagtaagtttttttaagttaaccctgattgatgcggcaaccgggcaactcaccgaaatcatgcatgtcaccgcgcgcactggtgacaccatgacgatcgaacgcggccaggagggaacgacagcccgagcatggtctgcgaatgatatcgcagcaaacatgatgaccgccggcactcttaactacatcctggccaattttcaacccttagatgcaaccctaacggctttggccgggctggcaactggagcaaataagcttccttactttaccggtccggatagtgcatcacaaaccgatattacatccgttggacgagacattattggtaaaacaacaattgcagacattctcgcgtatcttggattgggtgcaattgcgacttcatctgacattcaatcaggcgttgcaaataaactggtcgatgccgcagggcttattggtgctattgcaactgatgctgatattcagaataaagtagaaagaaagtttgtagacgcatacgggctaataaatgcaattactactatgcaagatgtgcaggatggggctttacgtaaattcgttaatgcgttaacgctgaagaactaccttcctgtaaaggccctttctgctaatgggtttattcgcatccccgatgttcctggcggtacgataattcaatatgggcaagtaattacaactgtgaatgaaggaacccagaacatcactctcccaaccccatttccaacagcgggaagggttgcgattgctattcctataaaccagagcggtagcactactgtcgatatttttgctcaacttcaggccatatcaacaactggggttaacttcttcttctcatgggctacaagcttatcaccagctaatggttttcagtggtttgccataggatactaa

SEQ ID NO: 166359 - DNA, 249 bp, Enterobacter cloacae
atgaataatctgtcagttgctattacaaaatttcttttatcatcagttagcgcaataacaattttgctttcggcgttccttattgctttaatcttcaacatgtggattcaggaaggaatcccaccatttgaaaatataaagttcagcgccgctctgttctttaccattatcatgttgcttgttatatgccagtgtcttaagtattacactgacatggcaatagatcgccgggataactctagccgataa

SEQ ID NO: 166360 - DNA, 162 bp, Enterobacter cloacae
atggaaaagaatgaagtgaagaccacgctgcgatacccgtaccgcttaaaggaagaaataaagcgcatagctgaagaggaggggatgtctgaaaactcggttctagttcagggcatagtttggtggatgaggtatcgggagaaaatgcaggatgcactatag

SEQ ID NO: 166361 - DNA, 285 bp, Enterobacter cloacae
atgcgtagcacctaccgcaataaaaaatggctagccgcagtcggccagattgagcaatgcgtcctttgcggagcgtggggcgtacaggtggcacaccgcaatgaaggaaagggaattggcatgaagacagacgactgcgctaccgccgctatttgcgtcacatgtcattcagagattgataacgggaaaggtcttagccgtgacgagcgccgccagttaatggatcgagccattgtcctgaccattatccagattgcccgtcgtggcctggtggtgcccgcatga

SEQ ID NO: 166362 - DNA, 291 bp, Enterobacter cloacae
gtgcgatcccatcaggtgcaggacgatcagctgaggctgggtgcgcggagtggcgaagacctgtgccgtcattttcaacagcgcttcgtctttggtatttttgtcggcttcaaagtcgccgttcttcaggaactgcacttcgtcggcacgtttggcgatactggcgatggccgtatcgtattcgccaatctgcccctgattggagaaccaccaggtctgataacccgcgcggtttgccagggtgacaaaattatcctgatactggggtttgccgtcgacgacacggtttag

SEQ ID NO: 166363 - DNA, 201 bp, Enterobacter cloacae
atgagcaatttccgcgttattgccacctgctttgatggcgctggtgcgccgatcccggtcacatggtacggcaatgccgtcagctccagtgatgccaaattgcaaatgacccacgaagcacagcgcaacggctggagcgttggggcaattatttgtgtgcagcagagaaaaatcagtaagggcatagaggtggtggcatga

SEQ ID NO: 166364 - DNA, 243 bp, Enterobacter cloacae
atggactacatcaaagccagcaatatcaagctgctccgctattttgcgaattcgcatttcgttctgcgcaatttactacacattcgcaatgccgccgttagaattcgtcagatggtacgcacgctgaatgcgcagttttgccgcgtacctgactgcgtactgcgaaccagtggcgcgaaccagaatattttggacaacctaaatcacattctggcttccagcccacgactggcgcggctttag

SEQ ID NO: 166365 - DNA, 825 bp, Enterobacter cloacae
atgaacgagcaccaccagcctttcgaagagatcaagcaggttgatgacgaaggatcggaatattggtcagcacgagagctagcaaagttgctggattactcagagtatcgtcatttcactcctgttttagaacgagcaaaagaagcgtgccttaacagtgggcacaatgttgacgaccatttcgaggatgtcctcggtatggtcaaaattggttcaggtgcgcaaagggagctaaaggatataagactgtcccggtacgcttgctacttagtcgttcaaaacggagaccccaccaaacccgttatagcagcgggacaaacgtactttgcaatacagaccaggcggcaggaactagctgacgatgagacgttcaagcgactccgcgaagatgagaaacgcctttttctcaggaacgaactaaaagagcacaataaacaattggtcgaggcagcacagcaagctggtgttgaaacaacactggactttgcaatcttccagaatcacggatacaaggggctttatggcgggttagaccaaaaggctatccaccagcgaaaagggcttaaaaagagccaaaagatactcgatcacatgggttctaccgaattggctgccaacctgttccgagcgactcaggcagaagaaaagctccgcagagataatgttaaatcgaagcaaaaagctaatgaaactcacttcgaggtcggccgaaaagttaggcaaacaatccaggagctaggcgggacaatgccagagaatctgcccgcaccggaaaaaagcatcaaacaattagaatctgccgccaagaagctggataaaaaatag

SEQ ID NO: 166366 - DNA, 207 bp, Enterobacter cloacae
atgcgaattaaacctgacgataactggcgctggtatttttgcgacgagcatgaccgaatgatgcttgatttagccaatggcatgttgtttcgttctcgttttgcccgccgaatgttaaccccggatgcattttccccgtcgggcttttgcgttgacgatgcggcgctttatttctcttttgaagaaaaatgcggctttgttgaataa

SEQ ID NO: 166367 - DNA, 1140 bp, Enterobacter cloacae
atgaaaaaaacaatcatgttagtttttggaactcgtccagaagctattaaaatggcaccaatagtaaagtttctgaaacaagataaacgcttcgtatgtaaggtttgtgttacagggcagcacagacaaatgttggatacagtattatctttatttgatattgttcccgattatgatcttgatattatgaaaagtaatcagacgctatctaccgtaacttcttcaattcttcaaggcttggaaaatatattctcaaaaaacaagcctgatattgttttagttcatggtgataccgcaacaactatggcaactactctatcgtcttacttccaccaaattcctgttgctcacgtagaagcaggtcttcgtacggggaatttatattcgccatggccggaagagggaaatagaaaggttacaggagcgatagctaatattcactttgcaccaactcagtacgctaagtcaaatcttttaaaagaaaatatctcagaatcaactataacaattacaggtaatacagttatagatgcattgtttttagtgagtgatatcatcaacaaagatagtgatatggtcgctagcatgcataatatattcccatttctcagcgatagaaaaaaaatggtattggttactggccatagacgagaaaattttggaagtggttttgaaaatatctgctttgcaattaaaaaagtggcgaatgaatatcctgagatgcagtttgtttaccccgtgcacctcaatccacaggttcagaaaccggttaatgagttactttccaatgttgacaatattttcctaattgaacctcaagattatttaccttttgtttacttaatgggacgttcctacttcattctcacagattccggtgggattcaggaagaagctccgtcgctcggtaaaccagttctggttatgcgagatacaacagaacgaccggaggccgttgatgcaggaactgttaaactcgtaggcacagagattgagagcatttattccaacatgaaaatgctcattgaagatcaaagtgtgtattcctctatggcactggctcacaatccctatggggatggcaatgcttctttgaatattatccgcgtgctagcaaactattttaatttagttaagtga

SEQ ID NO: 166368 - DNA, 240 bp, Enterobacter cloacae
atgactgatgcaatacatgattttaattcaaagattttgacaaagtattcgttctgctatagccaaacacaatctatcgagaatgtaatagatgacttttgcgtacagatgaacgctgatattgatgtgaacgaattagttagtgagtatcaccatatatttaatgtatactataacagaaacatgtatgttgagagtataaaagcaaaatttgcttgtatgctaaataggaaagattaa

SEQ ID NO: 166369 - DNA, 1572 bp, Enterobacter cloacae
atgaaggcgagtgatatgcagcatttatgtaatatagccagagagcttgtttctgatggcaagtttgaaaaggcgtatgaattcacgttgcaactttataaatcccttgaagaaaatatctttgggaataattattatatacttctttataatatggccgcgaattttgttgatataggaggaatgcaaccaaacaaagaggcttctctgctaggttataacttaatgaatgagcattttgactctttttctaagatcatgaatgaatcgacgctttattataatcttgcaaacgcaaagtcaaacttggttgataagggggatgtttttgaacaaacgttcacaacaattgaggatatggtggacgtaaaaaatttatactggaaggcatttaaattacttggtgatgataatactaaatatagcaaagagttgaaggttaatttagcaaactcactcaagcgacagtttagagttgtagagtccatttcatattatgatgctgttatttcttctggggaagatataccgcaagcatggattaacaggtctgaagccttaatgcaactgctgcaactctcaggttctcatactataaagcatataagagagattagacttggatatattaaggcaattgaatcaatagaggtgcctccaccatggaaaccattctatcaatcacgtgctgaaaaactcacgaaagatataattgagatgtcggaaaaaccattttctgaaaaggaagatgatcttgatgaaaaacagacgctagaagaatacagcaaacttaataattatcaaaagttcgttctggataaccacttagttctttctgaacatggagtttattgtccttgcgtagttggggctaaagataacctaacaatattaccaacgcataatggcgtttctggtgattttattattcccatggaaatggttttgaatagactgaagtctgagtatgctttggcaagacgttcgttattcgagtatgagtatatggcggaggtggatgatgtggcctgttattcagagctgcataacgacgaagttttaaatgctggtgtcgagaagatcagaaatgcatttcgtatatgctttggtgtattagataaaatagctattgcaatatgtgaactgtacgatgtttatccagccaataaaatagtgtactttgaaaatttctggcaattaaaccaaaatgggcgaagggataagtttgaagatataaaaaatccagctttgctggctttatatagccttgctactgacctaaatgatagaaagagtggtgagttatccttttataaagattggagaaatgatttagaacataatatagtgattgtacatgaaagtaccaagccattagatctgtacaattcttatgattacatatctaatattagactgatatctgaagccgatttcgctcgtcattttaagattttattacaaatagtacgatctgcaatttttctttttacttttatggtgcgagatgaagggaggaaaaaaagtgcggattcattattgatatcaaataaactagattggaaaatatga

SEQ ID NO: 166370 - DNA, 246 bp, Enterobacter cloacae
atgatgcgttgccctttctgccgtacagcggcccacgtccgcaccagtcgctatatgtctgacagcgtcaaagagagttacctgcagtgccagaatgtgcactgctcggcgacattcaaaacgcatgagtccatatttgaagtgatacgttccccggtcgtcgatgagaaacccgcaccggtgccgacagcctccgcagcaccccgccgggtaaaaggctgctacagctcgccgttccgccattaa

SEQ ID NO: 166371 - DNA, 738 bp, Enterobacter cloacae
atgactcagactgctgttattcccgactaccttaaacccgaaatggagcgtcttgagacggccagagaagcgcatctcaccagtgcccgacgcatggatgaaaccacggcggccatcagccaggtggaagcgcaaaaaaaggaactggagcaggaaaacggcaatgactccggcgcatggcgcgccgcctttcgtgccggtggtgctgtcattaccgacgagctgaaacaacgccatctggcgcgcgtggcacggcgggagctggtgcaggaatgtgacaatatggctgaggttctgtcttttgagctggacagccttaagggatcctgtgaccggacggccagagcgtatcgtcaggtacatcacagcgtcctcagccggtacgcagagcatgagcttgatgctgccctgcgtgatacctgtagcgcgctggtcagggcaatgaagctcaatatactggttctgaataacccgctagccaataccaccgggcatcaggggtataccgaaccggaaaaggttgtgatgcagcaggtgaaagaccggcttgagcaggcggttaagggctgcaatatccgtctgaccgatgaaccggtgctgtttaaaacaggactgtcggcctccacgctgccacatatggagcatgacgttgcggccacgcccgttcagcggaaagtctggcaggaaaaaatgcgggaacgtgaagccgacctgaaagcacgggggttactgtcatga

SEQ ID NO: 166372 - DNA, 300 bp, Enterobacter cloacae
atgcacactgaaaacagcattcagaccgtctcagcgcgtcgtgatgacattaacactctccgcgagcacctcagcattgaggcataccataaactcaaccgcgccagtgctataacgcagtttgtcgggcttgatttggggcaacgtgaattaaccggcctgcatcagctttgtatgccacatattttcagctatctgcacgatgacatcagttttgttatggaggaactgaaaggcaaaggcctgtgccgtgactttctcactcagcaaggcctgcgggaggaagaagaccatgtttga

SEQ ID NO: 166373 - DNA, 450 bp, Enterobacter cloacae
atgtttgattttcctcagcccggtgagatttatcgctgcacaggtttccctgatgtggtcgtggtcggtgttctggccgctggcattccgtgggatatgccctaccgttgcccggaactgttctggaacccgtaccgccggacgtacagtattcttgtccgtatgaaaaatgatggccgtattaccgaaataccgcttggtcgttttttgcaggagtttacctgtgtgaaaccagacctgtttaaacgctgccgcgagaaccgttatgccgtactgaaagaaatcaccttcgaccctgaattacagaggcggcgggcgaaaaatatcgatatttacccggaagatataacgacttccagacgaacggtaccggcggcgtgtaaatggcgggatattccgcgaacggagccggaaataaaaccggataacagttaccgccattatctgtaa

SEQ ID NO: 166374 - DNA, 201 bp, Enterobacter cloacae
atgcttaggacaatgcggctgcaaaactctttcaccttcgagctttgtctcaccgtatatattcagcggagcagtcgaatccgtttcacgccatggcttctcaccgtcacctgggaatacatagtcggtagagtagtgaataacccatgcgtctatttttgctgcttctttggctatagcttcaacgctatttgcgtttag

SEQ ID NO: 166375 - DNA, 933 bp, Enterobacter cloacae
atgcgtgttttactggccccaatggaaggcgtgctcgactccctcgtgcgcgagcttctgaccgaggtgaacgattacgatctctgcgtgacggaatttcttcgcgtggtcgatatgctgttgccggtaaaatccttcttccgcctgtgccccgagctgcacaaccagagccggacctcttccggcacgctggtgcggattcagctcctcggccagtatccggaatggctggcggaaaatgccgcccgcgcggttgagctgggctcttacggggtggatctcaactgcggctgtccgtcgaagctggtgaacggcagcggcggcggggcgacgttgctgaaagatcctgagctgatttaccgcggcgcgaaagccatgcgcgaggccgtgcccgcgcatttgccggtgacggtaaaggtgcgcctggggtgggacagcgatgcccgacagtttgagatcgccgatgcggtgcagcaggccggggccaccgagctggtggtgcatggccgcactaaagaagatggctacaaagccgatcgcataaactggcaggcgatcggtgagatccgcaaacgcctctccattccggtgatcgccaacggcgaaatatgggactacgagagcgcgcaggcctgtctgcaggccaccggctgcgatgcggtaatgatcggccgcggcgcgctgaatgtgcccaacctcagccgggtggtgaaatataacgaaccgcgtatgccctgggcagatgtcgtcacgctgctgcaaaaatacagccgtctggaaaagcagggcgacaccggtttgtatcacgtcgcgcgtattaagcagtggctgagttatttacgcaaagagtacgaggaagcgctggaattatttcaggagattcgtactttacagacgtcggctgatattgcgcgggtgattcagtccaaataa

SEQ ID NO: 166376 - DNA, 1110 bp, Enterobacter cloacae
atgaaaatccctggactgcaggccctggcacgcgatcgtttcttccatctcttattactcattggcgcagggttaagcctctttgtgccgtttgcgccgcaggcctggcccgctgccattgactggcgcaccatcattaccctgagcggcctgatgatgctcaccaaaggggttgagctgagcggctattttgacgttctgggccgtaaaatggtgcgccgctttgccaccgagcgcaggttgtccctgtttatggtgttttccgccgcggtgctgtcgacgtttctgaccaacgacgtggcgctgtttatcatcgtgcccctcaccctcacgctgcgtaagctttgcgagatcccggtaagccggctgatcatcttcgaagcgctcgccgttaacgccggttctctgttaacgcccatcggtaacccgcaaaatatcctcctctggggccgttccgggctgtcgttcgccgcttttacctggcagatggcgccgctggcgctggtgatgatgctgtcgctgctggcggtctgctggtttgcctttccggataaaaaactgcagtaccacagcggcaccacgggcccgcagtggcagccgcgtctggtctggagctgcctcgggttatatatcgtctttctgttcgcgctggagctgaagtatgaggtggcgggcgtgttgcttgtcgccgcgggctttgtcgtcctcgcgcgacgcgtgctggtcagcgtggactggacgctgctgctggtctttatggtgatgtttattgatgtgcatctgcttattcagcttccggtgctgcaaaacgtgctccacagcgtcagcacgctgtctcagccgggactgtggctgacggcgattggcctgtcgcagtttatcagcaacgtgccttccaccattctgctgctcaactatgttccgccggacacgctgctggcctgggcggtgaatatcggcgggtttgggctgctgcccggctcgctggccaacctgattgcgctgcgcatggccaacgatcgccgcatctggtggcgcttccatctctggtcaattccgatgctggtttgggccgcggcgatcggtttcggaatattccttctcatatag

SEQ ID NO: 166377 - DNA, 1638 bp, Enterobacter cloacae
atgaataattggacacttagtcctagtggtatagctttattatccttttctaatagcgctacagatgaacttttctcacgggttaaaaaatactcccccgatacggtcagtagattcccacacttcatcggaacttttgatagctttatatttaagtttttaattagtccaaacgcaaaaagtttgactcattttgagtgggaatgtaataacaatactttaaggattatagagtctgcgtcaccattattcattcaaacaaaatatgcttacaataaaagaggaaagatcaaagcacaccattatacttttgatagaagaaatgattctatactgttcaactcagatagccccgaacttgacagaatgagaaacgccataaatctacaggaatggcaaattaaagatttaatagaaacaaaacataagttatttaaatctggattaatgactcacgatgattcactatttcttgctgctgaaatcttcagtaatgaacagtataaaaattatgcttcattactctccaaaagatttccactaattattattgatgagtgccaagatttatcatacgagcacttatttatattacaggggcttcatgatttaggagttaaacttcactttgtcggtgatttagatcaatccatttatggtttccgtgctgtagatcctaaagatacaataaaattcattgctgacaatgaattcgaaagaatgccattaaaaattaattatcgaagctgtcagcaaatcattgatctttgttcaaaattaacagcacatgatggtgttaatggccaatttagttcaattgaatctccctgtatcgttttgcagtataatgaaacgcctctagaattaatcgataaaattggacagctatgtttcggatacagtaataatgtaatcgtagctcgtgggcactctattttggaaaaattcacatttaatggtgtagaagataatattgtgaaaaaccttgttaacgcaataaatattttctcattacatggaactcaaaatataaaaagctcactgcagttattttcaacagtaatacgcgcgagatcaaatcatccaattagagaatctaagtataattgtcctaatgagattgagtcatccgtgcaatggcgagcatttcttttctatacattggaatacttcatcgagaataagctcaacaattttgaattaacatggagtaagtggtgtaaaaatgcaaatgcaatccttatcaatcttcatcaacaaccgttcataactgatgaattaaaacctatagtagaggaagtattttccttatctataaaagctccttcaggacttgcaaaaattaatgtttcggagttcactgcaatagaaaaagtaaataatgaaaattataaatatgctacaattcatagcgttaaaggtgaaactcatgatgtaacaattctactatcatcgccttcaaactccggaaataatggttcacactggaaacagtggataagtaatcaaaagtcagaatcgaccagatttgcctatgttgcaagctcaaggcctagatatcgattagtctggggtgtcaaaaaattaaaagatagtgaagctgatacattaagaaaacttggttttactattgaatga

SEQ ID NO: 166378 - DNA, 435 bp, Enterobacter cloacae
atggaaaatatgatgaaaactatgcgtgagtatttccccacgcgaacagtggtgttcgaacagtctctggatatgtttggtctcacccggggtgaggacgggaaactcatatttccccgtcattctgataaccgtttcccgatcgggcgtatccgcaagcgtctgtcatcttatggctggcgcggagagcgtctgaatcaggaagtggcgcgtattgtcgcaggccctgatattcttcctgaaagaaatgactacagcataatttttccttacggatgggaacgaaaccagctaaccccagagatgcggagaatgtttccccggaggactggtcgccgcgtgctgcttatgctggatgagttccattatattcatgacgcccgggaacgtcagacgtttgcaccagaaagtgatgaagcacccgaggtatcatga

SEQ ID NO: 166379 - DNA, 231 bp, Enterobacter cloacae
atgattccagcgttactctcttcattttgctcagatccgaaaaaaggcagttccggatctgcctcaggcgcacgggcgcgctgcggcgcagaaacacaagatgtgccactctatcagctgctgtttcttctatatgttgtgtttacccccttccccgtgacccgtcgcgcaggggcagatattgccgctttgcttatttcgtgtgcgtggtacacttccggaaactgttga

SEQ ID NO: 166380 - DNA, 174 bp, Enterobacter cloacae
atgaaaattgaagaactgacgcacaaggcagaggaagaaatttctgccctcatatcaaaaaaaatttcagagttacgaaaaaaaacaggccatgaagtttccgaaattgagtttatcgctcgtgaagcgatgacaggtcttgaagggtacgaggtcaaaatcaaactcctttaa

SEQ ID NO: 166381 - DNA, 528 bp, Enterobacter cloacae
atgaatgatatttcttatggtcgtgatgctgaaaaatggcctcgtgattattctatgcttgctcgcaggatacaatttttgcgttttaacgactacccagttcaattggtgagttgtaacggtcaatcaatgattggttatatttcgaaatttaaccagagtgagaatataattctcatatcaaatgaggcaaaaggtaataatagagttgaagtcaaacttgaatctctttcctcgcttgaggaattatcattaaattgcaatatttctgcaaagttagtagacgctgttctattcgccattcaaccttgcgaaccaacaaggaaagatttcttttcgatttgtaacaaatgttttaagcaaggcataggcataaaaattcatatgcttgatggacgaatattagtaggtgatacaactggagtaaacgcttgccatgttgggttgaagaagaaaaacggtaatcatatgcaaattatgtttgattgggtgggacgcataacttcatctgattatatagaaaaatag

SEQ ID NO: 166382 - DNA, 1203 bp, Enterobacter cloacae
atggcacaagttatcaatacaaacagcctgtcgctgttgacccaaaataacctgaacaaatctcagtctgcgctgggttctgctatcgagcgtctgtcttctggtctgcgtatcaacagcgcgaaagacgatgcggctggtcaggcgattgctaaccgtttcaccgcgaacatcaaaggcctgactcaggcttcccgtaacgccaacgacggtatctctatcgcgcagaccactgaaggcgcgctgaacgaaattaacaacaacctgcaacgtgtgcgtgaactgaccgttcaggcacagaatggtaccaatagccctaccgacttgacctccattcaggatgaaatcaaacagcgtctggacgaaatcgaccgtgtttctgctcagacgcagtttaacggtacgaaagtattgtctaaggatcaaacgctttctattcaggttggtgcaaatgacaatgagacgattaaaattaatctgagcgaagttacggcaagtactttgaaactcgctggatttaatgtttccggcccgaacggagatgcaaaacctattggtactactgattatgccggttattctgatatttggggtaaaactacgggcgtaaattctacagaagtagctggtgtgactgccgcgcaaattgcaacggctaccggtgtagctgaggcaaacattgatgcgccaacggcaaccgccctcgtagataaaaatggtaatttgttcgccgaaatttcattcaagaactcactaaccaaagcggatgtcgcagctgctgcgaagaaggggttaacgcttgaagaaaatacagcaaaaaaagtttatattgcactgaatcctgctgatgccactattgcagctagtaaagcgacatttaagcttgacggtgcgaatcttgatgtgaaaacgatgaaatcgggcagtaccgcaaatccacttgcagccattgataacgcattgtccactatcgacaaacagcgttctgctttgggtgcaatccaaaaccgttttgaatctgcaattaccaacctcggcaacaccgtaaataacctgtctgccgcccgtagccgtatcgaagattccgactacgcgaccgaagtgtccaacatgtctcgtgcgcagatcctgcagcaggcgggcacttccgttctggcgcaggctaaccagaccacacaaaacgttctctctttactacgttaa

SEQ ID NO: 166383 - DNA, 372 bp, Enterobacter cloacae
atgtttttagaagatatggattgggataaatcatcagttgattacaacaacaatgtaaaaagtgatgttcatgaagtcaggcattggtttgacgtagagtgctctccagctaaagaaattttagatctagatggattacgtgctggtttgatggatgaaatgtttcggatgaaaaaagatcatcctcgccgttatcttacacatgcgatctatgttttggtttttaatggattcattaaaaacccattaaatctgacctttgatgatattgaaaatgctcgttgggccatcaagaaagaagagtatggttatccagaactaccaccaaataaagaagtaatgaatatcccacaatcatattttaacttataa

SEQ ID NO: 166384 - DNA, 1146 bp, Enterobacter cloacae
atgattgctgacatcgcttttcatgatctcgatagtgataatcctcatgctcacgttatgttgaccttaaaaacaataggcccggaaggttttggcaaaaaggaaagaagctggaacgacagaaaaatgtctgtcctttggcgtgaatcatgggcatctatggctaacagcttcctcgctgctgctggttcatcagaacgtatcgatcatcgttctctccaagtccagaacgaagaagcactatccaatgcggctattgctttggataatgaagaaaaagcattatggcttgctaaagcggctgaaacaaatcgccctccaatgaagcgtatccacagcgccaaatggcgtagtaaagcggctcaggagcaaagagccgcagaacagacagttcgtgatgcagcgaagcaggaagcggttgaagtctacaaaacattcagtgaacttgacctcgaaatcgtcgttgatgtcagaagctttacgattatacatcttgctgaaccagaagagatggtattacctaaaacacaccccggcgcttctactgatgagaatcaaagacctgtattggtagcaccagctcctcatactcgtatgcgtggcgttaaatcttaccgtgataaaacaaaagtcagtaaggtcgttgctggtaagaaaccatcagtcagtatttctgattctggaacaaatactattctgaaaacattctcctcgcaaaacccaaatagggcatccagaagcgcccctgaccgtgtgaagaggaaacagactactccacgtcaggataatttttttaaacgtttcactgcccttttagttgattttatcagggataaattcatatgggctaagacagacaaaactaaagttgatattatcagtgaagaacatgataaacgtattgctgaaaactatgtctttgatgaggtattaggccgttatatttctcgcgctgaatatgagaagcaagctaagtttaacagtgataatcacaaaccaacaccggatgaaatcagacgttttccaagtcgcccggttaaaccagcacagcttgatggcgatcttgattacataccaacactatcgtctgataggaaactgctaatacccagactgaggccaaataatggttttagagatagataa

SEQ ID NO: 166385 - DNA, 324 bp, Enterobacter cloacae
atggaactgaactttgcggcgacggtactgaaagaacttggacatatgacaaggctcggtatctacaaaagactgatcaaagcaggacctaaaggcatggctgtgggcgaactacagaagcaactagagatcccagcttccacactgagtcatcacctttcatcgctgatatctgtatctctggttcgtcaggaacggcacggtagaacactttactgccacgcttgctatgaaaatcttggtgcgttgatttcctttctaacagaagagtgctgctcggaagcatgtgaactaggcgatactgataccgatgtcggagaataa

SEQ ID NO: 166386 - DNA, 318 bp, Enterobacter cloacae
atgacgccaatgatgcaattgcaggacccggagaagacgaaggtgattatcgtgacgcttgccgaaacgacacctgtactggaagcagcaaacctgcagcaggatttgcgtcgcgctggcattgagccgtgggcatgggttgtgaataacagcctggcggcagctgaaccgtcttcacctttcctgaagaccagggcgaaccgcgagttgcctctcatctctgatgtggcagagcagtatgcaaagcgtattgcattaacagcgctacagagcgaagagccggttggtattgacctgctggaagaaatggcgaagtaa

SEQ ID NO: 166387 - DNA, 513 bp, Enterobacter cloacae
atgactaaagtaactgtcgattatccttcttctatctcccgccgtaagctttcaaatctgttcaatcactccccgtttatgttgtctcttgttcatgacatgtgtgactctcaagctattgttcttgctgccatgtgtgaagggaagtgcgtaacaagtgcggggaaccggattgaagcagactacgaagtaactaagctggctgcggtcattgatgttctggaaaataagttttacctgcctgtatcacgcgtgaagattcccaccgcgtcggatactggaggtggaactatccaagctaaatatctcattacggaaaatgatatgcagctgttgctggaagatccggaatcagtggttttgacgcgagagagattggctctttctaagttaaaaagtcgagatgaacgttgtttaaaacgtttggtgtccgttcacggttatgatgaagtttttcgatcactacaggcgttagatgtagctaatgattcttttggtcgagattgcgggtaa

SEQ ID NO: 166388 - DNA, 348 bp, Enterobacter cloacae; identical to SEQ ID NO: 140631

SEQ ID NO: 166389 - DNA, 1296 bp, Enterobacter cloacae
atgaatagagttttcgtattaggtaaaacaggtcaggcgttgatgccctgccatccggcaagggcaagacagctattgcagagcaaaaaagcaagagttaaacgtctttatccttttactatacagttaactcagcgttcagacggatatatacagcctgttgaactcaagtttgatccgggttcaaaacaaacaggtgtagggctggttttacatgggaaaaacaggctgtctgccatatatgctgctgtgttaactcaccgtggacaggaaataaaaagcaatttagatagtcgtcgtatgataagaagggccagaagaaaccgcaaaaccagatacagacaggaacgtttccttaatcgtgtaagaagtaagcataaaggatggttggctccatccgtccatagccgtgtagataacatagtggaatggtcaaagcgtttcatgcgactgtctcatgttgattttataactgttgaatccgttaagtttgatatgcagaagatggaaagcgctgctgttgaaggacttgagtaccagcgtggcacgctgtttgattatgaagtaaaagaatatttgcttgagaaataccattatagctgcgtctattgtggaatcaagaatgtgccatttgaaaaagagcatgttgtcccacgtagccgtgggggaagtaacagaataagcaatctggtgttatcctgcaggtcatgtaatgagaaaaaagataacttgccaatagaggagtttttaaaggataacccggcgttattgaaaaagataaaggcacagttaaaaagctcgttaaaagatgctgcagcagtcaatataacccgaaaacaaatcgtaaaagaactgtctgatttaaatgtgcctgttctgacgggaataggagcagaaacgaaatataacagagtaagtcagggatatggaaaggaacattatatagatgcgttgtgcgctggcacaacgggaacgaaggtatatataccgtctaagttaaaaccattgttgataaaaaaggaaagaagaaataacaggcagatgtgtctggtagataaatacggttttccgagagggaaagcgaaaggatctaagatagtacatggatttaaaacaggcgatatagtaaaagcagttgtgttgaaaggaaagaaaaaaggcgtatataaaggtaaagtagcggtaaggtcaagtggaagcttcaacataaacgtaaaacagggaaggatagaaggcataggctggaagaactgcgtaatgctgcatcggttcgatgggtatagctatacctattag

SEQ ID NO: 166390 - DNA, 441 bp, Enterobacter cloacae
atgatttcttaccaaagagattttgctaatgactttaaatgtaaacttccaaacggtattgatgcaaacgtaaaagagttaaccatttgtgtcgaagatatcttttttgacgcagatgatcattcatatattaatgatgataagtttaaagaatctatttttcctcttattcgtggtttttacattttggttaaaatgatcaatgaatctcatgaggaagaaatagaaagcaaggatgctgataaatattatgaatggcttgttaacctgactgactatagtttaatgaggcttgttctcttttgtgttttttattatgatggaatatcatcctttaactacataaattccaaccaggcttttatttccaagctgtcaatgattgggtggggcaattatattgctgaagttaaaaaacggaaattgcaaatcggtaattga

SEQ ID NO: 166391 - DNA, 306 bp, Enterobacter cloacae
gtgcgaccccatgaggtgcaggacgatcagctgcggctgggtgcgcggggtggcgaagacctgcgccgtcattttcagcagcgcttcgtctttagtgtttttgtcagcttcaaagtcgccatttttcaggaactgcacttcgtcagcccgtttggcgatgctggcaatcgccgtatcgtattcgccaatttgcccctgattagagaaccaccacgtctgaaaacccgcgcggtttgccagggtgacgaaattatcctgatactgcggtttgccatccaccacccggttaagggtcagaccgagtga

SEQ ID NO: 166392 - DNA, 162 bp, Enterobacter cloacae
atgaataataaaatacctaacaatgtcattggcgcggtgtcttcagtacttagggaaggtgcgaataagcaggtcatttcttcccaagctgactcgctgattaaaatttcgcggatctgggccgatttttttcccgcaaacacatcgaatcagcctatttag

SEQ ID NO: 166393 - DNA, 972 bp, Enterobacter cloacae
atgattaagcagcggaatatttcaatcgaactactacggatagtaagctgcctattggtaataggtatccatgttttaccgccgtacgaaatatatataacacaaaacataacagattctgaaaagataatatctttattgtttcaatgtttggtgcgggttggccttcctgtcttctttgtgataagtgggattttccttttaaattgcaaggtagagaatatttttgttttctacaagaaaagattactaagcctactcatcccattctttgtattttcaattctacacttcgctattgctaagctgccagttggcaacgtttcacttttaaatttagctattgagtattttaaagaattactgtcaagcactgggatatcattccatttctggtttgtatattcaatgcttggtatttatctagtaactccattagtaagcttgcttctttcttctgtaagctctcgcaatgcactttttgtattgttattcctgattgtcattaaggcatacaacctttattgcaagggtcttattgctgggttttccattccagacataaacatatggctggtatattttattataggaggattgataccaagacttcctaaggctccaatgaaagtctatttattggcgttcttttctgcatacgcttcgacttgcattgttacatatgcacagattgcattccagccatcaacatacctagcgccgtttgatacaggtttaaatatgatagtaatgtctgtatctctttgtatgattttccatagttataactggaatgcatcaggtctgattggtggtatcgtgtcaaaggtggcaggaaacacatacggagtctatttgatacacctggtagtcttatctaacgtaactaccatgtatgacttttcatggtatgtaggggagtcgctacaatatgggctgcttatgattgcggtaatgactccaacttactga

SEQ ID NO: 166394 - DNA, 984 bp, Enterobacter cloacae
gtgataaaaagtgtatggaaatataggggccaatccagtgatgaagatgaacactggtatgggcgacgctttttcaaaatcgatattttgggcaacgagattctggagtttgatttacgtgaccacgatggtaaccgctatgctaacacccacgatctgatttgggattccgccgataatcttttcatgattggtaatgataacccggaccgttcgaccaacacgatgagacaggacgcatcaattttaaaatttgatgaaaagacaggcgtgatgctgtgggcaaaaaattatacccgcgcatttgataatactcagatcctgaataacagccccacaaacgatgctcaccttaactcgctttcctggatccccgcaggcgaggtaaatgctgaagcgattgttgttcatactcgctctgcaggcctgacgtttggtatttctcctgccgacggcaagatattatggagtattaataccgggggatttaacggtaatttcgcagcaggacagggcgttacgcagatagatacttccggtattgagagttttgaaaatggtgctcataccgtattcgtcactaaaaatagcgcttttgctgggttaagcaatgagactgaaggaaaattagttctttcgctctttgataatcgctcctgcgttgataatgaaggcaatgcggttactcgagatattacacgtgattcaacggctgatgcttacaaaaccgatcctgcgagagtcatgttctatgctgttgatctcgtcgccaatacagcaacccaggcaggtagcattatccagttaccctccgatcgtgttcctcaggtcactgattttatgggggcagcaatagattatggtgactactatggcatctacaccaaccacgcacgtgtagattcaatctgtcaatgcaacacccctttcaattatctctttcggtgttttgaacttcagtgtctttctcggtctgttgtttag

SEQ ID NO: 166395 - DNA, 828 bp, Enterobacter cloacae
atgttgtccattcaaagcggcgcctcgctggcaaaatcgctttttccactggttggcgcgcccggggtgaccgccctgcgtattgttctgggcacggcgatactagtggtcattttcaaaccgtggcgactgcgctttaaaaaggagcagcgtttaccgctgctgttttatggactctccctgggggcgatgaactacctgttctacctctccatccagacgataccgctgggtattgccgtcgcgctggagtttaccggcccgctggcggtggcgctgttctcctcccgacgtccggtcgattttatctgggtcgtgttggccgtactgggcttatggttcctgctgccgctgggccagagtgtttctgagattgacctgacgggcgcagcgctggcgctgggcgcaggtgcctgctgggctgtctatatcctcaccggccagcgcgcaggggaagagcacggaccggcaacggtggcgctgggttccctgattgcggccatcgtgtttgtgcccatcggcatggcgcaggcgacagaatcgatctggcaatggtccgtcatgcccatcgggctggcggttgcgattctctctaccgcactcccctactctctggagatgattgcccttacgcgtctgccgacgcgcatatttggcaccctgatgagcatggagcctgcgcttgcagccatttccgggatggtgtttctcggtgaaaccctgacattgacccagacgctggcgctctgctcgataatcgcagcatcaatgggatcgacgctcaccatgcgccccgaacctaaagttgagaaagtggatatcaactaa

SEQ ID NO: 166396 - DNA, 510 bp, Enterobacter cloacae
atggatcatatagagccatataagaaaagggaccacgctctagatggaattagaggaattgcgtgccttatagttttctgtagccattttatgcaatttttccttccttcggttttctttcagaatcagcatgatcattatggagagaagtacatcagcgaaacgccgctgaatatattatacaatggtcagtttgcggttatgattttctttgttcttagtggaatggttttatctataccattttttaggggtaaggatattgcatggtattccagatcgatcattaagcgttacccgcgcttagcaataccaaccctagcttcagctgtattttcttatgttttaatgttagtgatcggctttcatcaggatgatacttccgtgtattctctttctagggaaggtgcgaataagcggggaaattcttctcggctgactcagtcatttcatttcttcatgtttgagccgattttttctcccgtaaatgccttgaatcagcctatttag

SEQ ID NO: 166397 - DNA, 501 bp, Enterobacter cloacae
atgttaagtaagtccgatgtaatcctcaatgaagattatctcgctaagcgtgagtattataatagcatcgcgaataaagtcatctatactggtcctattgatgagtatttcgattataaatatggaacattacagtatcgtagcttgaaatttgagaatgagtatcttgagagtgaagataattaccaggggaatgctgtagtaaactatactgaatatgaagttccatatactaggattattgagcataaacactttgagtttaatgattgttctggtacgtatattacaaaagagtttcctgctgaatggaagttaggagatgaggcatactaccctgtcaacgatgattcaaacatgcaactttataaaacatatcgtagacttgcgaaattcgaacagagggttcacttcggtggacgacttgcagagtacaagtactatgatatgcaccaagtgattcgaagtgcattctcgtttattgatcaagagttgcaataa

SEQ ID NO: 166398 - DNA, 666 bp, Enterobacter cloacae
gtggcggcctgtacacgtgagccactgcgctttcgcctgcaagtcggcgaccgctatataacgctgatggatctgcccggcgtgggcgaaagtggcgctcgcgataccgagtatgctgcgctgtaccgcgaacagcttcctcgcctcgacctggtactgtggctgattaaggccgatgaccgggcgctgacggtggatgaacatttttatcatcaggtgattggagaggtataccggcataaggtgctgtttgttatcagccagtcggataaggccgaacctaccagcggtgggggacagttgtccacggcgcagaagcagaatatcagccgcaaaatctgcctgctgcatgagctgttccagcccgtccatccggtgtgtgctgtgtcggtccgtctacaatgggggcttaaggtgatggccgagcggatgattaagtgcctgccacgtgaggccaccagcccggtggtgtcgcaactccatccttcctttcgcacgacggtagtccgggaacaggctcgtagcgattttggtgaaaccgtcggggccgtactcgatagcatcagtgcctttcccctgatacccgccccggtgcgggccgtcattcaggccgtgcgcaccacggtggtgtcagtggcccgcgccgtctgggatttcttcttctga

SEQ ID NO: 166399 - DNA, 234 bp, Enterobacter cloacae
atggtgctgtcgagtgacgataaaacgcatcgcgtcattaaagcacgccgttcagcaaatgatttcctgcagtttttctcgcagtggacggggattaccgccgggcagataaaaaacgcttacccgtttgtctctaacaagaaagctcccccagtgtacgttaccaacttcaagttacagaaagttgactacaaccatctgggtacggatatttttgatattaagaataagtaa

SEQ ID NO: 166400 - DNA, 234 bp, Enterobacter cloacae
atggtgctgtcgagcgacgataaaacgcatcgcgtgattaaagcgcgccgttcggcaaatgatttcctgcagttcttctcgcagtggacgggaattacagccgagcagataaaaacggcttacccgtttgtctctaacaaaaaagcttccccagtttacgttaccaacttcaagttacagaaagttgactataaccatctgggtacggatatttttgatattaagagtaagtaa

SEQ ID NO: 166401 - DNA, 150 bp, Enterobacter cloacae
atgcgcattgccacaagttattttcgcatcttcttcattaccaagaccaacgtgtttactttttgtctcaacaacaaagtaaatatggtcttcaccattgtcttcaatattgccagtagaatgaacatagttagagctgatgtttcctga

SEQ ID NO: 166402 - DNA, 423 bp, Enterobacter cloacae
gtgaccgactacgtcaaccagcgcccttcgcgcgtttcgtctggtttcgcccagcgggaagtgatcgccatgctttacggctcactttggtataaacatatcaaaaatgagtcgtttagcagaaaaatcgcgctcttacttgagtcgctcgtgatcacgggcgatctcagcgaagagggtaaggtgtactacgtgcagggccaggctattaccaccatggtcgagtatgaaaaagaggaccagcgggtaacgcatcagcaaaaaatgcagaaaaaaattacgcgttttatgtttgcgataacgctatctacgctgctgattattctggttctgctgtcgatggcaggggtcgtcgacctcgccgctgtctggcagaaaatactacagattaagcctcttagatttttaatgaattttatctaa

SEQ ID NO: 166403 - DNA, 891 bp, Enterobacter cloacae
atgtacgacccgatgaccttagagaatttacacaggtccacttctttgcagggattggcgtttggtcctatgccctgcgacgcgcaggatggcccgatgcaagccctgtctggacaggctcctgcccatgccagcctttcagcgcggcaggccagggaaaagggtttgctgacgagcggcacctatggcccgccatgcattggctggtcgggcagtgtcgccctgtcattgtctttggcgaacaatctgcaagctctgacgcgaacagctggatcgaccttgtacaagctgatgtggaaggcatgggctatgccttcggggcgtgtgcgtttccggctgcgagcgtcggtgctccgaatatcagagatagagcttactgggtggccgactccagcagccaacgaattcttgccgaagaacttagaaatgttggagtcgagaagggcgcgccttgcggcaaagaacgggaacaacggctttgggctgagtttggggcaagcagcggcgcttttagcgggatggccgacaccaacagccagcaacgtgaaaaatgcttatcaggatgccgacaaggtaattgcgaggaaagcagctggcaggcaatccaatctccaggattttgcgaccctcgcgggatggccgacgccaacagcatcagattgcaagggtggttatcagggcggaagagtgcgcaatgggaagctttcaatcgacagattggacgtggtggcgcagatagcgggaccagcccggttaacggtttctggcgaactgctgactggctcctgtgcagagatggtaagtggcggccagttaaacccggccttaagcctctggttaatggggctgcctcaagagtgggacgaattcgatcatatggaaatgccttaa

SEQ ID NO: 166404 - DNA, 165 bp, Enterobacter cloacae
atgaaagcgtggtctctcgaagagctggcgctgctgtggcgacactcaaacgctgaagtcgctgagattaccggccgctgcattgaagaggtaggagataagcggctgcaaaccaatattgagcgtaatggctgggatgttaacgatccggagcgtgcatcatga

SEQ ID NO: 166405 - DNA, 210 bp, Enterobacter cloacae
atgcgtaacgacgattttcactgtgtgggcgatgggcgtggcaagcgacgggtgttcgttaatggcaacgaagttaagagctgtgtatgggctgacgttaagcgaggtatagcctgcatccatccacacccgctgcggattcacaagcgaaagcgcgatgaagtctatacccgcaaactgcgcggcgtaataaccgtcgaatttatctaa

SEQ ID NO: 166406 - DNA, 516 bp, Enterobacter cloacae
atgaaaaatggagaaatttgctccctttgcggcaaaggccatctgacaaagaagatggacgaggataggatcacgtacaaaggccagacaaaacaggtgactgatacttacttcacctgtgacttttgccacgtcgagcaagcgggtgctagcgagctaaagtataataagcgggccatgaattgcttcaaaaaagaagtagatgggttgcttactggtaaggaagtttatggcattcgcatcaggcttggactaacccaagatgaagcttcccttgtttttggtggcggcccaaatgccttcactaaatatgaaaacgacgatgtaatccagtctgaatcaatggataagttacttcgtgtagctaactcttatcctgcggtctttgcagacctttgtgaaaaggctggtgtttctactaagattcaaacgacctggttcaaacaagtctctttttcaaacgcctgggttagtgaatttgccgttgaaactaccctcttagaaaagacacactaa

SEQ ID NO: 166407 - DNA, 369 bp, Enterobacter cloacae
atgaattttgtaatttccagcatgtgggtggactctttcagtctgactcgcactacagagagaacaaatgacggtcaagaatttactttgagtatagacacggccgtagattacaacactaaagataaacgcagctttaggctcgctttatctttaaaactaattaaaaatgaaaagtttatattcaacgccagtcaaatggcggttgtgaaatttgacagagatatgagcgaaacagaggcacaagaagaattggaaacaccaatcgttgtcaacactttatatccatatgttagagcattcactattgccacaacacgactggctggatacaacagcataaatttgccagtcgttattgcagaataa

SEQ ID NO: 166408 - DNA, 984 bp, Enterobacter cloacae
gtggactccatattttctattggcatccagtcattatgggacgaattgcgccacatgccagtcggaggagtctggtgggttaatacggatcgtaatgaagatgccatcagtctggtaaaccagacgatagcggcgcagggtaaggattaccgcgtggccgtcattacgatgggcgatgagccaaagtcaatcatcaggctcgaaactgaccgtggaccccagacagtacgattattttccatgccagcggaggccgacagtttatactttttgccccgcgatattcagtgctctattgttcctgaacactatttactgattcttaaatgttctcaaaacggtctacaaaatatcccgtctgaaaaactgctgaaatggctgggaagaatcagcagatgggcaaaaaatcaaaattgcaccttattggttgttaacccgggcagtaataacgacaaacttttttcacttttaatgagtgaataccgttccctctatggcctggccagtattcgtgtccagactgacagccatctttacgacgtggctttctggtgcaatgaaaaaggggtgagctcccgacagcagcttaccctcaaaaatgtcggggacgagtggcatcttgctcaacaggaagagacggtggttcagccacgcagtgatgaaaagcgcgttctgagtcagattgcggtactggaaggtgcgcctgcactgtctgagcactggtcactgttcgaaaccaacgaggccttatttgatgaggcgcgcaccacgcaggcggcgaccattatcttctcgttgatccagaataaccaaatcgaaacgctggcacggcacattcacacattacgtcgccagcgcggcagcgcgttaaaaatcgtggtacgtgaaaataataccagcctgcgcgccaccgatgagcgcttattactgggctgcggcgcgaatatggtcatccctggaatgctcccctgtcgcgctgtctga

SEQ ID NO: 166409 - DNA, 201 bp, Enterobacter cloacae
atgacacaagaccagcaaaccattctgatgtttaagggccttattgcctcgctgcctgaagaaacccaggcgaaagttaaacaggctgagaatgctattcgtcagctactgactgattaccctgatggtgaggcggtgattgcactgggtctggttggtgccgaactgcaatacgatggactcgaacatgtgaataaatga

SEQ ID NO: 166410 - DNA, 1101 bp, Enterobacter cloacae
atgcattatattaaagaatatgcaatttactttgctgtgttattgctaaccgtttctatcgtatcaaaaatacttaagatagagccagacagccacaaatatagttctttcgatggcgcgagggggatatgtgcatctttagttgctatattccatatattttggagagatggcggcccatcaacagagtattggtcacttgattacatatcttctagcagagtagtccactacattcttctaactggtgagttatcagtaggaatgttctttattctttctgcctttcttttttttaaaaaggctatggcaaagacatttgattttgaaagattctatgtttcacgaatccttagaatttaccctcctgtggctttttctataataatggtttatgcggcatcctacgcaatatctgtaaaccattcctaccagattaacgacctgatccagtcattaccttcgcttttcaattacccaatgacgcgtataaatgatatacctttggcaataatgaactcaggtgttttatggacaatggtgtgggagttaagactatatgttgcaatccctatcatattcattattttaaaaagattcccataccctaaagtctttgtacttctttcaatggcgtatgttgtttatcaatggtatttcgttagcaaagatattgaattgagttatacaatgtacttcctggcaggcttcatggttgccactataaacaaagaggttaaattgcacgatgcacttagttctatcgtactttttgtctccgtgattttgataggtaatgcatatgatgtcattacaccattattgatgatgattgttttttataccctcaagtgtgggtgtacttactttggcattcttacctgcaaaccaattaggattcttggtgcttgtagcttctcaatttacctaattcatgggatacctcaggccgtctccaaacattatttttatgatgatggtaatatgatctggaaattgatttctataattgcgattggtgtaatagcgccagtaatgtacaaatatattgagaaaccaacgatgaatgcaagcctgttttccacacagaagaccacctag

SEQ ID NO: 166411 - DNA, 567 bp, Enterobacter cloacae
atgcattcacttgcgtatcaacagagtaccggacttgaacaacgtccgttgatttcgatttatcaaagtgttccgcgtaataaccgtaagctaactcgaatacgggaggcagttaaggcctggcaaaaagctacgccgggccagtctcaggttcacatttctcagctggttgcgaaagagtggctggcgcgcggcgggaaggggttgttactggcaggttctgaacacaacacgaagcagaacttcttccggatgattaacgatccgggcccgaagaacgacaaggggttgatgctattgatccccgtcattatcgacgtgatggcgcgggataacgagaaagtggcgagagagttcggtctggtcgcaaagactgaggccgaactgatagccgaggccatgaaagagtgcagtgaagcgcatcaggcgaagttacttggtcagccgatacaacgccttgagaaagaggtgagagaagctgctgaagcacttctgcgctttctgcccactgaatcaatcgccgcggtggtgacaagtctggccgctatggcgccgggagttatgtga

SEQ ID NO: 166412 - DNA, 798 bp, Enterobacter cloacae
atgaccagtctggcttcctccatgaccgtacacagcctggatcagcgtctaaatcccgatctggctccgccggaaatctctgagaccatgcaggagttcaataatatgtttgatcgcctggagggggcattccggaaactgtcagatttctcgtctgacatcgcgcatgagctgcgcacaccagtcagtaatctgatgatgcagacgcagtttgcactggctaaggaaagggatgtttcgcattaccgcgaaattttattcgctaacctggaagaactgaaaaggttgtcacgaatgaccagtgacatgctttttctggcacgttcagagcatggtctgctgcggctggataaacatgatgtggatctggcagccgaactgaatgaattacgtgagttgttcgagcccctggcagacgaaacaggaaagacaatcacggttgaaggagagggcgttgttgccggagacagcgatatgctccgacgtgctttcagtaacctgctttccaatgcaatcaagtattctcccgataacacctgtacagcgatacaccttgagcgtgacagtgactgtgtgaacgtgatgattacgaatacgatgtccggccaggttcccgctaatctggaacgtttgtttgaccggttctatcgcgcagactcatcaaggttctacaacacggaaggcgcggggctgggattatcaattacaaggtcgatcattcatgctcacggcggcgagctgtcagcagaacagcaggggcgtgaaattgtgttcaaagtgcgcctgttaatggattaa

SEQ ID NO: 166413 - DNA, 435 bp, Enterobacter cloacae; identical to SEQ ID NO: 19847

SEQ ID NO: 166414 - DNA, 1152 bp, Enterobacter cloacae
atgagtaatgtattttatatgccgcctgtaaccctaatgggacttaatgctattcgtcttttaggggatgaacttgtttcaagggagttaaaaaaagcgctgatcgtcactgaccgtgttttggctgacacgggactggttaacaaactgacagatgagcttgaggcgcataaaattagttatgcaatatttgatggtgttcaacctaatccaacagagaaaaatattgatgacggtttagccttgcttgcaaaaagtaatgctgattttgtcatttcctttggtggggggtcttctcacgatacagctaaaggtattgcattggtggccactaatggtgggcatattcgggattactcgaaaggtgtgcatctgtccaaaaaaccacaattaccattagttactgtaaatacgacagcgggtacggcatcggaaatgaccgtatttgcaatcgtcactaaccaggaagatgaaactaaatacccggtagtggataagcactttacgcctatcattgcggttaacgattctgaacttatggtcgcaatgcctgcgttccttacggcaactacaggtatggatgccttaactcatgcaattgaagcgtatgtatcaacagcagctacgcctgttactgatgcttgtgctatcaaagcaattgaaattattgttaataatcttaaagacgttgtagatgatggccaaaaccgcgaagcacgtgatgccatgcaatatggtgaatatctggctggaatggcattttcaaacgcgtctcttggttatgtccattcaatggctcaccagttaggtggcgtttataatctgtctcacggtttgtgtaatgcgatcctgctgggtgaagtatcccgatttaatgcgaaaaaggttcccgatcgttttgttgaaatcgcccgggcaatggggattgatgtctcaacaatgactcaggagcaggccattaattctgctatcgaagcaattgagatgttgtcgcaaaaagtcggtacgaatcaacgcctggctgatcttggtgtaacggaggataaacttgcaattatggcacaaaatgcactaaatgatgcttgttctttaaccaatcctcgtcaggcaagcctttcggagattattgagctctacaaagctcgtatgtaa

SEQ ID NO: 166415 - DNA, 252 bp, Enterobacter cloacae
atgttcaaacagcttgctctgaaagtgttgatgagcctggctaacgagaaatcacatattgttgaggaggtatcgtgtttcgctctggcatctggtgatgtcgtatttatagatggtctatgggtgttttgggtgtcaggtcatcttgagagaactcttgttcacgcctactacagactcgataacactgctggagtgaacgaatacaaaacacactctcatgtgtttcttagaaaagtcaggatagattga

SEQ ID NO: 166416 - DNA, 1386 bp, Enterobacter cloacae
atgaaaaagtctttactgtctatggttgttctggcttctgttgcatctgtctcggctcatgctggctcggctgctgctaacttcgtatctggtgaaattacctctggcgtggacttcaagaaaacccttgaggactggaataaactctcagcggaagaccagcaatcaatttctgatttccttggggctgaccgtgtgattgatttgggtggtgttaaggctgataccgttccatacgtcaattacaatcgtgaggcggttactcaagagatttacggtaaaatattgagcgccaataatcagagtcgcaccaatgcacaggtagaggctctgaaaaaggctcagactctttacagctacggtcacaaggtgaactcggtaggtgttccggtaactatgattgctggtgtgaagaataatccagtgggtgagcctgtgccatcgacggtgcagagtattcagaaggagctttttgaacatgatgctgcaattgctggtaacgccgctgtattgaaagacactgctgacaagctggatggtgttgagaaaattgttgcaggtaatactgctgaactcaaaactactggtgacaaattacatgcagttgagcaagttgttgcagatgaccacgctgggctgaaagacacttctgacaaattgggtgagatggaaaagagtgttgcaagtaatcgttcgggtgttgcgagcaatgctgaccagataagcaaagttgatgccgttgccactggaactgcaaagcaggatgcaattcgtaatggtgacaagtatcagggtatgcttcacgctcgtcaggtggctgagacaaatgctacggtcaaaactgctgttgatgctatccctgacaactcaaaagagatggcaactaacaaggctgacattgcccgtaaccgttccgatattaaatcatctcaaggtgctgttgctaaactgtcagctcaacagaaagttgattcagtgcattacagccaggagattcagtctttggcaggggtgcaacaggctcaggctgatgtgattaacagcaatgctaccgcttctcgtgctactcagtctcaggttgaccgtaacgctcagtcaatcagcaagctcaacagtaatttcagtagcctcaaatctcaggttgacagtgaccgttctgaatatcgctcaggtatcgctactgcaactgctcttgctggtctgccacaggtgaactctaatcagaagtttatggtctccgctgcggctggtacgttcaaagatgcctctgcaatcgctgtaggtggctctgcaaatattactgagcatgttgttgtgaagtttggtgtctctgactcaacagaaaatgatgtagcggcaaacgttggtgttgggtatggcttctaa

SEQ ID NO: 166417 - DNA, 939 bp, Enterobacter cloacae
atgagtccagatgcaatacttctcgctaaagctattgtttctctacaaccatcacccgattacatgaaggattatgtctttccaataacactggcttttttctcggctttgcttggcggcatgtctgctatctatatcaaccgcagacaggacttgaggaacattacgaaggataattttatagctgcaaatgagacattcgttaaagcacatggatgtttgaataacctgattgccattaaagccaactataaacacataacgtttgatgagcctctttacagagcattcgcttacccgactatgcttgtcaaaaaagatgaggttgcatttaacccaagtacactttatttcatcagaccaatccccacagccaacaaaccttttccgcaaaatcttatctggcatatcaagcatcgtattttgaagatggaagtcccctccccacctccagaggaattactctacacctggaggaatgttgtgagagtcagcgccatgttcagtaactacaatcagattatggaatttcttgtcacgagaaacgaattaagccaacttgcaaaagagaaagctcgtgaggttggagattttagcgaccagaaaacttttacggaattaccaaaaatacttggtcgccaattatgcggaggtttcgttgatgtcaccgagcaagccattgccttgactgaccatgtgataattgaattgcataagttcctcatagaatttcccgccattgcgtcgagcaatatcgagttgaaaagaattagagaatggggcggattgccaacttatacaaatcagcaaccactttttttagaaaccatcaagccaatggtaaaacctaactttgcacgacttgccgcatatgtagggatatccgaggaagaagcgagagcaagatatacatacagagattgggaaaaaccttcttga

SEQ ID NO: 166418 - DNA, 192 bp, Enterobacter cloacae
atgaacagagccgcacccgttgatttgaggaaaagcctggaaatcgccaataaccttgcgcacatcgggattcgttttgtgccgatcccggtggcgaccgaggaagaattccagacgctggccgccgagctatcacgacggcttgagcagatggcggtcgaagccgaaaagaatgaaggcggtgcagcatga

SEQ ID NO: 166419 - DNA, 216 bp, Enterobacter cloacae; identical to SEQ ID NO: 119954

SEQ ID NO: 166420 - DNA, 435 bp, Enterobacter cloacae
atgagcaacatcgacaaacaggcactgcgcctaacagcagaaaaggcgaaagataacttcatgccgaactttatggtccctactcgggatgtgctggcgctgctggatgagctggaagccgcagagcggcggattgctgagctggaggcgcgggaggttaagccagtggcatggatgaggaacgctaacgccacatcattcatgtcgaggttcacaaccaatgagaactatgcagttgagcaatggggagatgatgcagttgccctctactcccttcctgtcgattacatccctgcatgttttacagacgaaagaaatctcatgcatatcaacgagcgtggacgagagacgtcacttatctggagtgagcagaactcagacagtgacgacattcaactttttcgtatagccgccgcagccggtaaaggagagtga

SEQ ID NO: 166421 - DNA, 342 bp, Enterobacter cloacae
atggaaaagccactgaataagcgagagcgcgagtttttaaagccagccatagttcatcgctgggagattgaaatatcgccataccgaaaaacggcgctctgggatggtgactctctctttcctgtcaaagtgggtgcaatggctgaagacctgataaagcgcggttttctggaacgtgtttctatggggtttggtcgagacattatcagggcaaccaaaaaggcagaagtcctacattgttaccgctgccattacggaaaagtgattaaagaaaatggacagcagggcgaggattgcccgcattgcgatggcggtgtaattgtgaagaggactaacccatga

SEQ ID NO: 166422 - DNA, 363 bp, Enterobacter cloacae
atgaaacgcttccccctgatagccctgattctgatggcaacttctgcatcagctcatcaacttgaatcacaattcccccacggtttagatgaagcgctacgttgttcatactttgctgacaaagcagaactatcccccaccccatatgagaaagtagctctgaggattgcaaaagaagcgtacagcgaactttctgatgatgcgtttactattaagttcgcagaagattacgcccttgcagctacaggtgcatacagtcaagtgaacatgttcgcaaaccgtcagcagggaacggtagatgagatgcttcggaaaggtgctatcgaactgatgaaggtaaatcaatgtgaaaaggtcaagtaa

SEQ ID NO: 166423 - DNA, 351 bp, Enterobacter cloacae
atgaaacgctttcccctgatagctctggtgctgctgtctgctgctggttctgctcatgctgcacggggaatatctttcccgtatcagaagcactacgcctgtacatgggttttcacaggtacaccacagcaagctcctgacctttacacggcggttaaccctaactctcacgcaatgaccttacagcgtccaggcgctgaaccgtattactctaaacaggtcactgacgatatatgggaagagataaaccctgaacctaaccaggatgcagaatccgtaagggttacacatggtgctttagatacgtatcagggcaacatgaaaatctctgaatgtgtggaagtggagtga

SEQ ID NO: 166424 - DNA, 267 bp, Enterobacter cloacae
atggtgagcattatcaggactactggcaacacctcaactggtttgcatatggttcaaagaagcgggaacaagttcaagtttcgttgtagcgtggattcaatcaagaacctcgtttcagtgacggttaaaccagaacacatgcactacttcaccgcccgtaaggatggtgtatttcactcagagttgtacgataaaccggaacaatgcgcagacgagttgatttcattcatcttcaaatgcacaggtgttcggtgcagtagagattaa

SEQ ID NO: 166425 - DNA, 156 bp, Enterobacter cloacae
atgaacgcagaatacttggctttcctgatgctcaccttccacaatctctggaacatgtttctccaaacgagtgctctcgattgggtgattttccagatgctatgcaatcaaatgtggttggtaatcagagcacatgtcatatacatgttcacataa

SEQ ID NO: 166426 - DNA, 339 bp, Enterobacter cloacae
atggataattgctgtattactctggatgactcaattcatactgctctccagaaactcaagcgacagtacaaactgttaatcgacgataaagacaactcacttgatgacatcgagaaaagttactttgcacatatgatgagttactacatcaagaaccatccggtgacgtgctacgtgttgcataaacacagtctgaaatggtcgttacagggaagagggaagggtgtgctctttaagttcatcgaagctgctgatggtatgcctgataaactccagacgatgaccattcactatgactcgtttgataagcggtacattctggaggctcatcttggataa

SEQ ID NO: 166427 - DNA, 1002 bp, Enterobacter cloacae
atgcaaattgcaagagcttatcaaattatcgtaggtaacgatgttaaggcgtttgctggaaatgcttcatctcaaggtaaagacgagagtaatgctacaattcttgaccagttgcaatttacaacatccatccagattgataatgatttttcaaaaaatcaatctgatgatgtgacatttgatattatcaacctatcgaaagagtttgagcaagcattcaaatctgatggtgctacgttaatgcttcgcgctggatattatcaagacgagaagcgtttagcagatggttcactttacgttgataatgatgatttacccgtaatcttccttggcactatttatcacagcttttcatataagcaaggtcaggatgagattacacgagtttttgtctctactgataaagttgagcgagcaacaactaaagactcactttcattttcacctggttctaaactctcagaaattatttctgacctcgctaaacgtatgccattcactgttaataaaattgattttggtaatgttggtgggaaagtttatgttggtgggctgtccttatatggcaaggttgcaaatatgctcacaagggtttgtgatgagaatggtttaacctggtttgtccataacaagaaacttactgtgcaaccaatcagacctgtcaaagattctgctcaaactccgtgggatattcatccagcggatatgattgaaagtgtcaaagctacgtacactcgctctcgtactaaagttggcaaaaagtctaaaggggaagagttaaaacctggtgagaaggtcactgttgcagatggtatgaaaacggtcatcaaatccggtgtaactgtaacagtattgctcgatggtcgtctgatggtaggtgactttgtgcgcctgaacgacattggagaccttgcaggggattaccgtatcaattccatcagacatcagttgagctaccgtcaaggcgattggacaactgaacttgagtgtgtggcggtgtaa

SEQ ID NO: 166428 - DNA, 804 bp, Enterobacter cloacae
atgtctctattcagtaatcttgcgctcacgtcgcgagataatgtttatttcaatgctgtgaataatttgaatcaagttttctctttatccgctacagaagaatactcatccaaatcttcttattcaatttctaatcagccaactgttgatgtgaatactgtcactgataatatcaacaggcagccacgacaagtgacactgacaggtgtatttgtatcaaaaacctcatatcagctttttggtaatggcgctgttgcaagtgcaaatgattttgttaatgccgtagagttactccgacagcaaaaacaggttatttctctgcacctaccaaatggactatcgctactgcaatgctttattacctcgtttgatacaagcgctgataagacgattgtgaacggtcttagagtgtcgatgactttcgatgagattattgtgacacctcagaagttaggtaaggcatccactactgttcagggtgatacctctaatggtggtatcggctcaaaagttaagacaactgctaaaggttctgttgttactgagaaacaagtaggcagggctgcaacctcagttggttcatctcgtaccgtctgtggatttatgagtgaatcatcaaactaccagggcaatgacaatcgtgtttttgctgctcagaaagcatgtaacgaggctcgcctgggtcagcgtacaaatgcctctgctgaaagtattgcatccagcaatatgcaggactaccagaaacaagtgtctcttaaaaaacttggtgggaatatcaacaaaaattatttaacggtgaagtaa

SEQ ID NO: 166429 - DNA, 1479 bp, Enterobacter cloacae
atgcaagctgcttacaccaaaccaggtgaagctgatgctcagatgaaagctgttaaagagttgtctgacaagtacggtacgccgcttgcagaggcaatgcagcaatcagcagctttgaaaaatactcttcctggtgacatcagtgatgcggtcattgcagcgttccacgaaggttctactgtacttgctcgtacaacaggtatgagtgatgaccaaactcgtagaatgtctatcgcaattgagaaactttctgcttctggtaaaaacattggtcgctcgtggaatagcctcattctgaatgccccagccttgctgtcaaaaatggcaaaagcaaaaggttttcagaatacaactgaccttcgtgactatttcaagcagaagggcggtcaggcatcagcacgagagattattgcttacatcaataaatatcctcagttgttggcaggtaacggtaaaactaacgctcagaacgttcagacatcactacaaaccaaattgtctcaggcaactaacgccactacagacgcaatggatttatttaccaaaggcgctacagatggtcttggttatctggtgaactcaatcgttcaattcgttaaagataacggatgggcgtttaccactttaggtaaaatggttggtggaatctcagaggcgtttggtcgtggtattcgtcacttagacaggttcttcttggaactttacaactactatcttggtttcagaatctggtacaacaatctggacggggcaactaagacactggttgataatttcagtaaatacgctgctgatattgttgctgcgatgatgggtgctggcggtctccttgccgtacttggactactgaaaactgccttttgggttctctggtctcctgtgaaagctctcggtggtctgttgaaattccttgtacctgctggtgaagctggtgctgctgttgcaggtagtgaggctgctgttgccacaggtgctgctgttacgggcggtgaacttgctgctggcagtgttctggctgctatgggtggtgcagaagttcttgctgctatcgctgtggctgcattgactgcatacggtttaggtaaactatgggatgcgctgaaaccatcttatgataagaaagatttagattcgtctggtcagtattatcataatacgcttgctggaaatgccattgatggtgtgcgtaatgcctggaataaaatcacctcttctgacacattccaggggctgcaaaaatacgataagcaaaatatgatgagtacaaactcttattcatacggcgctccaaatggtatggctccacaggttcagaggtttgaaatgacagtcaaaactcagcctgttgaaattaatattgctgcaaccactcccgaaggtctcaagcaacaaattgctcatactgcaaaagacatctttgacgaggctcatcaagccgcgacatacaatacagcatctctgatggcactcccaaggtaa

SEQ ID NO: 166430 - DNA, 435 bp, Enterobacter cloacae
ttgagcaatatcagaagcgatgtagcgctgcccggcgtgtacggtgcggatcgcattgacgacttcctgcggcgcggcgcctttactgagatacccggcagcacccgcctgcataaccctggcaggcagcggattttcggtatggacggtcagcatgataactttggtatcaacgaacatgcgcgcgattttgcgcgtggcttcaagcccgccaataccgggcatgttcatatccatcagcaccacgtctgcggagttagcgcgacaccatttaacggcatcttcgccacagcacgcctcgccggcaactttaataccctttatatcttcaagaatgcgtcgtatccctgcgcgcaccagttcgtggtcatcaacaagaaggacgttgatcaaaggaaatgtctccagaatagggataacgctactgactgctaa

SEQ ID NO: 166431 - DNA, 474 bp, Enterobacter cloacae
atggtcaagcatgttgaacgtcacggcaaaaaacaacttctaaacttaaccaaaaaccttgcaagcactcatgtaaagattggctactttgcagaccagggaatacacgaaggttcagggatgtcatacgtcgaattgatgaacttgcaggaagtgaaaggggtgcggtctaagaatggattaatcagacgcagagcctttgctatcgggtctggcctacatgccgcaacagcaaggaagcgactaatgcagggtcttgtaaaagcgttcaggggcggtagttcgtcaccagtgctggtagcatctcagtttggcaaggatatgcaaaaagcagttaaagatgtattcggtaacgctgcaattcttccacacaatgcagaggcaaccgttgccagcaaaggcaaggatgcaccacttattgatactggtgatttgatgaacaagctgacgtaccgtgttattacaaaatcttaa

SEQ ID NO: 166432 - DNA, 594 bp, Enterobacter cloacae
atgaatactcaatggtctcctgacctccaaaattatttacgtgcagagtacattgctgacctacagcgaggatatttaatccacaaacgcgataacggcaaatactggtctgctggcgatatccagattggatggaagcataaaagcaaggcatcaccttatcattacattaccgtcttcattaatggcaaaaagaagaatgtcaaagttcaccatgcattatggttcctgcattacggaaagcaaccagaaggtgttattgaccatatccgagggcttgatattccctatccaaacgcaatgagcaacctgcgagaaacaacccacgctaacaaccttctgaatagttccaaggcaaacggcaagactaaaatccgaggtgtacacgcactaagaagcggtggttacaaagtcgtggtttatcaaaagtcagtggcaagatgtgatagcaagtgggaaggttattcgctgtattgtgaacacgctcgcaaagcccttgagagctactacagaccacaacttaacccttgtggaatctggatggtaaaaccaagtcatcccgactataagaagtttgtattgggtgtttcataa

SEQ ID NO: 166433 - DNA, 576 bp, Enterobacter cloacae
atgactatcttcgcatacactcgatgctcaactagtgataagaaccagacatcacatacacagttactccagattcagaagaagtaccctgttgcgatgtactttgatgattatggctacagtggctctttaccagtagctgagcgacctgctttacaccgcatctaccaattagctaaacgtggtgatgtcattgtatgcaatgattggacaaggcttgcacgtagcgtatctgtaggtagtgcattttcagatgatatggaaagacgaggtgtaaaactggtcagcatctccaacgattacgatttacagacccctaccggaaagctcatgtttaacctggaattgtcagttggtcagaatatgcgtgacaacctgaaactcaaggtaaaggaaggaattgaacgcgctaaagccaatggtgttcactgtggaagggctaaatctgatgctggcattcaggcaagggagctactctcccagggtgtgtcacccgctgatgtgatgagtcaaacaggaatgtctaaagcgatggtctaccgcatcaagaagggtttagcagaaggacactcataa

SEQ ID NO: 166434 - DNA, 504 bp, Enterobacter cloacae
atgccacctatcccatcaaaaccacctttcaaattttctcaggtaaaagctgaaacaggacaagcatcaatggctcatgcagccgttgcacttggtatggctaaacttgtcggagcagacctgcaacccgatattaaatgcagtcaatttgcaggtaaggctttaggcaatttccaggccaccattgcgagaggtgatgactcaggcgcacctggttacacaacttacaattcatatcagacactttatgataccgttggagctggcttttatatgattaccgctcagaaacaaccaggcaatgcttacgagtcccaaatttacactcaaaatagcactgcaaaaacttttaccgcatattgttacggcaacggtaagacttataccttcgccaagcaacaggctgacctttatcatgtgaccggagcacctgcacaagaacttttcaatttatttgcagcgaatcttaacaaggtcatgaagttcagaatcacccatgcttga

SEQ ID NO: 166435 - DNA, 450 bp, Enterobacter cloacae
atgagatatgcttaccaacttagacatcgcaaccataaaaagaaaccgtacaaatttatcaccgtacacatcaagaaaactcatcctgtagttgccgaattagaaaccctgccccatcttaattataaagttggtagcatttccattcataatggctgtagcactggtgttgtgaataccaaaccaagggtaatctctacattacaacgcaactgtgatattaaacatgagcaggtgttttacagtaaatctacccatacatacgggtattggtatttcagcctgattgatggtcaatttattaccgaaactggatatgcaaaaccatcacgagcacgacaagccctatccaaaattattacatctgagaaaaaggatattctctattcacataaaattcttgatgagcatggtagcttgtcgtggaatttatcagaaaccgagtattaa

SEQ ID NO: 166436 - DNA, 381 bp, Enterobacter cloacae
atgtatgtagcagaaccatttaaattaaaaccacatcacaccactctcgataaaatcgaactactcaattccggttcaatttattatccagatacggatgatgactccgtatatgaccctgacgacgaaataacggaatccctaacagaatgtactgaccacgaaccaaggtggctcacaagtgattatgcgattcctgacgatactccagaagatgacggtgatacatgtggttttgaacttgaagagacagaacctcgtgatagtcactttgagcatagctggagagatgcagattacgaagatgacgataaaccccaaggcacaatctacagtgatgaaagttacaacgaagaaccttgtgaggatattcaaatttaa

SEQ ID NO: 166437 - DNA, 948 bp, Enterobacter cloacae
atgaacacaaacaccaagttagactttgattttgacgccctggataaacgagttactcagatttccacagttaagatgacagcagcagatagacttatttacgcaaggatgctcaacgagtataaattttttaaagatacaattgttggttactcacctaccaatacatcactcgctgtcgttggttgttatgcgaaaccacaatctgtaattaaaactattgagcgcctgattgccctgtcacttatcgagaaactacccactaagcatggcaagccttgcagatacattgtcagaacaattgacgagacattaaagtacaatcctgaattactttcagagccaacaatggctgaacgtagatatgaaggtttaaaacttgagtccaaaggttacaagaagaaggctgctgctgagggtgctaattcaggtagtgctttgaaagcaccagaccagtgctctgagagtaccacaggtagtgctttgaaagcaccagaccagtgctctgagagtacacatgaaataatatataaagagaaaaaagaatcttttaaagaagaactcgaaagtcaaattcaaggtcaaaacaatttggtttttgataatgacttattgggtacgaagtcaaatgaaacaattggtgatgaagttaacggtgataaaaacaaggtcgcttcgcttccatcacaggatgactctttgaatcaagatgactctgtagagaataatgaaatggatagtgataaggaaggtgtgattagagagacctcctcactccctcctgcgcccgtcgagtatgaagaagattgctacaatgattttcaggaagatgacgaggaagagaaagaaattaacccattcaaaagcaatgccaacagagttagattaactccgaccaaaattaaatacaatcctgagttcgattatgaagaagaccatattttataa

SEQ ID NO: 166438 - DNA, 126 bp, Enterobacter cloacae
atgaaattacatttccctcacaaagtttggctatggcttattgccgaagctaataaaagagaaattacagttggtgcatttatcgtagacaccattgttgaattatacaaatcctcaagtaagtaa

SEQ ID NO: 166439 - DNA, 495 bp, Enterobacter cloacae
atggcctctacaatgagcaagcttatcaaaatgtgtggcgctaaaagcacagcagacatttccgatagcaccaaacgaattttaagaaggtgcgccaacgagattgacaggttatcagaccttgagaaaaaagaagcaacccacctttatatcttcaaatttgatgacatgtacaaaattggaatcacgaagaacccacaacaacgatttgcgcaacttaaactatggtttgaagattctgaaattatcaagatactaccatttaaaggcagaatctcagcatctcataccgagcaattaattcacagcaagctgcaaacacatagaaccaagccccttaacgatgatggctcaattaagaaagttggtggatatacagagttcttcaatattaacgatttcacaacgaattatatcgagcaactcaccacggagaattgcaatgaaattacatttccctcacaaagtttggctatggcttattgccgaagctaa

SEQ ID NO: 166440 - DNA, 333 bp, Enterobacter cloacae
atgaaagactatgaactaaactttgctgtaggcgctatgttgatgaatgacgaaattatcaccccatccacactcaagactaaattcttccccaccctcagcaagcagcatattgactaccacctgaaaaaacttatctccagacatcctgaaatcaaaaacaactggtcattccttaccgcgcgagagcgtgtatatgcagttctcaatgaataccaaggaaaaattgacactaaggagcttatggagaaagcatcaattggcgcatctcaagcgagagatttcaaggccgattggcgcaaaatgacaaataatctatatcactggttttaa

SEQ ID NO: 166441 - DNA, 126 bp, Enterobacter cloacae
atgttatacatcgccttcaggtcgccgttgacgttcgcaatggcctgcgcgttggtggtgatcgctgaagtgtgcccgttgatggtcgccgtgatgccgtttatctgcgtggcggtggcctgctga

SEQ ID NO: 166442 - DNA, 168 bp, Enterobacter cloacae
atgcccgtgatggtgatcgccatgatgatcatgccagccgtgggcatgagaaggttcatggtgccatgggcgatggtccgcatgatgatgatcggaagaatgatgatctttgataacgcatccgctgagcatcaggctcagggcaatcagggcgacgttaagggataa

SEQ ID NO: 166443 - DNA, 678 bp, Enterobacter cloacae
atgaagtgtgacagtaacacggacgttacgtttttgtacattattgccgatactgtatccgcatacagcggcagttttccttatgatcatgtgtttgatacgggatacccagggataggttatgcgttgtggaataccaggcgtaatatctcgtacagccttgggcaatcgacgtatgttgtgaccagcggtgttgactcttttactgttgagaaagacgatatgcagatggaattagccctgattaaaacaggtgatattgcggcgggagttcttgatatgagctcgttgggtgttccaacgttcagagtgacaacgtccagtaccagtactgtgtttggccctacatttacaggcagcctgactataacattacccacctgcattaccccagattacaccgtcaaccttggtaaatggggacaagcgcggttcaacggtaaaggcgcaacctctccctgggtcgacagttcgatccggctgacagggtgcggacagtttaacggcaatttcactgaaaaaaccggaagtaacaatgtctggagcgataacggggattattctgccgccccacccgagcagaacaggtggtcgatctcctttacttccgttaatggcgttattgacgccgatagcggcatcatctctacggacgcgtcagcaaccgatgctgcatag

SEQ ID NO: 166444 - DNA, 1152 bp, Enterobacter cloacae
atgaaaatttcaggatggattagcgttgctacatttttttgtctgcttattttctcaaacgcagcaatggccgaaacgtgttcacttgacagtgcgtccgtatttaaaacggccagtaatgtgagtatgccgcttaatatatcatcgatagcggtaagtaatgatataccagatggaacaatcatatatcaacaaaaatatataccaggttattcaagtattagcgttaactgcgatgagagtagatcatggtactatgtcatgtctctgacaaacacgcccatgccgctttcctcctggaccgggaccattatttctcatgagagttgggctgctgaatattcctgggacggatatatatacgaaacgggtataccggggattgggattacaatttcaatgatgagtgttcgcagaccggcaccaggtattgttggtacaaactgcttcgcaagtaaaagctgcacggataccgggatgaaagccagagcaattatagccttggttaaaacggggccgattagtgcgggtgttatcaatgccggcaacttccccacgatgaaggttgcactggggagggaggcgactaatattacactttatacactaagttttaccggttctctcaatgtgacgttgcccacatgtacaacgcctgactttaacgtatcattgggtaaatggaccacagaacattttaccggtaaaggtagttcgacgccctgggttgcagcgaatattgtacttagtaattgtggtgattttattggtagtaatgtcagtggcgatatgagtgatgggaattactggtcagataatggaagttcattctcctcaacgatgcagtggaatacatggtcaataacactgtctcccgtctcttcggttctggattcagccagcggcattatgtctgtcgatacgagtgtgccctccgccgctacgggtattggtatacagattagttccggtgatacaacatcggcagattcacacattattgattttggcaatgctttaaccggcacctttaattcggacggtagtagcagcgttacgattcctctctcggcaaggtatattcagacggaagacagcgtgacggcgggcatggcgaacggcaagctagtttatacaataagttattattaa

SEQ ID NO: 166445 - DNA, 570 bp, Enterobacter cloacae
atgaaagttttagtctgtgtatttactgataatgaatttttcttttcagccatgatggagttgctctcctcgcatacgcttttggcagaaaaatatacgctttgcaaaatacgctcagatgaaataggcgcatggatgcatacagcagataataatatgatgattatggctggtccggatatggagtctctggtcaggtttttttgcctggaaaaaagatgggattatttaacgacaaggttcagtgccagtgagatgcaggattttctggcgcagaaaataaacaggcaacatgaagtaaagaaaaacctgattcgaacaagaacacatctgaaactttcaaagcaggagttaaacgtgctttcgtggtttatgcatgggctatctccttatagtatgtccagatattatggtctgtcagttaaaacaatcagcacctttaagagacgcctgatggataagctttatatcaaatcggacgctgaactatttagggttggctggacttataagatgtatcaaaacagtggtcatttaagagggcgagatgaaaatttcaggatggattag

SEQ ID NO: 166446 - DNA, 126 bp, Enterobacter cloacae
atgaacgttgaccgtcaaaaaaacaccgtatggggcaagtggactgaacgaagcctggtctttgccgtcattattttttgcatccttaactatgcttatcaactcttccgcattttttctgcataa

SEQ ID NO: 166447 - DNA, 195 bp, Enterobacter cloacae
atgagtccccctatatcgaaaaaaatccatgccaaagcgtggatttttttcattcaaaacaaatcaaacgttaaacaagaagttcattacgtcgccatctttaacgatgtaattttttccttcagctcacattcgggctgcctcttacgctccttgctgaatcttaccctcaataagctgtcagtatacccgtga

SEQ ID NO: 166448 - DNA, 912 bp, Enterobacter cloacae
  misc_feature (891)..(900): n is a, c, g, or t
atgggagccagttttggggtgggtctgggaggaatgagcggttctcagaaggtagaagagtcacgaaaagttgaaacagatgctcctgctcaaattatttatcgcatagataaaaatcgatacctgacgctggaaaactacatatcctgtgataggggtggacaagtatattacaatgactctcagaggggaataaaaacacacctgggatgggataacgatttttatgatttctcatatcgccggggaaataatattgcggcttatcaaggctctattattaatggggcagataatggttatctggcattccctggcgcatctaccagacaatattgtggtagtggaaggtcagaaacaggttgccctgtgtttttcttcttttcagcagatcatgggaacacatttatatataaaattgtagctatggaatacagcaccccagaacgttttagtcagcttaaagtagtagtggctaatgatggtgtttatctaagggatgagtctaaaacggaggatagctattctcgccctacaggtctcaatgaccttagctcagtgaataaattaaggttttctgacggcaatttaatcagtgtttatgatgactggcagaaaaaaattgatgagttagtgaaagaagaactgataagaaaaaaaatgccctatgcaaacgagtatggacctagatttcatatattcgactatctcagaacattaacgccaccgaaaacacatgaggaaaggaatttaatggcaaacgaattgtctgaaatccagattaggattgaagatgaagtttataaagatggaattaaatttccgaagccttcaacgtcaagtattgatgttaaatatcaatgtaataaaaatattaaagctaaaaccatnnnnnnnnnncacatatactaa

SEQ ID NO: 166449 - DNA, 264 bp, Enterobacter cloacae
gtgaatcgttcgggagaggtgattgattctattatcagctctgtgaataaagtgcatgcgctgatggaacagatttcggttgcctcagaagagcagagccgcgggattggtcaggttgggcaggccgtaacggagatggacggtgtgacccagcagaacgcggcgctggtgcagcaatccgccgccgccgccgcctcgctggaggagcaggcgcagcagctttcccagagtatctcacgctttagtttgcctgctacggcgtga

SEQ ID NO: 166450 - DNA, 177 bp, Enterobacter cloacae
atgatacaagaaatacaaaaagaagatatgcgtctcacaacccgagaaatcgttgatcttgcagtttcggtaaaagctttcatccaggttgaagccggacatctgcaaaaacagatatccggaattgaaattagtgccatagccggtgttctggaaacactaagttatgaagaatag

SEQ ID NO: 166451 - DNA, 177 bp, Enterobacter cloacae
atgaatcatgaagaaaaagttaagtttctgtttgaacaaacttgccgtactatcagtggtccattagctttagcaccaaatatgtcaatcccactggatcagcgagtaggacgctatttcgacgcaacatatgccgtgcttgagaaaaaacttgaagaaaaacttaagcagtcatag

SEQ ID NO: 166452 - DNA, 996 bp, Enterobacter cloacae
atgactaacaagccgatgagtcgcatatatgataaaatcagtaaggctgggtttaataccgcttttataaacaaactcttaccttcatggtgggatgatggtttagctgataccccttcaggaaggcagtatgcaagccttcatcttgcccgtgtttttagtttatcacccgaaagtctcaaagatagctcagatgctgcctgctttaatttaggtggaaatcatcgttttaagcacagagttaatcttggagaggaagatctcaatgttgccaccgctattgcttattcagcagccagaattgtcgctgaaaatttcaggattccattcaatcaagatttgaaacttagctggcaaaccataagacaagatttactcaaagcaaaatgctgggttgacctgccaactcttgttcagttctgtcattcagtcggaattcctgttgtatacatcaaaaacttccctaagggtgcggcaaagatggctgggcttgcactcagtatttcaggacgtccagtgattgttctttcgcaagtcaaaacacatggttatatgcttttcgaccttgcacatgagctcggccacattgctatgggtcatcttaatgaccagaatggaggtgtgcatgttgatcgtaaaattgaagcgcaatcaaccgataacttagaggtggaagcgaaccgctttgcgtttgggttggttggaggcaaagaaacattaagaattgctcccacaagaggatatcttactgggccaagattagctgatgccgcattaagttatggtaaagagcatggtatagagccaactcatgttgcacttaattatggtcataatctcgggcactggggcgtcgcagttaacgctgtaaaaatcatctgttctggtcaaccttctgaccagatagtagtgaataaattaatgatgagtgctctcgatgaagagaccattaacgaagacgatttggaaattctaactgcgctttgcgggggttag

SEQ ID NO: 166453 - DNA, 564 bp, Enterobacter cloacae
atggaagatcctgaaggcatttatgttagcccaactgctcgttttcaattattaccaaaaagcagtgataaagcgttgaaaaaatgtggcagcaagcagatctatcaaaacatccaaacttttcttgatagcgtaaaagttatcgatgagatcaaagatgatgccttactaaatcaactgggttcaattcctcatatcgatgttggagaacaacaattacttgcttcatgcgttgaaaatcctggttctctttttatgacaggagacagaagatgcctgcatgctgttatggagaaccaaatgctcgtgacggcagttcatgcccggttgataaactcagttattacttatgaaagtgctttattgctctctgtagtaatgctcggttttgaaaatgtatataaacaacttcaaactaatcctagtccagactcaatgcttcggcttgccatgagatccagccaaccggaagaagtatgtggttgtattttttctttcacccgccccttatatgattatcttgcatataaagatcgtcttcccgatcgcaattggcaaatatga

SEQ ID NO: 166454 - DNA, 453 bp, Enterobacter cloacae
atgagtgaatttaagccctttgacgaccggctcaatggtctgattgctgccctgtcaccggcatcacgcaggaagctggccggggagattgcaaaggagctgcgcaagtcgcaacagcaacgtatcaagctgcagaaagcaccggacggctctccgtatcaggcgcgaaagcgtcagcctctcagggcaaaaaccgggcggattaaacgggcgatgttccagaagctacgaaccaaccgctatatgaaagccagtggccgcaatgatgtggctttggttgagttcaccgataacgtacagcgcattgtacgggttcatcagttcggactcaatgaccggccaactaaatacagtcgaaacgtacgttatgctgaacgtcagttattaggattaaactctttacataatcggcgttttgaaaaaattattatcaaacatttattgaataggtga

SEQ ID NO: 166455 - DNA, 1212 bp, Enterobacter cloacae
atgaatatgattgaacttaataaaaagttcttccatgggttatattctgaagtgttctcagagagtaagaaccgctatcacgcctgtataacaaccacagatgaagaaaaaaaattcataaaagacaccaaagaagcacaatgctatcagagtttaaacctcagcactgcgctattaaaactaacggatggaaggacatttttagctatcaaaggcagtccacatttcgaggaattgccaccaggtctcgaattacaattgcttgatgaacatagtggcgtaataaccattctgggtgggataggttttcttagttttaacaaccttgatataatgcaagacaaaaattggtctatcatagacaatagtgaacttggtaacaaagatgatgtgacttacattgagcaagcagaaatattaaatatagttgatgacttttctgtttatgaagttattcaaagtccttttgagttcaaaaaagaaactgttgacagatttttattattattcttgattttatttaacataggtgacactgataaactatccgtcaaaaatgaattactaagcatcgtgaccactcttgacaaattcccatttcatctgcttcactcatcttacattagccagacttggcaatactcctatattgacttatatcgctgcattgaacttttatatcctattcctagaatgattaagttgagaaaagctttaagtaaacgaggggaatcgatagacttcccagcgattgacttttttaaagatgtaaatgacacactgggttggagagagaatgaacaaactggattagaaaatatagttttagatgtaaacacgccctctattaactttatatttacaatgctagaaaaagtcaaagcggtgaacgaaagagatacatcaataattaatgagttaaaaaaatccgaaataatgcgggagagtaactttaaaaatattctcgagcaaattagggatttattaacatccaccccacctgcgcaaatgccacttataactgattacaaaactaaaaaaagcgccaagctaatagcgaactttctttattcagccagaaatgaattagttcacttccgtacacacgaaaacattcactctgaaactcaaataaaagcagcttttaaagccatggtgattttattaaatgatgcttatcataagcatgaacttgaagcatatccactatga

SEQ ID NO: 166456 - DNA, 1188 bp, Enterobacter cloacae
atgacaagcataaataaagaattaaatattttgcatgataaaaaatcgcagtgtttgtccataatcacaaacattaaagtaagtcgctatcttgagattatcgcggaagcctataaaaatgatggggcgattgatgggcaaaggaaagctcagacatctaaaagtgctttacgcatacgaaaacaaatgacgtctgattttatcgatggaggagttctccctccggtagttattggaattacagatccagaccttgatgatgaaaccacctttacatcgcaacaaaatttaattgatgcattagacgaatttcataatgaattatcaataattgatggaatgcaaaggacaactgctatgattgaagcagttgcgatcgattcatcggataaaattctaaaccgtgaaataagaatcgaggtttgggtcgctcaatccatcactaagcttatatatagaatgctagttctaaatacaggacaattaccttggtctttgagaagacagattgaagttgtgatgcaacctattaaaaaagagatagtttcttcaatctcaaatttaaaaatgatgaatgctaatgaaggcggcagaagaacaaccccaggggagtttcaagcagataaaatattagaatcatttttaatatacggaactcgctcgcaaaaagttgatagcagggatttgatttccgatgaatttgtaaagctagactttatagactccgcttcaaaaacagaaatattaactgatttcattacaatattatcattaatcgttgatcttgatattgttctttctaaaatcaagagtgacaactcaaaagccagattctctaagggcattgacctatttacaagccaacccgccctggccggtttcatttgcgccttagctatcaaaatttacggtcgccctggcacagattatgagaccaagcgtcaacaaaagaatttcgaccgcataacaggtaactttaaatcattaatcgaagttcttgaattaaaaaatgaagcgcaactatctgagttcatgcgattcgaaactttaaatactgtattaggttctctgagctctccaaatacaaaaataggcgacattgagagaagttatttcaaagactctttcaccgttctcatcgatgaggattttaacatcgataacatggatgtttgctggagagcatga

SEQ ID NO: 166457 - DNA, 555 bp, Enterobacter cloacae
atgaaaacaacgggtatctttaaaacttacaagcctgtagaaagccagctgattaaagatgctaaaaccatcaaggaaaatacagggatggatattattttccttcgtgatccagatggtgagctatggcatgaggcgcaatatctttttgatagtgacaccctgaaaattgcgtttgatgaaaatgatgtcattgtcatgctttctgacgatgcaacatttcttaatccggtcaactgtgccgtggcagaagtgaataaaaataatgtgcctgcaggtgttgatgagtctcagacgtggatgtatcgaaacggggaaataattccgagaatatatacacaggatgagtttatcgctcaggccgaagccatgaagcaacagctcatggctgatgcatcttccatgattgcccctctgcaggatgccagtgatatgggggatgcgactgatgcagaagtttcatcattgcatgagtggaagaaataccgtgttctgcttaaccgaattgataccagcaaagcgccagacattgaatggcctgaaaagccgcaataa

SEQ ID NO: 166458 - DNA, 495 bp, Enterobacter cloacae
atgaccaataagaataatgctattttctataatcttgtgaatagcaccacatttactaaacaagcatatcggttagtagcacgagatcgaggttatcaggtttatgatagaaggttgcttaaagataaatatgaagcaacgataaggatagcacaaaaaataaccaggcatcacgagtttcttttcagaaagatcaggagtttatccgctgttaaaaaaaacagtccccttttggctgtatctgccttgcttctttttgtttctgactgggatgaaacaactgcaatcaacaaattcatcaaattatgtggtgtaggaaaatctaaaaataatgatgagggaaacgtaattggcttaaacccctttattcatttcgatgcctggaatgttattcatcaacttaaggatttaatggttacacttccagacttctcgaaccttgatgaagaatttgccaaagaaaaagctagattaactgagctttataagctctag

SEQ ID NO: 166459 - DNA, 618 bp, Enterobacter cloacae
atgtcacatagtttatacccaactaccttgtttcattttactgaaaagttagataccttatttgagatacttgactcaagtgattttcgaatttcttttgctagagaatttatacaaggccagagcacgaatagaaatttcggtataccgatggtttcattttgtgatatcagactaacacagcttacccagcatactgaaagttatggacattatggcatcggattatctaaagattgggcaaacgaaaatgggcttaatccagtaatttacatgtccaagcactcttctgttttcgataattataatctagagattaggagtttaaaatcagaacttgataagttattaaagcactttgaagaaatgaaatcttcaggtacaaaatctcaattaactaatgcaaagcggaaatatgactcagcgcttctaagttacaagaaaattgtagatcctttgcgatacatgaagaattaccaagcaactttgaaacggcgcaatggcccggagatacctaactatatttttgcagatgagagggagtggcgatttgttccagatatagaaaactcaactggaaagccagtgatcgctgctccgaaaaatatatcaacttaa

SEQ ID NO: 166460 - DNA, 471 bp, Enterobacter cloacae
gtgttttccctctccctgtgggctgagggttccccacaaaataatgcctgcacagacggccccctctcccttgagggagagggctggggtgagggggaacatacggctctggtggtcattccgttcactatatgttccttgctactctgtcacgacatggccggtgaacgtgccagggtggctcagtcgccaccacccttggcgacccgagctcccggcggaaaatcgccgcttcgcggtaccttcggcttattccttcaggctatcggggcgggcggaggtaacatccctgtaaagcacgccctctcggcgcatccctgcgcctcgccccggcctacaggaaacgcctcagcgatttacagccggaccagggcatcgctgaaagccctcagttattctgaaggcaacgttatcgcttttgctttcaaattactggtgatccctctcccctgtgggagagggcaagggtga

SEQ ID NO: 166461 - DNA, 183 bp, Enterobacter cloacae
atggattttgctaatatcatggacgaggtggtgcaaaattttgccagccaatacggtgttgaggtagagatctccattgagattaatgcccgctctaagaaagggtttgatgcaaatttacagcgagctatcaaagaaaactgcggtatgttgaagtttggtaatgctgaatttgaagagtaa

SEQ ID NO: 166462 - DNA, 303 bp, Enterobacter cloacae
atgaaactgctaaacacctatgatgacaaaaatgaagccgaagaagcactgacgaagctcctcggtgaaaaacgcctggccagtgaacgagatagcacagtggtgatctacaacctatttggccaacctacttggggtaacttccatcgtcttggcatgtttaacttgccggaactgcagaagatgctggagctgcgcaaggccgggcatgtcattgacaaagccagacacagcgaaattttgagtatgctgcgctatgctgcacaatccttcgaactcaccattccgcagcattggatgtaa

SEQ ID NO: 166463 - DNA, 1263 bp, Enterobacter cloacae
  misc_feature (1204)..(1242): n is a, c, g, or t
atgttaatcctactatgcttcgtcgttttcattataaggttgttctggcttttttattttaagagaagctatcatattggttttctcgttcctttttttcttgaaataatttttgtatatccatatttatttatggatactttaggcctttattggagctatttagggttcatcctaaattatacaattgttacagttgtacaaattggggcagcatctaatattatgctgccaaaaaaagatgtgctttttataacagcgaagcatagttataagttgttaactactcttatcatattatcatttgttggtgttatttctaatttaccaagtcaggttttatttccgagcaatatagactcactatttgcgttgtcgcattcaaacgctgttgctcgttatgatggaacattaaaagttagtgcaatatataaagttagttcgatttttgcatactttaccacttttttaatgggaatgatgtatgcatcatctcgcaccaaaaaaacattgttatttattttgctacattttggtgtaatccttatcgatagcgtggttatggcggctagagctggaatgatgttgcagcttttctgttttctggcaagtttttatgctttttcatattacaattcatcgcgagaaaattaccgtgtgacctttaagaaaatattgctgtccctgatttttgtattagtgatttttttattttttgtgactattcaggttgtgagaggcggtaaaactgaatatgatatcactggtatagtatcccatgttgttacttggtttgttggttatatcccagggtttgattactggataaataatttatatgactatgatataacctatggtcagcgcacatttgttggtcttttcgacatattagggatttctgagcgtgtatctggcgtttatccagctattgatataggcagtggaaggatctctaatatattcacagcatatcgtgggttaattgaagatttttcaatgctaggactctatgtcgcattaattatcgtaggtatccttctttcatgtattcctaatattgtagtagcccgccaggcaaaatttcttgctcctataacaagttttattgtcttcttctttttttggtcctatgtgattaatcctttttcgtataatgtgatactttttgccgctctgatgttttgggtatattttataatannnnnnnnnnnnnnnnnnnnnnnnnnnnnnnnnnnnnnntgtgagaatgaaatcttgtga

SEQ ID NO: 166464 - DNA, 834 bp, Enterobacter cloacae
atgacagtgaaagcaaagcgtttccgcatcggggtggaaggtgccaccaccgacggacgcgaaatccagcgtgaatggctggtacaaatggctgccagctacaaccctgcggtgtatacagcacaaataaaccttgagcacattaaaggctattcgccggatggcacatttaagcgttatgggcatgtcaccggcttaaccgccgaggaaatcacggaagggccattaaaagggaaaatggcgctgtacgctgaaattaacccgtcgcctgatctgattagtctgattaagcagtggcaaaagcaattcacctctatggaagtcagcccgaaatttgccgacaccggcaaagcctacctcgtcggcctggccgccactgacgatccggctagcctgggcaccgagatgctggccttcagtgccaccgccaaagagaacccgctggctaaccgcaagcagagtcctgaaaacctgtttaccgccgccgaagaaacgctaatcgaactggaagaaatccaggacgaaaagccatccctctttgcccgcgtttccgcgctgtttaccaaaaaagagcagaccaacgatgcgtgtttttcagacgtgcacaaagccgtcgagctggttgtcaccgaacagcagaacctgagcgagcgtactgataaatctctgtccgaccaggacgcgcgcatttctgagcttgaatcctcgctgcaggagcagcaggccgcctttgccgagcttcagcagcagctgagccgtgaagacagccgtaaagattaccgccagcgcgcgccgggcggtgacgcaccggctggcaccctgaccaattgctga

SEQ ID NO: 166465 - DNA, 249 bp, Enterobacter cloacae
gtgctcaaggcatacgacattatcagccaccggcgcctggagtttgacgccgggcacaccgacattgcgcagtctttcatggcaatccgccgcgccaccaccgccagcgggaaccgccccacctacgaagccagccgcagcgaagaagccagccacgcagacctggcctgggcaacgatgcatgcattgtttaacgaaccgctgcagggcgaagccgccaataccagcaacattgtggagattttttga

SEQ ID NO: 166466 - DNA, 1719 bp, Enterobacter cloacae
atgcatcctgttttaaatagatatattcaagatttagcgaatactcttgatgtagcagaagggcaagataaaatatttgaatatttttgcaattttgttgttacatccaaaaattatcttggccgatttaatcctgtcgatattactactcaagaagatgatgcatcaattgatggtttggctgttctgatagatagtgagatcatactcacgcaagaggatgctattgctgctttcgaaagtcacaaaacgtcattgcctgtagaacttttagttattcaagctaaatcaggagaatctttccggaaagaaaaaattgctaattttaatttgggtttgcaggatttatttagtttggatccgaaactacctaacggagagtataataaagaaattataaagatactaagtgttatcatcgataatttgaaaaaagttaagaataaacttcctgacataaaagtttatttttgcacgagtggtgtttattcaaaagaaagagaaatagaagccgcttttaagattattgaggaaacctgcaaaggtgcagatctttttggtgaggttgaggtagccccattaggacgtagcgagctaatgaaattgtggcgttcaataaccgaaaaaaatgaagctaccttagaacttataaacttcatgggcatcaatgagatgcctggaattcctcaagcatatattacaactgtaaaagctaaagagtttattgaaaaagttgcgatggatgaagatcgtaaaatccgggaggaggtatttgatgaaaatgtgcgagcatttttaggtgaagataatcccgttaataaggatattactaaaacactgcaatctgaaaaatcgaatcaattcgctgtgcttaacaatggtgtaaccatcattgctcctgaggtaaccgtcaccccaagtaaaaaaacaatacacatagctaattatcaaatcattaacgggtgtcaaactaccaatactctattcaataacttccaaatattaacggatgcgactgaactcgtagtcaagtttatacaatctagtgagattgatgtcgcaattgatattgtaacggcaacaaataatcagtccaaagttgagagttctagcttttacgctttgcgagaaaagtctaggatgatacataaattttttgaaatacaacgggatattgaaggcagagaacacctttactttgaaagaagagaaggtgaataccgtggtaagcctattaaaaccacaaaaatatatgatattgttgaattggcaaggtgtttcttatctgtatttaagcagaggccacacaatgctgctatgtatgtgaaaaaggttttgaatgaaagtaaggatatatgttatctagatactgataacgaatacgcatattatacagctgcttatatttgttataaatacagtactttgattaatggtcgtaaagccaatgcaaagaaatataataagctgcgttggcatattgctatgctttatccttgggttgtgagcaaaagtatggaggttcctgcacccaattcaggaaagataactacgttttgtgataacataatgagaacattgacgactgatgagtacgtggagaatttcaaagaatgtcaaaaaataattgataaacttccattccctacagatgaccagattaaacgaggaaaatacaccagtgatctgagagcgatggcagtagaatactttaaatga

SEQ ID NO: 166467 - DNA, 1191 bp, Enterobacter cloacae
atggaaattgagaaaagcaaagagatcgatttaaacaatataataaataacattttgacctccagccgtatttcccctccaataacactaaaaaccgatattgtttcagactttaaaggaagatgtgattactacataaatgccctcagaaaatatgacaaagaaaatatttccgatataaatttcacattattaataaaacgggtaagtgtgattgttgatggaatcactaagtgtcttgaggaatttttatctggtgacataaaatctgcttatgatgctttcgatgatactttttcagcggatacgattaatagacacattcaaagaattgccatacccttaaatgatatttgcaatgaaaacaaaccattattccgagtcagaaagtccgatactccactttcagaacgagaggaaatatttcacattccttttactaagaggcaaaatgtaagtgcgcaaaggtactcagtagctggattaccatgcctgtatctgggtacatccctatatgtttgctggcaagaaatgaacaaacctgactttgataaattatatctgtcatctttcatttcttacgatagaaaatctaagatattaaacttctcgcctgacatcttaaacaaaccaatcacaggacttttgaatggtgaagaattgaaaaccattaactggagaaaagcatcttacttaattttatggcctttaattctttcttgcagttatattaaaaaaaacgccaacgcatcttttattcaagaatatataattccaaacttgttaatgcagtggataagtcgtcgcactaactctcctattttcgggatcgcataccattcaacaagaatgcctaatgcaaataaaacacaccgctcaattaatgttgtacttccccctaaagcaacttatagacaaacgatacttaaagattattgtcctcgcttaaaagatttatttgaatttacaccaccagtatcttggcaagttttaaaaacattggattatcagcatgatgatttcaaaacaactgaacaggaagatgcagaaaaatttttgcgaagaagagaaaaattaactggaatctcaaatctatatgaagatattgttaaattatatcctttaacagacttctataaacttgaaatttggattgatagactttttgactatgacaaaatcattggctag

SEQ ID NO: 166468 - DNA, 321 bp, Enterobacter cloacae
gtgacttctatcaatcatattaagaatcccttaactatagtgggaatatttgcggggattgtcgaaatctcggcaaactttgttctcccttttttggacaacgaaaaccaagtgacatatgtttggtttcttatgttattcccgacgattttagtaatcatgttctttgctaccctgaactggaaccatggcgtgttgtacgctccaagcgactatcaaaacgatgctgcttttgtacagatacatgcaagacaaaaaatgcatatagacaataaccaaatggaaggcgactcatcagtagttgtgacggtggcagaatga

SEQ ID NO: 166469 - DNA, 249 bp, Enterobacter cloacae
atgaccaacaccaatgtggtgttggatggaattaaatacactaatgtcacattcactaattgcatcattatttttagtggggccgatacagggaaagatatgggattggtcggttgtaaattcattaactgccaatggcgctttgaaggtgctgcgggtcataccataaactttttaaattcattgactaaagccatgggaaaccaaggggagcagctcctaaaaaatctcttccaaacgcttaagtaa

SEQ ID NO: 166470 - DNA, 519 bp, Enterobacter cloacae
atggataaaacattaaaatataatcgagctctgcagcttgaggttttgaatgctttagttgactgtgcacctcgttcattaacatacccacaggagcttgaactacttgaaaaatttcaagatgaagaccatttcattgcatgtcttctgtatcttgaaatgcacggattgataagtaatccgctaataaaaagtcagactttaggtgaaggcgttaagtacatttttaactcacactcatgttacatcaccgagaaaggtatagatttcttgcttgatgatggcggtttaagtgccattttgaaagttcaaactgtaagacttcacaatgacactataattgcccttgaggacataattcgggtagcaaatatgcctgaagatcagaagaatggattgatttcaaaacttcgagagcttccggcagacgccataaaacatttgaccctacagctactgactcagggggctctgaatctaccgagcgcaattcaactaattcaaaaagtcctccagtag

SEQ ID NO: 166471 - DNA, 525 bp, Enterobacter cloacae
gtggccgatttgaccatagagatgttttcagaaggagccgtatatgatttctcgggcttcgactgcggcgaaccatctctgaatgatttcctgcaaaaccgcctggcacagcaacacagcgggcgtatattacgcggctacctacttcttaccaaagatccggtgccgaaagttaagggcttttacacgctttccgggagttgttttgcaagacagacactcccatcgaatacccagaagcggaaaatcccctactcagatgcacccagcgttacacttggacgtctggcgatagacaaaagcctgcaagggcaaggatatgggcagcttctcgtggcacacgccatgaaggttgtttatcaggcctctcgtgcagtgggcatttacgctctgtttgtggatgcacttaaccaaagcgcaatgcagttctatcagaagtttggcttcatccctttgacgggggcgaatgccaactcgcttttctaccccacgaaaagcattgaagagctgtttgaagcagagtaa

SEQ ID NO: 166472 - DNA, 780 bp, Enterobacter cloacae
atggattcgataactgtcattataacattgtttcttagtgttctatcctcgttggtagagaaaattactgactatttttctagcggagttagaagaaaggatgtagaaagaaagattaaagaattagaagagcaaagaaataaagccttgtattatcacatcagaaatataagatcgcattcgacttatgaagcactgaataaatcgttaggaagtgagcttacacataaaattataattgataccatgctgaagaacgatgaggtgattacaaaatggcaacagttggattacctcgttcacgaagatagtaaactcgataaactaacctacgaagagttaagaggctttattctgattgagagaactatgcgagagcggttagaggccaaaaagaaaaacaaaaatgagaccgtggttaatttgtttttattaagtgagaaaaacaaaatgctaaaaacaaagaccatttcagttcttaccattatcctgagtgcggttgcggtagcgtttcttgggttaccaatctggacaatgtgcataggattggtgatctttcttctggcagaactgaaggatcagatcgtgagttttcgggtatcccgaggtttctttggtactaccacatctgaggctattcagttaattaaatttatcagagaaaactcagataagttcgattccaacaacggtgatgggagacgcaggaagattcttaatccggaaagattaaacacgaaaggcgtaaaagaggctgatggaggtctgcaaaatgtttaa

SEQ ID NO: 166473 - DNA, 411 bp, Enterobacter cloacae
atgtttaatgcagatactatatcaaaacgagtaagtcagtgtcttgatattctatttttgagacaaccattacgcaccgctttcggttttcttgtgggttttattatttatacctgtgtatattcatttcgattgattattgcagcaaactggtttgaggttgacacggttcattacactgcatgtttcgtgcttggcatcttgctggtacacggcaggacgcttgttgatgtatatcgtggtactgctattgacgaagaaataaatactcttcttaacgctataagccgacgtacagatttgtcaaaagagcagaaaagaatgatgattgcggaggttctccagtcggaaatttctaagttaggcaagaaaggattagaacaggttgcccaaagtgtagttgaaaagtag

SEQ ID NO: 166474 - DNA, 1206 bp, Enterobacter cloacae
atggacacacaaattgcacacatatcgcacacaaataaaaaggggtatgtatggcgcaagcgttatgaaaaacacacgattgaaatcatcctgcgcacccgtgataaatcaattgccataaaaagaacggcatctataacaatcaggtatatggagctaaaatcccttgaagctccatttacctcaatgcgggaaatgctgaaaaagtttcgtgatggcctcatagcctctgacgagattgaacgattgaggcatcttgcgacggcttcacaggaagcgccacacgctgttgctaccacttcgccaatgcaatcccttaccttaagcactaaacggcctcagaaggtcgcacaggggcattccttagcggtcgccaaaaaagcgtactttgacgctaacactgaatggaaagagaaaactattaaggcatattctggttgcatagatagatttattgtttggtgtacatcgaaaaatattgagattgtggaagaaataacgaaagagcatgttatttcatttaaatcttgcatggatgaagaaaaattagcctccatgactaaacagaaaattattacctcattgagtagcatgtttgcgtttgtgttggacgttaaagaatggattgataaaaatccatttagggggatgaattataaaaaggtcagtattgagaaacctaaagaggaagttaccccaactcaattcaaaaaaattattgagcaaccaacagtaactaaagacgctcaaaattattgggctaatgtacttatgtattatacagggatgcgggttagcgagttacggcaaatcacaaaggatgattacatcgagatagaagggattaaatgcattagtatcaatacgcatgaggaagggaaaaccactaaaacagaatccagcaaacgaaatataccaatttgcgatgcgcttttagcgcttaacgtatgggaagaaagacccgtaatgaagaatggattaaacagtatcatggataaaatcagcaaggcgtataaatctattggtctaaaacgcacaagccattgttaccgccacggtatgtctaacagattacgtgatacagatgctgatgatagtacacgagcatttattttaggtcatgcagcgcatggaattacggatagagtttatataacgcgcctgccattacaaaaaatgttaaaggcgctgaatgatgctaattaa

SEQ ID NO: 166475 - DNA, 1002 bp, Enterobacter cloacae
atggctaatttctttaccgatttaaacaattacattaaacaaaaaccgcttgattacatgcgcgaatttggaattgaaatcgaaccaaatacgcaaatcccctgccctatatgtgggggtgaaaatcgttttaactggaggagtacgggcaagtatgcaaatacaggttattgcagatcaggcgacagtcacggtggtaatgtattgcaaccactaactatcatacaagcgataactaaactttctctttctgatattggtgcgcatataggttttaataaaactaagaaatggtacaaccccaatcatcttataatgaggaatgctccaaagaaaaccatttatacgcatgtgcacaaaatagccgagttagattacaacaaactggatttgttttcgcagaatgtaagcaatgaatctaaaaatgctacatggcgcgaatctccgtacctgctaaccaaaggaattagcaaaatgatgtggattggcggtcatggtcagacactactggattattatcgcgctgacggagcattttgtgcaatgcaacgaatttctaatgatggggcaagtaaattatttatctctaatagtcagaaaacgggtgcttttcactgtgagaggaatcaggcggggaatattgaaaccatattcattggcgaagggtttggaaccgttaccgcatttcaatattcaataagtgatttatatccggcatccttgttcttaactgctggcaatgatactaatttaaacaacgtcacgatagaagcaaggcgatgttatccaaatgctaatatttgcattcttactgataatgacagtaataaagataacgctggcttaaaagccactataaaaacaatggagcaagtaaataactgctggtgggcaatgcccgttaacgttggtgaggattggtgcgatgtttttcagcgcggaaaatttgcagtgcgtgatgaatttcaaagggtacttaaaaacagcaagccatctatataa

SEQ ID NO: 166476 - DNA, 327 bp, Enterobacter cloacae
atgaccgatacaaattatcttattgaaaaaatgcgttctatcgctattgaaaaatacgttaaggaaaataaaaaactaattgcttcacaaatcagcgagcaatcccagaaagtacagcttacagggctggtgtgtggtaatgatgctgtagctttgtctggtgtaagcaagccaatgttttatgcggcaaaacgatttaacccgaaagaatttccacaggcgatttatcaagaacatgagggttacatctggtatcgaaaacaagatattgtcgatttcgttgcaaagtacccagcgcgtcgatatgggagtaaatataatggctaa

SEQ ID NO: 166477 - DNA, 135 bp, Enterobacter cloacae
atgttacttgctaacgttatagggcgctgccttgaattgaatagaacaaacgaagccgtgataataaacaataactcaatcaccaatataattaatgaagaaaacagaaagtttggctcccctgctaattattaa

SEQ ID NO: 166478 - DNA, 1500 bp, Enterobacter cloacae
atgcgcacaggaatgtttattgattggtctgcaattcctgattatcactacacacttgcaattgattattcctcatcaggaaattatggcgaatggtctgaatttaatggcattaacgatgatttatgtgacattgaattagctgaaattcaattgcaatcagaaaagcggttacgccctataattgaaaatttatttaaccgaaaacaagttgggttcctctatggtgaatccaacacgggtaaatcatttgccgcattatcattattaaatcgcgttgcacagggtaaaccgtgggctgggttgcgtgttgctaaagaatgccatgctttttattttgacggtgaaacaggcgttgaaatcaaagaccgaaatacagcatggtgctataaatttaacaatggtgtcaaaaatgagcgaatgcacattttgtcgcctcaaattaatttatttgataaagaggtacaacgccgaatcataagcgatgtaaataaaataaccaatagcaagggcggcattatttgttttgatacgctttcctcatttttggcatattacagcaaacaaagcattgatggcacaacaacattggatatggaaaatccagatgaaaatgatgctatcgcaatgcgcaaattgatttcaatcctaaaaaggatagcagttgaaaccaattcttttgtccttatggttcaccacggcgggaaagatgccgctaaaggaatgaaaggtgcaatcactctaaaaaatgattctgatacagtcattaaactggaacaaattcaaggtaatgatttcgggctttcagtatcactgacaattgaaaaaaaccgtagcgccgccaaattgccaatcatgcaatttgatttatgtgcagtagataacggaattactgctagcgagttacatgaatttaataatgaattatgtgattaccctgatgaaaccgaaaaaggctatcatgtaaataccagtactaaaacgttagtttttgttgataaaccaacgccagtaattgcagcaggaaaaatagaacgcaagcaagctaataatgagccatttatcatgcagcaatcaccgaaaaatgattacgcgcaaatgcatacacaacagcgacaacaaatgacaccgcaacaacagtgcaaccagttagttcaaaacgctgtaaatgcggaatcatacgaggcgggagcaaattacaccaaaaatgcatcacataataatgcacttgcctttgaatcatatatgagtgaattacgaaagaaaaatgcaacagcacaagagcgaacattagaaaagataattgaactaacaaaatatagtgttaatggctgtataaatgagtctgatttaactaatgcattaaaggctgaatatacaacaatgcagtcaaataatattaagcgtgcaattagcggccttgagcgatgcagatttattgtgaacaaccgaggaatgattcatatccttccgccaccagcacagataatgacaacctag

SEQ ID NO: 166479 - DNA, 141 bp, Enterobacter cloacae
atgacggcgtttcagggatttagcacgttgagggtgtgcgattacctgtgtgccgtttgtgtaccatttgtgtgctacaagcgtaaatcaggcgaatgttacaacaattttctgactgcggatttttgcgggatgatgtga

SEQ ID NO: 166480 - DNA, 2124 bp, Enterobacter cloacae
atggcaggtgataatgctgaactgggtttttcggttgatacgtcgcaagtagaaacagcaacaacacggcttgatgaattagccaaatcagcgcaaggcgttacaagtagcattgataaaatggcgcaatcattttccgctcaaacaatgcctgatggaatgcggcgcggcttcatgggtaatattacccgtgattttaattccctacagaatacggttacacaagatattattaattctggtgaaaccgctggcaagggatggtggtctaaatttgttggtggcattaaagaaaatcacaatgcacaacgtgaattaggcgtaatgtcacacgaaattatgtctggacgatgggctaatttgcgcggttctgcgtcaatttttttaggcgcggctggtatgggtggtttggctggtactggcgttatcatggggcttacagcagccgttgagggcgtcgaggcactaacggaaagcattcaggaggccgcacaagcgcagaaggatttacagcaaaccgctatattatccggtaatgctggcgctttgttttccgggaaaattgatgaaattgttaatggccttgaaaccgttaaagaagcatcaaaagaagttaaagaggaatttgtttctaacgctctcaactctgggttaagcgctgattttattaaacaacatggctctatccttttgcaatatcagcaggaatttggtgataagcaaacagaagcattagaaaaaatccttacagaaacacaaaccgatgcaacaaaaggttatgccgctctttataaaatgggtgatggcctgttagataaagtaaatgaagatattcaaagcggtaattataaagcggctggcgctgatatgattagtcagttgttgcagggggtggaaaatgaagtgcgtgaatctcagggtaatcaaaatgaattaaaacagccttcgttctgggatgatgtaatggattatatggggatgggcgcttatgggtactccgcaaaaggtgtgcaagttcagcagaaaatcatggaaggtatgaagcagcgaaaagaaaccattaaaaaggatgctaatgaatatcataaggctgttgaggaatctgtaaattccgtaaaacttccagacataagccatacgaaagcctatcacgattttaacgcttttctgcatccatcatttaggcaacacaccggaaaaacagaagcggaaaaatcagcggaacgtgcggcgcgtgctttaagccagttgaaaaactcaatttatggtattgatgaacaatcgcaatcaataattaattccatcaataggcgttgggatacaaaaaatcaaccatttagtaacctaactaaagatgtgtatgatttccagcaagcgcaagaccagattaatcagcagtttgataaaatgattgatagggttaacgaattacgccgccgtcagggtaaggatgcaaataattctgcgtttgattcagtgattgcaaaaatcacacagcagcgcaatgcagcattgaaagccagtgaaagtggatttgaagattatgaaaaaaatcttcattcagctatagcggggatgaaagctggctggaaagaatatgatgaaaggttcgataatgtcgcggcgcagcaagaaaaaatctggtctaaatcacttgatttaatgacggatgatttaactgatttcttgactaccggaacattggattttgaaaaattctttaaagatatcgccgttatggaagaaaaatatatggttggtaattggttggtaaaaccatttaatgactatgttggcggtttaatggggtttggtttgggtggtggcgcttctggcgcacctgtagcggctactaatacttttgcggttcctgatgtccctaaattgagcacaagtcgtttaggtggtggtttgggttcaacagcgccagtaatcaacattactatcaacgataacggcaataagggcggggtagatagcaaaaacagtgcaacaactggtgatgcgcaaaaacttgctaatgcgcttgataaattcctgtcggactacgtcaaaaatcaaaacgtaaaatccaaccgtcagggcgggttaaacaaaacaatggggaactggtcaacacgttaa

SEQ ID NO: 166481 - DNA, 300 bp, Enterobacter cloacae
atgattatagatgaacgatttattaaatggtctatggtgctggtggaggccggaaaaccttcacccagccttgcgcagctttataaaggaagcacaaaaggattaatcttttataaaacgcgcgaactggcagcaaatgcagcggctaaacgtaatgagcaattagtcggaaataaatccaccagccgttttaaaatcattaaattgcatgatgctgaagcgcagcagaagcacgattttcagcaaaaacaggaacgccagcgacgcgatgcacgtcatatgcgccgatgcggtttctag

SEQ ID NO: 166482 - DNA, 369 bp, Enterobacter cloacae
atggctgataaaaaatatggcgtctttttttggcgtaaaggtgaaagggttgaagatgttccatcagaccaaaatgtagcaaatcgtggcgtcaaacctaaacgaatttttactgattacattgaaggtatgcgctatgcacagaaaatgaatgcaacgattccggcagcgcagaaagataaatatgaatatgtgttgaatgaaattgttgtgcccgatttgaataacacaaaagaattgtttaaatcaggaaacctaacagaagctcttaaacagcgccgcgcaatgaatcaacgaaatgaaattgctgatttggtaaagcgtggtgtgcatgattatcttaacgttacattgggtaataaacaatga

SEQ ID NO: 166483 - DNA, 717 bp, Enterobacter cloacae
  misc_feature (597)..(606): n is a, c, g, or t
atgcaatttactgaggaaacggatcaggcccgtcagcctgatgagacagaggctgattacaacgaaagaaaagcttggcagaagctaaatgattttatcaattgctttgatccttgtactgatgatgaagatcctgagcaaaagaaatcaggacagcgtacagcacgttcacaggtaaacaatcccgacaaaggcgaagatttgtctagcgatcgagctctcaagtggagccgttatacacgaactaaccagctacagcggctggtagacacctggcaagaagccaaggaaactcttacatacgacgagttcagagcattaaggttaagagtcaaaaactatgggaaggtttatttctatgaatatataacgcatattcagaaagggctaacaaaccaatacgcaggtgtcattttcggcggtggctctttagttaaacgctatggtcgtggttttctcattcacttcttcgataaacatgacgataaacccattcgtctatatatcgataagaaccttatggataaaggacggttcggccattatgttgaagaaattttggcaacagaaaatgtgagatattttcgtatctttttnnnnnnnnnnaaagaaaagatcgcgctggcaaacccgttatcaaccttgaaatatcaagcctgctacaattggcgatttactacgagcttaaccattcaaaagagggttaacctaaattaa

SEQ ID NO: 166484 - DNA, 273 bp, Enterobacter cloacae
atgatggaagatctcaaaaaaacgatccgactgcgctgtgcattctgtcgttcggagcagtttgccttaccttgcgagggttacacgcctccgagtcatagctttgttgtttgtgccaactgcggaagggaaaacgacgtcacatctctgctcatcgtcacgaaatcgaaagggagagaaatagcagaagcgtatgctgatgaactagttaaacagatgaagaaaaatctggttaaaacttttaaaaacagtcatttcataaagataaagtga

SEQ ID NO: 166485 - DNA, 393 bp, Enterobacter cloacae
atgttttcttacgtgatgctgggtactaacgatctacagcgcgccataaggttctacgatccactgatggaattgcttggacatccaaaggcaggccgtaatgaagaaggcgcatcctgggggactttcagcaataaccataccatcggattgtgcgtcggcaggccctttaaccagcaaccagcgagcgttggtaatggcacgatggtcgcactgaatacccactcgtttgaacacatccagcatttgtacgaacttgctatcagtctgggcgccagggatgaaggtacaccggggcacaggccacaatacggacagggattccatagtgcctatgtacgcgatccggacgggaataaactggcgtttgtgttctatgccgatgaaggttga

SEQ ID NO: 166486 - DNA, 1080 bp, Enterobacter cloacae
atgagtgttgtgaaattggtcaaagagcaggttctaggttacgttatatcgggaatactaggtgtagtggttataatagggcttttccattttacttcacaacctatacgatcttctgatgttcgcgaaaaattagtagaaatggctcgagcctgcatgcagcagcaacttgccacaaatttgacctctgtggtatttgactcagtgacaagtgagtcactcgacctaagcacatcaaattccgtagtagtctacggaaaagctgtgagcgctaatggtgcccttagccgcttcctgatgatcttcgaaccctctggacagagtttaatagataaagtgattggcagaccaggattctacgatattgggtactgggcaattatcccaggcgcagagaatgatgaagtcgtggcatcttcaatgaacattgaagacctcgataaagacggtaacaaggacatactaatccgtttaaagtcaacttacgcggatggcgtatctaaagggcttcttatccttaaaaaggataaacatgatgtatggcatttaatggggcttccatcaatgacaaagatcatgcattccattgccgcgggtcaatcccccctgccgaaaggacttcaacctgcactccctccaatacattggtttagtaatgacaaaaaactaaaacctcagccaaattataaacaataccttgattgggaaattgacgaatccaactggcaagccactgatgccattgggaaccattctttttggatgatcagaaacggcacgaagataaaaatgtacgagaatgaacaagcaggctacaagcaatttggtgtactggcaaacatctatgatgacgaggcaattcaggggaaccatcatctcatggtcagtttttataagattgagaataatagtttgattcctgatcagcattggaactgggcctatcctatgttctctattggattagaggatagtcaagcagtggatctgagtgaaatgcaggaagcgggtttgcaagctcatgttgctggtggttcagttgtcggcttgacagagtttgggaaaatggactcagattaa

SEQ ID NO: 166487 - DNA, 531 bp, Enterobacter cloacae
gtggcaaaattttactttaacgcgaagttatggggagcgaccgcctcaattcccgtaatgaaaatgcttgcggagcaggcagaaacaaatatatcccgtgtgctaaacgatgccgataagcccgggaccattgagtctggagagtttcaagatgaaagacatcatgaagatggaggggtttcaacgtatcaacgcacatactattcctgtggatcatgcatagggtatgatgaaaatgaagttaaatctgaatataagcatctgatagcgcaacttacccgtcgctcagcttttcttaccatttttggtctgtttgaacaccgtatggttgattgtctagaacttatggatcacctatcatgtaaaattacggataaaaaatacaagacagttgaggattgccataaacgcctcaagcagaatttcggcggtgaaaacattaaggatatcgatcatctatcggtgatcagaaacatcatggctcatagcgatggtgttgcagataactataaaatgctttcatgcaagtaa

SEQ ID NO: 166488 - DNA, 129 bp, Enterobacter cloacae
atgctggacatggtgaaacacgaactggaatttatggtgaagttgggtttcttgtgccgcatgatgcaatcacagatgatctatctacctttatacgctgggatgaacttaccaaaaatgcagagttga

SEQ ID NO: 166489 - DNA, 306 bp, Enterobacter cloacae
atggcaaataatacatcatcaactcaatatgtttcacgtttattaagtaagggagaaaacgataggctagatgagctaaagaatattctatctgaattagatataggcatcagactaaggaaaataacgcagctccaaaaatatgagatcattaatgaaataaagagagccattgcggatgaaagggaaatttatttcgatgagaaaaactccccatctgataatattagtcgagggaatgctagcgctagtaatgatgacttagtggatttgatagcaatgcttaatagagggagaagtcaatga

SEQ ID NO: 166490 - DNA, 312 bp, Enterobacter cloacae
gtgaaaaaaaagacaataaccaccaccggaaattttactccggcacgttttgcacttctgtgtctcgccatcttttgtagccttgcgtttctgctgggccgcgtagcgtggctacaaattatcaaaccggataatctggtgaagcaggaggatatgcgctccctgcgcgaagtggcgatagacgccccgcgtgggatgattgttgaccgtgaagggcgaccccttgcggtgagcgtacccgtccaggccgtctgggccgatcccaaaacagtgctggaaaaaggggggatcggttttgactcgcgctggtag

SEQ ID NO: 166491 - DNA, 405 bp, Enterobacter cloacae
atggttactcataagctggaagccggggatcggctggtggtgcttaagctggatcgcttgggtcgtgataatctagatgtacagcaaacgatcactatgctggtggaaaagggaattgatgttgtatcactggatctgccagtgcgtaatctcaccagtgcggaaggtaagctgatgctgcaaatgttttcggctttcgctgagttcgaaaagtcccgcattattgagcgtaccagagagggcctcgcacgagcgaagaaggaaggaaagaagttaggtcggcctgtggcgactaatacactaaagcgagtgcaagaagccaaagcaaaaggccttagccaatctaaagtagctaatgtcttgggattaggaatagcaactgtaaaaagacactggaaccattaa

SEQ ID NO: 166492 - DNA, 549 bp, Enterobacter cloacae
atgcgtaaacaaacccgctttaaattcaatgcctacctgacccgcgtcgcggagctgaacgacatttccaccgatgacgtggcgaagaaattcaccgtcgagccgtcggtcacgcaaaccatgatggacaccgtgcaggaatcgtcctcattcctgacgaaaatcaacatcgtgccggtcgacgagctgaaaggcgaaaaggtcggtgtgggcgttaacggcacaatcgcgagcaccgccgatactgacggcgatggcgagcgtgaaaccgctgattttactgcgctggagtccaataaatacgagtgcgcgcagattaactttgacttccatatccgctacaaacagctcgacctgtgggcgcgattccaggacttccagacccgtatccgtaacgccattatcaagcgtcaggcgctcgatttcatcatggccggtttcaacggtattgagcgtgccgcaaaatctgaccgcaaaaaaatccgatgcttcaggatgtggccgttggctggttgcagaagtaccgcaatgaagctccagcgcgcgtga

SEQ ID NO: 166493 - DNA, 414 bp, Enterobacter cloacae
atgttggaaaatttttattttgaaggttttgaagttatttcctcttctttcaaagaaatcaacatcggtgaagagggattcattactgtaaacactcaggaccctgaagttagttacgaaaaagttgatgactcaaattcattcaagataagcatgctgatcgaagctaaggttcgcgcattctctggaccgagaagggaggatcccgatgaatccgatttagctttcgagtccaatgccgtgttcactacgtttttttccttaagcgatgcggacgcttttgatgagcaattcgttcaggataatttatggtattttgaacgtttcaatgcaattgcgctcaaattagtaaccgaaaacattctaaaacatacatctttgagttacttaccgataccatggatagctggataa

SEQ ID NO: 166494 - DNA, 459 bp, Enterobacter cloacae
atgaataagatgctgaaatacaagaattattgtggaagtgtagaaacatcacttgatgacatggttttgcatggaaaaattgagtgcattgcagatgttgttacttatgaagcagactcccttcctgccttgaagcgagcctttgaggaggcagttgacgattatctggagacctgttctgccatagggaaacaacctgaaaaagctatgagcggaacctttaacgttagggttggagaaaacctgcataaagatgcttatctatcggctaagaatcaagggcttaacttgaatgagtttgtaaaaaaagcgatagaagaaaaactggcaatcaaaaaagaaatccatttccattttgaaagaaaaaatgaattcgtttctgaaacattagatttcagtagagagcttcgccagccaggaaactggcatctctctgtaggcagggggataagacattga

SEQ ID NO: 166495 - DNA, 249 bp, Enterobacter cloacae
atgagcaggaaggaaaaacttcgctcaaggctcaacgctcttcctaaagattttacttgggatgaacttgttacgcttcttggacactatggctttaaggttatcaacggttcagggtcgcgtcggaaatttgtcaacgatgtaaagcgtatcgtagccttccattgcccacacccaggcaatattgtgaaagggtatgtgcttgaagaagccaaatctcttttagatgagttagatagcaatgaataa

SEQ ID NO: 166496 - DNA, 1401 bp, Enterobacter cloacae
gtgaggttcaaaatttccctgaccacacgcctgagcctgattttttctgcggtgatgcttacggtatggtggttatcaagttttatcctgattagcacccttaatggctatttcgataatcaggaccgcgattttctgacaggtaaacttcagctcaccgaagagtttcttaaaacagagacgttccggaacaaaacggatattaagtcattatcagaaaaaataaacgatgcgatggtagggcacaatggtttattcatttctataaaaaacatggaaaatgaaaaaattgttgaactctatgccaaaaattctgttgttccagcggtcctgcttaataagtcgggtgatattctcgactatatgatccagacggaagaaaataacaccgtgtaccgcagtatctcgcggcgggttgccgtgacgccggaacagggtaaaagcaaacatgtcatcattacggttgccacggatactgggtatcacaccctgtttatggacaaactcagtacctggctgttctggttcaatatcggtctggtctttatttctgtttttctgggctggctgaccacacgtattggtctgaaaccgttacgggaaatgaccagtctggcttcctccatgactgtacacagcctggatcagcgtctaaatcccgatctggctccgccggaaatctctgagaccatgcaggagttcaataatatgtttgatcgcctggagggggcattccggaaactgtcagatttctcgtctgacatcgcgcatgagctgcgcacaccagtcagtaatctgatgatgcagacgcagtttgcactggctaaggaaagggatgtttcgcattaccgcgaaattttattcgctaacctggaagaactgaaaaggttgtcacgaatgaccagtgacatgctttttctggcacgttcagagcatggtctgctgcggctggataaacatgatgtggatctggcagccgaactgaatgaattacgtgagttgttcgagcccctggcagacgaaacaggaaagacaatcacggttgaaggagagggcgttgttgccggagacagcgatatgctccgacgtgctttcagtaacctgctttccaatgcaatcaagtattctcccgataacacctgtacagcgatacaccttgagcgtgacagtgactgtgtgaacgtgatgattacgaatacgatgtccggccaggttcccgctaatctggaacgtttgtttgaccggttctatcgcgcagactcatcaaggttctacaacacggaaggcgcggggctgggattatcaattacaaggtcgatcattcatgctcacggcggcgagctgtcagcagaacagcaggggcgggaaattgtgttcaaagtgcgcctgttaatggattaa

SEQ ID NO: 166497 - DNA, 471 bp, Enterobacter cloacae
ttgctgaggattaaggcgaagctctttatccagatgttcacggattgtacgtctaatcatatgccgctggataagcattgggtcaatatcacctacgatatcaccttctttcatatagtaggtattagaaggcgtatccagtgtcagatagccttctttgcccgtgcggatctcacttatcctgtatccctgataaatatcacgccccgtttcgtcatcaagtgtcataccgtcatgcacggtaatttcagaacgatttacgcccccttttttatcggctatatcaacaataacagtcgcgctaatgctattcttcttattgttaatactgaccagttttacataggggctattacttgcattttggacttcaagcccggcaacctcgatctgtttgaccagtttttggttgtaagcatcaatggcatcaaggcggtacaccatatgatgtttatgaatatgtgttgctga

SEQ ID NO: 166498 - DNA, 189 bp, Enterobacter cloacae
atgcccacggacgtggatccgcaatttgcggacattgcctatagagtcaaaccagtttgtcagagattgccatttatcggccatacgttaccggttgcggctgctttctcgggtaaagtccctctcacccggagaggcatcattgctgccagcaatttgtttgttcagttcctcaacatggtcatataa

SEQ ID NO: 166499 - DNA, 561 bp, Enterobacter cloacae
atgataagaacagaacccgataacacaattattatctatgaaaataattacgtccgggaaagcatcgaacacattgctccagatagcatttttaaatttataaaagtgaacgacattactgactctcaatatatagcatcatcctgtaacatttacgccatattatccgaaagaaataccatctccgctttgcattacatttttaaaattcgtatggcataccatcatacaggcatacattttatttccttaaacaaacaatctgatgttgtcaagcgggcagtagaatgtgtcggaggaacttatgatgaggcgggttttaaaatcatagaattccagaacgcgatactgcgttatatatccagaacagatactaatcactatgatacatcaacaactattacccctagcgaagcaaaaattctagcattatacctgaataatatcagtagaaagaggattgcactggatctggggcgtgccccaaagacgattcacagtcacatacttaattctttaaaaaaaatgaatgttaaacgctcaagagatctgttcctgtag

SEQ ID NO: 166500 - DNA, 159 bp, Enterobacter cloacae
atgtctgaacaaccggtaaagaagcatttgtccgtcattatctgtactgttaacattcaccccggctttaatgagaatggcggaacattctccattatacctctgatggaaaaggcaggcctctccccggttatttacatggtgaatgttaatacctga

SEQ ID NO: 166501 - DNA, 435 bp, Enterobacter cloacae
atgaataacgatataaataatgacgatgacataaccagagtgacaagacgcggtaaatttcatacagaaaaacttccacagaatgagatacgaacccactgcgtcagtgtcagattaaatgaagaagaattaattattctcgacagtaaaagaggccagtacaggaaaggagaatggctaagaatggcttccctgaataaactcccgccggtactgcctgaaataaaccgcgaggcatggattaaactcggcagcctttctcaggatttaaaccacctgctgaatcatctcgacagcaaaagccctgacagcgaactcacacgtaccgaactctttgccctccgaaggcaaatacaggtgcttcgtgagcacctcctcccttccaccttccggagtcaggccgatgaaaggcatgcagaaaataaaaaggggtaa

SEQ ID NO: 166502 - DNA, 1263 bp, Enterobacter cloacae
atgaaaggcatgcagaaaataaaaaggggtaaacagttcgccggcgtggttttctacagcctgaaaccaggcgcccatcacagggtcacgccttatgttactggtggcaatatgaccggcagtacagctgcagagcttatcagtgagtttgaacacaccaggcagctacgacctgatgtcgctaaacccgtctggcataattcacttcgtctcccgaaaggagaaaccctctccgtcagaaagtgggccgcatttgctgacgattacatggcccgcatgggattcacggaaacacacctgcgttgttacatcctgcatgatgataccgacgggcagcatatccatattattgccagtcgcattaaccttgccggtggaaagctgtacctgggaaaaaatgaaaatcttatcagcacccggattatcagcgagctggaacgcgtgcacgggctcactgaaacgccccccgccacaggcagtcgtcgcagggataaaagtaagccttcctgcaatgagctgaagatggcggaacgaacagcaacaccctgccccaggtctgccctgcagggggtgattgataacgccttaaccgaccgccccgatttactgacctttgtccggctgctgcaacaggctggcgtgagctgcaaacccagtatcgcgtcgacgggaaaaatgaacgggttctcttttcagtaccagggcattgcctttaaagcctctcagctcggtaaaaagtatggctggtcttccctgcaaacgctgattgattgttcgcccgaacacctgcttttgctgaaaaggaagcaaaagctggcacccgcccccgtgcctgcgccactgcccgcgccactgccagtgccagtgccagcgccagtgccagcgccagtgccagtgccagtgccatcatgcgagcctgaagagcaggcggcaaaccgggaaacgattctggagaaaatccatcagcttgaagaaaaaattcgtctggaaaggcaacaggagacagtgggtatcattcagctcaggagcaaactgcacaatacagcccgtcagataccccgccagcgtcgtctgcatgcctggcttgtcgtgctcggccatcttgtggtgctgctcaggcacacgggctggtctctgttgcatgtcactacccatccttttcgcaggattcttcatttgcatctgttgacacctgttcctgtcacagcatctcattctcttcaggaacaatcagttagcaataaccagcacctcataccatag

SEQ ID NO: 166503 - DNA, 279 bp, Enterobacter cloacae
atgagtaaccataccgtgcagtgccctttttgttttaaagaaagtcctcacggtgtacaaatttgcaccgggtgccatgcaaaagtggtttacggtgaatgccctgtcactgtcgccattctgttcgggatcgctgtgatggtcctggcttacttagcaggttcatggactgaaaattttatcgtctctgtcatcgttttttttggcagtatatttattcttaagtaccagcttaaaaaagtttatgcagagagaattctgtttattcaacgaaattga

SEQ ID NO: 166504 - DNA, 321 bp, Enterobacter cloacae
atgaaaacctatgccgttatcacactccttaccgcagccttgttgctgagtggctgtaacagcgaaccttcagagcaggaaatttacaatgccatgaataaaatcgtggcgcagacgaatgccgtcataaaatccgtggcaggaaacgctgtcacgcctgacatgctacggacgttaaacaccgtcaaaaaacacgactgtgtcagagagtcggatagaagctataaatgtaatgtgacagctgttgtcgataacgagaaacgcaccgctgctgtcacgctgaccagaacagatgatggctggcaggtcgttgacaggtaa

SEQ ID NO: 166505 - DNA, 426 bp, Enterobacter cloacae
atgcgtaatgacggtaccctgacacaggaggaaaaatttatacgggtgattgataaatatattctccggcatcgtgaacaggctaaaaataatgaattttaccgtgagttctatatgctgtttgtcggttatcacctgaagtatttttatgcccgggcacagtacagcaattcgtgctttcacgtggataatatcatgcagatgtttattggtgttgtatcctgtctcaacggcaacctgctcaggcagctcgccagcggcggctcactgcttcagtccctgaactcgcttgtgaactatatttcgaaagaccctgatgaggctgagcgcatctatgctgatttactggcacagtatgagagagggcgtatctcgcgttcgatggcatacacaccaccacgtccgggcggcaggaaaagactgtga

SEQ ID NO: 166506 - DNA, 198 bp, Enterobacter cloacae
atgacagtgcttaccggggagtacacatatgcattttgtggcaatcaggtgcgaagctgtggtttcttatttctttattattcttttatcttgcaaaacaaaatgaaaaataaaacaattaaatcaacaaattaccataccatcatggttatggatttcaccaccaaaaattattcatctcataacaggggatggtaa

SEQ ID NO: 166507 - DNA, 564 bp, Enterobacter cloacae
atgtcagacacaaatatcattttaaccagacaacaaaaagccgttatcgcaaaagcccttggcgtcagcccggaagaattagaagaaatcagtgtcaaaaccagcacgcacaggaagacgtcctttcgcgacgacttttcgctgatattcaaaggtaacattgccacgctcgccagaatgaaactgacgcccacgtcgtttaaaattgttatctatctcttttcagtccttgattacgggaacattctggtgaatttctcacaggccaaaatagcaaaagaactcggactatgtaaatccaatgtttcacgtgcattcagggagctctttgacaaaaaaatactgctcagggatgctcctgatggtcatgtctacctgaattcgaacctatgtgtcaaaggtattcctcaccgctttaatgaagagcaaatggataagttcagaaaatccagggcagagactgaggattttgacaatgccttcagtctttatcattccggaagaagaacaaagacaaccggaaaaaccagaaagctctcgccggcagacgatatcccgttctga

SEQ ID NO: 166508 - DNA, 195 bp, Enterobacter cloacae
atgactgaaaatgagaagcgtctgcgtggcaaacgtatccggctggcagcagcagaaatgcgttatcagaaggcatgctcaatgccggctgttcccggatgtcatctgacagtgatgcggactgaaattgagcggatgaagacggatctggatgatgccatccgggacagtaaacgcagggagaaatataaataa

SEQ ID NO: 166509 - DNA, 261 bp, Enterobacter cloacae
atggcaaccccttataatatctttttaggaaaaatcctagagcagatattttcagcatggcagttgcccggcatcataatgatgatattttcagtgatgaactttgcagtctttttgcctgatatcactgtaatattttatgcagtatatattcctgcgaacgcgacaggaatgacagcattgccggacaattgtcttttcgttgacaattatcaggcatatatttctgaaatttattttttactgagcaacataatatga

SEQ ID NO: 166510 - DNA, 264 bp, Enterobacter cloacae
atggttaacgaatttacggttccggatgataaaacttatgtctgcaccttcattgcctctccggatgatatgaaggaagcgattgagtcgtgccggaagtacttaaacagtgaagaaaaagctgaattttcaaatgcttttatgtttatgttgtatggtctgttgaagtatggcgatacggaaataaccatcaacgcggagctgcaggaatctcttgaatctctcgtcgatgagaaaaagtcccggagacgaaaacgtcattga

SEQ ID NO: 166511 - DNA, 261 bp, Enterobacter cloacae
atgaatatttccattttcgttgcacaagataaagagtttgtttgttcatttgtgacttcccgggaaaatattgacagggcggctgaggaatatcggggctattccgtcccggggggagaagcctgttttctgcagacccttatttttatattgttttctgtagcgtatgaagatggtacagaaataacaacagacacggatgtggcgaaatatattgcacatctggtcgatgaaaaaaacgcgggcggaaaaaagaagtga

SEQ ID NO: 166512 - DNA, 207 bp, Enterobacter cloacae
atgaataataaaaatatacgcctgctccgccttcctgaagtgctgaataaaactggttacggcagagcctggatttatcgccttatccgtgaagggcgatttcctcagcctgttaaaacaggaagccgatccattgcttttattgaaagtgaagttgatgcgtggatccagtccgtcattgaccgctcacgtcagcatgcagcctga

SEQ ID NO: 166513 - DNA, 852 bp, Enterobacter cloacae
atgaagaactggaacgcgacgcatacaaaagaactgaaaaaatggtttaaccttgataactacaggaaatttgaatcactgccgctgatcctgttgtatcacgaactcctggccaggacattcttttttaaaacgccacttgaaggtaacgaagagttctttgtcgggatcaaccgtaaaaaaatctgtaacggcaacccttttctggtccctccggagcgtctgggtgatctggacccgttctatcgtctttttcagccccctcatctggttctgccaaaggtagacaggatcgcgttgctgagtattgtcttaatgcagcgcgggatcgtttcctggcagggatacaatgaatatggaataaacgaatatttcgaagacgcatccattggtgatgctgttccggatctttttgaccggacggtaatgtttgaagtcgatttagccagcggtacggatgaggaaatagcggaatcactgaagtcagcgttaccacagtggcgcagggtgaaacatattgctccggatcccctcgaagccatccggttcgggtatggcacgatcaaaaaaatcatcaacaaccgtatcattccgatgcttgatatccttgtctgggcgaaggagcaggacgttcgtatctcagacggctggctgtcacgactgctgtactctctggatgatgaagagatgcggtatgatgatcagatcaaggacacggatcggccgctggcaatgaaagcgacgacaaccgattttatcaggcagtttcacttttttatgaacaaaaacagtcatctgaaggatatggccgtttcggatgtgcttaagctggccgcgcgtgaccagagttaa

SEQ ID NO: 166514 - DNA, 942 bp, Enterobacter cloacae
atggaaacaccgatgaacatacaacgattatttgatttctatattcaggaatcattctttaaagccacagcacacagcgatgtggagcgatttttgagcctgggcaacgatataaataccactgacaacaacgggaataatgcactttttgaatgcaggacacctgaagcaatggcatttcttatcaacaatggcattaatatccatcatatcaataatgaagggcaaaatgcactctaccatcaaaaggatcctgtactgcttgagaagttgatcagcctggggctggatttgaagcaaacagataatcgcggccggaactgtatttatggccatttcagacaccctgaaagccttaaagtattactgaacgcaggttgcgatataaaccacatcgatagcaaagggaacacgcttttacattgttccgtgtccccggaagtattgtccctggcaattgacacaggttgtgacgttaacatcataaaccaggaaggaaaaggtattatcgaaaacttccgtagtgatgaattctttgaaataattctacatgtcgatttctgtaactatcagactgctttctttctgtttgacctgtacgaactgggattcagcattcagttgaataaaaaccacgtcatcatcaacagttatgttgaagattataaagatattttgttaatgcttaactacgtcagtgatatacataatgttaaattttacaacgataaaagaataccgctgtataaaggcattaataaagaaatcgttaaatggatgattagaaatgattttcttgttgatctgacaaaaacagagggagataaagatcatgatgaaatcgttgcatataaaacccggcgggagcagagagaactttcaaagattctgaaaagcaacagaggtaagcccgccatagctaaaaatgacggaagactgtaa

SEQ ID NO: 166515 - DNA, 462 bp, Enterobacter cloacae
atgacgtgtcagagaaacatgatatctccggaagaaagaacagaaatccttgacacaataaaccactggctacacgaacagatattcccctataaacgaccttcagcccaattatgtgaacaggcaatcaccccggttaacgcttttcgtatcataacaaataagaaaaaattcgacctttatttcagattcggacagacatgggttaagaacgaagaaaagacaatagtgattgcaagaattggatttgaaaatcagcgcaatggctatggtacctctttattaaaactactgacaaaaatcgcaaagaaatacgggtataattatatagctatagaaagcgtcaattcaaacagcagagcatttgctttaaactttggttttgaagaacatattcatagcagtaactattatatctccacagacaaactgatctcaaaactcgccattcggaaatgttaa

SEQ ID NO: 166516 - DNA, 975 bp, Enterobacter cloacae
atgactacacaggctgtgacaaaagaacatttagatgctgatttgcagtattatattaataataaagacgacgttgccgttatagtttatgctatcgtgaaaggtaacaacgtacctctgagaatggatattgaatcgccagcccaaaatggactaaaatctctttttttgaatgtcataaataatgatattctcaaaaatgaggatttgaccgtattgcctttgtcatcagttgatgaaagaagtaaggtactgtatcactatgatattccggtacctgatgaattaacatgtctgaatcaggctttgggtcaacaggatgaaccggagtttgacttcaatgttcataaacttgaagctataaaagctttattgatctgcataggtaatgcggaaagaaaaatgacattgtataaaacaatggcaccggtgaatattttttcacaggatagtttttttcttatgaaatcggataccagactgaaagaaataaaagaagattttttcagggtaagtggtaatttccagattatgaaaattagcggagaattgtttgttgtagatttacttttgatagagaaaatgtttggctttcatgatgtgataaaaaaagaagccgccagaggaatgcagtctgtcagtgatatgaatatccttactaatatggatgtgttgcatgaattaattaacgatgtcaaatatgcgaggaagttaacgcgtgtagctaaggcatcacctgtaattaatgcagggattgataacgtcagtattattcagttctgtaaaacgtatccaaccctgaaaggccgtattcgttttaacgatgacgaaacgaagatctctttagataccaaagtgtcaaaagacttatttattaaagtgttaatggatgattttctgacttcacaattgactaagttttattatgacagcatagcaaaagatactctggttactgaagttgccggtggttga

SEQ ID NO: 166517 - DNA, 603 bp, Enterobacter cloacae
gtgaatgccgaatcgagaaaaaataaggagcaaataagaagaaaggttgacttgtatattttatcccttgctattttatttgtgttttttatcttcattacatgtagatttccggtatgtttttcatctcaatgtaagtttattgggtggggggtgttgctaaaaactaacgtagtatctgttatatgtattatcttgttgctatattcacttttcgcctattacagatttaaatatgacactaaaaaatctgttgaacttccggttaaaatcgttaagttagagaaaataaattacgagcatttaacatttctggctacgtatatcattccattaataacttttgattttgagaaggaaagatatgtggtcgttttagctgctctgttagtgattatgggggttatttatattaaaactgatctgttttatgcaaacccatcgcttgcattattaggttttaatatttataaggtcgatattaatatctctgagaatgtaataagggagggtgtgatagttattactcgcagaaaattagaggtgggtaaaatgtttagctatattgtactggatgaccgggtttattattctggaaattga

SEQ ID NO: 166518 - DNA, 159 bp, Enterobacter cloacae
atgggggtgttactgttcgttgacgagtgccagtcctttcctgcctttgtgaacttcagccagcggaaacgggtttgtcaggggcatttttgtttccagaaacaagggggcccgtcccggggtgtaagcattggtggggataccctgaccgacctatag

SEQ ID NO: 166519 - DNA, 222 bp, Enterobacter cloacae
atggatgcgcagggcgaggtcgctgtgttcgtacatgccgcgaccgtaaacgggatcgaaaccgccaaccttctctatggcgctgcggtggtagtaaagcatcactccacgctgtccggtataagcgatgtgcttatcatcccggcacagaaccgccatatcattcaacttattcgtgccagccagatcgagaaactggtaagccaggtgtggctcgggtga

SEQ ID NO: 166520 - DNA, 1275 bp, Enterobacter cloacae
gtgctattatggtcactcatatatatctatttgattttaaagtgtttttattgtgactttgccagcggattttttttgtgctggatgtgtggtctgtataccaatcttggtgtaactatactatcattcgtagtacgaaaagatcagcatcttggtagggaacgcatggtaaacaaggctaataaggaaaaagatgtaaaaattaggctagcctttgaaaggtggcagagaagagtttctcgtcaagggaaagaatattcgcagtttcgtcagcaaaaaaagtctcaaaagaaaaaagataataccttaattcggtttccatctgagttttcaatatattcaccagataagcctctgttttttgtacgctctcttcgctcgatatatgaggttaggaataaaatatataatcctgatgagagattgtatttggattttacaaatacaaagacaatgaaaatggcggcattagtaatcctttatgccagtgttgagacttcaattcgtaaaggtttatcgtacagaatattattttcaacagattttaaggttaatcagcttttaagagactcaggtcttgtcgctttatgtcggggcgaaaaaataaaacctgtcttcgaaaatgttgaaaatttaccaattattagtgggattggtggggaatatagagatgagattatagatttcattcagaaagaaatttataaaaacaagatgaaacctgaaacagaacacacatatgcagatgctgttcaggaagcaataaataacgttggtttacacgcctatccacataaaaacaatgatgaaaagcaatggtggcttgcatgtcacgtaattcatgatcaactttatcttgctatatatgatgaaggtgttggtatacctgaaacagtaatgcagaagacatggtttatgagtacgcttaaatcagaatatccaggcctaaaagttgctgttaaagaagagcttgagagaataggtttaggttatacagaacgctctaaagtgaaagtgggtattgtttctgatgcagtaaaaatagcaatttctatgattggagacgtaaccggtactgccaatgataaacatggtcaagggagtaaaagtatcaaagccttggtactaaataatgaacatggaaatctctggatttacagtaacttaggtatgtttaagctttctaatcagaaaggtgataaaattaacgagttaactcataaagtaccaggtactttaattcagtggaacatcaaggtcagctatgaagactaa

SEQ ID NO: 166521 - DNA, 333 bp, Enterobacter cloacae
atgaagactaaaaatatcaatgttatcaaagacttcaacagtaaaccttacgggcgctatcctgacgatggggctggctgtggggaaaacttccgtaaatatctggcaggctttctcaaagagtatgatttagttcatgttgagttgactggatataatcgttatgggcgttcatttattgatgaagcgtttggtggtttgatccgagtagaaggctatacattaagccaacttaagaaaaaactgacctatactcataaagatattaagagtatcgagaccttgattgatgaaagattgaataaggcagagagcgatgcaggcagaggttaa

SEQ ID NO: 166522 - DNA, 495 bp, Enterobacter cloacae
atgcaggcagaggttaattatacaagtattgggattgctataattggttggcttgttgcgtcttatttcaataatagagcattcaagcggaatgacatatctaggcaaaaggataagatttgccaacaaatagaatctctatttgataaagttttagacaagctttcttcaagagatactaaagaattagagttggataattttttggcttcaagtgtttcattgattgaaatgcagttatctcatttgtcacaaagaattggtaagaaattattatgcgatgagaagttatcctctctcagatcgacacctttagatttgttaagtaaaaagtgtgattataaaaatgaacttcatgagatgaaatattcagttttagaggaaattgaaggtaattatacaaaatggttttttgatagttacttgaaaaaaatcaaatccatatttacatcaaaacgtaacacaccaaatactgatccagatagtctaccttaa

SEQ ID NO: 166523 - DNA, 1107 bp, Enterobacter cloacae
atgtttgatgatgatgatgatgcagaccaggaaccccgggcccctgaactcagccaggatgttcaggccctgatcgacaacgggatggcgtttctaaacaaagcacgggaagaactcgaggccaagaagactaagttctccctcgtcagtttctggactgcagttgaaatcctgctgaaagtacctctggctcatgagcactggagtcttgtctgcagcagaaagatgccccccaaaaaacagacctatctggacggcgattttcagtccatcacttatgacgaaactcgtaccctccttcgtgatgttctccaaaaaccactgagtgagaaaactcatatcgttttcgacaaagtccggaaacaccgaaaccgtgtggttcacttttatcatccctccttcagcgatgcggaacagcatcaaatccggaaagagcaggccgatgcctggttcgcccttaatcgtctgatgcgtgatgaatgggagtctctttttggaggcatacatagccacagctggcagctcgcttatggtgaaacccgactgctcaggggaaatgagttttacgcagccatcaagctcagtcaggtcaagcaggaactggatgctctggccaaagctggggttaaaatagactcctgtgtttcctgccggcaaaaggcacagatcacaaccactcagacaaccgggagcaaggcgttcaccttgttcattgctcggtgccgtgtttgcaccgagcagttccggcatatctcgtttatttgtacggagtgcgataagcgccagtcattacctgaaggtgatgagccctttatctgcggaaattgcggattggtggaagaccgaatgacactgctcaatgaagaaacgttccggagcaccgacgagcaattattgtcaatgctcccggccggttgcacaaactgcatggtcccggacagcatctgtcagcatggtgatggttacctttgcacccagtgtttatcctactattcagagctggacgagtgtgaatgttgcaaccacctgagcgacagtgttcctgaatttagccaaattaaaggctgtgaattttgcggcggtgctagtccctatcatgatgattga

SEQ ID NO: 166524 - DNA, 735 bp, Enterobacter cloacae
atgtctaatttttattttaatcttgcactctttggtgccacttcatctatagcggatatgagaatgcttgctgagcaaactgagcacgctataaacaactccatagctaacactgaagtagttgaaagtgagtacggtgatgagcatgaagatgaggagggtaacatctatcagtacactcagaaagtctattcatgtggttcctgtgtcagctatgaggaaagtgaagcaaaagctcaacatgagcacctaatcacacaactttcacgcaggtcagccttcctgactatttttggaatctttgaatatcacatgtctgcctgtagagagattatgattcgagacacaggttataataaaaagctttcaagaggaattgttgaaggaacagaagagctactcagaaaagccattggctataacaatgctcctgatttaaagcatctctcagtgatacgaaatttctttgctcataatgatggaaaatattatgaatataaggatgttaaaagcaaacctgatattgaaagagataaaaaggaaaggcgcaccctttttgcgtttgaacaagctacaacagaattttcagggatttctctcaacgacttcaactccataacgatggatgaaagcttccttcctgaagcgattgatgtactggaagcattcgcaaaaacgttatcagacgcaattacgcattacggaaatcataaactaaagaccacatcaccttaa

SEQ ID NO: 166525 - DNA, 270 bp, Enterobacter cloacae
atggaagaactgaagaaatccatcggcctgagatgtactttctgccactccgtgctgtttgcattgccacacgaaaactacgcccctcttcatggctcgctgattgtgtgcgcaaactgcgggcgcgaaaatgatgtgacttctctcatctttgttgttaaggctaaagcgatgaatatcgcagaagactatgcagacaagctcattgataaatttcaaaaggatttaaagaaagcattcaaaggaagtaagcacttaaaatttaaataa

SEQ ID NO: 166526 - DNA, 543 bp, Enterobacter cloacae
atggatccggataaaattcaaaacgatattgatgctttattgatttttatgaatgacgatatggaacgaatcgggggaactataaaggatacgtattggggttttgctcaggggcaaggggatcgtaatgctatagaaaagttacatggttggtcagaagaaaatttattcgaaattataaatagatgccattcacgcggcttgttgaaaaacatgtcaaccagatacgaacgtgtggtattaacagaagaaggacagagccgcgcgctgtcggttaagcacggtaagaaccgctcttatgaacttgcaaggagcagttatacgattggcgctatccatgttgccgggtcagctcaggtaggcgatggtaatacgcaaaatatttacaatgtctttcaggaagtgatagacaaaattgaccgtgctgaagcgacttcagaagaaaaggcagaagctaagtcgcttttaacaaagttcctggagcatccactcacttcttctgtggtaggcggtgttgctggttctcttaccggacttttataa

SEQ ID NO: 166527 - DNA, 231 bp, Enterobacter cloacae
atggactattcagacacctttatgcgccagcatgaggagatgtgtcaggtggtgggcagtatcgttttttcactggttgaagccggacatgactccacaagcgaaaacatcatcaccgtactgcgcaacgggctggctgaaagcggtaaatgggagccagaccaggtcctgtatctccagctggccattgacttgcttgagcagggacgcatcatcccggggaaacgataa

SEQ ID NO: 166528 - DNA, 768 bp, Enterobacter cloacae
atgaatcaagtagtttccgaccttcttcacccccttcagacaccagggaaaatcagtcctgccgcactggatatggtcaaagtgctggcgctgggtgccatgctcatcgaccacgtcaataccctgctgctgacgacaccggaacccctgatgtatgcgcttggccggatggccttccccctgttcacgcttatctgggcgatgaacgtgcagtgcacaccagaacggcttcagaagagggcaaaccggctgtggatatgggcagcgttcacccagccggtcttcagcctggcttttgccggacatcagccctggtgggcactgaacatcctgttcgtgttcgcgggcgtcacgcagctgcttgcccttcagtaccggtacgggaaaaaaggactgatggcaggtattctgctactgggcatcctggtctggccgctgagtccggccagctacgggctgtcaggcctgatgctggccggcggtctggtgatggttacaggcgggaagacacctggcgtgcagcacacgggagtgatcgtgtccgggctgtcgctgtgcagcctgaacgggttgtcacatctgctgagtctgccggcagaaacgctgttattcgccatgcttcccacactggttctccccctgatggccgtttcactgagtattcagctgtgtccggatggctgtccacgttttatgccccggcattttttctacatcgcttatgccggtcacctgctgatactgctcatcctgatgcatgtctggtga

SEQ ID NO: 166529 - DNA, 276 bp, Enterobacter cloacae
atgaaaaacacctcacacaaaatcaaaatcgcctatggcgatctgatgaatatcacagcaatgagtatagaaaccatcacgggtattcagggcagggttctgctcagcgaaagtgaactgggcatactcaggggcatgatcctccactggagagcgatggcgtcccagttcggtttatcagatgaagtcatggacagggatatggactggttgtgtgaactggcgggaataccggttaactggccggcagggaggtcatggtcagataacatataa

SEQ ID NO: 166530 - DNA, 474 bp, Enterobacter cloacae
gtgcacgtattcgaataccgactcctgaatcagatccgggtacgaacggatctgaccgtagatgtccggcttggccttgtaaactcgcgcgatatttgtctgaccggtcaggctattgttgggcgagtcgacggtattaccgccgttgtttgctatagcgggcttcggcgccaggaaagaaaatacctgaccaaccactttaaagatcgggctcaggatgtcgccgacaatgccctttggctggtcgaatatctggatgtggtccagctcgctcagctcaaacgccagctcatcatcgtcacccagctttacgccattgcggacaatcagcaggtcacggtgaaagttagcgtcattggccgccagccagtcataaaaaagggtgccgtttggcaccctgcaacgcagcttaggcgttcctggaaaattcgatatctcaaccagcgccatattcgaaaaactccactttggtga

SEQ ID NO: 166531 - DNA, 264 bp, Enterobacter cloacae
atgaaatatgattttgatgagtacgtaagcagagagaaaacagacagtctcaccgtggacggctggcgggaatacctgttttcgggacagtccgaatttgcaatgcggtatccggcagaagggctaatcaacctctgggttgctgacatggcttttgccacaccagagccgattcttcaggccatcagagaccgtctggatagaaaaatactcggctacactaaaatctacgacgaagaatactatgagatctttggcagctga

SEQ ID NO: 166532 - DNA, 816 bp, Enterobacter cloacae
atggaaaacacggtggatgtaccgacatttgatgaagataataatggctggcttctgacactacctgagaaccgaactggtggtcgataccagcctgcctgcagtgtggtagttatcagaaccctcaaggagacttattctccggccagcggtagttttgacgttaaaagacagttggttagccgtacatgcactctttccctttactggaacgggggtggctggcatcaggaatctgaatataaagccgagtttaacgtcagtatctgggatggcacgacagaagtggacctgacgaactcggattttatactggactacaatttgcgagggcgcggacttggctcatggataatgagtcagctgatctcctgggcaaaaactctaccagcagagacctccgtaaaacccataaggacatctcctgtcgatgaagatgacaaggagaatatgcttcgccgggatcatttctggaacggtattggattcaggtttgagccaggcggaagagtatcccttcccttgtccattggagagcttcagtttccaaaaggcctccatagcccccttattgctgtccctttgcataaaggggtgtatgaattacagggtcagtacgtgagtcagaagctggagattgaaagtctgaaattcagtcagtcttatcaggcagaacaaatccgatttttgacagaacgtcagtgggacgttgtattgataaatctgatatcaaccgttctattttcgcccatcatgattctctgctggctatacagaaaggtgacaggacgccgtgaacataccactggaacatga

SEQ ID NO: 166533 - DNA, 1011 bp, Enterobacter cloacae
atggccaggcagatagagactcgttctgagtttgagaagaaggtgaaagccggagaggtgattctggagccgcctcgccagcctggcagagatgcggccactggtcgttacgtttcaaataagcgcctgcccgggatgcttccgccgtttctgataggccagcaggtgaatatcacgttctataacgatattgatgtggaagcctttaaacaggaagtccgtgctcaggtaacccggatactgaacgatatcaggggggagcggtttaatgaggcaggaatcaaatatcaacagttcatcgaccaatttgatgcatgtttcgaaatgccttcccctgaggggttgggaaaggtgaaagaacgcggtgtcgatctctatgcgatcctggagcatcagggaatggctcttactgatgaactgcatttgaaccataagcccggtgaagaagttgggaggcgcttcacagctatcactgatgcccatatcaacctgtttttttatatgcttgaactgaatctggcgattcataaccgtattgacagtgtccagggccaattacggaccaaactggcccagcttgaaaagcgcctcacaacattgctggaaatgtacatacatggcgatagtgagggtaacttgtggtacggcgaaatagaggctagccagcttctctatggctggatcttgttgaagcaaaataagctacttgatgcaatggagatttcagattcagatccgaaactgtcgggctccgtgactttcgctgaaatacatgctgatgtgtttaaaatattagaaagtaaaaaatatagttcaatatctacagttctggacgctgaatttcgcgaccgtggactgtctgatttcagagcacagatagccctcaaactgtgttattacctgcgacaaataaagcgactccaccagtttattgacgagctgacacagggcagtgaaaccactgaaccgaacgaggctacggtggatattcgttcacttcttatcccgtag

SEQ ID NO: 166534 - DNA, 1506 bp, Enterobacter cloacae
atgagcaaacttgatctagaaaaaattttggccactaatgggccatgtttaagctcagagctggctgacattttggttgaacaatttggtcttacgcctgctgctgctagaaaaagaatatccagaggttcacaaaatttaaaaaaactttcatacataattttcccgcacagagccagattcgtttatttgaaaaatgaatacgcttcaactaaatattggaaagccctatactcatcattaaaaaaagaaaactcctcatactacatggcgatagactccattagaacaagaggaggtatggtcaggaaagatgagtttgggataatctgtggctctccagtaaggcaaaaaaatcacatcccttatgaatcgttaatgttatcattaataaaagcggaaatacttttagaaacatctaatgaaaatggtgataagtatttataccttaaagagtgtgaaggtcatgaatacctgttattagagaaccaaaacaaaaaagaactcattaacgggataatgattgagcaagctagaacatggctaaaacaattaggcttaatgagttatgggaaaacaaaagcaatgggtgatgaaacaaaaaacccaatggttggaaccttcgaatggcatataacaggcccctcatacattcatccattgactaaaaacagcatcaatggaaaaaaacctggatttattgtctgtgatttaaacacaacaccatcagccacattggatgatattgacacgttcataagaaagatggatatgacattatcattaaaaaatataggtcattgcttttttgtttatatatcaaatacatttaccgcacaagcattgtaccaggctaaatcaaaaggcgtactggctataactttcagtaatgtatttggaaaaagaaacacagtcgcggcggaaaggttaggagatatattaaataatagagatattaatcaaatacaggcatcagaaataataaatcttacaaaggaattaaacgaaaggaatgggataactcaaaatttaaaaggaaaactttttgagtttatctgtgcggacatgaagaaaaaaattgacatttcctcaaggatactgataggtagggagtatattacaagccaaggggataaagccgaggctgatatcacatctatcagagatgacatttctatatgtttcatagaatgcaaggcaattaaaagagaaagcactcttgatgacgaacaggttgatagatggcttgatgtcaggatcccaaggcttttgaactattgcaaatcacacacagattacaaacacttaaaaaaaacattcgagctttgggtaactggtaacttaagcgaaaattcaaaccataggataaatgattttataagcaaaaatcccaaaaccaaaataataataaaaaaaccccgagaacttcttaaagatgtaaaggatataaacgacagggctcttaaaaacctgctctttaactattttttaaaaagagggaaataa

SEQ ID NO: 166535 - DNA, 294 bp, Enterobacter cloacae
atggcttacaaaaacaaaaatggtcaaccaagagagcgagccatggttgccgcgtattctttggtaacgcagtttggtggcaagcagcaggatgtagctaaagtgcttgattgttcaccatctacgattcatcagtgggtaaaagagattggttataaaaaagagatcgcgggactgaagcaagagcttagtgatgcgaatgaatacatcgaagagctagctgataatctcggacttgaataccatccagatgaaccggaagagaatgattatgacgatggggatgaccgttag

SEQ ID NO: 166536 - DNA, 588 bp, Enterobacter cloacae
atgtcacacaatccggcactggtgtcggatccacacacctttataagcgctgttagtgttggatccacacacctggatgcattttcaggtgtgtggattgttctactgatttatgtccagtgtggtgccggatccggcactgtggcttttcggcctttacaggccattctgacggcttcagtttttttgagcgtgtcagcgtcacgggacaggatgtgtgtttgtaataccgcgcacgcgcgaaattacaaacactaccgtcagggctcgccgccccgacacccggcaagcgcctcacgggcacacaataaattgcgcgcccgttcaccactacctgtccgcagccggattttgcgcatgcgcaaaatcacctgccagaaatgcacgccggcaggcccggaaagtgtgaaaaagagaggttatggggtgtatccggcgccggaatcagagccattcacctggctgcatagcgattcactgtgccagaattcatcccctgcgtttctggcgggtttcccgggggtttgttacctgttttacccgtttcccgtcagaaacgcgctcaggccgtctgagcggtgcgcgtaa

SEQ ID NO: 166537 - DNA, 228 bp, Enterobacter cloacae
atgaacgaaaaaacactgttagtcgaaatgctacgcctacacgaagccggcgaatctctatctataagctttgcgactgagaacttcgacggtctgaacaaactatggggacaggggctaagctgctatcaagtcacaaaagtggtggcaggtaatgtgaggtcccggagagtgttccctggcgttttaacccctactggcatcgagaaagctaagacccttagttag

SEQ ID NO: 166538 - DNA, 492 bp, Enterobacter cloacae
atgagcagtcttttaacgctggcgaaggacttagagcagaaatcgaaagcgcagcagcagagtaccggcgagatgctgagagccgcattcagcgagcacgagcagtctgtcagggcggaactgagcgcaagcgcgaagagaatcagcgacggcatccgcgcccacgagcagagtatgagctcggccatggagaagaaccggcggagcgtgctgcgcacggccggccggacatggctcaccatcctgatgacctcggcgctgctgatcgcaacgagcgggggcgtgctgtggtggcagggccagcagataaccgacaattacacggccattcgccagcaggaggatacgctgaagaaactcaccgtccggacgtggggggtgcgctatcaggagagcagcgacggccggaaattccttatcctgccgccggggatgcaatccgaagctatcccctacgacgggacgacctggatccgcctgaaacaggagtag

SEQ ID NO: 166539 - DNA, 633 bp, Enterobacter cloacae
atggcccccttcagtcggatgtttcgccccccgtccgggtcggcaatgctgatactgcttctggtggtgcgcaccacctcaaaacctgcactttccagcgcctcagtgacgtcctggcgcgatttcagctccccggatgaggctaaggccagtaacccctgcgtgatggcctgtgcgacttcctgcttcgtttctggcagggctgatgccgtgaccagtgcgcgccggttctccggcgcgttcgggtcatgcagccccagccggccgttgaccaccgtctgccaggcatcgatgcgcggccggtcggcgcggtcaaagtacggctgcaggcgttttcccgtcagcagctcggtattggggatcagaaaattcagctccagacgccccttgtcggtgtgctccacccacagcacgctgtactggtccttatcgagtccgggcatcagaacccgctcgaagctggccatcagtttttcacgctgcccgggcggcaggtcggcctccgcgaaagacagcaccccggaggtgtatttcttcgcgtacggcgaggcgtcgataagctccctgacctcttccggccgtccctgcagaacgctggcaccctcacgcagccgatctttcccgagcaggtaa

SEQ ID NO: 166540 - DNA, 396 bp, Enterobacter cloacae
atggataaaaaagaaatagaaaaaagactattgatttttacaagcgagatcgacattgaagatattaaaaacgatttcatcaataacgaaattaatgaagatgcttttactggctatttaaagctgtattacgctatcgatgatgcaatctataacaataaaagatcattgtttgaagcgttgatatatttgataaataaagatcgtgaaaataaagaccatgatgaacaaattataactgattatgatcttgtttatttaacactaaataattacataaatatctatgagctgaaaatgttatttttattaaaaagaaatatcaatgattttgattttaaaagtatgatttcagagatagaaaaaataaaaagagaggttgaaaatgggaagtaa

SEQ ID NO: 166541 - DNA, 1170 bp, Enterobacter cloacae
atgatagataaacgaacaggagaaatacacggcgagaaatcagctaaccgtgatgatctggtttatgctgaaatattagcacctgataacacgcccgattttttgaaaaaatctagcaacgatttatggtgtttcgtcgaacaaacagagaggcgaaaggatgctagaaccgcaaaagaattcaaaattactttgccccgtgatttatcgaatgaacaaaatatagaactaatgaaagattttttattaaaaagttttgtcgataaaggcattatatgtgactttgttttacataatgataaagataataaaaatccacatgcacacgttatgattactacaagagaaataaagccagatggcttcggaaaaaaagtacgtgaatgggatgaagaaaaaactttgcatgaatggcgtaaagattgggcaaaagttcaaaatcagcatttaaaaaaattaggtttaaaatctcgtgttagccatagaacgctagaagaacaaaaaaacataatgatcgatttagctaaaaaagcagaagatgcaaaagattttgacaagtctattttgtatttagcaaaagctattgaactagatcgaccaccgatgcagaacctatcacgtaaaaaatggaggacaaaagaaggtcaggagcaacgcaaacgtgaccaagcgatcagagatagagcgaagcaggatgcaagggctgtcaggttgttgagaggtgttgcagttgtggatgttgcttcattcgtggttcatcctttggagaaaaaagagcattcaaaaaataatgatttttcagttaaaaaatcgtggtggcgttctactgttaattttataaaaaatattaaagctaagttctcaactaaaaaagatattaaaaacgttcacgaaaaagaaccggagttaataactgatccagtcactggtttaccgattaccaaagagaaatggcaagagatgagcgacagagcaaacgtgaggactccacaagctgcgatctcataccaagttaagcaatcacacggggaagggctaaaaacggctcagaatgcgttacaggacgttttagacgtatcagagggtaaaacgttaaaggtgaagtctgtgcatgttccgggttctcgtaggcgtcgagtgatagaccaagacagcagtgacaagggttaa

SEQ ID NO: 166542 - DNA, 258 bp, Enterobacter cloacae
gtgcggcagaaccaggcccatgaagtaatcgaactcggcctgcttcacgattttcatcgctatctggccgccggagtaggtaccgctgactacggaggtagcagtggcgctctctaccgggaaatcgctggcttcgttctgccccggcacctcctgcccgtcgacgtcatcgaacccgtatccctcgacgatctgcgggataacttcgccaggctggaagaactggaattcagcaccagccagagaacccaggcttga

SEQ ID NO: 166543 - DNA, 378 bp, Enterobacter cloacae
atgaaaaaaggtttactgctactggctgtcctggcgctgtcagcgtgtgatgtgaatgatgcggatgtggccagccgtaacgtcagcaaagccgctgacaatttcgaagctcagcgtcgctttgttttttataacggcatcaccggcgaattcatgctggagatcaccgggctttgctccaaagacaacaccagcaccgatcgtaccctgggcgtcatctgcaagaccggtcctggcatctacaagaagcacatgctcggcctgtcagataacgtgacctggttcatggaagatctgagcggcacgaacgccagcgtgaaccattatcgagtcaccttcaaaccttcagtaatcatccccgatatcgatatccgctaa

SEQ ID NO: 166544 - DNA, 285 bp, Enterobacter cloacae
atgaacgcatatctcacttacgaccgcatcgaagatcggcgctgggttgagcagcagctcaccgacgagaaagagaagtgggtcgacgaccgggcgcagcaaatcatcgacatgatgccaaaagagccgtccggcctcttccacttcacgatcccgattgactccagaccatacgaaggacttcgcagcgataaagttggcgaggcctacaacgatttcatttcggcagttgcttacgcccaggcggaatacgactgggaacaccggaccggctgcccgttctaa

SEQ ID NO: 166545 - DNA, 501 bp, Enterobacter cloacae
atgatattcgaatatataaaacaacattcagaggtaatcatttccggattttcagtcgccgcggccgtcgcctctgcctgggctgctattgctagcaggcagacggcagcaaaagcactaaaaatccaaagcagaatgagcctgtatgagcttctaaaatccatagccgaaaaagctaactcgcactcaaaggggaaaaaaggtgccgagtggaatttttatgacgcagctaacatagtgagatgccttagcatggcaatggagaacataaaaaatcacactgaaactaatgacggtcttgatatcagggagttaaaacaattcttcataagtcaactgaacatggagctttttgaagagttaaactatcaagttgggccagacgccctgtttgcgacaagggaagtaaccagtatgactaacgaactatatttatcctggataaagattatttcattttttaacttcctcgttgttacaaatgaagatcttgataactaa

SEQ ID NO: 166546 - DNA, 171 bp, Enterobacter cloacae
atgaataatcctctcgcacgcgtcatcaaaaacgaaatcttccgcgttccgactcgccgtcagcgtaagccagcgcttaaaccttccgacatcccgacactgaaggggtacaccgcccgcctggtggatcagaaatggctgcgtctcgcggcacggaggaaccatgcgtaa

SEQ ID NO: 166547 - DNA, 1269 bp, Enterobacter cloacae
atgagttacctgcaaacaaacaaagtgatttactttctgtttatatttttgttttgttttttagtctttgtgtttagacgtcctgagattataaccaatgctcagttctgggcagaggatggggcgatatggtaccatcaggcaaacactatcggcccgctgaattctctgatacttccccagcagggatactaccagacaatatctaagctggttgcttcgttgtctcttgctgtgcctgtctactatgccccgctgctatacaatgtcatcgggatatccataagatgctttatggttatgttcctgctgtcgaacagactcagtatgtatagtcttccatcgcgggttttgatcgcgttatttgttgtgctgatgcctcatcttgaagaggtacatgcaaacataaccaatacccattggtacttgtcaatgtggctgttcatggtgctcatagccaacaagccagccagcagaattgataaaacacatgatatttttgtgcttgtgattgcaggcctaagcgggccatttattgtatttatggctcctgttctggcactcaaaatgattgccaatgcatccggtaaaaacattttcataaagaccataaatgccatcaagtccgtagactggttcgcttttgtgttcattgctctatgcgtggtccaactcttgaccatcgcgatgtcatttaatgaatcaagaaaccataccgagcttggagctacatttcagttatttataaacatactctctacgagagtgtttgctgggtttgcgttaagcgatagcggtatacagatgctatggaccatggataaagcaaatgacgtcatcgtcataatctcatgctgcttacttgttctggctttgtataaagctaactggagggcatgggcgattgtgatttatccgttcacaatgctgttcctcgcgctggcgaaaccaatgatcagccagaccattccgcaatggcatgggtttgaattcaccgctgcagggcaaagatattttgttattaccagtatattctggttcgctatcattctgctggcattctcaaggcttggtaacgctatgaagtatgttggttacgcatgcgcggcgatggtgttgataaaagtggctgtttacgatttcaggattgaaccattgcctgatgctggatggtctgagcaagttgaaaagtacaactcatcagccaagggagagcctgtcaggatgagcataaaccctcctggatgggttatggaagtgatcaagtga

SEQ ID NO: 166548 - DNA, 615 bp, Enterobacter cloacae
atgagaattgccaggcgggcagagtctggtggttacatgaaaattaagaatgttagatacgattcacaagactggcaatcgtttattcattatttatggccattacaatggacaaatgttgaaactccattaaatgatgagttaaacgaaaaattattcattttatctaaaggcaatattggattggctcagatgatttatcggggggcacaattaaaggttatcggtagcggcaatgaaatcatcactggcgcagtcttgtcggcctctgtaccggtactcgtgagtcatacggaggaatataaggatactccactcccgggggccgcgactgaagatgaggaagctaaatggctctctgcatctaatgagggtgatgcttcggctaaaatcatggcagagaagtccctaaagtctttgatccctggggatatagacaggccacagcacaaggaattcgtaggaaaaatagacgaggttttgcgcaatttcgacgagaaaatactgtctcttgaccacgatcttgttatcaacagaacagctgaaaagaaaaatacctacgatgctcttcagcgttgcgggcttataaatatagatccacttaataaattgtaa

SEQ ID NO: 166549 - DNA, 978 bp, Enterobacter cloacae
atggcttatgatttgactaatactctggtcattggtattagctcaacagcacttttcaatatgcaggaatcagatagtctttttaaggaattctgttccagcaatccagaaaaagcaattgagcaatacagagactacatgcttttgcatgagaatgatgagttgcttcctggaactggatttcccttggtagaggctttgttggggctaaataagtataaaaaagaagctgataaatctcctcttgttgaagtagtggttatgtcaagaaatagtcctgatacaggacttatgatactgaacaatataagaaaaaaaggagtagatataacaaggtcagtattcacaggtggtgaaacggtggttgactatctcgaggctttcaatgtggatctctttcttacaaccagtattgatgatgcacagcgcgttatcgactctaacgcctgtgcagttgctattttaaaggaaccgccaaaagaatctataaaatatccgcaagatcaggtaagaattgcctttgatggtgatgctgtcttattcgatgagtcgagtgagattgtctataaaacgaaaggaattaacagtttccatgcacaagaaaatgccaagcaaaatgaacctttggcggaaggtccttatgcaatgctgctaaaaaaaatagcgagattacaagaccgattacctgcaagagttgattattcaccgataagaattgctcttgttacagcaagaaatagcccatccgagctacgagttataaaaacattaagagcttgggggataaatgttgatgaggcattctttctaggtggggtcgagaaaacaaaaatacttaaagctttcaatcctcatatattttttgatgatcaagatgtccaccttgagccagcatcagtatatgtcccttcaggccgagtaccttatgcttctcgctcaccattatatcagcaaatattgtcaatcaagccagcttaa

SEQ ID NO: 166550 - DNA, 417 bp, Enterobacter cloacae
atggcatataaaaataaactctttgcgctcgccttattgacgatatccccgctgtcggtggcgcaggactggaacggaacggtattaggctttgaagctcctccggagcctgttctgggcgaaatgctcggcatacgtaaaatcctcaacgataacggttttacctggaatctcggatatctgaatgaaattggctggaacggaggcggtggctataaccacgactcccacgtggcctatattgaccagtttgcgctgaccttcaaccaggatcttgagcgctggaccggtatcccggacgcgcgtatcgaagggaacatcgtcaaccgtaaccacaatgacgacctcaccaccaaacgcgtgcaggacccgcgcgttaactttaacgatctgacccaggagagctggggcggatag

SEQ ID NO: 166551 - DNA, 744 bp, Enterobacter cloacae
atgaaggttggaaaatattccttaatttctgaaaaagcagtaataggaaataacgtgacgattggtgattttgttaccattcacgataatgtcaccattgaagataacactatcattgagtcctattgtgaaattggtgtcgcgaataaactttcaggtggagaacaattaaaaatcggcaaaaactcacacattcgttcgcatagtattttttatgaaggctcggtatttggcgatggtttgatgaccgggcatcgcgtaaccgttcgtgaaaaaacgaaagcaggtaaaggtttccagataggaactctttccgatattcaaggacattgtaatattggggactatgtaagaacccacagtaacgtccatatagggcaacacagcacgataggaaactatgtctggctcttcccttatgttgttctgaccaacgacccgcacccgccaagcgaagttgtgatgggtgtgaatattgaagattttgctgtagtagcgacaatgtcagtaattttacctggcactaatatagctaatggctgcttagtgggagcacattcctgcctctctggtaaaaccgaagccgatatgatttatgccggaaacccagctcgcgccgttggcccaactagccggctgaaactgcgtgacggatctcgtaaaccagcttatccgtggagaacacatttctccagaggttatcctcaagaagtcgtcgaattatgggttaaggaagtggaatag

SEQ ID NO: 166552 - DNA, 408 bp, Enterobacter cloacae
atgtacaaaattgaggaattacatgtaggaatgtcggcatcctactctcaaacaattactgactctgacattaagaactttgctgctttgtctggagaccgtaaccctgtgcatatggatgatgaatatgcggcatcttctcgttataaaaaacgtatagcacatggtatgttcagtactagtttcttttctgctctttttggaacaaaactccccggtgaagggtgcgtatatgtcgcacagaataccaaatttcgaaaacctgtatatattggtgatactgttactgccaccgtcgaagttaaagatattgacattgagaaacgtcgtatcttttttaacacctactgtaaggtagggaactcaaaggtaataaccggggaagctgaaatatacatgccactataa

SEQ ID NO: 166553 - DNA, 432 bp, Enterobacter cloacae
atggttaaatatatttatgacgcaaaaacaaatgcgttttatccatattccaataaagtaaattatttagctgccgggctatggccagagacgggcgttgactttgaagaggatgggtttgctggctggcaagctgatgcagcccctgcggggaaaatacgcatcgcgggtgctgatggaatgccgtcgtgggctgatattccaccgccaacgcatgatgagctcgtagcgaatgccagcatcgataagcaactgcggatcgaccaggctaacgactatatgaacagtaagcagtggcccgggaaggctgccatggggcgactgaaagattcagagaaggagcagtataacgcgtggctttattatctggatgcgctggaagcagtagatacatcgactgcgccgaatatcacctggcctctgcagccatag

SEQ ID NO: 166554 - DNA, 405 bp, Enterobacter cloacae
atggtgggtttccggtcggtaccgacggaatatcccaacttgaggactgggggggctgttaaagctactggagaccagctcgctgtcgccgaccatatctatccgaaacagactgacaccgccatcattttcgtatgttccccgatcaagaaagtcatcaatattgaaatatcagggatcaaaaatgccgacagcaccacagttcagggtataaaagacgcgttgacgtcgttgttttttgatgaggccaaccctgatggttccgggaaagtgtacctttctgatattaacgggagtatcggcggtgttagcggcacgacgggctatattcttaactctccgacggccaatatcacctttgctgttggcgaaattccggtgcttggcggggtgaattttgtatga

SEQ ID NO: 166555 - DNA, 246 bp, Enterobacter cloacae
atgaaaaagtttttggagcaaaagccatttagactccaaaggttttttgcgcttgtttacctggtaattggcattttcctcgttttttctgttgtctcaatgaatttcacggcgattacgatatcggtggtaagtgcattgcttttacgtgtgctttatgagttcctaatgaactcattcaaggcgactgagcatctttacaggatcgccgaatctcttgaccgtaatggatccagcgataaatag

SEQ ID NO: 166556 - DNA, 207 bp, Enterobacter cloacae
atgatgggtacgcgagataaggtaggcagtaacgccgaagcaagtcagcaggcagcagtggttccgtcaggttgtaaagcctgtaaacgtgagggcgttgccatttatcctctgcgcgtggccgcaattccacagcctctggtaaataccggttggcaacctgcggttcctacccaggatattgagctaaccggggggggagtttaa

SEQ ID NO: 166557 - DNA, 198 bp, Enterobacter cloacae
gtgcacgaaatattcactatgctgctggcggtttttgatcgtgcggcattaatgctgatttgcctgttcttcctgattcgcattcgcctgtttcgcgagctgttgcacaaatcggcccactcgccaaaagagctgctggccgttaccgccatcttttgctgttcgccctgttcagcacctggtcaggcgtgccggtag

SEQ ID NO: 166558 - DNA, 819 bp, Enterobacter cloacae
atggatgcagcattgcttaacatgatgcaatcaggcggaagaaataaagcctgggcggaaacgatggtgaatatggaagccaggaaactggtaaatacagccaacactctgtcggcttttcatctcagcgatggtctgactcgaatgaagttcattcaggaaattcgggacctcatagaacaacagtttacgctagctcgtcaggctaaatctgataaagaatgcatggactgcgttaaaatacttagagaagaaaactataacctcctggaacaagctcgtttattacgaacgaaggcagcgaagctttacgcaaaagtcgagttcatccgagagaataacaaaattgttgggtatgttatctcggcagttagtgttgtcctggccggtgctgaaatagccgcaggatttacactgattggcactatgacccctctcggagttcttgctggtgcgattctggttactgacggggcaaacagcatcagtaaagaagtggctcgctacgcaacgaacaacactaccagtgaagggctggtcgcgaatgccgcgatgtctacagctgagtttatgggctttagtcgtgagaatggtttaggtgtctacaaatcaatctcactggccgctaatgcgtataccatttttggcttgttacggcgacctggtacctggcgactgtttcgttatctacccacagactattaccgaaaggtgagcacattgagccgcccacagcttacaatgaaaatagcgggttacggcgtgaaagctaagattatttttgatctgttgtccgtcagcgacccgtctcagaattag

SEQ ID NO: 166559 - DNA, 879 bp, Enterobacter cloacae
atgccattctgctggacgcccccctgctccggcgaaggagtggtgcgtaaagatcccgatgcgttaaagaactggtccgtggagagcaaccttgagatcgccgccacgcagcgcgagctgatcgagagtgcatttcacgcgttgcgccccggcggcacgttggtctattcaacgtgcaccttaaaccgcgatgaaaacgaagacgtctgcctgtggctgaaagcgaactacccggatgccgtggagtttctgccgcttaacgatctgttcgcctcggcacaggaggcggtcacgccggagggtttcctccacatgttcccgcagatttacgactgcgaagggttctttgtggcgcgtctgcgtaaaacgcaggcggttgctcccctgcccgcgcctaaatttaaggtcggcaacttcccgtttgctccccttaaaggtcgcgatgcagcacagcttgaagccgccgccaaaaaggttgggctggtctgggatgagagtctgcacccctggatgcgtgataaagagatatggctgttcccggcacagatcgagccgctcatcggaaaggtccgtttttcgcgaatcgggatccgcctggcggaagtgcataacaaaggctatcgctggcagcatgaggccgttatcgcccttgccggatgcgggaatacctttgccctgacgcatcaggaagccgaagagtggtaccgtggtcgcgatgtctatccggacagcacgccgtcaggcgatgaagtgatcgtaacgtatcagggatatccgctggggctggcaaaaaaagtcggctcaaggctgaaaaacagctatccgcgcgagctggttcgggatggccgtctgtttaccggtaacgatcgcacagcctga

SEQ ID NO: 166560 - DNA, 780 bp, Enterobacter cloacae
atgacggccgccatcgcgcagctggaaaaagcattgtcgctggcgatgacgctgcaacaaagcgccttaacggccggtgccgggaatgtggataccgatcggcaaaaccagctggctcaggtgctgaaccagctgacagggccgggcattctggcgtatgccgaaaaaggtgccgcacacgtcaccccgcagagcctgcagctgtccgccgggaaagacctgatcgcaacagcaggacaggatgccagcgtgaacgtggtgaaaaaattctcgctggccgtgggggaaaaactctcgctgttcgtccgcaagctcggcatcaagataattgccggtgccggggatatcacgacgcaggcccagcgtggtgccatgcacatgctctcgcagaaagatttcacgatggcgagcactgccgggaagctgaacggcagcgccaaacagggcatacagctggtctgtagcggcggcgggatccgtgtcagtccgaacggactggttaccatcttctcgccaacgggaatcgaactgaaaggacccaacctgaagtatgacggtccggaaagcgcgcaggtcacggtcccgccgttcaataagggcgcatttaaactccgctaccagctgcacgccggagacgacccggagcaaattctcgcaaacaaaaaattcaggctgaccagctcggccggaaacgtggttgagggcgttacggacagcaacggtcattcatcgttactcgatgccgatgacctggatacctacaaaatggagttactgtaa

SEQ ID NO: 166561 - DNA, 123 bp, Enterobacter cloacae
atgagctatgttactgaatttccggccgccgagccgcaggaagccgttacccattttctgcgccgcctgagcgttgaaaccgactgcgcggatgtgcaccatgccatcgccaataatgagtag

SEQ ID NO: 166562 - DNA, 174 bp, Enterobacter cloacae
atgacgtgttacgacacgcgaagctttgggcggagaagcagcaggtgccgtcagacaagttcgaaaagaagcgcgttaagcgtgtgcagcagcagccaggtctgctatgaaaaggcgaaagccgcgctgttggtagcagcaacggctttcaagacactgtgttacgccaagtaa

SEQ ID NO: 166563 - DNA, 465 bp, Enterobacter cloacae
atgcagatatcaccgattactcttcgcgctgctcaggaatttgtcgcccagcaccaccgacacaacaaaccgcctcgcggccataagttcagcattgggctgaaaaatgaatttggagaacttattggtgtggctacagctggcaggccggttgcaagacacttcgacgatggcctgacgcttgaagtaaatcgtacatgcacaacaggagagcgcaacgctaacagcgctctttacggggctatatggcgggcagcgaaggcaatgggatacgttcgctgcatcacctacacccaggctaatgaatcaggagcatctctgcgtgctgctggatttgttcaggttaaggagcttccggcaagaaaaggttgggctgcttcaagcgttgtgctgaaagataagcgagacccgataggcaatggtggtgtttctcgtgttctttgggaaatcaggaggggtgtatga

SEQ ID NO: 166564 - DNA, 345 bp, Enterobacter cloacae
atgaataatattacgaatgagcaattggatggcctgattaagtcagcagtaaattcttctggcccactgcctcctgatgagaaattttcacagataatttccgccttacgtgagctgcgtgagttgagagccgccatgctacagggtggcaactctccggtgattccggatgacgtgttgtcagcaatcaggaaggttgcccgtattcgcgcagacttcgatgattttgacggtgacaggcgtggtatcggtgattgtcttgatgaggccgagcaggatcttatcgtgaccattaacaaacacgccagcgtgattgcagcagcaccgcggcaggaggtgaagtga

SEQ ID NO: 166565 - DNA, 249 bp, Enterobacter cloacae
gtgacaaaggtaaaagcaacggttgctcatttcaatgcgactttagatggagagttgatcattgagcacgagcaaagcaacaattccttagtgacaagaacaacgctgatcatcccaaagacaaaccattctgtagagattttaatgggatggcctttcaatcaaaatatcgaatttttgtgcgagcccggcgggtattacgattttaatttgcttgaagaaacagcgactcattacgttttcgcataa

SEQ ID NO: 166566 - DNA, 939 bp, Enterobacter cloacae
gtggaaaacacaggaaaaattgctgtaattataccttgctataacgaggacgcagcaatcgcaaaggtcgtatctgattttaaggatagtttaccatctgccgatatttatgtgtttgataataattcgacagataaaacctcagaggttgctttgcaagctggggcttttgtaaggcaggttaacttaaagggaaagggaaacgttgtgcgccggatgtttgccgacattgacgctgatgtttacgtcatggttgatggtgacgacacatacgaggcgaaagccgctcctgcgatgattgagaagcttttcgccgaccatctggatatggttgttggttgcaggattgaaaatggtgatgagaaaacatatcgacctggacacagaatgggcaacaagcttttaaccggcactgtgtcgaagatttttaaaggcaaatttacggatatgctgtcaggttaccgcgtgttcagtaaaaggtatgcaaagtcattcccgtgccattcccatgggtttgagattgagacagagctcacgattcatgctctggagttaagaatgcgcattggtgaggttggaacggagtacggcgagcgtcctgaaggatcagtaagcaagctatctacttataaagatggcattaaaattctgcgtacaatcattcaactatacgcttatgaacgcccattgtttttctatacgctaattgcgttggctatgtgcgttatttctttggtaattggaacgcctgtcattgctgattatattgagacaggtcttgtggccaagttcccatctgctatagctgctgcatcagttatgataatggccatgctttcccttgtgtgcggaatcatctcacatttagttaccattagcagaagggagacaaaatatctctcctatctgtcaatccctttcattactagcataaagtaa

SEQ ID NO: 166567 - DNA, 1143 bp, Enterobacter cloacae
atgaagaagatagcgtttatctttttttggttaatgatcgcctatataggatcgctttttattgtttactcaataccgaacttccatattgcagaaaatgttgcagattcggcaaaggtacttgaaagggatggtgactggcctcctgtttctcaggcttttaaaacgcagacaatgctggataacttcacagacctgagggttatgatgccaagggccttaagtgaaggaggtgttgtagtttccgcattggacatgggtggatatccgcgatactggcatggataccaggttattctgcgtccattggcatcttatttctcgtatgaacagataagattcctgtacgcattgctggttttctcgtcattcggaatggctttctacgcaattgcaaagcgaatatctgtataccatgcggtggcgtttgctgtatcaatgtgctttgctcacattgaagtattcagcagctctatgcagttttctaatatttttgttattactttcctgttcatagctttcattttgatgcgggacgatgttgattccttcattcaaaacaggctgattaccagcttttttgtagtaggctctctggttaattttgtagaccttcttaccgtgcctattgtgtcgcttggacttcccttgctggttgttattttctatgcactgaggcatggctctgtaaaggttacgccattactatttattaaatcatgctttgcctggtccgtcggctatggcgttacatgggtggcaaaatggcttttggcatcagcaattcttggcaaaaacgtagttaaagatgccattgaacaaatggcagttagaacctcatctgacggcttgcaacctcttgacagattgcacatgcttgatattaactttttaaacatgtttctttttgagaaagttatttttgtgttaggtctgatatttttactgggcatactgtggaacagaagatcaaatctaactaatgccgtgatggttttattcactgcattaatgccatatgcatggtatctggttttggctaaccattcacaagtgcatttttggttcacatacaggtctcaggctataacaatgttcgctgcccttgggttactgtctacgttaaaatttgctagaagataa

SEQ ID NO: 166568 - DNA, 825 bp, Enterobacter cloacae
ttggttacctccgttggcgggtcagaaagcgctatagcaattattaaacaatctagctctacactatatggaaatccctttggtagttttaaggctactggatcgcatatagaatgtaatggctatctaaagatggttgttaatagctcaggaataactggagcatcagatagcaaatatagttgcgtatcatttacaaactgccaaggtagtatgttaaatggggcccaagttcttgcttctatagctgtaagcgactacgaaggggctttgatcattgacgatagctgcaatttctacacgtctaccacacgtacatcacgcattgtttatagcttatcaaataagttcagattaaaggttggaaatggggcgtttgggaaagggtttggcacgctttcagaggagataggcagcgggaatgttgactggaagcatgatttacagccaatcatgaggatgaacgtaaacacagtcaccataccatcatctggacaggcgcctcttggattttcatcacgggagagcacgggggattatgcattctactatccagacacaacatctggcggcattgttctaacccatagccttagttgcatggtcatatctatatcagtgccggccactggaatattgactgtattggttaaaattgatggcgcagagtatttctcatgtcagggttctggcagcgttattttgaccagggagatcatacctgttggatcaacaataacatttacagcaattaatggaactggatcatctgtcacaactgcatcttccgcgcgggttatcgtgtcaggtgcaaatttgaagtaa

SEQ ID NO: 166569 - DNA, 267 bp, Enterobacter cloacae
atgcaggcgcatgaccggtctcagggcgcgccagtgctggcgctggtaggggattcagtgtctgtaaaacgcatgcaataccatgcaccttatgcatgcatggcttttatacgtaaaaatggcgggattttcgggggatttttaagcggactactgcacggccagttctgcacgacggcgggtataattcaggttctgtgcaggtgtgaatttttcacgactatcatcgcgcgaagccgcgtcaggcctgaatccgatggccgctaa

SEQ ID NO: 166570 - DNA, 534 bp, Enterobacter cloacae
ttgaactatgagcagatagcaagtctaacaataagcaacctgcagatgctgttagacaaccttaagattccgttggctgttgggccgataaaccaggaggattacgtcattttgacgtctggttattcggaactggagtgggggaatggtttctgcactcatggcaacaaagatgagaagtttgagttttgcttgaagttgctgtccggaccgatgaagcacatcccagcaggtgcggcgctatgtacttatgacgaagctacaaaaactattgaaattcactttgtagagtcgtttgttcgtggtaataaagaacatccattgtacggtcagatgttcaccgtaacgctttgggcggtctatctgttcggtaccgctgttgactgtcaggagattcgaatccctgacgcggtcaaccagaaagtagtggaccattataaaaagtatggttttgagggtaatctcaatctactaaccgcaccgtttgctacacttggtgatgtagtaagacggtacattaaaatcactagataa

SEQ ID NO: 166571 - DNA, 177 bp, Enterobacter cloacae
atggcacatacgcaaagtgacaagaaaactgcgcagttaagcactgcagaggtttttgctcgcatgggcgtggctatggaagaacttcttcaagcaagccctcaaatgtggcacgaaggcaagttcgatggtcatgaaatgcacggcgaacttaaagataagcaaaaagctgcttaa

SEQ ID NO: 166572 - DNA, 615 bp, Enterobacter cloacae
atgaattctaattttttttcgttgtcaaaaataactgatcagcatatcgttcagaaaatactggatgcatggttttctaaacgtatacaactttttttgtattttggcggaaatggcaaaaaatgtagattgtcacgctgtatttcgccttcgctacatataggcggagagcagcttattagtaatggggatgaattttacctgtcagaagacagtaaggcacattcaattttaaaattcatccctgacctgccgctaaaatcgtacttgaagataactaaaggttttaaaatatcaagatcaattcaaggtgagtatttcaactatgaatacgcagggactgcattgggatattgggttgttgtcccgactaaactagcagcctttaataatggtaattatattctcactgataaagagtcatttagtcttaaggctgattcatctggtgcggtatatgtctatagtgtttacgatgaggactatttgatttttgacggtgataacggcatcaataatgatgatctctatatcgatgttaatgtgctaaagtccgtctttccttcattcaaccctgatgataaatttaatggcgtaacagatgagaaaaaataa

SEQ ID NO: 166573 - DNA, 276 bp, Enterobacter cloacae
gtggctacaccaatacttgtccgtaaatggggcatcaggctattcaaaacggtctggtttctatgcatcagcattatagtaggccgcatattgggacccgctgaacgctatcttgatcatgacgtggcctcatctatatgtgattttatttatggcgacgtgaatgctgaaacaatatatgacacatataccaatatcgatattttaattgtactgaccctcgccacggttatttatcgcttaacaacactgctactcaagaaaataaggaaataa

SEQ ID NO: 166574 - DNA, 786 bp, Enterobacter cloacae
gtgaaaaaagaagaaaatcagaaagttaaatcaaacttggatgcgataggaaatgagttatcaacgcatccaagtaaggggaatcaactcggatgcgatggttttcatgagcgattgcgagagctgttggcaaaattcaagagcactaacgcgtttgcggttgctgcaggtgtgtctccatcaggcattaaccgcttgctggatggtggcttccccacgttgccaatccttttagcattagcgaaagcaggtaatgtcagtgtggaatggttatcgactgggcaggaggttcaaagcaataaacaagaactagtgacacctcctagtaacatggcagtagatgttaaaggtaacgatgtggatttgagcgagtttgtttttgtccctcgctataatgtctctgccgctgcagggtacggtgcatggaacgatgaagagacaccaatgtttacagtcagtttccgccgatattgggtcatcaatcacttgaaggcagatccatcaatgctttctgttatcggggtgtatggagattctatggaaggtgtcctaaatgataaggatattatccttgttaatcatggagacagagacccacgagaggggatttacgttctgcgtatcgatgggcagcttattgttaagcgggttcaacgcatcccaggatcgatgctacgtgtgagcagcactaatccagcgtatgagccctttacaatcaatctcgacaatgttcctactgattttgacattgtaggaaaagtcgtctggtatggaagggtgatttaa

SEQ ID NO: 166575 - DNA, 894 bp, Enterobacter cloacae
atgagcatacaagcagaactgaatgacctgatggggcgtaagggctacagccagacacaggtagcccgcgcaatgggcaaaagtccggcagtcattaaccagtacctgcaggggaaatatgcaggtgatgtacgcagtattgatgagctggcccgcagcttcattgcccgtgaggcggataaagaaaaatcccgccgtatcacgtcccgctttatctccaccgtgacctcgcgcaaagggattgaagtgattcgcctggcgcatctggatggtgatctgaacgttatttacggtgccgcagggttaggcaaaaccatgattctgcgcgagtacgccgcacagcaccgcgatgcgctgcttattgaggctgaccccggctataccgcccgtgtggtgctggaagaactctgcagcctgctggggctgagtaagcgcgggaatatgcacgaactcagcgaagcctgtatttccgcactgcgtgattcgggtcgtctgctgatggtcgatgaggcggagaatctgccataccgggcgctggaaaccctgcgccgtatccatgataagtccggtatcggactggttctggcaggtatgcctcgcctcatcattaacctcaaggggaagcgtggtgaataccagcagttgtacagccgcgtcggcctggcactcaatatcggcgattcactgccacaggaagatatctgtgatatcgccgtcagcatgctgcctgatgctgccggaacagatgtaagtgcagcgctgtttaaggcgagccacggcaacgcccgccgtcttttcaagctggttcgcggtgtcagccgtcacagcgaaatcagtggtcaggcggtcagtgcaggtgctgtccgcaagttcgcagaaatgctcattaactga

SEQ ID NO: 166576 - DNA, 153 bp, Enterobacter cloacae
atgactcacgctcacgacgacatcagggttggcacagtgtgccttcccttcattggaaaaggctggctaatgccatggggtgaagtggtcagcaatccattaaaggcgcagcggctcgctgaggaatatcgggaaaggcaggaggcggcatga

SEQ ID NO: 166577 - DNA, 222 bp, Enterobacter cloacae
atgaacaaatttacccccgagtatcgaaaatatcttctccggccaattcctgaccggaagctttcaccctccgagcgagccgatcgcaaagagctttaccaaatcatccagcaagaaagagccaaagaagattcaccccctgccccacccaactacacgccagctgacccatacctcaacgacaaccgcaagggcctcggcggcgcttcaaggagtgactaa

SEQ ID NO: 166578 - DNA, 183 bp, Enterobacter cloacae
atgaacaactattttgctcgactcgtggcaggtctgggtctggtcgtttctgctttgagtatcccggcttattcggccacggttgttgacggtggcgtcattcatttccgcggtgctattgttgcagacccctgtgaagtcgcccccccagaagcaacagattgcaatgtcatgtccaaataa

SEQ ID NO: 166579 - DNA, 516 bp, Enterobacter cloacae
atggaaagaaaattcatgatttatcagcgccgcgatggttttcagatcgcagaagaagcaactgggacccgtcttgctaacggaatggacatgctggcccgtccgaacaaatcagcagactggtgctttgctgcatttaatatcgatctcactgacgggaaggatggttacgaactggtaggtgaagagtcgattgattgttcggttccccctgcgcaaatgatcgagttcgtggatggtgtgatgaaaatcaccagcaccttcgcagaagaacttgatataggagaagcccacgccgaagctctggaaatcaacgcagcaatcgacagtatgatcgaagcccggcagcaaatcgcaaataaagatcccgattttttacaagaaacctgggatctggttcgtctcgggaattcttacaaagaagcaggccgagagtggtaccgctgggcaaaagctacagccctccgactatgggaaagcagtttagctccgcgtcaaggacttcaggcgcaatga

SEQ ID NO: 166580 - DNA, 549 bp, Enterobacter cloacae
atgtctatgaagcaagttgaatcaaggagtttgacaaatattgcggcaaaaagaatgtattatatttttcttgtcggggttatacctttgattctgatttttttatcatatactaacaaccaagggagcgattctctaacttatttatatgcgttatctggtaaagttcctgagttaatttcagccaataacccaacattaagtagtgttatgagtttttatgttaaaattgctcctttgttaggtgttttgtttttcttgattgcccggaggaaattaactttaaaaaccaatttttctttcacaaaaggtattttggcttttatgttattcaccgtgttttatattgcaattatttattatttgttggtgtcgaacgtggagctaactgaatcaggaagatttatgaggcttttatcagggaacgattatcttcttactgtttttttcgttagcgtattttatgtgtgttatatcctcacctgctattacatcagctatgcttatgcagttttcttagtattaaaattaaaaattaagcaccggtga

SEQ ID NO: 166581 - DNA, 1113 bp, Enterobacter cloacae
atgagtggtaatggtggcgacaatgcacacaacaatgcgttcagtggtggcaaaaatcctggcatcggtaactctggttctggcagtaattccggtacgtcgggtaatggtgggaatggtggccgtacacagaatattaatggattttctgtggatccaaacaacagtgcacaggtgaatgctgctaacagaggtgatgcggctggagtattttctgccggtggtgcaattgctatcagttcaggagtagacagtcattcaggtaaaggctccggtggtaatggtggtaactcaggttcacagtctggtagtaataactcccagaatcaaaatggaattagcactacgagcgctccatctacctgggatagaacggcaaagtactatggctccaatgataaagtttcccggaaagcgcttaagaacttatatgagcaagcagtgcgggatggaagtataccaaaagcagcccggggtaatttgcgcgaaaatgtccagaagatgctcgatgaagataatcaaattgaagcattacaaaaagccagcgaaattattgctgacatgggggaaaaagttggtagttacttagggcaaaaatataaggatgtgtcaagggaaattgcaagtaacgttaagaacttccaaggtaaaacaattcgtaactacaatgatgcaatggcctctctgaataagattattgctaatccggggatgaaaattaatcaaggtgataaaactgcgattgttaacgcctggaaaagcctgaatgcgagtgatatggcaaacaaactcggcaatctaagcaaagcatttaagactgcagatctggtgatcaaagtagaaaaaatccgagagaaaagcatccaaggctacgaaacaggaaactggggtccattgatgctagaggttgagtcctgggttattagtggtattgctgtcggtgtagcaatggggatctttggcgccctggcgtcttttgttgcgacaaccgtcgggctaccaattactgcattaacaattgcaggaattataggcattagttacctagcttcattcattgacgataaaatcgttgataaaatcaacaatgaaataatcagaccagctcattga

SEQ ID NO: 166582 - DNA, 420 bp, Enterobacter cloacae
atgaataaatctaccggagtattcgtgtgtgcattgttaacatcatccttgatgagcagcgcatgcacccctcaaacaagtgcagaacgccatgcacgccagtatgtatatgctgcagatgacggctttgacccgaatgtacgcgttataaaagccgacagtattaagatggcggtgccattctttaaaacttttcatgatctgggagcaaaagaccgctcatcaggcatgtctatagaggacgccaacaagcgtgcagatagttttcgtagcgagtcatttctgaactccattcagagtgaaacaattttcgcgggaactcgttacgtcgataataaatcatggtctgctaaacagcgtaaagctatgagcgactctatctctgaagcctacattgatggctatgaaggaagaatgtga

SEQ ID NO: 166583 - DNA, 324 bp, Enterobacter cloacae
atgggatttcaatcaccagcattagacctcgctgagcagattctcactattaccaacctttacggtaatgacgacaactgccgaaccatcgaaacatcagctggatacgtgataataaacattgccagagagccgaagttaggtgacaccatcttaattgcgttctgcggtagtctggacttcgcaaaagttcaggggagggcattaataactcaggatggcgaggctatagagggtgattcactttatgatgcgaccataatgggagttgtgacgtactttctgaatcgagtgacagataccgatgatcggcctgtgatttaa

SEQ ID NO: 166584 - DNA, 519 bp, Enterobacter cloacae
atgaaaattaatgtgggtcttatctgcattgtcgttattgctggccttttggtcgctctcgtaaagagttgctctgatgccagcaacatacagagtgataacgacgttctgcgtagtgataacgctttgcaggggcagatgatcgccactcaggctttcaatttcaatcggttcaatcaggttgcacaatatgccaacaggctaaactccctaatcgacaccagaaccgaagaaaccgtaatcgaatatcgggagattctccgccgtgaaaaaacctgtgatctgcctgttcctgctgacattactggtgggctgctcgaatacgcgcaccgtttacgttccagcgcaatgcacgccgataccgacagacctgacgcagccgatgatagtaccgttgccgccggctcaataacgtactgccaggctgtgctctggattcagccgctgttggccgtaattgaaaagggcaacaacaacctggctggtataaggcagatagaactggaaaggaaaaactag

SEQ ID NO: 166585 - DNA, 651 bp, Enterobacter cloacae
atgtctttggcgaacaggttgcagcaggtaacgctaacgcatggttcgaccttgtacaagctgacctggaaggaatggaatacgccttcgggcttgtgccgtttgcggcagcgggcatcggtgctccgcatatccgagaacgggcctactgggtggcccacgcccacagccagatcgacgaccggcgcagggacgtcagggctaatgggtgggatgaacattcagacggcagtcactttaatgggatggcctaccccaaccaccgaatctgcgatgagggagaaacgctacgctcagggcggaatgccgttctcgatggcagcatcgctaatcggctggcccacaccgacaacgagcaacactcgatctccatcagtagacgcagccatgaatatgtatcgacaggacggcagcaagatccagcagcgcttgcaggacttagcagggattgccggccccttgaggttaacggtttttggcgagatgcggactggctcttatgtcgagatggcaaatggcgtccagttgaacccggcacattcccgctggttgatggggctgccgcgcgcctgggacgagtcgagcccggggtggcaagagtggcaagcagcaactgcgtcggccggctcaaaggctacggtaacgccataa

SEQ ID NO: 166586 - DNA, 804 bp, Enterobacter cloacae
atgcatcaggaagttgagtacctccgccatcctgaccatatgcagatcacccacgcgcaggtcagagaactcaccgtttttacgcaggagcttgttcacttcagctggcttatcagtcagctgcatcccggaaatgtattcatcttcactttcctttctgccgatattggcgataaaccaggtcacggcgataaacaccaccatacagaacagcccgctgccaccggctgcccactgcagctcacgcaggcactggtcgcccatcgcctgcatgtacgggtcggtataaatctgcggcagggtcattttgagcaccattgccgtcgccgttggcgcataccagtagtggacgtcgtagatttttggcgttcccgatgccggcatcaggtcaataaagctgctgttgatactggcgaaccaccacagggaaccgttatccagggcttcctgagggattcgccagagaaagatggcggtagtcagtacggcgaacaggatgaagatccagaatcctatccagttgttcacctgaatgaacatgcgccagcggtaggcggtcatctgcccgccctgggtgaggttttttcctgcgaagctcatagcgtgttgtccggccgttatcgcatcacctgctcggtgatgtgtgttatcagagaagaaacgttgaaaagggtgatgaaaaaatgtggtaccgcgtgggggttaatcgtcaggttattacatctgactcagttcatacctggcctgctgacatccgtcctcccagtcctgtttattaatgtatgcagccacagaacggactga

SEQ ID NO: 166587 - DNA, 396 bp, Enterobacter cloacae
atgctaatcaaggggatgataatgaaggcgctcaaaattggccttgcagggattgttgttatttacttgctcatcaatgccagtaaatcacaagagataaaaagcgaagatatacctgcgtttgctaaaagtgagtcaaatgtatggatagctaatacactgggccagccgggcgcagacgtcatcaaaagctctacctactaccttaagcgtgagattccagaagaggatattgtttatggctatctttgtggaaccataacaactggcgaaagattctttactgaggtctcgatcaataagcgcaagcacacgtctggcattttcaaaaatatgatatttgataaacgcaatgcaaagacgtttaatcagatctggaacactgagtgtaagtaa

SEQ ID NO: 166588 - DNA, 735 bp, Enterobacter cloacae
atgtctgacgtgatcctgcacaatgctgattgcttcgatatttttccaatgatggccgatggatctgtggatcttgtctgtgctgacattccctatggcaccacgcagtgccgctgggattcagttctcgacttgccacagatgtgggagcagctctatcgcattgccaaaccgacggcggcgatcgttctgttctctgctcagccatttaccagtgtgctggtatccagcaacttacagcactggcgatctgaatggatttgggagaaaggtaacgccaccggcttcctgaatgccaaaaagcagccccttcgcgctcatgaaaatatcgaggtgttttatcgccgacagcctacgtataacccgcagatgactgatggccacagccgcaaaaccagtaagcggaagacagttaattcagagtgctacggtaaggcgttgacgctgaccaaatacgattcgacaaagcgatacccaagagatgttcagttcttctcaagtgacaagcagaccggaaactatcacccgactcagaagccgctggcgttgataaaatacatcatcgaaacctacagcaatccgggtgacgtggtgctcgattttactatgggaagcggtaccagcggcgttgcctgtcaggaactcgggcgcccgtatatcggcattgagaaggagtcagatatttttcagaccgcatgccagcgcattggtgttaaacaggagcacgccgcatga

SEQ ID NO: 166589 - DNA, 234 bp, Enterobacter cloacae
atgagcagtctgttacttctcaaatgtaccaaagacaccgagggctggtggactgagggcgaaatgtacccagcccgtgtggtttccggtggcttcgttctggtcggtgatgatgacgaactggacggggagggatggagcgcagcgccgatggagtaccgtgaagatggttcagttctttatcaagttggcggcgttgatggtgaggttttgtttgaggagacaccacaatga

SEQ ID NO: 166590 - DNA, 2562 bp, Enterobacter cloacae
atggaatttttctattttattaaagcaacccagaaatcaggcaaagaagatgccgtgatctggttcacttcaaaaacagaagcccgcgccaatctgcagctcgatgtagagctggaagacgctggtattgaaacaggccggggcaaggattacgtaaaaccagttcgcaccgatttccccgtgtataacgacctgccggaagaaagtgcggtggattacacctggtgcaaacgctacgaactgcaggacgatggacgcacctggctgccaaaggctggggctgaatctactgaagcagtagacaacactgccgctccggagacgacaaccacagttgaaaccaccatcgagattgtcccgcttgaaaaccgcactccagcagtccgttttgccttccatctgaccagcgacaattatcagacgcatatcagtaaagagcagcagctggctgccagcgaaatgtcactgaatgaaggcaacacctatctccagaatctgctgctggcgaaaaacgacatccctgaagtttccgaactcagcctgaacgctgagtggaaactggttcaggcgattaagcaggtattcgcgccagatgaagcgcacgaaactgaaattatctctgcattcatggccgactgggcgaaagcagatgccggcgaccgcaatcagttagtggaagagtggaggagcggaaagcttactctgctcaaatcagaaaaaaccagcgacgccggggttgaaactggtcatcatctcgcgactgatgatggtatccaaatcggcgagcatgatgatgaaaatacccgttatccagtgtgcagaatgccgttccgtaagcagcttcttgcacagttcacaaccgacgaactgcgccaccacgtaacccgcgaagagtacgaagctatcagcgcactggagatggacactgacaacagctacgttcagaacctgttgctggcggcagaaaactgcgaggaggttaagggttatgataccaaagacctctggcgctacaccgacgccattcgcaaggtgttcagccaggagaagcgtcacgaactcactttagttctccgtttcaccagaatttgggcagagacagattacatagatcgtggcctgctggttaaagaatgggttaagggtaatagggttagcacgattaatcgcacaccttccggagcgaacgctggcggtggcattaagtctgaccgactcacccctctgacagagaccggacgcagatatgaaatagcgcagggactgctcgcacgtaaaaaagagttcgacatctacaatccttctcttgagatcgacgttgaagccaatgcaatcatgaatttgagccattcagatcgtgaacttgtggatgaattcgttgcaacctgcaagatttttgaagatatgccaggtgggatggattactcacgtgcctgcaatgtggcaacagtaaaaacaacaccagaaaattactggagggatccggtaaagcaccttgaataccttaacagagtgatgaccgaaactgatcacgcccaccctgacgaactaattgttgatatcgcctgtggccgctcttccttgcctatgccaatggctgatgtggcgcatccgtcaacagatgatgttaatcgtcagcctgctgtcagtcgtggtgagttagtccaaggcgcccctgacccagcagatcctaaatcagacagtgctcaccgccaaccgaccgtaactcacgaagaaaatttacaacgcgtacgcgaagaaggcgcccttcagcgggctaacgctgtaactaaaatagcagcagaagaaataccggatgcggagaccaccagcaatgtgcagatggaagaaactggtaatgatgaaaccacgaacggcactccattatcagagggccaggaagaaattgtcacaggcgaaagctctactgaaactgatagcaacgcaaatgccctaaatattgtttccggtcatcataatgatgattctgcggatatgctttatacgcaccttatggtggatatagaaagcatgggcaaaaaggctggcgcgccaatagtttccatcggcgcggtattcttcgacccggcatccggccagatggggcctgagttttataaggtgatctctctcgaatcggctatggaatggggcggcgttcctgatgcctcgacgatcatcttctggttgaaagcaactcctgaagctcgttcagagattgtcatggatcatgccatcccactggatgacgccctcctccagttcaaggacttcattgcagagaatgcagccaatggcaaggactctgtccaggtctggggtaatggtgccactttcgacaacgttctcttggaggatgcatacgcccggaccgggatctcctgcccatggaaatactggaataaccgcgatgtaagaaccatcgtcgaactgggtaaagccgtgggatatacgccccgccatgaaatcccgttcgaaggagaaccacataaggccatttcagatgcccgccaccaggtgaaatatgtttctgcaatctggcagcacctgactgaacactga

SEQ ID NO: 166591 - DNA, 123 bp, Enterobacter cloacae
atgatcgatttcgcacgtcagccagcaagcattcaggccattcgcgggaatgctttcaccgcgccattccgttttctttggcgtgtgctttgcaccaaaggcaatccagagttaaacgcatga

SEQ ID NO: 166592 - DNA, 1203 bp, Enterobacter cloacae
atggcagcgctgccctatatgcaactttacattgctgattacctggcggacaccatgcatctgtcaactgaggaacatggcgcgtacctgctgctgatgttcaattactggcaaacggggagggcaatacctaaaaaccgtctcgctaagatcgccagagtctctgattcacgctgggccgaactccaaatagcccttaaagagttttttgaagatgacggggagaactggatccatctgcgaattgagcgtgatattgaagcggttgttacctcgccgcgagggaagaaattaccgagtggggattcactcaaaggttttaatggatatgtctatttcattaaaaacccggcctcggggttgatcaagattggttattcaaaaaacccatgggctcggctttctgaactacgtaggaactacggtagtgaattgtccgtagtagctacgataaagaccgtagaaaaaacggaaaccacaattcactcaatttttgaaaagttcagggtggagggggagtggtttactgagagtgagtgcatcaaagcagtaatttccgcaattgtagcaggtgaaatagctactgtagaagctacgcgtagctacgtagataactacggtagtaatgctacggctactacaaatacagatccagatatagatacagatcttaaagaaaacccctctctacgcgggcgagaaattttagatattcaggaaccgcaatatctgcagggtctgaacatcccaatcggtaaattcacgatgcatgacagttggcttccatcggaagactggccccggctggcggctacctgggggattaatttgcctgttcctgcatacctgccaactgaactggccgaatttatcgcgttctggaattccgatgggaaggttttcacgcaaattcagtgggaacagaagtttgcaaggcatgtagtgcgggtgagagctaaacaaaaaccacagtctggaggtaacgacaatgcagcagttcgatcagagccaacagcatcccgagctgttcagcaaattcaatcagcacacgcagagtggcgccgccggcacggacttgatggcgacggaaacagcatggcggttgtggcaggtgatgggggaaatattctcgaaccgttggacgcagaagaatggggcagagcctacggccctctggatagctcagataggttcgatgactga

SEQ ID NO: 166593 - DNA, 261 bp, Enterobacter cloacae
atggccagaaagaaaactgatcaagagcgaatcgtcatcatcaatcggatcatcgaactggtgaaagagcatggtcgcatcacgacgaaagacgtaattgcaatgttcgacctgcatcgcacaaccgctgagaaatatctccgcaccgcggttgagcagggtggcctggttcgtcatggtcgctgcggtattttccgcgaccagcgcgcaaccatcgattttgacctgaaacgtttttcccgcagcaaggtggcagcatga

SEQ ID NO: 166594 - DNA, 837 bp, Enterobacter cloacae
atgagcaaaactataaaacatcctgcaattcgttatcacggcggtaaattccgcttggcatcgtggatcacgagttattttccggctcatcgttgctacgtagaaccattcggcggcgccgcttctgttcttcttagaaagtttccgagtgaggcagaggtttacaatgatctggatggggaaattgtgaatctgttccgtgtccttcgcgatgctgcacagagcaaaaaactgatcgaggcatgcgctctgacgccctactcacgtgaagagttttattgtgcataccagacgatagaagacccggtagaacgcgcgcgtcgaactgtaatccgtgcggcaatgggatttggtagcgcaggcgcaaccaaaggctctacgggttttcggctcgataccaaacggaacagcgcgaccgcgcaggctatttttgcaaggcagccggataacttggccgctgtggccagccgtttcgctggcgtgcttgttgaaaaccgcgatgcaattcagtgtatgcaggatcatgatactaccagcaccttgcattttgttgaccctccatatctgcatgatacccgcgttaatgtcgcgaaaaacagtgcttatcgttttgaaatgacaaacgacgagcatagagcactgcttgccaacctcaaggaattaagcgggatggtcattgtctgcggttacgacagcgatctttacaacgagtcactctcgagctggaaacgggttacccgcacaacttctgctaatggccatgctggttcggtacagcgcactgagtgcctttggataaatccggcggcccagcaaaaacaggagtgtgcggcatga

SEQ ID NO: 166595 - DNA, 234 bp, Enterobacter cloacae
atgagcaatctcttacttttgaaatgcaccagggacaccgaaggctggtggactgagggcgaaatgtaccgagcccgtgtggttgccggtggcttcgttctggtcggtgatgatgacgaactggacggggagggatggagcgcagcgccgatggaataccgtgaagatggttcagtggtttatcaggttggcggcgttgatggtgaagttttgtttgaggagtcagccctatga

SEQ ID NO: 166596 - DNA, 195 bp, Enterobacter cloacae
atgagtgaagcatgggagttgatcaaaattacgatggtcattatcggactgtctacagcagtgctgggggtaatgtcatttgtgatgtgggaaaaccccttccgttacatcaaaccgatgttagctgcacggattttagtggccctggtagcttacggctgggtgctttatttcattccaggagcagccaaatga

SEQ ID NO: 166597 - DNA, 441 bp, Enterobacter cloacae
atgattgatcgcgccaaacttcagcacatcctcgaatacgccaagcagcaaagacacatcggcctgcactgcaaggttccgccagaagacatggttgaaatcgtggaggcggctatgcttcatggtgccgaaaacgccgagtcgcccaacaccatgcagaccgcgccagatctggattcttcgccaaaaattgccgagtcgcccagcggcaactctccggtgattccggatggtttttgcccattttgtggcagaaaacaactcaaaaacaggacgtgttctgtttctggttgtgatggaaaacatgtcgcgcatgggttttgcaaaagacattacgacattgagcgcaaaaaagatccgtcccgtcgcgagagcatccgcgcagctgatgaacgctatcgggcgaggaagtcagcagcttcgcagcaggaggtgaagtag

SEQ ID NO: 166598 - DNA, 258 bp, Enterobacter cloacae
gtggaccctttgctgaaatacgcctgcagacgcgtgattgagctggaaaacatcctgctggtggccgtaccggaaaccgtatggcctgccgaggtcggaatggtctacagccagattgaaaacgccgggaacctcccggcgcaccaccagcggcgcttgaaacatcacatcaaccggatgtggcttgagaaaatgccagtaccgtcaattatcgttgccgcccgttcgctggccgaagccatggaggaatacgcgtga

SEQ ID NO: 166599 - DNA, 240 bp, Enterobacter cloacae
atgtcggaacaatcaacaccacaagatgcactctatgatgaagcctgtcgcattgtcggacaatgttgtctggctttggctaacaacggctctgaaacccacagagaccaactggttcatcagttaaagcgtctctactggctgtatatgcaagagaccaatgaatcaaacatggcgatgttgtttgcgatggagcagctggctaccagcgaagactggaaaaaaccatacactggataa

SEQ ID NO: 166600 - DNA, 402 bp, Enterobacter cloacae
atggcgcaaattaccaataaagtatcgaaacaaacatttgctggcgagctttcgggctgtgctggcttagttacgtcaccagaaacgcaaatcaccccgagacagcaggaagtgctggatctgctggtggattttgtgaatgcacatggctacccaccaacctgccaggaactggctaatctgctcggcgttgcctccccaaatgctgcgctgacccacctcagagccttagagcgaaaaggcgttatcacacttgtaccgggaacctcaagagggatccgcattaacgggcgtaaagaaccggcaatggctgtgcagttgttacgtgagttgctcaacaacgaacccggctcccgggatcgtgctattgaatacctgaaaatatccgggggaagccaatga

SEQ ID NO: 166601 - DNA, 201 bp, Enterobacter cloacae
atgaaaaaaagctggttcacccacaccggactgacttcagaagaagctaatgagctggtgactcgctacgaatccaaaggtatcaccgtcgagaaaagcctcgatattgatcctcgcctttggatagtaagcgcacttctgccgcagcaaaaatcctcaccgagcacgcagcaaagcctgcgctcccgggtatgggggtga

SEQ ID NO: 166602 - DNA, 1020 bp, Enterobacter cloacae
atgcgcgcgctgcttcaacctgttattgcccgggagttggggattgttctgttaaagcccggcagagagctgatgtgtttattcagtggtggaagggtgctgatcgaacgtcaacctgagagcatgtcaggatataggactgggcttgttcccgatgccagacagccgttagcggaaagcgagcagttgaggagcttttttcttaatgagaaagtcattcgcgctgcaggtggtatcagtgggctggactactggctacttcactacggaggggacaggtgccaaaacgctcatagcgattatcactatcacgaaatgactgtgatgcaccatgagccagggtcgattctgctgtgcggctattgcgacaatgagttacgcgttcagcatacagaggcgctggctgaactggcgcgccagaatgtgatcgcttttgttctcgattctgttcgtgtttctcttgggatggataaggcccgggagatttcgctcgcggaactctgctggtgggcggttcgtgtcggtgttactgacgcacttcccgaatatgctgccagagaagcgcttcgcctgcctgaggacagtaaaattgggcgcgaaagtgatataacgccagggataccggccaccagcattcttgctgataaagtcacagctgttgacgtggcagcaatcatggacgaaccgcttgtgggagtgctggtggatcctgctcctccgcagtcctttatgcgacgccctaaacgcctgcgctgggagtgtcgcgattatcttgattggattaaaactcaaccatgcgaatgctgtcagcagccttcagacgacccgcaccacttaattgggtgggggcagggtgggatggcaaccaaagcccatgacatcttcgcaattccactctgccgtaaacatcacaccgaactgcataacgaccggctgacattcgagcgcaaatatggctcgcagccggagatgatcatcaaagtgctggaccgggcctatgcgctcggtgtactggcgtaa

SEQ ID NO: 166603 - DNA, 810 bp, Enterobacter cloacae
atgaatcttgagtcattaccaaaattctattccccaaagtcacctaagctgaatgacagtaccccggccaccgctggggatgggttaactatcaccgacgtgatggctgcgcagggaatggtgcaatctttagcgcctctgggctttaatctgttcctggctaagatgggtatacagggtcctgaaccggcgatagatggacttatgaattatgctatggcgctgaataacccagtgctgaaaaagctgagtgataaagcgcggcttgagatattgccagtactggttcggtttgcctttgcagattattcccgttcggcggccagtaaatcgacatgccagcattgtaagggggagggttttatcaaggcggaggtgtctaccaaaaaagttcaatatcctgatggaaagcctccaaaatgggcttcaactaccaaaggattatgcccgtcatactgggaagagtggaaagaggtaagagaagaggaactggtgaagtgccaacactgtgatggaaaagggcagataagcactgcttgtcggggttgcaaaggaaaagggactgtgattgatgaaaagcgcaccaaattgcatggcgtaccggttcgtaagatctgtggtcgatgcaatgggtaccgctacagtagactaccgacaacacttgcccgtgaacacatccaaagcatcattccagatctgaccaaccatcaatggtatagcggctatgcggaagtgataaataagctggttagcaaatgctggcaggaagaagcgtttgcagaaatgcaattgcagaaagtgacacgatag

SEQ ID NO: 166604 - DNA, 279 bp, Enterobacter cloacae
atggcaattgacccgtcagctttcttcaatgcgtttatctgctcggtgattgtcgtcgtcctgatgttttaccagcggcatggtgctaggcaccgtcctttcatttcttttctggcatatgtgaccgtgctgatttatgccgttgtaccgctgcaattcgtcttcggcctctatcgtgactccagttggctggtggtggtggcaaacctcctgatatgcgcagctgttatgaaggtccggggaaatctggcacgtctggttgatcatctgaggtactaa

SEQ ID NO: 166605 - DNA, 204 bp, Enterobacter cloacae
atggcaatcacacttcaggattcagtggaggttgaagggcgggtatggaaactgcaaaaaattgacttcgccctggatgacaaaacattcagcgcttacttctacgcactcagtcgtgagcatgcttcatacatgtttgaagcgatgaaagaaaatggccggttgggggatgagatgattgccacgggtaagtttgacacgtag

SEQ ID NO: 166606 - DNA, 255 bp, Enterobacter cloacae
atggatttatcaaagtttattacgccagtgaaatcagatgaagttgaatatgtgatcattggcggaaaacgtgatggtgaaagaggcgtgattgataaaaaagtccacaccatcaacagagatggtaactaccataagaagcaaatcacctgcagcggatatactgcaaccttatttgtttcatcagagatgggtgacgcaacgcctggtgaagtgctttcgctattgtgtcacggataccgaaaaccaaaatga

SEQ ID NO: 166607 - DNA, 216 bp, Enterobacter cloacae
gtgaatgagtttaaagacctgtgggtaagcgtagatgaccatactcctgagaatcaggaagggagatggtcagaagatgtcatagcactgagtgatacaggagacgtgttcaggttggcctgcatgggcggttactggcaaaggacgcaagcatttattgattcaggggctaccaagataactcactggatgccgcttatttaccccgatgattaa

SEQ ID NO: 166608 - DNA, 336 bp, Enterobacter cloacae
atgagcggaacagttgaggttaatgatttaggcgtcacggtccacatggctggtggcgggaaaatagttatcggtaattggggcgataatacagcacccaaggttgaaccactcccaccccttaccccggaagaggagcactacggtcgtgggctctgtctcctgcctgatggatgggaagatctaagcggtgatgggcactggcaacatcatcttagcgaatctttgcgtcatctttggccgttgttcagcagggaacagaagatggctatcgcttactccatcagcgaactgtcagatgagctgacgaatatcgcatacgaaggttgctggtaa

SEQ ID NO: 166609 - DNA, 228 bp, Enterobacter cloacae
atgcgtatcactgtattggatggcgatccgggcaggagaattaatcccgctcgcgaacggtatgccgtttatctcgatggagtagaggtaaagcacgttttcaccgctgatgacgataaaggcgaagtgattgccgctgtacgcaatgagcgcggatacatgacggctgagaatggcgtggtgaaacaacaaacgctttacggaaaagtcaccattaagcgccaataa

SEQ ID NO: 166610 - DNA, 177 bp, Enterobacter cloacae
atgacccttgaacgacgagttgcgacactggaagaagctgttgcgttattgaaaaagcaggtaagcgagaaagatgctcaaattacccactttgaaaatttacttcgaaaccggattaatgaattcagcgcctatttagacacagttaattcattctcttctgatactcctcgatag

SEQ ID NO: 166611 - DNA, 210 bp, Enterobacter cloacae
atgggaaagttttctattacttcgattcgcgacattgactggcaatcagacccttctcgcccgggtaattgcaacatcactgttggcctgaatactccggcgggatacacctcaatatcttttgatccaggaagcattgatatcaagaagtcaacaatcgaggacctggaaaaactcgctatcgaggagtatcagaagagaatgaattaa

SEQ ID NO: 166612 - DNA, 597 bp, Enterobacter cloacae
gtggctgaagagattaagtttgtggtggtcggccatcataagcgcattgagcaggcttgcgcactggctgcggctatcggtccggcttgcaccatgctgattgatgaagcttatagcggcgctaatgctggacacaggcgtgcgctcgaatgggcctcatggcaggatcgtcgcgttgtgattcttgaagatgacgcattgcccgtgcctggctttattgatttggttagcgaatggctaaaccgcttccctgacaatctctgctcgttctatctcggtacgggccgtccgccacagtatcagatccagatagcagaacggcttattgtcgctgataagacccggacagatttcatcacattgccgcggttgttacatggcgtctgctacagcgtaccgcctcagcatattgagcgtgtgttgtctcgatgggacagtagcaagcctgccgattatgccgttggtgatgcatatggcggtgctgtggtttatccgtgttactcactggtggaccatgcagacggtgaaccggttgaacgtcacccagactcagcgccacgtatagaacgccgtcgggcgtggaggttacatgtctaa

SEQ ID NO: 166613 - DNA, 366 bp, Enterobacter cloacae
atgtctaagctcacaacgttaaagccacgactgaaagtcatcgaaacgcgtcgcataaaaccagtttatggagagcagcgccgcataaacgggagtgtaagggtcggcttaaagcgtcgcatatatgcccgtgatggtgggcattgctgtatgtgtggtcgggttgtagacctgcatgaaagtgagcttgatcaccggatagctttgcaatttggtggcgacaatgatgagcgcaatttgtggaccctctgcatctcttgccactctggtaaatcatcgcgtgaggcatcactcaatcagcccgacgctgaggcactgaaacactcagtacctgaaggtgatgggcaggccattactgcattgtga

SEQ ID NO: 166614 - DNA, 225 bp, Enterobacter cloacae
atgggctgtttaggggcattgctgctgctcattcttgctggctttgtcatcctcattatgcatgcatcaaatggtgcacagccaacctggctgtattgcagggatatgcggaacagatacggaacaccgaaaaagattgatagcaggctatcagaggaaggccaccagcctgtgaaagcagaaagtgaaagcagcgaaacatcgccgccaccgaagaattcatag

SEQ ID NO: 166615 - DNA, 450 bp, Enterobacter cloacae
atgatagagacaagccttgatttttccggtctgaatgacatcgcaaaagatcttgagttgctcagccgtgctgagaataacaaagttctgcgcgacgccacgcgtgccggggcagaagtccttaaggaagaagtgattgcgcgcgctcctgaacgaaccgggaaactgaagaaaaacgtggttgtcctgactcagcgctcccggcgccgcggtgagatatcttctggcgtccatatccgtggccgcaacatgcgaaccggtaatagcgacaacaccatgaaagccagcaatccgcgaaatgcgttttactggcggtttgttgagatggggacaataaacatgccgccgcatccgtttgtgcgccccgcgttcgatgttcgccaggagcaggcggcggaggtcgctatcagacgaatgaaccaggcgattgatgaggcattaagcaaatga

SEQ ID NO: 166616 - DNA, 3192 bp, Enterobacter cloacae
atgggtaatgactattaccgggtaatgcagaccggaggacgtcaggcagccgctgcgtctcgggagactcagcgcgcactggctgaggttaccagtcagataaatactgcgaaagcgtcggctttggggatggctggcgcatttgctggagcatttgccactggtcatctgatatcactggccgatgaatggagttctgttaacgcccgtcttaagcaggcctctcagtcatctgatgattttacagaatctcagcgtgcgctgatggatatcagtcaacgaaccggcaccgccttctctgataatgcgagcctgtttgcgcgttccgctgcatcaatgcgtgaatatggttacagctcacagcaagtgctggacgttaccgaggccatttctaccgggctgaagctttccggcgccagcacggcagaagcaagctctgtaatcactcagtttagtcaggcgttagcacagggcgtgctgcgcggcgaggagttcaattctgttaacgaaaacggagatcgggttatccgtgctcttgccgcagggatgggcgtagctcgtaaagatctgaaggcaatggccgatcaaggtctgctaactgcggataaagttgtcccggccctgatcagccagcttggcacaatgcgtggtgaattcgaggcaatgccgcagaccgtttcagcagcaacgacaaaaattgaaaatgcctttatggcttgggttggcggagcaaatgaagccaccggagcgacagctactctggtcagcgtgatgaatggagtggctgacaatattgatacagttgcggctgcagcgggtgttttagcttctatcggtggtgcccggtatttgggcggtaagttgagcgatcttggcagcgaaacagctaacctgattgacgctcgtaaaaatgaaattgcactggcagctgctcgcgcagaatcagccactcagtcgcaaagaaaagcggctgctgatgctctggccgctgaacgtgcctatcaactcgcccagtcagaactggctctggcaaaaaataccaatgctgaagcgctggcaacgcaaaatgctattgcgaagcgccaggcgatgatcgcagcgaatgccgcgctggtgcagtcaaaccgtgctgtggcaacttctcaggaagcgctgaacaaaatgacatcggctatgaattttgttaaagccggtgcatctgggctgctatcccttgttggtggtattcctggtattctgatgcttggtgcgggtgcctggtacgccatgtatcaaaaacaggagcaagcgcgcgaatctgctattcagtacgcatcaactttggacgaagtagtagaaaaatcgaaacagatgagtccggcacaaattaagggtgctatagctgatgccggagactcaattgatgctttaaaacggaaattaaatgatttaagagatcagcaagacagcgcaagtgcgtctattaagcaatatacagacttagctaaacagttcggcgtagagaatgacaccaataacggttatgtcattaatgcgataaaataccagcgcgaatacgataaaatttccagggatatagcagaaaccacttcgagattaaatcagacaatatcaaatcaaaataagcttcagggagaggctataaataaaaccgttgaaatggcaggtgcggttggctctttgacggaaatgtatgatcgtctgaacaaagtaaccaagcaatatacaccagtttcaccgcccaagtatgcagggccagtcttgccagagcttgatgcaaagcagcaacaggcgatggttaaagcggagcgtaaagctgtgcttgatggtctgcaggggctggaaaaggtacggcagcaggcaacatatgaagctgatgaccttaatcttcctgccgggcaatatgaaaaatatataaatcttgcagtggagggggagagaaaacttcagcagctccgtgataacaataaaaaaccgcgtggtaaatctgatgctgaaaaaactgtcgatacgtatgacaagctgatcaagcagcagaaagagcagattgctctggctggtcaaaataccgaactggcaaaaattaaataccaggttagccagggcgaactggcgacgctgacagagtcccagaaacagaccctgttgcagaatgccgcgcttattgatcagcagaaaattcgtgagcaactggcagcatatgaagcaaaccttgctgatgccaacgccagctcgcgtgcatcaaatcaagctgagctcactggatacgggcaggggagccgtacgcgtgagcgtatgcaggaaatgctgcgtatcagggaggaatttcagcagaaaaacgttgaccttcagcgccagtatcagtccggtgatatctctgaggaactgtatcgccaggagctggcactgaataaacgttatctcgatgaacgcttacgcgatcaggagggtttctacgtcgcgtctgatgcccaaagaagtgactgggctgctgggatgcgggagggctttgctaactgggtagatactgcttccgattacgcctcacagtcagcagacctagtgaacaataccatgtctgggctggtggggaatatttctgaagcgctggccggtaacaaagttgactgggaggactggtcaaaatcggtactggcatccatgcagaaaattatccttaacgcgatgatcgtcaattcgctgcagtcttctatgggcggtggtggattcctgggcggattgtttggcggctctgctggcgggtccacaccgtcaggttcttacaactctgcggcatcaggtcttcagctcaacgctaaggggggcgcttacgcttccgccagcctcagtgcttacagtaacagcattgtcagatcaccgacatactttgcttttgcgaaaggcgctgggctgatgggggaggctggcccggaagccatcatgccactcacacgctctgcggatggttcgctcggtgttcgggtaaccggggcgcaaacctcaccagcgggaagtggtgaaatccatattacccagcatttcaccatttccggtaatggcgacgccgcgcttaaacaggcaatggaagaagcggcagcacggggggcaagagatggtgcgaagctggcgaggcaggaaacgttaaaggatttccagacgaatggaccggccaggagaatgctaaacgtttaa

SEQ ID NO: 166617 - DNA, 816 bp, Enterobacter cloacae
atgagatacggatctgtttgcagtgggattgaagccgcaagcgtcgcatgggagtcactgggatggcaaccagcatggtttgccgaaatcgaggcgtttccgtccgccgtgctggcacatcactggccgcatgtggcgaacctcggcgacatgacaaaaatcgcggctgcggtccgatccggagaagtagacgcgcctgaagtagtcgccggcggaacaccatgccagtcctattcaataggtggcaaacgtcagggtttaagcgatccgcgcggacagttgacactttcatatgtggaattagctgatgcaatcgacagtaaacgccgggggaacggcgatcaggaagcaattttcgtctgggaaaacgttaccggggcattctcatcaaaagacaacgccttcgggtactttctcgcaggaatggctggagaaactgaagcattcgaacctggtccacaacctgcaacaggatgcagcagcaaatactggcgctggcataaaaaagcccgtaagcacgttccagtctggtcaaagcgtggtgttgttattggacgacagcgccgagtggcctggcgaacctttgatgctcaatacttcggattggcccagcgacgcccgagaattctccttgttgcaagcgctcgaacagacatcgatcccgcagaaatattatttgagcccgacagcgtgcgcaggattaatccccgtcaaagcagacgcccgtgcctgtttgtctcacagcgcgaggggcaggctctctcgatgacagagaaacttacattgttacgccagaacgccgaatcagacacctga

SEQ ID NO: 166618 - DNA, 567 bp, Enterobacter cloacae
atgaagaaatatctttatttgactaaaccggaatgggtttttccttggatcagaggtggggttgttcctctgtttcaggccagcacttatctttctgacgaaagagatggggtaatgactcctgatgagaacttaattgatacgtctacgcatgacattaaagcgtacgggaatctcgccagaatccagggtggtggctgtatctcattcacaaattcaacgattaatggtgttttccacccaggcactattaagtttgaacaaagagtagaggatggattagtgctctgtcttgctaattcaaaaagctctgaaattgcaagaaggctgggtaagcgcgcatgtgttgaaataagcgatgttgaacatttaaagcgctatcttgataggcaactaggcattgaaagtgctatgcgagcatgcgaatacacgaatggccacaaccggaaccattttttaaaatcctctcttgattcctggcaggacgaattcaggattttctggcctggagcaaaatcaacacgtgtttcaataccatcaggtatggcgaaaaaagtaaaaatttga

SEQ ID NO: 166619 - DNA, 195 bp, Enterobacter cloacae
atgagcaacaaaatcgttgcgttcgtaaagcgtatggaagagcaagggcgcactctggaagtgaatggaaactttgttgtggttactccagcatcaggtatgtctatcacagacatgatggagatgcagagtctcaataagaaaggtgagttggcggattacatcacaaaatctcacaaaggggccgcccaatga

SEQ ID NO: 166620 - DNA, 144 bp, Enterobacter cloacae
atggctaacatgaagcagttttggaaagagtggggctatatgtgccgagtggttggcaagcgccacacccgaacctacgttggtacctcaaaatttcactatggcgccctgagtcgctcccaacaaattaaatggctggactaa

SEQ ID NO: 166621 - DNA, 279 bp, Enterobacter cloacae; identical to SEQ ID NO: 101025

SEQ ID NO: 166622 - DNA, 645 bp, Enterobacter cloacae
atgaatgcaaccgaaattgatgcatatctggaagctcgaaagccaaaatccaggcacaagtcagttgtatttggcgtcgcatccaatgatgcggcttttgcggtaactggcttgatagatggaaaatcagagtctcatcatgggtacaaagcgtggactcaaatgattatgcgttgttatgacccatcctaccttaacaaaaagccatcatatcgtgacgcttacgtttgcaaagagtggatggcatttacaccttttcttgagtggtggaagggcgcgcatattgatggttttcatcttgataaggatttgttgatcacagggaataaggtatataggccagatgcttgtatctatatccctccggagctgaacactttcacagcagataatcgctctgtcagaggagagtacccaataggtgtttgctggcataaaggagacaggcgctttcaatctgaggtaatgggcccgggcggaaagagaattcaccttgggagatttaaaacagcattggaagcacatgaggcgtggtttgagaaaaagcttgagctagctcagcgcttcaagcctatctgcgacgaactgcacccgcagctatacgatggccttatcgcaaagatacacagcatgagggtcacataa

SEQ ID NO: 166623 - DNA, 816 bp, Enterobacter cloacae
atgaaattaatccagaaacacttaaaaaaccatacggcatctttggtttcagcatttaatttgtcatccataacgacgaacgggagtagcaaaggaagtgctagagaaattgtaataagggaatttttaaaagcaaatctccctagtaatttagatattacatcaggacaggtttttgactctaaggataatctctcaagtcagatggatattatcatatactcgaaacattctttaaaacttagttatgataaagatcagtgtatggtccctgtcgattcagctttagcgttaattgaatgtaaatcttcattaaacactggctcaatgaccgaaggagcttcaaaccttaagacaaccttagatgcttgcgttaggtcaaaaggtttggtaagaatcaatccaatcggtattgacgatggttattttatgaaagaaaatattccccaaaatacagtgcaattagtagaggaaatctcagggatgtgtgcaaccttgagaaaaacaccattcttactactagccttccaaggtccagaggaaagtaccttacgagattcgctgtttaattacatgactggaaataatatcgatttagatgatatgcctgatgtaattacaattttagatagagggtattatttggtaaaaaataatggtttcctcatccggaaggtgcctgggcatgttcactattcgaggggggaaagcgagaacagtgctctgttgggattctatatttatttggttaaaattgctgaatcccaaaagttgtcaaaaaatttctttcctttaggggaatacttgaaaccctag

SEQ ID NO: 166624 - DNA, 2034 bp, Enterobacter cloacae
atgagttacttaccaatagaaagattagaacaattaagaattggatctgttggatttgtatcacctaatgaaattagagtttctttagagattgactcccctgattcagtgtcacttcaaggcggttccccccgcaattttcctcgaataaatagttatgtactgatcggtagcgatgatggatttctcgtcggacaggttgaatggattgccgtagaacactctccataccccaaaagaagaggcttacaagattttggcttgatagatcttccttttccacttaaaaagatcagtatcaatcccgttggtactttgagagtcgatagaaaaaacgaagattacaagttcacaagaggaacagatgcttttccctcggttggtgactccgtgctcctgcctactgaccggcaattaaaatcaataatagaatcaggtgacaatagaagagtaaaaataggggacagccccctagctaacaatgcggaaataaaagtggaccctgataggctttttggacgacatttagctgttttgggcaatacaggtagtggtaaatcatgctcggttgcggggttaattcaatggtctttagatgctgttttacaacagggacagattccaaatgctcggttcataatacttgatccaaatggagaatacagtagggcattcggcccagaatcaaaatacaagggtaagctattacgtgtagaagctaacactggtgctggagagatagatcttaaagttccgtcatggttatggaatagctctgagtggggtgctttcactcaagcgagttcaaaagttcaacttcctttactacgccgagctttgagggcgatgagaaatgatgttttatcagaagatgatgtgacaatccaagcgaaacacttctgcggtatcctactcgtatccatacgacaattatcaagccaaggccagatatatgtgaatggcggccatgccaaaggtttcgttgatagtttaacgtcttggaataatagcctgtccacattaaacgacaaaatcgataacaaacctttcgataatctaataaacacgatgaatgtgtatctttcctctcgtataggaataaaatggcctgaaaaacctgaagtttcagatactgatcagttgattaatgaattaaaaaatgcatatgaaacgcttggaggtgatgaacaaggacttcttccaaaaagtgaagattcgcctattcgttttaaaggggatgattttgtcgcatacctagaagctctagctcaagagacaggcacagagcaattcgttgaattccttttgactcgtattcgaacaatgctaggtgacacccgtataagtgcagtaacaaatgattcggaacagcctatcagtttaactaattggttagacacttttctcggtagagatggacaaggttccataactgttatcgatttatcgctagtccctaatgaaataatacatttggtaactgctgtaatttccagagtaacttttgaagcattacaacgttatcgaagatttaaggggaaaccactaccaacagttatggttgcagaagaagcgcatacatttattaaacgctacaaagaagatagtgagggtcagtcagtctctgacgtatgctgcaaagtgtttgaaaagatcgcacgtgaaggcaggaaatttgggttaggtcttgtagtttcttcccaacgaccctcagagctatctccgactgtgttatctcaatgtaatacttttttgttgcacaggattagtaatgatagagatcaagagcaagtccatagacttgttcccgataacatgagggggttgttgagggagttgccatcgctaccatctcggcatgccattctactaggatgggcttctgaacttccggttttagttagaatgaaagagcttactgaaaaacaaagaccacaatctgacgatcccgatttttgggatgtgtggtctaacactacagaagagcctcgcgaagttaattggcaaccaatagctgatgattggcaaagttaa

SEQ ID NO: 166625 - DNA, 1539 bp, Enterobacter cloacae
atgaatttaggattcttttttggcgctggggcagaaatagggtatggattgccaagtggcggcaaatttgccattgacctttttcggcaagacccgagccagtataaaactgagcttcgacagcaactgagattagtggactcacgctctccttatgccaatgattggctacctcagggatatgctgataagagtatttatgcttttggacgtaacgaatttactagtattattgaatcatctatcgaatataaacgtgaggaaataattcggcgtctaaaccgttttgatcaagaatgcgatgatgcgatattggcactaggaattgatagaggcacactagaaaatttatttttagagttgacaggcaatgttattggtgaacgtttgtacacacacgacattcgtcttaacgagttattggcaagagatgttagattatttgagtcagaatactactcggccatgttagatgtagtacgacaatcagataacaacgatgatttaaaaagatatgtcacatcatttttgcaattattagtcggcgcacacggtcaagccctcgtgcaacgcttgaaccaagagttgtttgaagctgcgccggatgatttaccaatcttcgatgatattaccggcatgttccgcctagagtttaatcgcataggctcaacagctctagaattattgctggaagaaaatagaaacttcaatattgatgaagatgcaaccgctcttacacttttctgcgcgatagcccaaaaagtattagagaatctgtttacgactgtactcgattaccagaaattaatagatgaccattttcgctacctcttctcgccatccaccgaatgggctaaattcacgcgtatggttatttttcttaagatagcccgtgattatatcagtgcccaagcaccatctgtcgaagatcttcccgatcatggctattatcatgacttagctacattcactggtgacttaacaatttcagccattggaacagccaattataatagccttctagcagaggttttccgtggtatgaatatagaattgccgcaaattatccacctgaatggtagtgtgcatgactattataatccctataaaaatgcggttatcacttgtgaaaatccagatgatgtagatcaaagccagatccatgttcccttcatgctgacacaaagtggtcttaagcctttaacgtcggtaaccatgtcaagacggtacgttagtctattcgatgcttatgctgaatctgacgctattgttgttgtaggctttggatttaataaggatgatagtcatattaatggactttttcgcgagttggttgaaaatcaagggcggaagttaatccttatttcaagaagcgtagatggaacagttgaagaacagaaacgacgactgcgtaacaaattacgtatttcccacgcatttaatcacttgctaacagttattcctgtagatgatcacactagacttcaagatggacaactatggttggagctagtcttagcgtcgttaaatgaacaataa

SEQ ID NO: 166626 - DNA, 561 bp, Enterobacter cloacae
atggagatagttaacgaaaatatttcaagatataatcaaaataatcgtctttgtctgcgtttctctgtagaagcggaaagtcgctggatagaattttataacaaggtggagtcagatatgggcttacttggcaccttaacagactttaaagactatgcatctaaggtcgcagaaaatacggcaagagtagccgctcttctgcatttttttaatggcaatgatggcgatatacctctttctgcagtcgaagatgctgtgaagataactacctggtatgtgaatgagtacatccacatattttctaaacctcaagaattcacgctggcaatctcggaggctgatgagctttattggtggataaaaaaccattgtaatcgccttgttgtaccttatattactaaaaataccatactccaatatggccctaacaaattcaggaatcgtagtaaagcaaatgaattactcagtacattattctctcaaaataaaatccttgtgggaaaaaaggggaaaaccacattaatagctatcgctggtttgaacgcctcaacttcattctga

SEQ ID NO: 166627 - DNA, 1236 bp, Enterobacter cloacae
atgtggaatatctggccgtttggccgtaagtctgaaccctccgaacagcgcagcatgaccattgatgagtggctggcgatggcagggtttccaaataccggatcaggcgaatatgtgtctgcgggtactgcggaatctctgcctgcggtgatgaacgccgtgtcagttatcagtgaggcagtggcaacaatgccctgctacctctatcgcgtccgtaatgataacgggcgagaggcacgggagtggctgagcaatcaccctgtggattttctcctgaacgagcagccgaatgactgccagacgccttaccagtttaaacgcacgatgatgcgccattgcctgctgaacggtaacgcctatgcggtgatccagtggggccgagacggccagccgcaatccctgcacccgtatgcgccgggggcggttgttcctgagcgaatcggccagcataagtacaaatacaccatcactgagccgtttaccggggctgtgcgcacttacctccaggaagagattctgcacctgcgttactccaccgatgatggttttatggggcgctctccgatctccatctgccgtgaggcgctggggttaggtctggcccaacagcgccacggtgccagcgttatgaaagatgggatgatggcgtcgggcgtgattactactgctgaatggctcgacaaggtgaagggcaaacaggctatggatgcgctggatcgttataaaggggctaaaaatgcagggaaagtgccgatccttgagggtgggatggattacaaggagctgggcatgaacaacaaggatgccgaatggctggcatcccgtcgattcaccattgaagacattgcccgcatgttcaacgtgtcgcctattttcctccaggaatacagcaacagcacctacagcaactttagcgaagcgagccgtgcctttctcaccatgacaatgcgcccgtggctggcgaacttcgaacaacaaatcaaatctgcgctgctggtggcttctcccgttccgggaacgcgctatcaggtggagtttgactcagctgaccttctccgcgccacgccaaccgaacgttacgccacatatgagcgaggtatcaagaacgggatcatgaacccgaacgaagcccgtgagcgtgaggggatgccgccgcgtgaaggtggtgatgagttcagccaggcatggaagcaggaagtgaagatcagtaaggacggcaaggaaggtgacgcatga

SEQ ID NO: 166628 - DNA, 669 bp, Enterobacter cloacae
atggcacaaaaaacaaaggcgaccatgcagggccgccagtgtagtaccgaaaacaaagaacagaatcagcataccaggcctatagctggtggtcaaagcctgagcgctcctgtgattacaggaactgcgtcaatggagcggttacgtgaaactacccagaaattgggctgtttagggtgtacggcattggcgcatacccaatctcccgaaacttcgggagaactggaacagagtgccgggtgtactgcaatgcagcaaaccccggaagatttccagagtgcatttatgcactctgggtatcactccttgtcggcttctttggtcttcttacgctggcggcgtttgatctcgccctttactgccgtgacaataaattgcgcttttgtctctccatcttcaaggctgctttctaattctgaaacaacttcatgcggaaagcgtgcgttaagttgctgtgacttattgttagttgaacccgttgccattactggatctccttgcattaggtgcgattcagtatacgcaaaaaaaatgataataaaagacttgaagtgcgattcacttgagggtagggttaaaaacagaggtgcgattcacctctgtagctcgaagcccggcagtgcgcgaacactaaccgggcctctgaccacaaaccgttatacgaggtaa

SEQ ID NO: 166629 - DNA, 552 bp, Enterobacter cloacae
ttgtccattccttctcctcagccgggtgaagggctgtacgcttttatcggcgcgcttgtgatagcgcttgcgctctctgcgggggtattccgttttaaccgcaagcatcagatcaaaaccggtcagcttcgtagaacctggcccacggcagctgtcctgatcgttagcctgccgctaattgcacactggctgtttggggccgctttgcactgggatattccacatctgcggggctttaactttcagggcgggatggtattaattcccgagctggcggccctgacgctggcgctgtcgatttatacgtccgcgtttatcgcagaaattatccgtgcagggatccaggccgtaccttatggacagcacgaggcggcgcgctcgctgggattaccccataccgtgacgcttcgccaggtcattattccgcaggctttacgggtcatcattcccccccctgaccagccagtatctcaatattgtcaaaaactcgtctctggccgctgccattggttacccggatatggtgtcactcttcgccggaaccgtgcttaa

SEQ ID NO: 166630 - DNA, 153 bp, Enterobacter cloacae
atggtgtcactcttcgccggaaccgtgcttaaccagaccggacaagccattgaaaccatcgccatcaccatgtctgtctatctcatcatcagcctggtaatttcactgctgatgaacctctataaccgtcgtatagcactggtcgagcgctaa

SEQ ID NO: 166631 - DNA, 213 bp, Enterobacter cloacae
atggacaaatgcaaggaattagttgatcgtctttctgtttgtcacaatgcttggcttctgaccgaggggttaatggctaaggagactgacatcgttgaggcttgggagtttatctttactaatcataaaaattatttgagcggtgcattatcgagtttagttttgggggcgcattgcacaacgattttaaataagcgattcgtattcaaataa

SEQ ID NO: 166632 - DNA, 897 bp, Enterobacter cloacae; identical to SEQ ID NO: 161762

SEQ ID NO: 166633 - DNA, 3222 bp, Enterobacter cloacae
atgaccacgaacgttggcgaaatttactacgaagtaagcgctgacgtagcgccactgctgcaagggcagcgccaggctgataaagctctagacagcatggagcagagcttcaacaaaacgaacaaggcggctgatgcgcttgataccggactatcgaggctgtcatctgcaatcaaaggtgtgattgcggcctctgcgctgcgtgaaatggctggcctggtgcagaagtatcaggaaatggccgagcgcgtgcaaatggctacttccagccaggctgagttcgaaatggtgcagcagcgtctgctgacaacagcaaacggtacatatcgttctttgcaggaggcacaggagctttacatccgcacggctgacagtctgcgcagcatgaagtacacaaccaaccaggctattgatgtgcaggactcaatgtcctatgcgttcgtgaaaaacgccacctctgctgatcgcgcaaacaacgcaattgatgccttctcaaaatcaatcaacaccggcaaggtggcggcggaccagtgggagacaatcaccaccgctattccgtcggtgattaatgacatagccacggccagtaacaaatcggcagctgaaatccgagcgatgggcgccgcggggaaactgacggctcagcagcttaccgaaggactccggcaatctcttgaagcaaacacagcagcagcggctgggatgtctaacaaccttgtcgatgccagtgtgcgaattaagactgcgataacatccatcctcgttgccttcgagaatgagactggagttatccaggaatttaccaacgggctgatcgcttctgctgattcaatgcttaagttcagccagaactctgaaaagatgactggcttcattgatgcagcgacaactgcggcgactgtcttttctggtgtcattgctgcgagatatgttggagcaatgacacagggtgtagcggcaaaagttaagagcattgcagcttccaggcagcaggttattgctgactcccaatcttcacaggctgcattgatttcagctaactctacattgcgcaaatccgtggcagataaggaagccacaatgtccgcgcttgctttggcgcaagctgaatataacgtagcgagagggagcgctgctgagatgacagcgatggatgcgcttgtggccgcaaaaacacgggctactgccgcagccattgaacacaagattgctgaagatgcgcaggccgcagcatctacacgagctgctgctgcggtgcgcgccgcttccgcgagtatcggactagccaggggtgcactttctctcatcggtgggccgatgggtgcggcaatgctggccggggctgcgattttctacttttggcagaaatcacagcaagcaaaagaggaagcgatcgccttcgctgacggcctggacaagctcaatagctcaatgaaatcaatgagcgtaacctctctcaggggttctatcgcagatgccaataccgcgatagaggggcaaaaaagcgcgatcgctgacctgactggtgagattgactccctaatcgctaagcgcgatgaatatgtgtcaaaaggcaagcagtttggcactacagcagagcaaggtaacggactactcaagatcgcagccaggctaaccgacgaaatcaatcagaaacagcgcgaccgctccgacattgaaggcaagctgaacgacacgatcagaaccagagacagcgcgcagaccatcctcaataacaacatgctcgaatcgatgggtatccacgatagcctcatcgaaaagggaacggtgcttgagcaggttcaggacgctgtagcgaaagcatttggcaataccgccaatgcaatcaacagggccaatcaggcggggcagaacttcaatccaaaggcactggaaatctcaccgccaactcaggccggtgacaaaataatcctgaacctggaggagcaaaacgagcttcttaaaattcaggatgagcgcctgcgtgccgttaccaaagctggcatggaggccgcaaaggcaacggagaacccgaaccagatcgcagctgctaaaagactagctggagaaaactacgacctccagaaagctgaagaggctaggaataaggctgcttcggaagctgagtcccaagggaaaaagtcggcaagtcaggctgagtcaattactcagaagttatccagcttaaagcaacagtccgagctagcagcagactctacgaaggagttgagccgggaacaggcgatcctgacggctcagcagtctttgggtaagggggctacagaaggccagatccgtcttgcggggcagtatgcggctaaaacgtgggatgtcgccaatgctctgaaaatgcgtcagcaggccgagcaggctggccggttcgttaatcaggaggtggccgcagggaaaacttcagttgatcctgttactggagcggtccaggaccctacggcgcagatagccttagaggagcagcaaaagcttcaggcgctgcagtcttatcaggatcagggcgtgctctctgttcagcagtatgaggatgcgaagacggccattcagcttcaggcgtcaaatgcacgaaaagcgatcgcgcaaacagaagccaatcagcaagtgcaggcgctgggttctatcttaagttccgcgtcgtctggtttcgacagcctggccagcatgatagaaaacgccggtggcaaaagcagtggtgcctatcttgcgatgtttgccgctagcaaggcctttgctatcgcacagtcaacgctgagcctgaatatggcaatcatgcaggcaatggcagatccaacagcgttaacgccataccagaaacttgctaactacgctgccattgcatcagctggtgcctcactactttccaacgtggcaagcgttactctatcgggcgcccgcgagcacggcggcccggtcaacgccaattctatgtaccgcgtgggcgagggtgggaagccggaaatctaccaggctaacaacggcagccagtacatgattcccggtgacaacggtagggtgattagcaaccgggatatgcgcagtggtgggggcggtggagatgtgacaatccaccaggagaatcactatcacttcgatggaagtcccaacagcccggaaacggtcaaacagtttgacaaggtggcgtacaacgccgcattacgcgccatcagaaatgagcagcgtccaaatgggatgcttgaaaaaagccgttaa

SEQ ID NO: 166634 - DNA, 384 bp, Enterobacter cloacae
atgacgccgtcaatgtacgagcgtgtcaggaatctgtttgtgcgtgctggtctgactgatgggcgcatcgtacagttgctcttctttgaagatacgaaggtagcgaccgacgcgtttattgtgttccggccaaatggtggcacgccaatccgcaaagaccttggcgcagatcactacgtccttgtggatgttatcgggcccaaggataagcgcgcggccactgcgcaggcggtgcaggcgattatcgactacgtgcaggacaaccccatcagcgacagctgcgtagggcaaatcgaaaacatgggcggcatcccaccgccggtgctgaccgaagaggggcggatcgtcttccgccttcaatttgcttgcctctacggggagtaa

SEQ ID NO: 166635 - DNA, 225 bp, Enterobacter cloacae; identical to SEQ ID NO: 126355

SEQ ID NO: 166636 - DNA, 648 bp, Enterobacter cloacae
atggcaaaaggttttgtgctcaaaggaaaagtgcagcaggggacagggaaggataacaatattttgacaatatccggtgatggaaacactggcgctacaggatttgttggcgcgtttcagtttaactggtatgccgatggctggattgcaggtattacgcgaggatcgggaacaaacacaattgcgtattcaatctactataacggtgcatcatatggcactgggtcaaaactttggaactttaattatgatggctctgccacttctcagggagcctgggttaatggctcggatatccgtcacaaatttgatattgagcaggtaaaaaattctctggccgccgttattagctggcgcggtactacatacgagattaaagacggtggccggggcgttggccttattgcccaggatgtagaaaagtggtgtcctgatgcagtcaagacttacggagaccgtaagttcagtgatggaacggtgattgaggactttaaatttcttgatacctctggcgtgtcggctgcttaccacacagaggccataaaagaactattcagcctgattgaccttgcactaaccgatccagaaaaagcgcgagaaacattaaatgaggttaaacgtgcgctgcaaaacacccccacgcaatga

SEQ ID NO: 166637 - DNA, 564 bp, Enterobacter cloacae
atgttcaacgataaaagatttgatggtctgcgcccggacaccgacgtcgctcatctctttcaccgcctggtgcgtcggggcaagccccgtcatcaccggacgaacgtccgccggtatggtctccagtgcagatatcaccgccttcagctgcgtggttttccccacgccggcatagccctgaatcccgataaactgatccgtggttcccagcaccagggtggtcgcctttttctggccatcggtgagtccgttcagcacggcttccggtacctgttccagcaacggctgctgtgtgcctttcccttcctccaccacacgcagaatggctttctccatctcccaggtggaccgggaaaccagtaccggctctccccctgcggatacggacaacagctcgccatttttaatcatcgcgccaatttcattcccgatagcttcaaggtcgggatgatatttctgcgcttccgtcgccagcttcagttcgctgaataccacagtgcgctggtcattgatggcacgccagacggccagcccggcgtccgtccggacgctgtcatgcagtga

SEQ ID NO: 166638 - DNA, 717 bp, Enterobacter cloacae
atgttcctgactcagcgcctggatcgagagttcatcaagcaggtgaatacgggaggtaaagacccctttctcactgtccagcggtacaatcatgccgtccttcagcgccgcatcgatggccacacgaatttcctgaatctccggcagctgttcactcagctcagcggtggtcatcatcagctcgccaaaggtgaagcgcgttttactgtcgctgagctgcgagatggccagccggacagactcagtcagttccgggcggggtatttcagtgtccagctgcgctgcaggaacgctcctggtcgccggcgtcttttcggggccggtctgtaccgtctgacgcagtgtgtcagccggctgtgttacagcctgacgggactggctctcccgttctgcgggttgagcaggtgtatcgacgctcttttctgccctggacgacgtctgcagagaagactgttcaggcccggcaggaaccggtttagcctggtgaccttgctccggctgaggcgcggtctcacgaagacctgcatcacgcggcaccacgctctcctgatacgccttcaggtcaaatcccttctccttcatctggcccagccagcgctccatcaggcgcatccgcgaagggtcaactttcgccctgcgggtgtctttggcggccacatcccggctgcgcagcgtggcttccgcccccacggccccctgtatttccctgccccgtga

SEQ ID NO: 166639 - DNA, 219 bp, Enterobacter cloacae
atgcttgcctacttcttccacttcatggccgagcgcttcaacccgctcacgcagcgcgctgcgataaattttcccaagcgtgacctgatgcttcatgacggtttcgataaagcccgcgttatggatatagtccgtggccagggctttccatttgcccgtatactccgtcatgttggcaatcaggagatgggtgtgcagctgcgggtcaagattacgtga

SEQ ID NO: 166640 - DNA, 129 bp, Enterobacter cloacae
atgtgcttccaccatttctttatcgttgccgataagtgccagaatggacacgcttttgggggcggaaaaggtcaggtcatggccgggacggtggacgtgctgtccgttaacctccttgccaagccgtga

SEQ ID NO: 166641 - DNA, 573 bp, Enterobacter cloacae
atgagcgtgaaacgttattactgggatagaaaatcagattgcgactgcgaaataatcgaacagcctgacggggcaatggttgattacgatgagcatgcttcagttgttgcagaacttgaagccagatgcactgcactggctgcggagaatgcggggctgaaggagagccgcaagaatttggctgaattcattcacgaagaactggacgcaggctatccgctgaacatgagcatagaaaccccagctaccgacgctttcttggctgaagtgcgggcgcagggtgtgaaatctctatccaatgcagttcagtcagtgatttcagagcgtcaacgccagcaatctgttgagggctggacacccgaacacgacgacgaacacacagaaggggaaatggcagaagcggcggcgtgttatgcgatgtttgccaataaccagggcttttctgttccgggtctttggccgtgggcgcgggagtggtggaaacagtccggccagcgccgcgatcttgttaaagcaggcgcgttaatcctcgcggaaattgaacgcatagaccgtcaggagtccgcccaatga

SEQ ID NO: 166642 - DNA, 222 bp, Enterobacter cloacae
atggagacatcaaccgcacgcaacaaattggaggctaggaggatagagagttggttacgcagccagatatctgatctggggatatcacgtatagctgaagttgctggcagaaataaatcaaccgtaagccgctggcaggagagcctggtaccgaacatgtcgctgctgctggccatcctgatttctaaccgggatggagcgaagggagattttgaagcatga

SEQ ID NO: 166643 - DNA, 741 bp, Enterobacter cloacae
atgcggcccttaatgccaccggtgcagacgccggataatcttttccatgatggtaatcctctcacaggtgagctggggaccattgttgatgctgagcatctgaataacgtgcagggggctgtcagagatgcgcagtcggagcttattactgtcctgaccgctgccggtattaatgttgatccttctaaacaaaaccagttgttaacagcacttaaagcgctgttactgagtcgctcaactccatttgctgatatcaaatcagatggtgcggctgctattgcgaccgctctctcaaaccttggtttaggggaaggctctgcgttgcctgtcggcgtacctgttccatggccatctgcaacaccgcccacggggtggctcaagtgcaacggtgcggcattttcgttagcgcaatatccacggctggctgttgcttatcccactggcactctcccggatttacgtggtgtgtttattcgcggctgggatgacgggcgaggtcttgacagtggccgtgccattttgtcttacgctgctgataaaatgagaaagcatactcatggatttttatttggtaatggggatggaacagcaacccctgccgtacatgaacaatcaaggaaagcagcagcaacaacttactatgcggtttcgggaagcagtggtgtgtatataactgaagaaggccagaatgagacagctccatgcaataccgcgtttaactacatcgtgagggcagcataa

SEQ ID NO: 166644 - DNA, 351 bp, Enterobacter cloacae
atggaaatgttgattgacccaacgaccggcgattataccggcgacagctcagacactttagcgaatgccgtctatttaaggctgatgacgccccttggctcatggtgggctgagccagcactgggctctcttttacatacactgcgccgcgaaaaggatgtgtcccgcgttcagaaactcgcggtgcagtattcgcagcaggccctgcagccgattattgatgacggtcgcgcccggtctatttccattactgcagagcactggcaaaaaggctggatgctgcttcatataatcgtcacgtccgcgagcggaacgccgcagacctggaaatttccggttaaggtcagctga

SEQ ID NO: 166645 - DNA, 210 bp, Enterobacter cloacae
atgtctcatactcttattcgtcttcccgaagttcagcggcgaactggatacagcaaagcttggatttaccgattactaagagaacagcgttttcctcaatctgtaaaaattggaagccgttcaattgctttcgttgaaagcgaagttgacgaatggataagccagcgtatagaagaacgtgatgcgctaattgatcttacccacgaatag

SEQ ID NO: 166646 - DNA, 567 bp, Enterobacter cloacae
gtgcagatccttagctttatcatcatcagcaagctccagttcagcctgccagcgcccaatgttctccgccgccgtcaggttcgccgcacgcagccagaaaagctcatcgtcgagtgtaagcatctgagcatcttcagtagtagcatcagaaagcaacattcgacgaccatagccgccatgcttcagggcgtgctgattaccggtctgaaatggattggttggaggattggtacgcactccgcgtatcggtttcgtttctggtggatgttcggcttttggttgcgtacttttttgcgtacggccagcgctggcaggcttttcgctggtacgcgccttactcttttgcgtaccatttttgcgtacctgcgtaccgctattgcgtacccaatcaaactttttagccctcttcctgatagccccttcagtaacgccgtatttatcgcctatatcacggagactaaggactccggcccggtatgccgattcgatggcctcccagtccggttttgccataatacttacctcacgttgacattatcgaagcccctcaatgaagagctcctgtaa

SEQ ID NO: 166647 - DNA, 687 bp, Enterobacter cloacae
atgaagactgaacagcatgtattaactggctttatccgtaatgtgtcccgtcatcacatgagcattgagcgtgatgatggcctgtaccggcacctgcgctttaagagttctggaacaaatacatattacttcgatcttgtgacttggccagggtatctgaccgtcactggtgacatgggaacctggacgttcagccgcatcacggacatgtttgaattcttttcttccgaacattttgggcggcgcgagagctttcttatcaaccccggatactgggccgagaagttcgaagctggagccggtggcgggagattcgattcgccctgctatgagtttgatgatgaaggcttcgacgaagggttgcagcagtggctcgcggtatatcttgaagactgtgacgatgaggacgaccgcgaactggcgatcgagaccgttcgtgaactgaaaggcaatgggttccgggagaagaacgacgcgtactatgcggtcgaatccgcaacctggcccgataacgtaagcgcctgggatttgatggatgggatgtctctccagcgttacagccatcattatctgtggatctgccttgctatcgtctggggtattgagcgatatcgcacatcaaagctggtcgacaaagcgatggtgacttttctggcattcaaacgtgttgaaggcggtgcagcatga

SEQ ID NO: 166648 - DNA, 171 bp, Enterobacter cloacae
gtgggtagtcctctcgcgcgcgtcatcaccaatgaaatcttccgcgttccggcgcgccgtcagcgcaaggcagcggttaagccgtccgaaatcccgacactgaagggctacaccgcccgcctggtggatcagaaatggctgcgtctcgcggcgaggagaaaatccgcatga

SEQ ID NO: 166649 - DNA, 420 bp, Enterobacter cloacae
gtgcaggagcctgtcgacgaccgggtgcatgatttatcggatgcgttctgtatcgtcgggccccagtcacaggcacagaaaatcagcggaatcagcaccagtggcgcgcagctgcgcactgatgatggcgctgcgtttgttgaagtggccgcaggtcataacatcacggttaaaacccccggcgcgctgacggcgacagcagaaggaggaaccacgatcacatcacccactatcacgcttaacgggaacgtgacaataaacgggaatctctctcagggtatgggcgcaagtggcggtaccgcgacgatgctcggccctgtcacggtgactaacgatgtaaaagccggtggtaagagtctgatgacgcatacgcacggcggagtacagaccggcggcggtaatacaggagcgccaaactga

SEQ ID NO: 166650 - DNA, 1119 bp, Enterobacter cloacae
gtggcgggcgtccttaaacaggatgtgcttgaggatattcataaatcgttgcgcgagcatattgttaacggcggcacgcttcgtgacttcgaacggcagattaccccaacgttgatccgtaagggctggctcgccgaccgtaccaggctggtcgccgatgaagatggcgttctggagggtaaacaactcacgccacgccgtctgcgcaccatctttgaaaccaatatgcaggcggcctacggtgccggtcgctatgcggagcagatggccaacgcggagtttcgccccatatgggaacgcgtggccgtcatggatatgcacacccggccactccacgccagactcaatggcttcactgcccgctatgacgatccagtgtggcagtttatgtacccgcctgacggttaccactgccgctgccgcattcgtgcccgaactcaggcagatgcagaccgcatggggattgaggtcaaatcatgggagcaggacattgtcacggtacagcaggcatggggaccaaaagaaacccgtgacgttaaggcgttacgcttcaacggcgagctttatacgcctgatgccggattcgggcacaatccgggtcagggctggctctcttctctcggacagcgcctgatggataaatctgcaactaccacgccccggattgcctctcaggctatccatgaaaccctgtctgaaccagctgtgctggatgccgtcagcgatgatgtgcgtcgctgggtcgacaccgtcagcgtgcggcagaagacccgtggcgacctgaggcgcgttggcggtatccagcctgagctgctgaatcgcctcgaagagcgtggtgttaacggtgcgatcacattaagtattcacgaagaggatgtccggctagctccgggcccgatgtggtcagagcttcccgttctgctccgtcagcctgctggtgtctggcttgatgatgacgctctggtgtggctcctgtccgggcagaacggcacccgcgccgtgcgtggtgtgcagtctgacgatggctggcgtctgtcgcttgtaaacgccggtgccacagtcacccctggcgatgtgttatctgaacgcgcggcgcagctgctggagctgaaatcatga

SEQ ID NO: 166651 - DNA, 759 bp, Enterobacter cloacae
atgagcactattaccaaagaatggctgcagcagacaattgccgacatggaagctgcccgcgatgaaatcccgttcggcctggacgaagacgacagtaatacgctggctgccctgcgtatcgcgctggcatcgctcgaagcggagcctgtggcgtgggcgcacagattaatcaacaagcgtaacggagtcgttcacccttgggtttacggtagcgcagaggcatgtccaagcgagggggatatcttcaatattgaggtaatgccactttacacagcccctccagcgccggtatctgtgcccgctgcgatggaaatggatgatgactttgacagcgcgtttgaacacggaaaagctgctggctggaacgcctgccgcgccgccatgcttcagggtgccgagcctgtaagccagccttgcacgttacgcgaaggggtggcagcaattcgcaactctggcatagcaatcgacgatgagaagattaaggccgaacgagatgctctcaatgaacctacgtgttggtgccacacctgccgccccgtgaaggtgactgacatgcgcttcatcgtttgtcctgattgcggtaacaagcgctgccctcatgccaatgaccaccgtaatgcatgcaccggaagcaatgaaccaggtcaggaaggtagcgcgtatccagcagcaccgcagcaggaggttactcaggcgcttgccaaaggcatggaacgttatggcgatgccatgcaaaaactcgcagatagtggtgactga

SEQ ID NO: 166652 - DNA, 360 bp, Enterobacter cloacae
atgctgcccattcatcatcaattgcgactggtacagtgcgttctggcgccaggcatgctctttgatcagatcgttacgttgcctttcaataccctcaagggtttgctgaatattgcgagatttctcccgcatatcattcaacttcccttcttcaacggcgagctgatctgtgacgatggctatcgctctcaggatatttgcatcgttctcgctcgtaatgcccggcttaccacgggaggcattaagatcgtcaatttgagacttcaggtcaccaaccttccttgcttgctcatcaatcagacgattttgctcgacaagggctccaacagtcctaccacggttgtcatccgtttccgatag

SEQ ID NO: 166653 - DNA, 441 bp, Enterobacter cloacae
atgcaaaccagtgaaaaaggcattgccctgatcaagcagttcgaaggctgcaagctcaccgcctaccaggatagcgtcggcgtctggacgatcggctatggctggactcagcctgtcgacgggaaaccaatccgcgccgggatgacgattaagcaggaaacggcagagcgtctgctgaagactggactggtcagctacgaaagcgatgtgtcccgcctggtcaaagttggccttactcaggggcaattcgacgctctggtatcgttcacgtataacctcggcgtccggtcactgtcgacatcgaccctgctgcgaaaactcaacgccggtgattacgctggcgctgccgatgagttcctgcgctggaataaagctggcggtaaagtcctgaacggcctgacccgtcgtcgtgaggcggagcgcgctctgttcctgtcgtga

SEQ ID NO: 166654 - DNA, 126 bp, Enterobacter cloacae
atgagaccagacgccaattccggcaaagaagtggcactgcgtgaatcctcgcaggtcgtcaggtgtgacatcttcaatactcctttcatctacttcaccgggcgcgatatgaccgccggcgattag

SEQ ID NO: 166655 - DNA, 351 bp, Enterobacter cloacae
atggaaatgttgattgatccaacgaccggcgattataccggcgacagctcagacactttagctaatgccgtctatttacggctgatgacaccccttggctcatggtgggctgagccaactctgggctctcttttacatacactgcgccgcgaaaaggatgtgtcccgcgttcagaaactcgcggtgcagtattcgcagcaggccctgcagccgattattgacgacggtcgcgcccagtccatttccgtaactgcagagcactggcaaaaaggctggatgctgcttcatatcatcgtcacgtccgcgagcggaacgccgcagacctggaaatttccggttaaggtcagctga

SEQ ID NO: 166656 - DNA, 207 bp, Enterobacter cloacae
atggctgaccagttaatccgggttaacagtgaaaactatgtgatggccagtgacgtgctgggcgtccggttcgcgggcggcagaaacgtaaccgtcgcgacgtcgacaggctgctacagcctcgatgttgaacgagataaaaccggcatcgagtcgatgaaccgcttcatcagcgaggttaataaagccctccgcaaccaccattaa

SEQ ID NO: 166657 - DNA, 270 bp, Enterobacter cloacae
atgagagggggccttctgggtagaagcttcattgatatccatcaaatcagcatcagcctcagtcagcttgtgggtttccatcagacgctgagcgcggcggagggcaagtgctgcttcttcgacgctggagttattacgcgccatcgcgagcagctttttaattctctggatatatttctctttattttccattgttcaactcctgaatttggcgtaagccagcccctgcgggtttacgccatttttaaaagtgatttaaattacggttaa

SEQ ID NO: 166658 - DNA, 264 bp, Enterobacter cloacae
atgaaaatatctctgcgcgatctggtgacgaacccggccaccggtcgtctctcaacgtcagacaccatcgtttttctggccttcctggtcagttcattcgtactggtctggctcaccgttacccgccccgaaacacctggtgagctgtatctcacctatctgggcgcatgggtggcgcagagccaggcatcaaaacatatgtccatcaagcgagccagagaggtgcgtgatgtgggaagcagccaagaaaatcctgagggttag

SEQ ID NO: 166659 - DNA, 1641 bp, Enterobacter cloacae
atggatatggcgaagatcgatgatctgcagaaagagaagggcaagaaaggtgctaaaggggtaactgctcgctggcaacgccgaatgaaacttactccatgcgtagtcatgacctgctatatgctgcccggcaatatgcagataagcgaacacaaaggtcagcgtaaattcgagaaaagttatttatatgattttgccgatttactcattgtcgatgaagccgggcaggtgcttcctgaagtggctgctgcctcgtttgccttggctaaaaaggcattagtaattggtgatacggaacagatcccgccaatatggagtattgctcccgctattgatataggtaacatgctggcggaaaaaattctgtcaggcagtacgcaagaagagattactgagaaatatacggcaatcgcagagcttggtaaaagcgccgcatctggcagcgtcatgaaaatagcgcagtgtgcctcacgctatcaatatgatcccgaactggctcgtggaatgtacttatatgaacaccgccggtgcttcgataatattattggatactgcaatacgctctgctatcacggtaagttgttgcctaaaagagggtgtgaagagagcaatttaatgcccgcaatgggttatctccatattgatggtaaaggcgagctggcaagtagcggaagtcgatataatttgctggaggctgaaacgatagctgcctggctgacagataaccagcaggatattgaagcacattactgcaaatcgcttcatgaggttgtcggtatcgtgacgccttttagcgcgcaggtatcgaccatcaaacaggcgctgggtaaacaaggtatcagcactggcgcgaatgaaacgtcgctcacggtgggcaccgtgcactctcttcaaggagcggaaagagcgattgtgatattctcgccagtctattcaaagcatgaagacggcgggtttattgatagcgataacagcatgctgaacgttgctgtttcccgtgcgaaggacagtttcctggtcttcggcgatatggacctgtttgagattcagccagcctcatctccgcggggaatactggcaaaatatctctttgagtcagagaagaatgcgctcacttttgattataaagagcgtaaggatttaaaaacttccgagaccaaaatctatacattccatggtgtggagcagcatgataatttcctgaatcagacgtttgaaaataccggtaaacacatcacgatagtttctccatggctaacctggcaaaaactggagcaaaccggttttcttgattctatgattgcggcgtgttcacgtggtattaatgtcacgattgtcactgacagaagctacaacactgaacatagtgattttgagaagcgaaaagagaaacagcagaacctcaaagcggcgctggagaaactgaacgcccttggtattgcgacaaaactggtcaatcgtgttcatagcaaaattgttattggggatgatggtttgctgtgcgtgggatcgttcaactggtttagcgcgacacgtgaagcgcgatatgaacgatacgatacatcaatggtttattgcggtgataacctgaagggcgagattgaggcaatttataatagccttgagaggcgtcaggtttag

SEQ ID NO: 166660 - DNA, 216 bp, Enterobacter cloacae
atggattatttagacaaacttttcagagagtatcttaatgaggatggcattgttcgtattgccagttctgaattttatagagataatatatttgatgaattagacccgtcagggtatgaagaagcgtttcttgaatggtgtagccaaaggaaagtagacaatatcaagaaggctgatgatatattagcttggtgcaggaatgtctgctccaagtga

SEQ ID NO: 166661 - DNA, 204 bp, Enterobacter cloacae
atgcgcttctatgttgtggacaaatttctgcccagtttattcaagttcagtaagcattttacgcatttcctgactaacggttctgccagccttttcgcaccgaataagcaattcttcagcggcagagaggtgattgaagagttcggtcaattcatcaaaatcaataccaattccggcgtcagctgccagcaatgtatcttttag

SEQ ID NO: 166662 - DNA, 204 bp, Enterobacter cloacae
atgagcaagttaactttggctcagcaagatgtgttgcgcctcatcaatgctggcgtagatgtgactttttcccgaatttcaggttcttactactgccaagaaacaggcgagtatgtaacgaaacaggttgaagcactccttaaaaaaggtctcgtaaaagtctcagaaatcgcagggaaatatcgtgtggaggccgcccaatga

SEQ ID NO: 166663 - DNA, 609 bp, Enterobacter cloacae
atgagcaacatcgacaaacaagctttgactgctgaatcagcgcgcgtgtcaggaaacatcctgctcatcgtagccgctcgtatggctcgtcgtgaactcttcacaccactgcattacgtcagcgagcttcctcagaaagtggtcagtatgcgcgtattccgtgaagcgctggagaggtctgaggaaactctacagcgtgaagtatgcaaaatcgtggaaggtcacgatcgtatgcataagaagctgaaagaggctgaagcaaagctggaaaccgctgagaagcggattgctgagctggagagcgacaacgcatacatcagaaaccgacacaaagaactggacctgctaataggtaaaaacattcttctaatgcaggccgcaatcatcgaatggcagggaaccggcgacgccagaaaggggatggcatggatttatagcacgctgcttggtccaggcgaactgccggacgaggcggagaaagacgcccaagcctactttgaccgaaaatatgctcctctcgacgaagaacttatgaaccttcaccggtggttctgggagcagagtgaggctgagcgcgccgctgaagcaggcaaaggagaagcatcatga

SEQ ID NO: 166664 - DNA, 516 bp, Enterobacter cloacae
atggataagtttatcaatccggtaatatataaaaaagagcaagcagaaattgaaggcatgctcaggactggactgtattttcaggatgaaagcgggagggactggtatgaaactctgcgcacttggaaaggtgcggtagctaccgatgagaatggaatagtagttgcctgtgagagtgatgtctcatttatgggtatgcaggaagggcgaaatgtatatgagataaacccagctgacatcccggctaatgtgttagggaatttcaagttttcggagggtgtttttattgatatccgcccaagcgatgccgacgttgcggagcaaaagaaaagtgaattaatggcggttgcggaaagagctattgccccgcttcaggatgccgttgatttaggaatggctaccgatgcagaagcggcgttactgctcgagtggaaaaagtaccgggtgcttctaaatagagtcgatattacgaaagcacccgatatagcatggcctgataagcctgtgagagattaa

SEQ ID NO: 166665 - DNA, 867 bp, Enterobacter cloacae
atgatttatgactgctttctctattacgatgaagatatgttgttagacattcgtctacacactttggctaatgttgtagataagtttgttattgttgaatcaaagttcacttttacgggtcgcccaaaaccactcaatttcaatattgagaaattcaaggcatttgccgataaaatcatttatgttgtaaacgacactgaaccgacgaaattaccaggaacaaaatacagtcctgattatgaagttgacccatgggaagtggaagcgaaccatcgtaatagtattatgcaaggtctggtagatgcaaagcctgacgatataataattgtttctgacgttgatgaaatcttcaaaccagaagcgattaaaaaaataaacccgcgtcatttgtgcactaccatccatcaagatttctataactatcagttcaacatgcaagtgttcaacaaagatggttctccgcgcaagtgtacacttccaagagcaacaacatacaaaaacctgttggatttttttgacggtgaacctgagaccttcaggaatgtcaagcgtaatcgtttatttaaaaaatggtcgtggttcaaatggaattggtttaagttcaataataaagttattgataatggtggttggcatttctcgtgggtgatgacacctgaacgtatttctgaaaagatgtctactatctcgcaccaagaatataatacgcctgatttcaataacccagatcacattttgaaagtgttagagaacgcagaagatatctgggggcgagatagaaaactagtcaagcaagaacttaaaaagcccgaattcccggattatctagtcgacaataaagaaaaatttaaaatgtttgtcatttaa

SEQ ID NO: 166666 - DNA, 219 bp, Enterobacter cloacae
atggccgatatcatcgataccgcagcagagattgaagagcttcagcgtaacgctgccctttccgctcaccgcatcgaccgcaacgccgtatcagctgagcgttgtgaagaatgtgacgaaccaattcccgagcctaggcgagttgccgttcccggctgccagacgtgcgcggagtgccagagcgtgatagaacttaagaataaacagagggggttgtga

SEQ ID NO: 166667 - DNA, 249 bp, Enterobacter cloacae
atgagcaatacagcaaaacttcagctcggattttccccgctgacaaaaacaatccagttggcaaaaatgcgcgatttggatggtgtcgggcgtctgcgagtaggtaacgatagaggtcgtgacgtgacaaatgaagccgcgcaattggtttggcagctcgttatggctgagggtggtgaaatcggctgggagcttgatgatagttcacgcatggtgctaaaggctgaaaagcaggaggccgcccaatga

SEQ ID NO: 166668 - DNA, 573 bp, Enterobacter cloacae
atgagcaacatcgacaaacaggcgctgcgtggtcaaagcgttgaaggttcattttacctggtggaatgctgcaattgcggtgaaatgtaccccagcaaccttcttgatggtggagaagcaattgctgactccggggattacggcgattgctactgccatctatgcggggcagatgatacggaacgggcggattggggagacgtgaattcgaatgaagcaaaggcgtggaattttcagcagaagcgcattgaggcgctgctggatgaactggaatccaaagacaagagcatcagctttttgaaagaccagctcgcgcagctggcaaacttcaatcctgattgggacaagctggaagcagcaactgacagcctccgtgagcacatggcagaactcacagcggcacgcaaacggattgctgagctggaggcgttagggcgtggcgtgaagcagttctcagagttccagatttgccattacggtgccactgaggactatgcgaagggctatatcgactgtcagaacaattacaacaaagtgctgttcgccgcagccggtaaaggagaggcatcatga

SEQ ID NO: 166669 - DNA, 2268 bp, Enterobacter cloacae
  misc_feature (1083)..(1092): n is a, c, g, or t
atggaagactttgtccctgaacaagactgggggcaaataaaaataccatggggagacaatatttatagaattttttacggtagctcagtcgaacgcttatatgattatattcaagcttttggaattagatacgcagaatatccaattatccttaagcaaatggaaaatgttcttattttacaggaccagtttctatcaagcctaaatccagttgatacactctcagagttctctcccggccatgtcgaaatccctccagaaacattctggaaaggttgccatcaggctttaacggatgcctgtcatgtgtttgagaaaataagaagtcagacggaaaaaatatttattaaaaaagcaggggaatttagaagcattaactctaccgctgaattatcaaatataataatggagggcgtagcactccctgctattggtatcaacattggtgatcgtgtttatccattgtcattcaggaatatggcaaatgtaatcattgagcactatgcttccaaaaaaatggatatcgattgttcagatgctatttcaaatttcatatctcagcgttttgaaagcataattgaggaaccatttctgctcctgagcaaaaaaaaggtcctaccttataaattctcaggattattacagggtaatgataagttttatttatttgctctttttgatattgattcagcaagtaagttaaaagatatagaagaagacgttttcgaactttttaatcaaggtgaatgggctttatcaccgatttcatcatcacaactattaggcattcgaaatcgctcggggaaacagctatcaattgatgatattgaatttattttcataaattctaattttactactgccatgcatttttttgagccaccacaactaaaatatagtcatcacatcttctttctgacagagttcattgcattgtttgactcaatagagaatctaaatgaattatcattatttttttcatatttagataagaacaagtcaaaaataaatccgttctttatttccgtaatagataaatttgcatcatttaaaggaactcattctgtattagaagatggtgcnnnnnnnnnngtattagaagatggtgccattaattttaatatgattactcttgaccctcactggggttctaattggagatatgaagaactgggaaaatactggtcgcaggctcccgcgaattttcctgatgtcaatgtaaaatggaacatcagtaatagttaccaaggaaatatttcattaatatcgaaatgtcatttctatgtctcttggtccacaacgataaaaaattgcacaattcatttttgtgcggattgcaagtacctacttaatgaagatcccctcaatggtcaacttctgacattatttttagaatgtgcttgtgatgcattatcgcaacgaaaagatattttagagagtacatctttccaaggtataaacagaattaccgtacactgcactattgacagaaaatatctagtcgatagtaactctgacattacagaaaattttgctcctgagttgtttactcaggtatcgttaattaacaaagataattattctgcaaatataaagatttgcattaatttgccactaatgcaatatcgtcttaacagacctcataatgccagtttccaggctgatgtttgcattgcattcttacaatcgctctccaaaatacttcatatcgagttctccgaggattgtaggcaaaagttaatcaacacagggaacagacccgcaaggatggcaatatccaaggaagagcgcacttttgatactttagaaataaaaccaaacattcctgaagccaaacattttaaactagccagaaaaacattggctaatttcattaaagactctggtgttcaggaaggaaattatgagttacaaaaagccaaagatattattaaccctttggccgattttttcagagaaaaaattcacacaacaatacgctcgataaacagggagcacttgctacaatttgtaattgaaaactatgatgcttatgtagccgaagatcatagaaaaaagaaaaatattatgttaagccttcaacatgaggttaattataatagaacggaaaaattagcgaaacaaagtactgagttcaaccgaatgtcagcaaattataggtatttgcttgagtgcactttaagtcttaactcaaaaagtgagaccataccgactaccgatgatattttacaattacttgctgatattgattggttaatcgggtcatga

SEQ ID NO: 166670 - DNA, 234 bp, Enterobacter cloacae
atgaaaaatatgattctttgcctggcggtagcggtattgctctcgggttgcgctggcgttattgagaagcagcaacccgtatgcaccggaacagccctggtcggcggacaggaaagcagcgtccagatctacggagtccgcaagcaaaataatcagacgcagtaccgtgccggttatccctttaactggtcatgggtgagcgccaacacgttcaccagcaccacctgtcactaa

SEQ ID NO: 166671 - DNA, 231 bp, Enterobacter cloacae
atggcaatagatgcgacgttaaaagttaaacaaattaactctattaacccatacggcgacggatggaataggcatatggaaatcgatatcgacagtatcgaattagttgaatgtgttaagcctgaagaaattatttctgagtacacggcggcatcacttcttgatgcaatggatgaatcggatgtggttcgctggcttgaaaacgaaggttacacagtaacaaatgattaa

SEQ ID NO: 166672 - DNA, 903 bp, Enterobacter cloacae
gtgctgcgcaccccggcgaacaacaagctgcggatggaggataaacgcggcgaggagcatatcaagctcgccacggagtatggcaaaacgcagctcaacagcgggcacctggtggacgcacagggacagcatcgcggcacaggctcagagctgcgcaccgatgagtggggcacgatacgtgccggtaaagggctgtttgtcagcgcggatgcgcaggtgaaagcacagggtgaggtccttgacagggatgcggcgctgaaggaaatcgaccggctgaatcagcaactgcagcagctggaaatcgcggcggagcaggcacaggcgctgaaggcggacgttgacagccagatagcgatgtttgagcagcggctgaaaccgcttaatgaggcgctgctgatgtctgctccggaagggatggccctgaccagcggggagcacctgcagatgacggccacgaagaacgttgccattaatgcgggcggggatatcagtgccggtgtcatgggcaatatgacggcgctggcgggtgaaaaactcgggctgtttgcgcgggaggggcagctgagcctgaaggcgtcggaaggcccggtggatgtccaggcgcaaaacgccagcctgcgactctttgcggagcagaagctgacgctgagctcggcgagtgacatctccttcgccggaaagaaacgtatcacgctgatcgggggcgggagttacctgcgactggaggcggggagaattgagtacggcacgacggcggtgtatttacgcaaagtgaaaaggacgatggcggcaggggcggcttcaataccggttaaggcgagcacagggggcggtatttgcctcagttgtctgatgaaagcggcgatgaatggcgacacctttgttataagaggtgagtcatga

SEQ ID NO: 166673 - DNA, 1359 bp, Enterobacter cloacae
atgaacatacagcaaaaagaacaagttttagggcttttagatgcttttgatgctattagctttaatgacaaagtggctgagtcatttaaagatagcggagatatatcgcaaattaatattggtgatattagtgtaagtgattatgttactctggtgaataaagttagacatcattttaggcaggaatttgatggcttaaattatgtaacattgccattttcttataattttggtagtgaaattggttcgggaaatcttcaatctgatctttcgaatatgaatgcatatatatcaggtgaaagttatagtaactcactctcatatgtgtatagattggcaaactatcagagggttaacggtttttgggagttgaatactagaagggcttttaagaagacagaaagaaaacttcaagaagaatatgaacttctcgaaatgaagaagtcaataattgaacaaaggatattagagttagatggttttgttagtaaggtaagggatgctgaagttcgtgtgaatacatttcttgaggaaagtcagtctcaaattaaaaattatgaggctttgcttcaaaatttagtatcgcaaactgattctattaataatatgttcaactccgcaacaggtgttgttgaaaagataaactcacaattagccctcgctgagaacaaaaatagtagcattgataagatctttgatgattcagaaaaagcattggatgcaattaagttaaatatttcgcagtacaaagaagaatatggtgaaattagtaagaatctgaacgcactaaatagctcgtttgatgagaaattagcttttgttgttggcaaggaagagtactttaaagaacgaaatgattatctagatgctctgattggaagagaagttggtgcatcacttttcgaaacgttcaaacaacggaaaaatgaacttgcaccttctgtgaatttttggaagatcgcggtgcctgttcttgcaattgcaacggtgctctggatatttttcctgttccatttatccgaagggcagactatggattataaactgataataataaactctatcaaggcattgcctgccataggcttgctgctctttggtatttcgcaatatagcaaggaacgaaattttcaagaggaatatgctttcaaatcggctgtggcattgacattaaaagcatattctgaacaactgataagtgaagaaaataaagatgctttaattctatcgtctgtttcgtcgatatataaatcaccaatatatcattctaaattaaaagttgaggatggtaaaaatgctatagattcagtatcggatttactaggcaaatttaaagatgttaatttaacaaaaaagtag

SEQ ID NO: 166674 - DNA, 210 bp, Enterobacter cloacae
atggatatccacactcggccgtggctgtatttgactcaatgctttctttgccaagatatatttatgagcctcaagtttattttacttacattagtatgtctcatcagtttattaaagatagggttagatattccagtaatgaagaatatttcggagtttaccttaaatcttctattaaaaatcttgtatatcggcaatatgatgttttaa

SEQ ID NO: 166675 - DNA, 1359 bp, Enterobacter cloacae
atgttgaatacggattttcttacgcaggaattaaatttattacgttctaactcctatgatcagttggatgaacgtcagacaatgcttctcgaagtaacaaaaacaatggtttcgtatataagtattcgaatggaatatcttaaatcgaaagttgatgataagcgtttaaatgaactcattcatattgaagaaattcaaactctttcaaattgcttgcaaaaatggcttaatccagagtttctacaggaagtttactatataccaaaaacatatgatgttttgttttccagaacctctaggttcgaaagtaatacagatgaattagaattaaaagaagtaggagaagggcgagtagtcggtatcaatatcggttatcacagggctgttgctttggcattattgttttttaaagggattacttataacaactcccttagcattatctacatcaacgatcttgctgactttataaaaaataacaatctaactaccttttttatagacaaaatcataaattttattaaatctgactcctttaaacaactgattgagctattggagttaagtcagcgacaagatgaactcgttgattttgaaagtcgcaaggataatttacttgctgcttttgaacaactcaaaagtaaatcattacaagtggcgttatctggagtcataacttcatcgtataatcaaaaacttgttcaagattataataaagggctgacaagtgattttttaaaagcattgaaagaacatgttgacttagaggctatccataatgacaacttttcttccactttggaatttgagtttcaaatagataaaagagagttgctggatccaataaatggggaatacttctctcagtcccattcaatttatgctaatgaaattatgaagtccataatattaaaattggttggtgaaatcgatttggacaaagtaaacgtaattcctattaatgatcctaatgccttgccagaaggggttaagttcgtaagcatgaattgtttggaagatgactttgagtattcatggagattttaccggggtgtgagatttaagagagatgaacgtgttgaaccttttacagataatggcttttattacattgatctaagcggctgctatgagttttacggcaacatagctcatgttttgaacgttcagttcggtaaaaccacagctgaattattgagtaaatataatttcgaagttagcgaaagaaatatggaaactaatgctcggatgtttgtttcactcatgctgcgctgggaacctaaagagtctcaaaatgttttctttatttctgatggagattgtagagaatatttggctaatgttgacaaaaaatcgtaa

SEQ ID NO: 166676 - DNA, 864 bp, Enterobacter cloacae
atggctttcactacgcgagagcaggctttagaacactttcgcaaacgctacgatgaagacaaatttacttgtactgtaaataaaatttctagcggttatgcctttattgccacaccgattgcacaagctggtactggtcagagtaaggccaaccagcaagcaacagccaaaaatccagtacctgaaagcttccgcagttcagtaacgaacaggctttttgtagcaacaaaaaacgtacccaaagtaagtccactagccagcagccaattacttaaggctgaaaaaaaaccagcaaaaagaataacagcaatagaagatgagcctttgcctgatgaagcaatcaaagccgtcattgcaagtcgggctaaacgtaaaaagccagtgccatatgtacgcgaggagttatcctcgacatcagcattaaacataaaccagcatgataccgatcggcctaggtgtatttattgcggtgactatcgctctggcattgtccgtgaccacgtggtttcagttgcatggagaggtggagtgaggcattacgatcgccgtcataccgttccatcgtgcccacaatgcaacaatctattaggtgataagccgttacataacattgcagaccgcgcagcatttcttgttggagcaatagagcatcacgaacgtcgatatctatttactgttgacaggacggctgaggaattagccgaacttgaccatttcttagctatttcggtaaaaagcgcaatgtacgaaaaagtcattgccttgcaacgtatcgaatacgctaaacaggttgcagcaggatattatgactacgctactatcaagcatcttgttaagcagggtcgagatattcccgaagaatga

SEQ ID NO: 166677 - DNA, 771 bp, Enterobacter cloacae
ttgagaacaaataatatttactctccttggcctgaggagggtaatcgcaaattgactggcgcactggcaaatttacactttgcacctaccacgacttcagcgaataatctccgcgccgagaatgtttctgacgaaacgatcattgttactggaaatacagtaattgatgctcttcttatggttaataataagctgaaatcgaatccagtattggctggagaaattgaaaagaattttgagtttatcgatcctaagcgtaaaattgttctgattacaggccatcggcgtgaaagctttggcggcgggttcgaacgtatctgtaaagccatattgagattagctaaagcttaccctgaagtagattttgtttatcctgtacatttaaatccgaatgtacgcgatgttgtacattcagtactgctcggacaaaataacatatatcttatccaaccacaggattaccttccattcgtatatcttatgaacgcggcatcgataattttaactgattcgggaggtattcaagaggaagcgccatccctgggcaagccagttcttgttatgcgagatacaacagaaaggccagaagccgtgactgctggtactgtaaaacttgtaggtacggatgaaagacggatatttgatgaggtttcattgcttctgacaaatcaggatgaatacaatagaatgtgctttgcgcataacccttatggcgatggcaaagcatcctccagaattgcagatgccatcgtgaattctttaaaggattaa

SEQ ID NO: 166678 - DNA, 4266 bp, Enterobacter cloacae; identical to SEQ ID NO: 160490

SEQ ID NO: 166679 - DNA, 792 bp, Enterobacter cloacae
atgtcacaactgagttttgaatccctgttcctggcagaccaggctgatccgaagccgcgggcttccgctcctgtccgggtgcagtccccagctgaggcgcgtaagcagttcgccagtgtgttccgtcaaaccgctaaatatatgcgccgttccgaagtgttccgcgactttatcaccctggccgccagtgggcttgatatagcgagcatacgctcgccagaaagcatcgaaaacagccgacgaatctgcgggcggtatcagccggacgatttagacgccatgagacagctgttctgcctgttggtggaggggctggcgggtgaaatgcatgattttctgggcgcactgtatatggagcatgagctgggcgcggacgaaatggggcagtatttctctccgtcctccatctcccgcctgatggccggactactcatgcccggcgctcaggagacgataaagcgtgagggttggatgacgctcgatgagcctgcctgtggtagcggcgggatggttattgcctttgcatactggatggctgaggcgggatataacccctcagaacagctgtatgccacctgcacagatatcgatccgatggtggctgatatggcctttatccagctgtcactgctgggtatccctgcgaaagtcgtgaccggtaatacgctgactctgaaagcaaatcgcgtgcgttatacccccgtttattacttcaatgactggcagggacgtctggagtttcgcagtcgtttcgaagctatgaaaaactttctggccaccgtggccgcctga

SEQ ID NO: 166680 - DNA, 261 bp, Enterobacter cloacae
gtgagctacgttttgctgagcaaaataataatcgttcggaatatcttattattgacgttgccgatggtacagtttcctctggaaatccaggtcgtattaggcgcaaagaacggttggctattgaagtcaatcctggcttcaaacttcctgttctggttcatgcactacgtaaagatttccctgttttgtcacatcaacatgctgggaagcaaaattctccgcgaattctttgtctttacgaagcatcttggagtgcagtag

SEQ ID NO: 166681 - DNA, 993 bp, Enterobacter cloacae
gtgctgcgcaccccggcgaacaacaagctgcggatggaggataaacgcggcgaggagcatatcaagctcgccacggagtatggcaaaacgcagctcaacagcgggcacctggtggacgcacagggacagcatcgcggcacaggctcagagctgcgcaccgatgagtggggcacgatacgtgccggtaaagggctgtttgtcagcgcggatgcgcaggtgaaagcacagggtgaggtccttgacagggatgcggcgctgaaggaaatcgaccggctgaatcagcaactgcagcagctggaaatcgcggcagagcaggcacaggcgctgaaggcggacgttgacagccagataaagatgtttgagcagcgcctgaagccccttaacgaaaccctgctgttctctgccccggaaggcgttgccgtgaccagcggggagcacatgcagatgacagccacaaaaaacgtcgccgttaacgccggaggggatatcagtgccggtgtcatgggcaacatgaccgcgctggcgggtgaaaaactcgggctgtttgccagaacgggccagctgagcctgaaagccagtgaaggcccggtggagatgcaggcgcagaacgccagcctgcgactctttgcggagcagaagctgacgctgagctcggcgagtgacatctcgtttgcgggcaagaagcgcatcacgctcatcgggggcggaagctacctgcggctggaggccgggaaggtggagtacggcacgacggcgatgtatttacgcaaagtgaaaaggacgatggcggcaggggcaaacgacctaccaattgcgtcattgaagcagatggcaatgatcactcagtattacgacagaacgttaagtttctcttcaaatgtcaactatcgtgttgaaacagcagatggagaggaattactttctggctcgggtacaaatggatatatcgacaagagtgatagtgaatctgagtactgggtctttttaagctga

SEQ ID NO: 166682 - DNA, 552 bp, Enterobacter cloacae
atgaaagtcattgatacaaatattgctgatgtaaaaattattgaacctgctgtctttggtgatgagcgcggtttttttatggagacatggaaccaaaaaaaatttgaagatttggtaactcataaaaaaacgaactttgttcaggacaatcattcaaaatccaaaaagggaattctccgcggcttacattatcagagcgagaatacccaaggaaaattggttcgcgttggggtaggggctgtatttgatgtggctgtagacgtgcgtaaagattcaccaacattaggccattgggttggtgtagaattatcagcagataataagcgtcaattatggatacctgaaggatttgcgcatggtttctacgtattaaccgatacagcagagttcatctataaatgcaccgattattacaatcctaaagcggagcattcgattagttggaacgatcctgacttagctatttcctggccgcttgatacaactacgcagctgcttttgtctaataaagatatgcaaggcatctcgttcaaaaaatttatggcgctttga

SEQ ID NO: 166683 - DNA, 243 bp, Enterobacter cloacae
atgaaattaagcaatcataatgaacttattttgcagattgctaagcgtaacatttattcaagatataaaggttcaacgcttggtattttctggagtctacttaaccctctttttctgcttgccgtctacactctagtatttggtttcgcatttaaaactaagtggggtggtggttcactcgctagttatccggtaattcttttttcaggacttatttttcactttttcattattgacgagtag

SEQ ID NO: 166684 - DNA, 531 bp, Enterobacter cloacae
atgagaaagtcaaagtcagtaaaaaataataatgaacacgataagctggagttgaataatgatttaagtgatcttgaaaaagatatcactgaagatgagcaattattacctgaagagagttataagcttctcattgaatcaggtcaggcggaaaaaatcagccctaaagccagtggcatgctgacatggcaactggcaatgtctgaaacagataatgaactttatctgcgcctcctggcaaatggcagcggagggttgttttcaaaagactgggtgccaattacgaagattgaaagtgtactagaaagtcaacctgcaacgggtttcacatcaggagtattcaaatctctcttcaaaggggcaagtgccaataacgcaggttttctggctgcggttttacgttcccctgatatatgtttgcttgagggacatccggataagttatttacgcatgttttatatcctgactggcgggaacgtctgaataaactcagtgtgatcgatattcaggaaaagattacggagggttaa

SEQ ID NO: 166685 - DNA, 1128 bp, Enterobacter cloacae
atgtttgaagactatcttgaacaccccgaccggcatcctaaaaatgctcagctcctcgctaaatatcagaatgatattgataaattatccgaaatttttactgaggatgatttactacatctgatgacacatgaacaaccagatggctcgcgtaagatgttactttccttaaaatctatcgagatattcgcgccctccgcattaatgtccaatcagattaatttttttcagaacaccgattatcttgagaaatggtgtgcgctacaatgtaaggaattcgaagtactggcaattaatatctacggtcgcacatcgattaaacaaaataaaatcccagataaaacactaaaggaaattgatgtatttctggagatattgctggataaggcctcaaaagactcgacacatccgctttccacatttctaaccaccctcaatactcttgtggatgaaaaaacatatcaaaatagtgaactcgtccattgtgatggaaaagcttcaatgctcagctataacaacaccctcaaggatacatgtgaaaatatcactaaatatatcacctcgtcagatttcatgaattctctcccggaagtttcaaacttggcccccagggatactgccctccttttctttgcacgattttgtgatgagttttatttcactttcctatttaaaacaatagacctaatgaaaaatggtggacttatcaaaaataactatctcaaccaccctaacatgattcaattgattactcttgcaatgataccctgtgaggttatgcgacccgttattaatgaaaatggctatacagccgctttaaccagtcctgataagttcgtttttaatgaaaccatcccccgaaacaaagaaaacatgacaggaatacaaaaaaacataaaccagattttacgcaagacctatatttacattgcattacttttatttcccatatggaaacccacagctaaagaaatcatccttttcctcgaggacaagagtaaaactgttaaaggattattagatctaaaatcgacagcactgggactaagctcccagattaacgatgtaggtcgtctcagcaaagaggagtatgtcacccgattactatcacttgctcgggctaaatga

SEQ ID NO: 166686 - DNA, 240 bp, Enterobacter cloacae
atgtgccttaccggctttaccgatagcgttttgcacgctggtaatcagcaccggctcattaagcgggaatgttacgtcatcagcatcgctggccgtgcagaccatgccgatgatggccgtcgagacggtggaaatggtgcgcgtgccatcgttaatctctatgacctcgacgccgtggtgatagtcgcccatctgtttaactccgtggttaaggggtgcgactattttcggttgtgctga

SEQ ID NO: 166687 - DNA, 1278 bp, Enterobacter cloacae
atgagtgggttgaactttctgaacaaattgctggatggagttgatgttgaatggttgtcactgggagagcttggcgatttcatacgtggcaatggactacagaaaaaagatttcgttgaaagtggttttccagcaatacattacggtcagatttatacaaggtatgggttatcagctgataaaacatttacttacgtgcttccagaactagccaataagctgaggaaggctcaaaaaaatgacttattgctagcaacaacatcagaaaacgataaagatgtagtaaaacctttagcctggcttggcgataacgttgctatttccggagatatgatgttatttcgccacgagcaaaatgttaaatatctcgcctatttcttccagtccgaaatatttcaaacacaaaaaatgaaatatattactggagctaaagtccgacgggtttccagtggcgatttatctaaaattaaaattccaattccctgttcaaacaatccagaaaagtctttgaccatccagtctgaaatcgtccgaattctggatagatttactgctcttacagctgagcttacagctgagcttacagctgagcttaccatgcgaaaaaatcagtacaactactatcgcgaccagttgctgagttttgatgagggtgaggttgagtggaagacattgggggcgataggtaaatttacttatggatatgctgccaaagcgcagatttctggtgatgctcgcttcgttagaattacagatataaatacaaatgggaaactatctccttttgaaccgatgttcgttgacatatcagctgaaaatgaaaagtacacattaaaaaagaatgatttacttatggccaggactggcgctacgtttggcaagacaatgattttcgaggaagattatccagcaatctatgctggcttcttaatcaagttaagcctggatagagacatcattgaccccaaatactattggcattttgctcaaagtgattatttttgggagcaagctaataagttagtttcaggtggcgggcaacctcagttcaatgcaaatgcacttaaacaaatcaaagtacctattccttacccaaatgaagcgggaaaatccctttcggagcaggcacgcattgtttctgtcctggataagtttgatattttagccagttcaatcaccgaaggcctgccccgcgaaatcgagctgcgccagaaacagtacgaatactatcgtgatttgctgttcagcttcccgaagcctgaaattgccagttactga

SEQ ID NO: 166688 - DNA, 210 bp, Enterobacter cloacae; identical to SEQ ID NO: 119099

SEQ ID NO: 166689 - DNA, 333 bp, Enterobacter cloacae
atgaataatttaatttcattggttaaaggtataaacgtaaatgactcttttttgtgctgggaggagttgaaaaaacaaaataaagagcatgtgtttgatgtagatgtcaattccatcattcgctcattgcgtaatcagtattttgttccatcagaaatggggtatttgtttttccttgcgtcaaaccctcccggtcgcgctcctaagaaacgtgcggtctctctttccgctcgctgcatcgacaaaatcataaggcgcatttggcgtgagcagatgcgtcagcaccgtgagttacggcgagcaggtttgtttgatgatggctctcctttttaa

SEQ ID NO: 166690 - DNA, 507 bp, Enterobacter cloacae
atgcgtggtgcatttgatcagcactccgtaacggtaacaactgatattattcaaggaatgtgcataggcctttgggctcaggtgataggttatatattcattaaggcattgagcgcacatctcaataataagaaagtattggttgtgatgatggttgcattgctgagtaatgcggttgtcaacctggcgacgtataaaatgtggggtgcatttgggttagggctagggaattcaatatacagtttaatgatgtttatccttagcgcgtgttacttaagaattgcaaaagatctttttcctgtgttaattaaaatttctttggggttaattctttatacatctattatcttgactcttgggcattacattattcaacctgataatgttattttccgactcttgattaatggcgcaatatttgtgatgtttagtctgttatgggcaatgttattcccattgtaccgaaatggtattaaagggattttccaaaaaaagggactgagatag

SEQ ID NO: 166691 - DNA, 480 bp, Enterobacter cloacae
atgtcatcggtaaaaaatagcgacgttacaattgatatctataccagcgatttaaatttgcctgatagctatgcaaatgtaaatggcgacattaggataaataaaggtcgctgggcatatacagacttgcttgagaaagtaagtgcatcaaagagtatgattatccctattaaaacagataagatcaattattgtgtcggattgtcttcattgattgaggctatcgctttaggcgtgccagttattgctacatacaacccttactggtatgtcgatattgagaaagagaagtgcggtatttatattaaagataattctttaattgaatggacgcgcgctctagaaaagttaaatagggatcccgaattggttgctcaaatgtctaaaaatgcattgaaaacattcgtagaaaaatgtgactttgtccgtacggaagagatgcttgcaatgcatatagataatatactcaaaaaaaagtga

SEQ ID NO: 166692 - DNA, 657 bp, Enterobacter cloacae
atgggactgctttcctttgatatttcatgtccgcattgcaagaaagaaaacgccgttttagaggcttttgcagaacaccgtcgcaatgaaacttatgtttatgacgtggcattcttttgccgaagttgcggacaatcaggtatcgcagttgtgatgtccgatttagcggattttggtccatttaagcaatccaagcagcagtcacatagagatatagtaattccacattctgctaataacttcgtactaacagaggtttatcctagcccaacagagcttcttgcccctgaggcaactcctattagagctgctgattctttcattgagtcaaaggataaccttcagcgaggtaagtatgatacttcagtcatgttatgtagaaaaaccattgatatagccaccagaaatctcttaggtgaggaggctaataaagagactctggttcaaagaatctcaattctttacagtaaagggcttattactgagcagatgaaggattgggcccatattgtaagaattgattctaatggggccgtacattcagatgaggcgttttctaaagaagatgctgaagagcttatcggcttcgctgaagttttcctgctttatgcgttttctctgcccgcaatggtttctgccaaaaaacaaaagcagtag

SEQ ID NO: 166693 - DNA, 264 bp, Enterobacter cloacae
atgagcaagttaacaatgaagattggcgttcttaatccgcgctacgtgaattttgcagcatttcttcgccaagggcgtgttgatgtgctggcaaagcagcttgctgaacgccttgaaattgaagccaacagccagagtgaagccattgatttcgtgaagcaggttcttatcgatatcgccgctgacgacatgggaatgaaaaatatcgacgagccacgggaaagctggcgttcacagttcgatgtaaaaggagccgcccaatga

SEQ ID NO: 166694 - DNA, 348 bp, Enterobacter cloacae
atgagcagcatcgataaacatggattattaggcgtgccgaaacacgctaatcaacaccgcctttctcgtctgactatggaagtgcataccgatgaacttcggattatggcatcagcagtagagagctataccgacgagttgattgcagcgctggaagccgcagagaagcggattgctgagctggaggcagtaaagtgcaaattcagcgattcgaagttgctctcgttggcgaaggatatcgttgagaacatagttgatacgggtggttctgatccagagtatacgaagcaatacgtcgactggacctgcaaacgaatccgtatcgccgcagccggtaaaggagagtga

SEQ ID NO: 166695 - DNA, 450 bp, Enterobacter cloacae
atgagcactattaccagagaattcaccaaagagcagttaatcgagcacattaagggcagaaaggaatttgcggatgaatgcgcagctgattcgactttacatccggaacgcagagagtattacgaattaacagcggaagccctgcgtatcgcgctggcatcgctcgaagctgaggctgtgggttttattgtgaggaacaaggaaacggggcagtttggcagctggatgcactcaaaagctgattggtttaaggatgatggctatgaagtcctgaacgcttatatcgccccgccagcgccggtatctgtgcctgagcccattaagcgtaacgacgcggatggatggtggatgtacaaagggcgtcgagtcggtggaggctgcgcggagtggtacaaccgggctcttgatgactgccgcgccgccatgcttcagggtgccgatggcaaatga

SEQ ID NO: 166696 - DNA, 558 bp, Enterobacter cloacae
atggaaaatgataaaaaattggatttctcatcagaatttgatgagttgataaatgcagaaggcaggattacccctgaaatcctcaccgccgttaaccgttattttttgtacttctcgtttttcgagtctctacttcttaattgcgctggaggccaagggaaaagcgcgaaatacgctaagcgtcttttggaaatgaaggtagtggatctgagcgctctcaagtgtacttacgagtttttttcagagcgctacgtgaatgatagaagcaaatttgaaagcctttgcggagaacagcaccacaccactcaaaaggcgcgagatgaatatttttctaccatgcaagcgatgacaaccgatcctgaggctcagctagcggtgtgcttattcgtttgtttcaggttgaggaacaatctgttccatggacctaaatggcgttattttctcgaggggcaagaagctttacttctttccgcaggagatttaattcattcgattctttccaatgtccctaaacaggatggctgggcatttcagaacatactcgtctctaacgattag

SEQ ID NO: 166697 - DNA, 285 bp, Enterobacter cloacae
atgactgttttaatgattgcggtattggcattggctatagctatctggcacgagataaataggttcccagcaacaaacaaaagtctcttgcaactacaggcagaaatggctgaactcaatgatgaaaacaaagaactctcagaacaaataagccaactacgagaagagatgcaggatatgtcaaacacactcgaacgtttaaaagatccacagttctacgcattgcttgatgcgggtgatgggcatggcttgtatgaacttgaaaaatcacgtagtgaaaaataa

SEQ ID NO: 166698 - DNA, 516 bp, Enterobacter cloacae
atgagctctattacaccaaccgaggttggaaccttcgccctttctctggtggggccaattattatcggggttgcggcagctggtttcacggcttatttcgcattacgcagattttacagagagaagtggtgggagaagaaacacaccgcctatgggcaactgatagatattcttatagaaatgaagtcaatttatgcaatggcgtcaaatcattatcaacgtatctatgaggcggaaagaaggctgcaggatgtccccgattactattttgattggaacagacttcacgccctgaaaaaggaactgcgaaggtctttcatcctagccccaatatccttaagttctaacaccaaagaacttttagatgattttttttccttagatgctagcgcgcaggagtctatccatgaggaggggtatccagagcaagcagcatatggagacatggcgaaggacgttgaggacatcataaatcttatagttgaagatgctaagacagagttgaatttcaactga

SEQ ID NO: 166699 - DNA, 309 bp, Enterobacter cloacae
atgccacgcacagcagacatgcaagccgtctttgttgcgatagaggagccattaattcctctttctgcaagcatcgttgaaacgcaggaaggttatgatgtcattgggaaggcaacgctgcttaagcgcggagacatattgctcatctggttttgcggtcgtcagcagcatgcatactgggctggtgacgcactgatcaccgatgatggtcaggtcatcgaaggcgatgcgcttgatgacgtttgcctggttggtgtagttacgcataccattcatccagtttctacagacgaaaatcccttcatgtag

SEQ ID NO: 166700 - DNA, 177 bp, Enterobacter cloacae
atgatggaagtcagggaggcggtaaagcgtatcgttgacaaactggaaggagctacgcaaaagcgtgaattttgggggcatttttgggggcaaaatcgtgtttggggcgtgttctggggcgaaaaaatagccgctatttgccgctattccccagacataattttttcaagtaactga

SEQ ID NO: 166701 - DNA, 1248 bp, Enterobacter cloacae
atgctcatttatcaaggtggtaagaaaattagtgaggatgatttcctttctcatgtttattctttgtgccagttagataacgttggagttctgctaggtgcaggttcatctgtcggttgtggtggaaaaacgatgaaagatgtatggcaatcgtttaagcagaaccatagtaagctattaggtctactcattgaaaagtacttgttagtttcacaaattgattctgaaaatgatctagtcaatgttgagcttttgatagatgaagcaactaaatttctttcagtagcaaaaacgaaacgatgtgaggatgaagaaaatgaatttcgttcaatattgagtgctttgtataaagaggttactaaagctgcattactaactgatgagcagttcagagaaaagaatcaaggtaaaaaaaagcaattccaatatcacaaagaattgatttcaaaattaatatcaaacaggcagcccggtcaatctgctccagcgctctttacaacaaattatgatttggctttggagtgggcagcagaagatttaggcattcagttatttaatggtttttctggtttacacactcgacaattctatcctcaaaactttgatttggctttcagaaatgttaatgctaaaggagaagcaaggtttggacattatcacgcgtatctatataaattacatggctcgcttacttggtatcaagatgcaagcctgactgttcatgaaatcagctcctctcaagcatatgatacatatattaaagatattataagcaaagatgattattatcgcggtcaacatttgatttatcccggggcgaataaatatagccatactatcggtttcgtatatggagagatgtttcggagatttggagaatttctatcaaagccgcagacggctttgtttataaatgggtttggctttagtgattatcatataaacagaattatattaggtgcactgttaaatccctcatttcatgttgttatatattacccagatcttgaaaaagcaatagccagtgcagatatgggcatcgctactgaaggtgaaaaagctatcgttactttcaagaaaatgactttcaatcaagtgacggttataggaggaggtggtgaggcatacttcgatagttttgtgaaacatcttccatatcccgtgcttttcccaagggataatattgttgatgatctggtagaagcaatagctaaactatctaaaggagaaggtaatgtcccattttaa

SEQ ID NO: 166702 - DNA, 1812 bp, Enterobacter cloacae
atgtcccattttaaactctccgaaatttcggctatcggctatgtagttgggttggaaggggaaaggattaggataaatctccatgagggtttgcaaggcagattagcttcacaccgagagggtgtaagttctgtaacacaacctggagatcttattggatttgattctggtaatatattagttatcgccagagtgactgatatggcatttgttgaagcggataaagcgcataaagcaaacgttggcacatacgatttgactgatattcctttaaggcaaattatcgcttatgcaattggttttgttaaaagagagtctgacggttatatttttatatctgaggattggcgtttgccagcgttaggttcatcagccgttcctttaacttctgagttcttgaacacaatttatagtatcgataaagatgaactaggaaaagctattgagttgggtttagactctcgaactaaaactgtcaagatcttcgcaagtgttgataagttattaactcgacacttggcagttcttggcagcacaggttatgggaaatcaaatttcaatgctttgcttacaaggaaggttactgagaaatatccaaactcaagggttgttattttcgatatcaatggtgagtattcgcaagcttttactggtataccaaatgtcaagcacactatcctaggggaaggtaggattgatgaggtcctaaaaaaacctcaagagaaaggtgggttatatagtgaggagtattattgttataaaaaaatatcttatcagtcattgggttttgcaggtttaataaagctgttaaggccgagtgataaaacacaattaccagcgttgagaaacgcattgagtgcaataaatagaacgcattttagaggtaataatatttatctacaaaacaatgatggtgaacgttttaatttgtatgatgactgtcgcgatacagaccaaaataaactggctgaatggctaaacttactaaggcgcaggcgccttagtagaactgatgtgtggccgccgtttaaaagtttagccaacttagtcgctgagttcggatgtgtcgcagctgagcgcctcggtggtagcaagcgtgatgcatttggatttagtaatgtattaccacttgttaaaataatacaacagcttgcagaggatatgcgctttaaatctgttgttgatttagatggcggagatgatttggccgatggcgggattcactgggaaacggctatgaggaatgaggttgattacttctttggtaaggagaaaggagaggaaaataattggaatgttcatatagttaatatgaaaaatttagcgcaagatcatgcgccaatgttacttagtgcattgctagagatgtttgctgaagtgctgtttatgcgtggtcaggagcgatcatatccgacggtacttttattagaagaagcgcatcactacttacgtgacccttatgctgaaatagactcacaggtcaaagcgtatgagcgacttgcaaaagaaggtcgaaaattcaaatgctctttaattgtcagtactcaacggccctctgaactttctcctactgttttagcgatgtgctcgaactggttctcattacgtttaactaatgaaagagatttgcaagcgctaaagtacgcaatggaaagtggtaatgagcaaattttaaaacaaatatcaggtttgccaagaggtgatgccgttgcattcgggtcagcatttaatcttcccgtaagggtttccatataccaggctaaaccgggaccaaaatcatccgatgctgtgttttctgaagagtggaggtaa

SEQ ID NO: 166703 - DNA, 1116 bp, Enterobacter cloacae
atggcaaaaaatgatgcgtatagatttcagattcttcttgcttcagttcagcatggaaatgtgtattttgttactggtaaaaatggcacgggcaagtcgaggtttttttcttatgctaccaaggaatactttcagaagcagattgataaaggagttaacataaataaaataatctgcatgtcaggcaccatgcatgataaatacccaccggagatttataaaaaaagcatttctaatgaagatgtgatttatctcggtaataaagtaaataataacatggtctcagatacagcaccctttaggatgctttgtagatatattttaattaatgtttttgatagaaatcaggtttcagtatgtcgtagtgagctgatcttaaatgctttacaacgcttaaatttcgagagcacaataatattcaagtttcgttatgggaaaaatcggaaggcagaggttttttcttcagtttcttctgagctgaaagtcaaccttattgatgatgctaacagcttagatttaattggtaagtatcttcagcaccttgaggcaggtgatatattattatcagatgtaagtttttttcgtaatgatgttgcgtatggattggcagaactaagttcaggtgaaaagcaatatttattagctctcttaggtttgatttattgcggttgtccaagttgtattcttttttatgatgagccagaaaactctcttcatccatcgtggcaattaagtattgtaaatgatctttctattatagctgagaaactattccctaattctatattaatggttgctacacattctcctttgatcgcaagtagtgtgcgcaatgagagaacatatatttgtgacttcccatcaggtcagtcatggcagcgttctagtcttcatgggcaagcaagtgatacggttctgcgggagcagtttcatctatattcagcaagatcgccagatgtttatattatagttaataaatgtttggattttattgctaaaaatgaatcgcatactccagaattccttcggtatcaaaacgaattgaggggatatgatttatctctgcagtccgatgaccctttatccgaagtagttactacaattttgggattttaa

SEQ ID NO: 166704 - DNA, 678 bp, Enterobacter cloacae
atgacaatgctgaaaccggttgctcgggcagccttaaaaaggaaggaatataaagctaacattttaagctatttatcaggaaaaatagagtggtctgataaatctcttaagcctgttaaagatgcgataagaaaacttctgagagtagagcagaaagatatatgcccttattgccagagaattatcattcctgaaagacgaaatgttaatgagcatattgagcattttttagataagtcaaaagctaaatataaaatgttcgcattcaccgcttcaaatttgatactctcatgtcaaggttgcaatgttgaaaaaggcactaaagatctagttgataaagggagagctgctcctacgcaccttaatcgcgcagaagctccttttctatggcctcatccatattatgatgatatgcaagcttgtataaaaaaatcaccaggtcctgtttattctcctgtcgttggttctggtcgggaagtacaagctgcaaaattaattaaagatcttaagcttaacgatcttcagaatatagaaactcgtcatggacgccttgttgcgagacgcggagaattgctaaaaacattaaaggaattggcagagaaaaatgacttggaaagccaggggaaaatggctcctttgatcattgaaatggacggggttattagtgaattgagttga

SEQ ID NO: 166705 - DNA, 387 bp, Enterobacter cloacae
atggcaattgctgacctgaaccatctcgccgcgcctgatgtcgtggaagtgatggactatgaaaccatgctcgtagagcgtaaggcgacgctcgtatcgctttatcctgaggaacagcaggaggcaattgcgtgcacgctgacgctcgaatcagagccgattgtgactcttcttcaggaaaacacctaccgggaagttatctggcaacatcgcgtcaacgaggccgcgcgtgccgtcatgctggcttacgctgctgacagcgacctcgaccagattggcggaaattacaacgttgagcgcctacagacgacacgacgtttccgcccacgccagctcactgaccaccgtctgcgcattcagcaggccttagaggggctaattagttaa

SEQ ID NO: 166706 - DNA, 864 bp, Enterobacter cloacae
ttgaaggaatatactggagcggttttttttgtagatattcttggcgttggagctttaactcaaggtaaaatagaaattagtgaaaaggatttctcagcacataattttagatatgatagtaagttttcagagcatcagttttgcgcaaaattactattgaaatttaggagggtattaatatcttccacaacacatgtaaaaaacattaaagtggctcaactatctgattgtgcattcatctggtctgatgatccagatatagtagttaatgtcgcgagggatataatgtggaaaagtgtactaggtggacttctttgtaggggagggttggcaaatggacagatcgttgagcccgataaaataaacactaagttaggcatgtttatttgtggcggtgcagtaaccgacgcggtaagacttgaaggaacaggtaaaggtgcaagagtatttgtcaaacaagagttagtatcagagttaaaaaaaatcccatatacagcatttgttccaagaaagagtctaattgatttttccacaatagatgagtttaaatggtatcgatatcctgatgttatcaagtcggctaatgaaaacttaaataaaaaattagtcatgaatgagattgtaaaacttatagccatgcttaagcactctccaaaatatatatggaatgcgtcaaaccctttagggcgagttcaactagctagttcgattgatatcatctcatctgaaaccgaagtacttgcaggaaattcagatttaaaatttgattatgaaaatatggttgataatttaaataacagaagtgaagagagatataaaaaaatcctaatcaattatcataagttaattaaatcatcagtttga

SEQ ID NO: 166707 - DNA, 180 bp, Enterobacter cloacae
atgttttcttacattatgcttggaaccaacgacctgccacgcgccattacattctacgatccgatgatggagatgctggggtatccccgtggcggcaggaatgaggacgtcgcatggtggggcgttttcaacggtaataacacgacggcactgagggtctgcagaccttttgataaatag

SEQ ID NO: 166708 - DNA, 717 bp, Enterobacter cloacae
atgccggtcatgcagataggcacgctgcgcttgcaggttaatcgtaaagcgattaagaacctgcatatcaacgtcctgccgcccgacggcaaagtccgcgtttctgctccggaacacatgacggaaacggcgatacggatggctgtcgcttcccgctttcgctggatccgaaagcagcagcaggattttgccagacagccccgccaatccgagcgggagatggtcagcggagagtgccactacctttggggccgtaaatatcgcctttttgtgattgagcgtcagggacgtcatgagataaaagttgcaggaaacaataaactccagctttatattcagccgggaaccagtaatgaaaataaggagctggtattaaccgacttttatcggcatgaactgaagcggcaggttgctaaattgctgcccgaatggcaggccagaaccggtgtccccccaacgttctggggcatcaaaaagatgaaaaccttttggggtacctgcaataccaccacaaagcgaatctggctcaatctggagctggtcaagaagccaccggagtgtctggagtatattctggtgcatgaactggttcacctgctggagcgtcatcataacgagcgctttcggctgcatatggaccgcttgatccctaactggcgcgagcgccgggatttgctcaataagatgccgctggcgtttgaggcgtgggactattag

SEQ ID NO: 166709 - DNA, 3096 bp, Enterobacter cloacae
ttgagcactatcggccagcgcgaacgcgccacacagcagcgtttgattcagttttttgttaaggatttaggataccgctatctgggacgaagtgccgggtataccggggacagcaatatcgacacggacatactgagcgcatggctgaaacagcgcggcgtcagcgataccctgatcacccgcgtacttcggcaactggattccgccgccgcgctgggcgaaggtaaaaagctgtattacgccaataaagaggtctatcgcctgctgcgttacggcgtgaaggaaaaggatggcgcgggtgagcagaatcagaccgtgtggctgattgactgggcaaatcctgaagccaatgatttcgccatcgccgacgaggtgacggtcaaaggtgaatacagcaagcgcccggatctggtgctttacgttaacggcatcgcgctgggcgtgattgagcttaaacgctcgtctgtccacgttagcgaaggcatccggcagaatctcgataatcaaaagaaaacctttatccgcaatttctttaccaccatgcaactggtgatggcaggtaacgatacgcagggactgcgctacggcaccatcgaaacgccggaaaaatattatctggagtggaaagaagagaataccggcgtatacacgcataaactcgactttcatttaagccgcctttgcagtaaatcaaggctgctggatatcgtccataactacatggcctttgacgctggagtgaaaaaactctgtcgccataatcagttctttggcgtcgaggcggctaaacagcatattgcccgtcgtgaaggcgggattatctggcacacgcagggatcgggtaaaagcctgacgatggtctggctggcgaagtggatccgcgaaaacgtgccgaattcgcgcgtactgattgtgaccgaccgcaccgagctggatgaacagatagaaagcgtgtttatgggggtggatgaagagatttatcgcacctctagcggcaacgaccttattgcgacgctcaatcatcctaacccgtggctcatctgctcgctggtgcataagttcggtcggcgcagtgaagcagaagacactgcggcaaccgacgacttcatcaccgagttgcagcaatccctgaccaaaacgtttcgcgccaaaggcgatctgttcgtcttcgtcgatgagtgccaccgcacacagtccggcaaattacataacgcgatgaccgccattctgccggaagccctgtttatcggttttaccggaacgccactgatgaagaaagataaaaagaaatcagtggaggtgttcggcccctatatccacacttataagtttgatgaagcagtggccgacggcgtggtgctggatcttcgctatgaggcccgagatattgaccagtatctgacgtctgagaaaaaagtcgatgactggtttgaagccaaaacgcgcggcctgtcgaatttagccaagacccagcttaagcaaaaatggggctcaatgcagaaactgctgtccagcaagtcgcggctggagcagatcgttaacgatattctgctggatatggatacccgtccacgcctgatggacggacgcggcaacgccatgctggtatgcagcagcgtgtatcaggcctgtaaggtttacgaaatgttcagccagaccgatctggcgggaaaagtggcgattgtgaccagcttccgccccgatgcggccagtatcaaaggtgaagaaaccggcgcaggcctgaccgagaaactgtttaaattttcgacctatcgcaaaatgctggccgactattttgaacaaagcgaagagaaggttgccggacgtatctccgagtttgaacgggacgttaagcagcgctttattaatgaaccgggacaaatgcgtctgcttatcgtggtggataagctgcttaccggctttgacgcgccgtccgccacctatctttatatcgataaaaccatgacagaccatacgctgtttcaggcgatttgtcgggtaaaccggctggacggggaagataaagaatacggctatattatcgattataaagatctgttccgctctctggataaagcgataaccgattacaccacgggcgcgtttgatgattacgatcgggatgatgttgatggcctgctgaaaaatcgtctggagcaggcaaagctggatctcgacagcgcgctggaggtggttcgcagcctgtgcgaacccgtcaaggcaccgcgcgatttaccggactatcagcactatttctgcggtcagtcgggggaaaatcagacgatattaggcgaaaaagaggcgctgcgcctgtcgttctatcagaatgtcgcccgcctgctacgcgcttacgccaacctggcaaatgaaatgcaggaagcgggttataccgatgaggaagtggaaagcatccgcgccgaagtcgctaaattcgagagactgcgctacgacattaagctgaccagcggcgatctgctggacatgaagcgctttgaacccgccatgcgccacctgttggatatgtacgttcgcgccgacggtagcgaagtactgatggatttcgaagagttaagcttgattgagctgattgttgaaaaaggcgcagcagcaaccgcggctctgccggacgagatccgcaacaatcaggatgcgatggcggaaaccatcgaaaacaacgtgcgtaaaactatcgtggatgaaaacccggttaacccgaaatactacgggcgcatgtcgcttttgctggatgaactgattacccttcgccgccagaatgcgcttgattatcagcagtacctggagcgtatccgggatttgagcaagcaggtcatccgcccggaacaaaccaacggagcatcctatcctgaaacaatggatacacaggcaaagcgtgcgttttatgataacttcggtcatgacgaggtgctggcaacccgtattgatacgacaatccgctataccaaaaaagcggagtggattggcgatcgttttaaggaacgagagcttgcccgtgcactacgcgaagaaaccgccagttataacgtcaatattgatgacgttcttgagcttgcccgcaagcaaaaggaataccactga

SEQ ID NO: 166710 - DNA, 1068 bp, Enterobacter cloacae
atgatgacatatacacaaggcaatttactggacgcgcccgtggaagcactggtgaatacggtgaataccgtcggtgtcatgggtaaaggcatcgcgctgatgttcaaagagcgcttccccgacaatatgaaagcctatgccctcgcctgcaaacaaaagcaggtcatgaccggcaagatgtttattacagaaaccggcgaactaatggggccgcgctggatcgtcaacttccccaccaagcaacactggcgcgccgactcccgcatggagtggattgaagacggcttgcaggacttacgtcgctttttgatcgaagagaacgtgcggtccatcgctattcccccgctgggtgcgggcaacggcggactgaactggccggacgtccggacgcgaattgaatctgcgctgggcgaccttcaggacacagaaatcctgatttatgagcccaccgaaaaataccagaatgtcgccaagagcaccggtgtaaaaaagctcacccccgctagagcgatgatcgctgaactggtgcgccgctactgggtgctgggcatggagtgcagcctgctggaaattcagaagctggcatggctgttacaacgcgccattgaacagcatcagcaggaagacgtgctaaaactacggtttgaggcgcactattacggcccctatgcccccaacctgaaccatctgcttaacgcgctggatggcacttatctgaaagccgagaaacgcatcccggacagccaaccgctggacgtgatctggtttaacgatcgggaaaaagaacacgtcaacctctggcttaacagcgaagccaaagagtggttaccggcgcttgagcaggtcagccagttgattgacggttttgaatcgccgtttggtctggagctgctggcgaccgttgactggctgctgactcggggagaatgccagcccacgctggattcagtgaaagaggggctacaccagtggcctgccggggaacgctgggccaaccgcaagatgaagctctttgacgataaaaatctgcaattcgccataaaccgcgtgatggagttccattgctga

SEQ ID NO: 166711 - DNA, 657 bp, Enterobacter cloacae
atggcttatgattacagcgctaatctcaacccggaaaaagccctgatctggcgcattgtccatcgggacaatatcccgtggatactggacaacggcctgcactgcggcaacagcccggtgcaggccgcaaactggatcaatatcggcaacccggagcttatcgacaaacgcgccgggcatccggtgcctgccgggacgggcgggacgctgcatgactatgtgccgttttactttacccccttctcaccgatgctgatgaatatccacagtggacgcggcggcattaagcaacgtcccaacgaagaaatcgtcattctggtcagcagcctgcgacacgtggctacacaaaacgtccccttcgtgtttaccgacagccacgcctactataatctggcgaattactataccgatctaaacaatctgcaccggatcgactggcccattttacaggcgcgggatttccgtcgcgatcaggacgatcttgccaagtttgaacgctatcaggccgaggcgttaatctggcagcactgccccatcacgctgctggtcgggatgatttgttacaacgatggcgtcaggttacaattagagcaatggctgtcgcaacgcaatctgacaatgcccgttcacgcacgggccgggtggtacttctcatga

SEQ ID NO: 166712 - DNA, 1362 bp, Enterobacter cloacae
atggtggatttaatggtgagtgagcagcagtcgggtacggcggggaaaggcgtgcctgcggggtttaagttgactgaggtgggggtgattccggaggattggacgatcgaggcattgtctgcaattactgagcctagtaggcctatttcatatggaattgtccaaactggtcctgcggtgatcaatggaattccgtgtattagagtcgtcgatatatcaaatggaaaaattcaaaccggtaatttaataacgacatcggggaaaattagtgaatcttatcgcagaaccatacttcaagaaggcgatatagttattcctcttcgtggcaaggttggcgagatagctattgttgataggaatatccgaggagcaaaccttacacgaggtgtagcgctaattgctttaaaagatgaatattatccacaatatgtgagacagtatttatccagtcgcgagtcagcggatagactactagcctctatgaacggttcggctcttcaggaaataactatcgcaacattaaggcgctttcctcttgctgtaccgcgttctataaaagaacaaatcgctatcgcctgtgtactgtctgataccgataagttaattaatacacttgagcaattcatcaccaaaaaacaggccatcaaaaccgccaccatgcagaaattactgacggggaaaacccgcttgccgcagtttacgttaagagccgatgggacggttaaggggtataaaaagagtgagttgggggaaattcctgaggattggacaattacactactgaatgatgttatagactcctgttcaagtggtgcaacaccatatcgtggtatatctgaatattacaaagggaataatcgttggatcaccagtggtgagctcaattattgtgttattaatgacacgatagagaaaattagtgacagtgccattaaagatacaaatctgaaaattcatccagcaggaacatttttgatggcgataacaggccttgaagccgcaggaacacgcggcgcttgcggaattgtcggtaaaccttctgctacaaatcagtcatgtatggctatctatcccaataataagctggatagtaactatctttatcactggtatgtttacaatggtgataccctggcatttaaatactgtcaggggacaaaacaattaagctatacggctggtttaatcagaaaaataccgttgttcttaccaactgataaaaaagaacaaaccgccattgccgccatcctctccgatatggacaaggacattcagaccctgcaacagcgtctggacaaaacccgccagctaaaacaggggatgatgcaggaactgttaaccgggaagacccgcttaatatag

SEQ ID NO: 166713 - DNA, 2445 bp, Enterobacter cloacae
atggctatcaagaaaaccgaactctactcctccctgtgggcaagctgcgacgagctgcgcggcgggatggatgccagccagtacaaggactatgtgctgaccctgctgtttatgaagtatgtgtccgacaaatataaaggcgatcctgacggtattattctaatcccgaaaggggccagctttgacgatatggtcgcgctgaagaacgataaagaaatcggcgataaaattaacaaaatcatccgcaagctggcggaagagaacgatttgaaaggcgttattgacgaggccgactttaacgacgaagacaagcttggtaaaggcaaggagatgattgaccgcctgacgaagctagtcggtatcttcgaggggctggatctgtccagcaaccgggccgatggcgatgatctgctgggcgatgcctatgagtacctgatgcgccacttcgccaccgaatccggtaaaagcaagggacaattttatactcctgcagaggtgtcacgcattctggcgaaggtgatcagcattacgcctgacacaccgcaggatgccactgtatacgaccccacctgcggttccggctctctgctactgaaagtcagcgacgaaacgcgacgcggactatcgatcttcgggcaggagatggacaacgccaccagcgcactagcgcggatgaacatgatcctgcacaacaatgccaccgctaaaatctggcagggtaataccctaagcgatccgcagtggaaagaagccaacggcaagctgaaagccttcgatttcgccgtggccaacccgccgttttccaataaaaactggaccagcggactggatccgaagaaagatccatttgaacgtttcgtctggggcgttccgccggagaaaaatggcgattacgcctttctgctgcacattatcaagagcctgaaaagcaccggtaaaggggcggtgatcctgccgcacggcgtgctgttccgcggcaacgccgaggcgaacatccgtgaaaacctgatcaagcagggctatatcaagggcattatcggcttaccggccaatctgttttacggcaccggcatcccggcgtgcattatcgtgattgataaggagcacgcccacagccgcaaaggcatttttatgatcgacgccagccggggctttatcaaggacggcaacaagaaccgcctgcgcagccgggatattcaccgcatcgtggacgtgtttaaccaccagcgcacggtgtccggctacagccggatggtgccgttaagtgaaattgccagcgaacaaaataattacaacctgaatatcccccgctatatcgacggtggcgaaccggaagatctgcacgatctgaccgcccacttacagggcggtattccggcacgcgatgttgatgccctacaagattactggcgagtcttccctgccctgcgcgacgtgctgtttaccgacgatcgccccggctactgtcgggcacaggtagaggcacagcaggtgaagccaaccattctggcacatcaggaatttaaggattttgccacccgcagcctgctgccgtttaaggcatgggtgaaagaggcggcgctggcagatattggcaaaggtgataaaccgaaggaactgatccgcgatatcagcgagatgctgctggcgcagtatgccaacagcgaactgctgaataaatacagcgtgtaccagatcctgatggactactgggccgacgccatgcaggacgatgtatacgtgattatgcaggaaggctggaaagccgccgcgcaaattcgcgaactccagccggtgaaaggcaaggacggcaaaaacgtctggaaagaagcgcacgattttgagtttgacaagcggcgttacagggctgatgtgctgccccgttcactggtggaaattcgctgtttcccggaactactggacgcgctgaaccgcgcccaggaacgcagcgaagaagccagccgtcagttagccgagtttatcgaagagcaggccggggaagacgatctgctggccgaggcgaagaacgataaggacaaggtgacgcaaaagctggtcaatgctcgcctgacaaaattgaagaaaaccactgccgacccggatgagctgacggcgctgacccgctgtctggctctgattaaagcagaggcgaatgcaaaaaaagcgcagaaaacagcgcaggaagcactggatcgcgcggtatttaaacattaccccgcactggatgaagcggcgatcaagtcgctggtagtacaggacaaatggctggcgacgttgcaggccgggattaaggcggagattgaacgcatcacccagcaactggcggagcgcgtgaaagagctggaagagcgctatgccgagccgctaccagcgctggaagcgtccgttgaggcgttgagcgagaaggtggccgggcatttgcgggcaatggggctggtgtggtga

SEQ ID NO: 166714 - DNA, 240 bp, Enterobacter cloacae
atgaatgaaaatgaaatataccatcgtatccagcaagcgctatccggagcaccacgtaaccaatacaccgtcgagctgcatctacaaatgattaaatatgccgacgaactggaacacattacggcaaaagccttttgcgaaggcaccggtctgagccagagtctcggtaccgaattcagcaaaatgcgtaacttaacccgtcggctgaaagccgctggactgaacaccgatctgctgtaa

SEQ ID NO: 166715 - DNA, 147 bp, Enterobacter cloacae
atgaatactttcgaaaagggctcagacctgctgtcaaaacgtatcttcgccttgagtggtcttgttgtggctctggcaaatatcgggcttcccccgttacttgttatcccagcgagcattgttctggtgtatatgctacgtagatga

SEQ ID NO: 166716 - DNA, 777 bp, Enterobacter cloacae
atgactactaagtttgatcaattaaaaaaagagttagccgatttggataaaatgggcactcagttactttattcgatgtataaagaacaagaccagcttgatgaagaaagtacaaaaaaaattatagaagctggatgggaatttgtgaatgtccgccaagaatatcaaaaatggtatacaaaagcttaccgtgtaatatctcaagttgttccagaaaggaaaaatgaatttgagatgctctacaaggctgatccaaagagaaaagagttaacctacgccaattatactatctctgattatatgataaaaattgttaatggtgccagaactcgcggaccaaaagatgcaattactaaaatggaaatccagtcaaaaatagttaatgcagccagagaaaggtttaccagcacattatttgatataaaagaaattcttcaggcagacatttttgattcagagcttgaaaccgctaaagaattgaataaaaagggctttacacgagccgcaggtgctgtagccggtgtggttttagagaaacatttagctcatgtttgctcgactcaccaaataaaaattaaaaagagcaacccctctatatcagaatataatcagtcactcaaagacaatgatataacagacactgctacttggagattcatacaacatttaggtgacataagaaatttatgtgatcatcacaaagatcgagaacccaagaaagaagaagttgatgaatatatcattggcataatgaaaatatccaaaaccgtaaattaa

SEQ ID NO: 166717 - DNA, 477 bp, Enterobacter cloacae
atggaactgagcaggatgcaggttaacgtctcacagctggcggagctggtgggcatgaatcgaaatcttgttgcgcgccggctgcatgagctggaactggtggcaggcaacggggaaaacctgaaagtatacgaacttggcccggcgcttcaggccttgctgacgccgtctgtgaaagagaacggcgaaatgtcgccgcaggacagaaaagcctggtatcagtcggagaatgaaaggttgagatttgaagcagcttcacgggaactgcttcctgttgatgaggtggcccgcgaatatgcctcgcttgctaaggcagtcgttatggtgctggagaccctcccagatatccttgaacgtgactgtgctcttaccccgacagccgtaacccgagtgcaggaaataattgacgatctgcgcgatgaaatggcccgcaaagttgctgattcagagaatgaagaaatctgtcccgcagtctag

SEQ ID NO: 166718 - DNA, 1821 bp, Enterobacter cloacae
atggaaatttcactgtatgaaccaatcgagggcatgacggcgaagcgcttccgttactccctgcaagttgcatccggtccggtgactgtcgcgatcaacagcggcggcggaaatgttacggacggcatggcgatttttaacgctctgagaacctacaaaggccatacggtagcccgtattgatggcatcgcggcatctatggccactatcgttgcgctgggtgcaaaacgcgtggccatggcggacaacggctggtggatgatgcataacccgtggggcgtgatggcgggtgaggctgacgatatgcaacgtcaggctggcgtgctggagaagatcggcaacaccatgcttgccacctacgttgcgaaatccggtctgcctgaggctgaagttaaagcgatgatggatgcagagacctggctgacggcggctgaagcaaaagaaaagggatttgttgacgaaatctacccggcagaaggactgatgtttgccatggcgccgggctgtgattcgctggtggcgaaatactcccggacgccggagcagctgcgcgaggcgatgaaaaccagcagccagccggaaagccgggagcagaaagcagaaacgcttttctctgcgtttgcgtcacatgagtgggtggccggtattcgtgctgagtttgtgggcggctccatcactgaggagcaggctcgtcagaaaattttaacgagtctggcagcggggatcactcccagcgccgggccaggagcgatagacgtgtattcaggtaacggaaacattgtaggggattcggtaaaagcggctctgctggcgcgtaccgggctagcgcaggcagagaaggacaatcgctataacggttacaccctgcgcgaactggcgcgcgcttcgctggttgatcgcggcgtgagtggtattccgggtaatctgctgggtatggtgggtatggcgtttacccacagcactagtgactttggtggcatcctggcggacgtggcaaataaatccctgctgaaaggctgggagacatcgcctgaaacattccagcagtggacgaaaagagggacgttgcctgatttcaaagtctcgcaccgtgctgggctggatggtttcaaatcgctgcgtgaggtgcgccccgggtctgaatataaatacgcgacaacctcagaccgtagtgagccgattgcactggcgacctacggcgagcttttcagtatcgaccgtcaggcgatcattaacgacgacatgagtgcgttaaccagtattccgcaaaaaatgggggcggccgccagccgtacagttggggatctggtttatgccgtgctgctgggaaatccaaaaatgggcgacgacaaggccattttcgatgcagcacataataacctgctaaaaattgctctcgatattcctagcctcagtgcagggcgtaaagcgatgcgcatgcagaaaaacggcgctggtgctgtactgaacatcccgcctcgcttcctgctggttccggttgagctggaagacaaagccaaccagcttattcgctctacatcgttacctgaggcgcagaacagcggcgtcttcaacccgtataacgatgcgctggcggtcatcaccgagccgcggctggacgctgaaagccttaaagcctggtacatgctcgcaggacagggtgaagacactatcgaggtggcgtatctggacggcatcgacacgccgtatcttgaacagcagcagggctttaccgtggacggcgtgactttcaaggtgcgcattgatgctggtgtcgctccactcgactggcgcggcatggtgaagtcagagggcgcgtaa

SEQ ID NO: 166719 - DNA, 156 bp, Enterobacter cloacae
gtgactaaacagaaagcaatgtcggtttatatcgatgatgaaacagccctggcgcttaaccgcctgcgtgaggaaattcgccagaagaacgaaagcgacggcctcccggcgcagacgcccacgatcggctggctgggcccgtactctgctgcgtga

SEQ ID NO: 166720 - DNA, 996 bp, Enterobacter cloacae
atggtaggaaaaagaagatatatatccgaattctctgttggcataacgtcaaagggatggttgatgtttactcctgatcaactacatgccaaaggaaacatgaaaaaggaattccaggatattgccgataatagccatatatatcttatttgtaaaaggccaaaggctacatttagcaacgagcagccagtaatacaagatggactggtttctggtaaagtaataagtcgcgtagatggggaggaggtagtttcagagtattctttcccttttagttttcaagcaaacgaagtatctttaaaagttgctccatatccgcatcgcaaacttcagaccttaaaatctgatggttcgtgggaaaggtactggccgagtgatatgttggcgtttcaaactggaaatgaaatctatcataatttagaagttttatatgtaggtcaggcatttgcagatgggcgcagaacagcaatagaacgtttaaaaagtcattcgacattgcagaaaatcctcgcagaaacaatggatgaatatccagacgatcaaatttttattttcaatttggtctatgacgattatatgcttttgacatcatttgacggacgagataaaaatagtattgacggggatgaggacaacgctcgcttaaagagcattattgacaatcatctgtctaaaaaggaagtggtatgtttagctgaggcaggtttgataagatattttcagcccaggtacaatgagatttacagagagtcatttccagcctcagaccagaaaatactagcaggttgttttgatttggacttttctggtttgacagtagagttagaattaagtgaatcccctctgaaattatattccgaaagagttaaattaaaatatcatcatatagctgcatttaacctggctgatgaagaagaaagattgggtttcttcagcttgagtgatggaaaagaggttcgaagcatccttgacgatgtcatcaagatgaaaaggtga

SEQ ID NO: 166721 - DNA, 177 bp, Enterobacter cloacae
atgacgctgttctcgaggagagaggaaacgaatttagttaatagtcgttacaatttcagtgcggtagcacaaaaaaacgcatgctacgtaaagaaaggtaaaaaaaaaccgaatgccaggcattcggtagaattagggataaacagacattcaaatctgaatgacggtaataaataa

SEQ ID NO: 166722 - DNA, 1077 bp, Enterobacter cloacae
atgagtacacagcaagcaactgaagtcatgaaccaaacgacatcaacattcgatcaggctgcagttgaaaagattttagatgctctggagcagaccggagaattggcatacttcgcacgggttgcttcaccatatggctttcagacaaccggtcgctgggcttccaccaagcaaaacatacttacaacgttatcaaatcctgatgttacaaataagcttgcaactgagaaaacgttgaaaatgatttttttaagaattataacatctattaatcatttttattcggttgattatattaaaggcggtgatgttagcggcatctcgaagtttttggggttttcaaactttgaaaaagtcttcagtaatgcgtttcccttaaagcttgatgaaagtaatggtttaccgccatctcaagggaattttattactgccgttgaggatatgggagacggaatagctgttattttttcttacgtattaatgaagaaaattagtggtagaagtaaactacgcacgaatcaatatccagtacagtatttcaataccgtctttattcctaacgacttgagtcgtgtagagtatagaattgatcgtaagctaggtcgtcgtgcatgtgaccgagctttagtcgatcttcgaatgagattcatcgagtttctgtctgaaaataatgtaagtttgcaagttgaatcagttaacttttttaaagctatagataatatttatcaggataaaagttttggacgtttagtccaggtagatttcattgagccgaagagtgatgaagatgcaactttacgttgtagaacaaaacctagctacgatgctcgtaatagacatgttgtagaaacaaaagatggggacctttctgcaattgatgggttgagagttcgtggggttgctgttcgatttgattataaaatcggtgatgaacacttaactaatgaaataggttttgacccaaataaaaaggattgggctgaaaaggacttttgtgatacattttatttttctaaaatgtcagaatatatgtcacattttggggtgataaatgacatccttaaaagagcgatataa

SEQ ID NO: 166723 - DNA, 588 bp, Enterobacter cloacae
atggacactgaactgatatctggcttggttggtgctgtcataggtggtttattcacactatggggaacaatgatcgaaggtagacgacagcaaagagaaagcgatgagcaagctaaacttagtaagctaaatgtactgattgggatcaaggctgagataacatctttaaatgatgtatatagtaaacgaatggtaaaaactatcgagtcttacgactgcactgttcccttcgaccacttatttccgataacacaaaataacttctcattttacgaaagtaatgcaactgaattggcatcagtggatgagaaaactttgaaagctgttgtgggattttatgcgagcgcaaggagtttggttgattcttatcaaatgaataatgttcttattgtggagttaaaacgacaacaaactgtatatctcgaaacacaatcagatgtacacaaagcgagctttcataattcatgggcaacctgtgtaggatacggtaaaggattaaaagaaatccacaacgaagtcatgaacaagattactgattgccttggtgtgaatcgccacgggtttaacagacacctcagagtcatttaa

SEQ ID NO: 166724 - DNA, 159 bp, Enterobacter cloacae
atgtcaaaagctaaccaaaaagcagcaacgaagcgcaacaaccgaaagatccacgctcgtaaatttctggctacgccggagggaaaagcctggcttgctaagaagcaacaggaagaagcagaggtcaaaatagtgcgagcggctaacgctttgttttga

SEQ ID NO: 166725 - DNA, 210 bp, Enterobacter cloacae
atgagaaacatcgcactgcgtcataagtttcctcctttgctcccgcctcgcagcctgaaaaaaatagtgccgggagtcgttctggcgtttctgaccaccccgacactggcggcagaacagaaccagggtaacgtgttgaccctggggggaggtgtggatattacgcctcgctattctggttcggataaaaccgcgccactacagcattag

SEQ ID NO: 166726 - DNA, 615 bp, Enterobacter cloacae
atgacacatagcgcactaaacactttgattcaacaaggcgcgggtgaaaacgcaattcaaacactcattaaggcaaatctgaacctcttgggtgaagcgtgtacaccatcgtcgatctcgggtgagtacatcgcgttttcggaatatccaataatcactggaaaaaccgattttgtcgtctttacagatcgttcgagaatggtagttgtaataatcgaagtaaagggtgccgattttaatttcctcaatgcagatggctcagtaaatgccaatattaacgaagcagccaggcaggttagggaacgttatcgcgcaatcgagaacaactacgagctattccgcagggggtttcacgatattcgtcgcgatgtcgaatctggaaaaactatctacaactcttaccttgggccgaacaaatttctccatgttgatccagacaaggagatttggcttaagggcatggtaattggtggaagaacaacagatgaatatttggtgagcaaagagcggcattccttagagagggagtcactaagaatctcattcgacacatgggacagttggagcaagaacaacggaaaatatggcggcattctaagactccataatgtttaa

SEQ ID NO: 166727 - DNA, 240 bp, Enterobacter cloacae
gtgaatcgcctgaaggtactcctgctccgagtaatacccatcctggttactgtcaatcaactccagcaggcgcttgtagttgtacttattgagtgcgtgggtggtccgggtttcatcctgtgccgctttatacaactgctccagaatccccttcaccacgttatccggttgttttatgccatcaatcaggtcaaaactctccggtgccttattcagcgtcacaaacccgagctcgcctaa

SEQ ID NO: 166728 - DNA, 1680 bp, Enterobacter cloacae
atgcgtagaacagtcatcattccggtcgtcctccacgccctggtagccgttgccacgttgctgtggttgctgtggtatttcatcccgacaggcaacgtttttaaaggcctggccactctgctgatcctccttctggcaggctggactgtttttaaaaactgtcggagtgaagagcacacatctgacgttaccctcccggctgctgaactgccattactcgacacccagagccccgttgtactggtgtgtggtgacatgctggaagcgttgttccagggaggccctctgcgtaaaacagcccagggatggtggcttcgggccggtgacgtcagccggttaactgacgttgtccgcagcatacagaaacaattccctcgacaggttggtcagctttcggtgatgtatcgctgcctgccagatgaacatcaggatgaagcggtactgcgctccacactgaaaacgctccgccagcagtgtaaacaaattaaatccctgacgggtttcacactgccggtggtggtgaatgccgaattttccgggcccgaaacgccgtggatcatcgttcgcggtgacaagccgatagtctgtccggttaatgattcgcctcaggcgtttattgactggcagcaggcggaagacaatatcctgctactgccaactgtcagccaggcattttcctttatccgtaatacgctgactgatgagctagagaaaccggaccggctaacgccgcctgtacgtgttttttccgtggccatgcgcctcggcgtggtcaatcctgaggctcagtcagtctggtccacctggctttgtgcccggacctgcttgcagttttcccgccagcccggtcagtcagttctggcaacccttttcccggatgccgttctgccacttctggcaccttttgcatcaaccgttcagggggggcagcgtacccgccgcctggtgctgctgatgtggctgtgcgcgctgaccgcattgggtatttccgcgctcaataatcgtgacctcatccgtcagatgagtgccgatttacagcgctggaacgcgatcccgatgaatcactaccgtcctaaagcggactcgctggctgctctgaaacaggatgcactcctgcttgaacgctggcaacggcagggagagcctttacgttacagcctgggctattatccgggacaacgcctgtggctggccttgcagcaggccattgatacctggacacctccacctgcccctgaaccaaaaccggtcccgaaaatagttcgtctcgatagcatgtcgcttttcgattccggcaaatcagcgctcaaagaggggtcaaccaaaatactcgtcaacgcgctggtggggatcaaagccaaaccgggctggctgatcgtggtcagcggccacacagacaataccggtagcatacagctcaatcagaccttgtctttacaacgcgctgaagccgtccgtaactggatgcgtgataccggggacgtcccggagagttgctttgccgttcagggctacggcaacagccgaccgattgcttcaaacgatacgcctgatggccgtgcgcataaccggcgtgtcgagatcagtctggtaccgcaggctgacgcctgtcgtctgccaggctcaaaacatgcgtcacaggatgtacgtgacgtttcaactcaagaaatggagaagtaa

SEQ ID NO: 166729 - DNA, 162 bp, Enterobacter cloacae
atgatggggattatgccgagtaatgttggggggtttggggatgttgataaggtaagcttaatatttgtaaaaaatgaattaaaaccattacaaaagagaatgttagaattaaatacatggctcggcactaacgttatttcatttgaaaattacatcctctaa

SEQ ID NO: 166730 - DNA, 645 bp, Enterobacter cloacae
atgggtgtgctttatgattataatttcatgttaaacgctaatgagttatattttaaggcaagttatgatcctcaacaatatggttttttatatcaaaatagctttgcagataaagtcgaatttatacatgttataagtggtggcttatcatctgttgctcaagcaattaataattcaggaaatagcacgttaagtgatggcgtaattcttgctttgactggtgctttgagtgcttttgcttttaatttatttcagaaattactggacgctaagtctgttcgtttgactaagtccggtgatgcaatgttattgctcataaaagaatttgaagagattgctgtgagatattgggttagagggcataattcctcaaatgatgatgcggagagcaatacatacgaccaaataaatatcaaggctatgcttatgactcttgacaaaaatgtgaatttgatgcttgagaatttaccattcaaaaataaggagagtaataagcagaaattaagtgcattctcttctgatgtatatgatttggcatcaggtgacgattttgagtcggaaataaggcctcccaataaaggaaaggcctttgcaatatcaaaaagatgcagtgaggcgaaggctatcattcttggattgatttag

SEQ ID NO: 166731 - DNA, 405 bp, Enterobacter cloacae
atgaaaaatttagaaatcaacattgggaaaacgttttcttctactccctcagggcgtttttatactgatatgactgatagtagcggtgagcaatttagagaagaattgttatggccagcattgcaacaacttgaaacaaatcaaaaggttaaaatcattttggatgatgatgttgaaggctatggttcttcttttttagttgaaggctttgcaggaattgttaaatatggatatatggataaagaagttcttttagaaaagcttgagctgtttcaagttgatccggattttttgttgttcaaaaagaaaattattcaatacattaatgaggctgtgtttaattccaaacaatatgagtcaactaagccagagtatttggaaaaattaaaaaaacgtaaggggtaa

SEQ ID NO: 166732 - DNA, 1149 bp, Enterobacter cloacae
atgaagaagctaactctgcggcagaggacgagggatgttaaacgctcaataatgtttcgtcgcgggcaaaccggaataaggacaaaaggtaaaagtttttactatgaagttgaatggagaaaggctaattattggatcgaggagcaatcgagccaaggattagatgtacaatttgtcagcaagaagaaaaaaggattaattcttacgttgccgcctgttatggatttttcagataattatgctgtaactgttcagcatattaacgcaattaggatgttatccgagaggaaaggccttcctaatccaggctatcagttagcttctgttaatttttgtaacttgaagaaaatttcaacttctgccgctcttgtacttacagcggaattatctaaatgggatgacgcattaaggcaacgtttaacgccaaaattagctggttgggatagaaatatacttcgaaatttttatgagctaggtttttttgacttattcaagaaaagtagaaatttaaaattagattttgggaatgaatcatcgactaataaagggaagcgatttgtaaaatatctcaaaggcaagtgtggagaagttgctaaaactaaagttttaaaaggtgaaataattgatttggttggcgagtcaatagaaaagtggacttttctacacagcggtttgagtgaggctatcacaaatgtttcacatcacgcttaccctattgaatctggatataaagaatatgataaaaattggtatcttacggggtcatataatattgaaagtaaagagcttaaaatagtattttacgatcaaggggtaggtattcctaaaactcttcctgcttctaaagtatgggaaaaagcgctaacagtgctagccaaaatttcatcgctagagcgttatcgagatgaggaacttctgaaagcagctgttgaacttgacagaacaagtacagaggaagatgaccgaggcaaggggttgcaagatcttcttgagttcattaaccaacgtgaaaatggttacttatcaataatgagtcttaaaggtctttataaacactctatgaatcaaggtattgccaagattaaaactgaaagttttgcttcaccgatttgtggtacacttataatctggagtgtatctctcgattga

SEQ ID NO: 166733 - DNA, 573 bp, Enterobacter cloacae
atggacttacgcaaaggcggaaaagcagcaattgatcgcatgttggaagcatatggatatacgacaaagcaggcgctgtgtgatcagttgggtatcagtagtagcactttggcaaatcgctatctgagggacacattcccagcagattacgtgattcaatgcgcattagagacaggtgtctccttggaatggttagtatccggcgaaggttcaaaaaagcctggttccccgtcgtctaatagcttaaaggaattaaaagcatataaattggaaaatggtgttcttgttgaggatggaactattacttttgactataaaatattaccggtagacactaaaaaccttcatgtgattagagatgcaaaggtaattcatttcgttgattatgctaatgctagccttagggatggagttttgttaatatcgattgatgaaaacttatcttttaggaaactctttcgcatgcctgcaggtcaattaaaaatcgaaaataaccttactagctttataagtaatattaatgatatttcattgaagggtcgtgttgtatcgactatcgaacttcaaatataa

SEQ ID NO: 166734 - DNA, 1443 bp, Enterobacter cloacae
gtggcaaaaataacatctttaataaatttatcttcgttaaatggtatttccagtgaactgctagactttttaggtgttactgatgttattcttaacgctgatacagctctatttattgatccactactgttgagcgaaagtcggcataaattaataaacgataatgccagtaaaaaatacatacaaaaatttcagcgaatcaaaaaatttctccatgcatctacaaaagtaaatgatgcagcttggaaagcggccaaaaaggaattccatttccctgaggttagctatacttgcttaggttacagcagtactattaatggctccgcatggggagaacaattaattgaatcaacaataaatactgctaaggaaattattgttcttggtgttacagatgatgatttcttcatgggactttcgttattcgaagaaggcattggccctgttcgaatcagtgacatgactactaatatcatctttgacgaacttatcgagttcacattgctttcgaatgaaagtctcaatcttcctactaagaagtttactatcaaaaaaacagggaaggaatttgtatcattaattaacccaacgaacgacggaccactaatattagttccaagtgatattgtaagatcattacccatagttactgactggagtgatatcgggattgccgcaaaacaaacaaatgatctccgagatcgacttaacagaagtgtaggaggcatttggaccacaatgacccggatggaaaaagataatgctcgagcactagctttaaaaagcaaggaagcatttgaggatatattagaacttataagaactgtcgataaagttccatatgatatcaaaacagataaaaatggtgaatttttctggcgtgatatagtaaaaaaagcaactattgatcaccctctagacttgaatgattttaaaaaagaccttactgaagaggaatttatcgaactcgttatgaaaataataaacgagtttaaggatctagttgaaaacaagggtatttggaaggaactttgggcagaagatggcaaaccgaggcgggaaaaagcagttcagcggttattatttactgttgcgtactcttattgcaaagctaataatttagatctttctccagaaagcgattcgggtaatgggcctgtcgatttcaagatatctaaggggtttacaaaaaaaatagtggtcgaagttaaactttcaactaactcatcattaccacatggctatgaaaaacaattagagatttacaagaaaggcgacgatacgaacctcggtatatttcttattatggatgttggtaaacttggcaaaaaattcgaaagagttattcaaataagaaataaattccttgagagcaataaaactgcatctgagataatattaattgatggaaatcataaagattctgccagcgttcgagattag

SEQ ID NO: 166735 - DNA, 267 bp, Enterobacter cloacae
atgaatctgaaattgatactagctacggcaacggataatacctcaaaacttcccgtagaatactcattacccaaacggacgatttctttaacgccatccttagcatcgataagagcaattgtcagtgactcctcgaaaataatgtcattcgttaaaaaagatatagtgatgatcattaacctgaacagctgcttccagtatttgcccttgtacaataatgcctgtgctattgccattgatcactacgttagactgcgcctgggataa

SEQ ID NO: 166736 - DNA, 267 bp, Enterobacter cloacae
atgaccgacgacaacggcgagcgtttctggggtgttaatcgctatcaggatgagggcgagcgcgtcagcaactggctggcagacggggtgatcaaataccaccgtacgctcggtaccacgctcaatgcgcttattaaggcggggctgacaataacggaagtgaacgaatggggaccaacgcaggcacaaattgatgcctggcccgcgctggccgaagaggcggaacgtccgatgctggtcctgatttctgccgctaagactcagtaa

SEQ ID NO: 166737 - DNA, 834 bp, Enterobacter cloacae
atgattaataatacttctccggcacaattattaactcgtagggattattttgctaacgagtctgatttccatcgtcaactttttgatgacattggcaacattataaaagttatggaaagttcaagcgataaatattatggagatgatgaagacaagttgagccatgctatagttgctacccttggccagcttggatatggtgcgacagaacaaactaaaaaaaatggtagtgttgatataactattacaactaacacttcccaaaataaaaaatttgaatggatagctgaggctaaaataggatatggacctcaaaaaatttttgaggggttgctccagttattaactcgttatatcaagcgtgacaactccggtggtttgatagtttattatcaaaaagataaatccaatgttcttttcaataattggttgaaatatctgtataaaaaagaatggtcagattattgcgagtcgcaaggtacacttggaaaggttagtccattattagggcatttagagtttaaggaatacaaaaaggttgcagatgattgttatcatgctgacataaaagtaattaaacctaatggtgctccgtttgatcttagatgcttttatgtggatgtttatcatgaacctgtagataaaagtggtgtggcaaataaaagcttgaaagaggggatagcaagaaataagatcagagaaatgtaccatctttgggaagcaggagatttcaagcaggaaaatcaaaaagaattgtttgatgctttgaaagtttatttcgatggcgcaatggactctgatcgtccagaggatttggatgatgcggctgattaa

SEQ ID NO: 166738 - DNA, 900 bp, Enterobacter cloacae
ttggatattttttttggtagtaccgattgcatcagtattgacaaaaaatataataccggcttcatactttatagtaatgaatgtgatagagaccttagaaaaaaaataagaaacgctttgtcttttatattgggatgcaaattaatacatatctcaagtgtattaaaagacgaaaattacaactcgcttgaatatgaaatacacacgcaatccgcaataaacgatttatatcattcttcttacagcctgcctccaactcccctgcacccagctaatgcaaagcatttatatctaggagaagatgaaattggtctaatggtagaaaaaataataaatcgttatgatgactatgatttttcacatatttcttggttatattggcatgctgtagcttctcctcttcatctgaagggagttggatttggagccacattagaatttattcaaagaaaatatatagaaaaaaaccccactcagttcagtggaaaattaattgaaaagggtttatggaaacttcttcataaagaactaagtcaaattttagaaaatgcaaaacatctatctgagcgtgatagaaagttactatcaaataaattatcaaacctaaatcaaactccacaatccattttgacaagtaaattttacgagattctagacctatccctagggcatttagagttgataagcttcaaacaacaaaacaactccgcacatggaaataaatctgaagatagtgagatcattccactagtgcgtgaagtaaaaatattaagaattctatgtaatcgcattattttaagaatctatgatctttctgatttttataatgatttttatagtctagggttcagggtccgacatgttagtgattcaatatcagatcaagagcaaggtgtttga

SEQ ID NO: 166739 - DNA, 132 bp, Enterobacter cloacae
atgaatcatcacgatttgttaacaacaaaaaatgaagatacaattatatcagataaaaaagaaggtttcactaaagttgaatttttgctggttttatattgtgatgatgttatcacgcttgcggatttttaa

SEQ ID NO: 166740 - DNA, 609 bp, Enterobacter cloacae
atgccacgtgataagctcatcgccgaacttattttgcatacgattttgcgatgcagaaaagacagtgagccgatagcatgtaaggttttctatgagtcggaaggaaaactatcagaatttggtaatgcccatattgttcatcaggctggtaaagccgatgaattatggcttggcctttctaaaatgatccctactggaaagatggacgatacgctaaaagaaatttgtagtgtactagacactaccatttctaaagctgtattgagttccgagcgtgaaattataatcacgctgcgtgaacctcaccaccacttacctaccgcggagcaattcagtaaggcattaagtaagcattcgcctgctcaagaaatgctcaagattatgtgtttccctatacttcttgcttacgatagtgatgtacttggaagaggatatgcctccgattacattaatcatttaaagaatgagatcatggctcactatagcgagctaaaaagcagattacccccaaaagtcttacaagtgaaaatagctatttttcttcttccaatagaaaacatccagagattagtcatcgagtttaactcgctttgtaggactggaatttga

SEQ ID NO: 166741 - DNA, 192 bp, Enterobacter cloacae
atgaaagctaataaccttcaagatgataaaatgcccctgaccacatcacccggtcttacctggcctgtagtcttttgcgtcgccggaataacacttctgcgaagcaagtctgtcgagtgtcagacgataggggccagcctgaccacactgtgcctggtaacgctgataaaaaaactcgccattctggtctga

SEQ ID NO: 166742 - DNA, 696 bp, Enterobacter cloacae
atgaaaaaaatgccagttttaatggcaacattgcttgtatacggatgtgcattcgcaggtggcaatagtgaaaaccccaacaaactttctactttattagcaccttatgatgagtggtattttgattttgcatacccgaaagcattacctgccgttgtgacttatgcggagttattggatacagactcaattttgtatcgcttcagaacgctggatggtactaactccagcgacagcagtgtaggttcgtggggagacagcattggttatggaataccttcatttaacaaagctaaaaaccctccgcgatttatccatttttgctgggactccgtgattgacaagagagtttatgaaaccactataaccttcggtagtaaagtttgggagatgatgttaataccttattttgctccatatgatgaaatacagaccgcttatcataatggtgctaaaggagagcaacgataccatcgatttatggttatcgggctggcaccggaaggaaaggtcagggtatggttacagaacagccgcaaaccgaatatagagctaactgatatactggttgagaccgtttttggcgataaactagatatgtgtaaaaaaattacatccagtgatttttcttatggttacgacgcggatataatagaatttattaaaggtaaaaaatatccatatggcgagtggtga

SEQ ID NO: 166743 - DNA, 186 bp, Enterobacter cloacae
atgcaacagcagtggtgttcagtagataattacatgatttcgtcgcttattcctgaagatgaaattctccagaacgtccttgaaaacaacaaacgcgccggtttacccgagcacgacgttgctgcaaatcaggggcaactgctggcgctgtttgtccgcatgacgcaggcgcgtcgaatactttaa

SEQ ID NO: 166744 - DNA, 3816 bp, Enterobacter cloacae
atggacgtgttaggtaaagcaatagaactttgtaaaagtattgaaacactgctgataaaggcacaatcccgaaatccatcattagatgcatctagcacctacgatacattggcacctaaatgcatcaataatgagaatatgcaggagtatttcagcgcattaaagtttgcattgtccaaaaaagaagttagaaatattgccatcacgggtaactatggtgcaggaaaaagtacggttgtatcctcatttatgaaatatcactgcagtgaaaagtacatgaatgtatctttggcagggttcgatatgatggaaaatgacaaaaacacttcccttactaatcaggaagtcgaactcagtatcttgcagcaaattctatataaagaaaatagagataaactcccagactcaaagatagatagaatattaaataggagtttatttcataccctgaaaacatatttttcattgataaaaattgctatacccacaaccgcttttctggggattctattttttgagagggtttcagaatggtttaaactccctcaagaatggaccaatatattgcatgaaaatgcaatcacaagagttctagcgttgactatactcgcattcatttcactttttttcctcacacaaactgcatcacgagttggtatatttgataagaaaatcagactaggtaaaattgcctttcttagcggaggtatggaatttaacgataaagaatcttcatctttgttaaacaactgcctagatgaaattgtttattttttttcacgccgcccatataaaatcgttgtatttgaagatcttgaccgacttggaacaccagagatcttcgttaaactccgtgaaataaataagattatcaacaataatcttccaaataaaaaaccagttaggttcatctatgctgttagagacgatatgttcatgaatgccgatggtagaacaaaattctttgattttatcctacctatcgtgccatttatggatagcagaaatgcttttacgctactcaaaaacaaaactccgtctcttgataaatcaagcgataagcatctgaaaagcattgccccctacatcaacgatatgcgaagcttagttaatataataaatgaattcaacacattcagtaaaatagttgacaactctaaaaacaccataaaactttttgcacttgtcttttataaaaacatttacactttagattatcatcttgctgataaaaaaaccggattgctttatctgttcatccataattatcgcactcaaaggctgcatgctgaatattttgaatctcttgatgagagacttgaagaactttttgaaacatccatcaagcttgaagaggatattgccaatacgccttatgatattcgaaaagatattcttataaaatttatcccagaattactctggggaaaagttttcattgcatataaaaacaacaataatcgatttacgctttgcgacagtgctgaactggttaaaaatgaagaatacttcctagaaacattctctggaaataaaacactttatgttggatatacaaatcaatatggtaatgatcagttttcctctctaacagcagaggccacaaacattcttttatcgagttactatgatagggtcaaattagttggtcaagataaaacaaaaacattccagcttgtaaatcgcgaaatacgtgatttagaaaacacaataagatccagaaatgccatacctcttgatgaattaattaagtccagtggtcgtgaaaagtttgaagttactgcaaagcaatatcttgatgagatggaaatgcatgattatgtgtcaaagcagcaacttgatatattgcggactgatatgcaatatggtggattagatgccttgtatgttctgctctctggtggattattaatgcaagattttatgtcatatcgctccatttttcatgaaggatcaatgacggtgaacgacaatgacttcatcaaagccataggtcagggtttagaatttgaaaaatccaatcaagatttttacatagatgatgctgaaaaggttattttagaactggcagaacaaaaaagaatttactccgatggcgcactgcactaccaattattaacccacatcattgatataaacagcagatatcttacgggaatggtagcatcgctttttagaaaatcagatcagtacatttacaatgcttttgaaatacttagcattaagtttgttacctactcaactttcgaagcttttgttatcagagcattaaagatcagtggttatctggaacgtatgctaatagcattaaaaacgaatagagaatcaccttataatactaacatatcaatcaccgtgctttcctgcacgtcaccagagaaatatgaagaaaaagaagaattcagaaactatcttcatttcataggtagtaaaatcattcaccacatcaaagatgataatttacctgcatttcttaccaacatcctaaaagttaacgtatgttacaatgaattattcactccaaaaacacctaatgaattttcagctataagtttcattgctgaaaataacctctatcaaataactaaagaaaacgtaggtgtagttctatactcttatgtacattctgacgaaaccattaatcctgaatacgctcagaaaagaccatggagtattataacgcagtataaattaagcgccccatttaaatattatacagctaacatcaatacttttgtccaaaatgtattcgtctttgccgatgaacccagtcattacattaaagaaatgctcgcgagaaataaattaagtgatgaatcaaaagaaaaaattgttaaaatcatggatttcactctttccgaactcactggactgacatccgaatcaacatttaatgatggtaatgagttaatttcttttgaggaccttttctatcagtatgaccgcgtcattccaagctggtcagcactaatggattatatatctattgactgtaacgcgactattttgcatgattggttgacaaatcatgctttggatttagcaaaacttagcaaaccatcaattgatgtcgaagactatgttccattatataaaaaaataatctgcagtgatttattcgatgataatacttatgaaactctcctatcctccattgaaatcaatattgaacagattgacgatcaactgagtgttcgtaacttcggtaggcttgttaaacttggcaagattatactttctaatgaatcatatcgaattatagagtcaacatacatcgagcctgacgaaaaactgacggagtatttagtcctattgttcagccaacataaagatatttttctatccaatagcgatttttacctagggaaaaacaaatcttccttcgataaaacccttgattctttaatgcttagtgacttatttaatgatgatattaaggcgcagttagtccttcaatattctgaatattaccttgacttggatatttctaaaattaacttacctaattctgtatcattactgtcaatcaaattaagtaataatttaaatcttaatgcaatacttctcgccagaatgatttcccgcggctaccgtaataaatctagcattgccgatatatgccataagattaatgaggctgatttatctaatgtattcatcaaacgtactcaagcaactatcacagccaataatgatgatctcgtatatctcatccttgaatattcccgtgatgcagggatcattaaggactatgagaaacgtgatgacagtaaaattactgttacaattacacgagaaaaagatgatattagctaa

SEQ ID NO: 166745 - DNA, 222 bp, Enterobacter cloacae
atgttccactgtccaaaatgtcattacgccgcccacgctcgcacaagtcgctattttactgacacgaccaaagagcgttatcaccagtgcactaacatcaactgcagcgcaacgtttgtcaccactgaaacgatagagcgctttatcgtttcgccgggtgaagtagtgccagcgccgccgcatcctaccacgtcaggtcaacatcagatccaatggatgtga

SEQ ID NO: 166746 - DNA, 135 bp, Enterobacter cloacae
atgaaagattatttattcagatggctaattatcgcaagagaaaataaccgcaaagatagcgagatcagcgatacgaaaattgaggggtttacaccggtgataggttcgataattccgccgccacgtcgacgatag

SEQ ID NO: 166747 - DNA, 405 bp, Enterobacter cloacae
atgaaaattttagatgtacgcaatctggcttataccgaaacaggagcgattgactgtgaggttttggttggtgagcaatggttgccgttctgcgcgtcagaagatgacagcatggcgtacggggcaatgctttaccaggaagcgataggtgggaaatggggggaggttaaaccttacgaaccgacagaaaaggcctacagcgaaccagtcagcggcgtgacaacgaaatcaaggctgatgacgaatgccgaagcggtgattgcgccactttcaagggcggtgaagtacgacatagcaacagatgaggagaaagccgctctggaagcctgggagcgttacaccgtgctcttgagccgtgttgatgttgataaccctgtgtggcctgacgagccggatttggggtaa

SEQ ID NO: 166748 - DNA, 2190 bp, Enterobacter cloacae
atggatcaggtattctttcgcgtaccgttcgcgtcaaacggcgacacttcaaacattcccgaaactattacctccgatggttcagttaactggcctcagggctggccgctggattatgaaaaagacatggatgcggatgctaatgcgaaggctgtagagcgtgatgtgatgaacttcatgttcaacgccgttactgttgccctgcgccagtaccagacagccgcgttccctgagtttattactccagccgacaacaacggttcagctttcccttattcagtaggcaccgtcattcgctatcgatcaacgaatgctgcggcttttaaaaattacgtgtcattggttgataacaacacgtctacacctggatccgatgcggctaagtggcaggagtttatttttgctgaagcaagtgatcaagaaacagatgcgggtgtaagtggcacccttatcatttctccgcgccgcctgaaaagggtaaccgataagctcgaagacaagattgaagagtcaataaataaaacggttacccctttcattcttcctgtcggagcaattgtgctttgggggggcagggttccgccagatggatggatcgaattaaacggacaggcgtttaatacctctgaaaatccagagctgttcaagcaatacccgtctggcagagtaccagactggaggggccgttttattcgtgcctgggataatggcgcaggcgtcgatcctgatgttggaagagatgttggcagcgaacaactaagcgctttggaaaaacattcccattccgcgcctgtagaacgagccagtgatggccttgtaggtccaagagctatacgtggtgtctactggcctggaaaatatacccgcatcactactaatgccggtacgtctgaggaaggagggaatgaaacaaggccgagaaatattgcagccatgtacatcatcaaaacagatcaggcggaagaacaggaaggtgttgaatatccgacagctattgttgtcgcaccagcaacaggaacaattaaggcaggggaaaaccgccagttcacaggcaccattcttcctgcaagtgtggctgctggatatgtcatttcgtggaatgttgcagatgcttcgctggggagtataaacggaagtggcttgtacagttcgtcagctggtaaggctggcgagcaaaccgtgatagctactgttcagactgaagctggaacggtcacgggaaccgcgacgataacacagcaaatatggttatcaaaaattgatttggtcgctcccgaacaaatgaaagaaggggaaaccttcagtgcaggtatcgtatttactcctctcaattttaccgaacccgtgcaatacagttcctcagattcgtcggtgcttacgttcattgatggagaaatcgaagcacgaagtggtggaacggcaacggttgcggttacagggattaattcaggagtctcagcgtcgagaaccatcaaggtaacggcagctgaggttgttgaggaatttttgcgtattaaaaacaacctttcagagattgcggaatcaggtccgagcgcacagaaagagtcgcgtgatcatcttggcctgggtgagttggcaacgaaagacagcgttgatgcttcagatcttggtgctgtgccactatccggcgaaagtcttggaagagattttgatctcgatgacttgaccagcccaggcgaatatctccagggcgtttccagttacgctaaacctagtcttaactaccctgaagaagtcgctggagctgttaaggtttacccaacaggcgtaagtgatggagcctgtcggcaggagtacagaccgtacaactcaaacgtggtgtattcccgttatggcttcggagaaccgttagcattttccgagtgggagcaggtaggtatcagcccattggatgtcaatcaacgctataacgttggctcaataattatggctgcaatcgtcaacaatggcggcgcgtctttacaatatgggcaaaccattagcggggccggattacgggcatccagcgttagcttaccgttctggagcggaggtagcggagttatttatacaggggcaacgttatcaggaacatggcggtttcttggccatacgaataccagcggtgctgatgatggtccagaaggtggcagatcctatccggtgtcactgttcattcgaatcttgtaa

SEQ ID NO: 166749 - DNA, 1890 bp, Enterobacter cloacae
atggcaaataaaagattacctggcgggcgcaagtctgcggggcgaatttccacgtctgctaaaaagttggtagcgttaaaatctggcagtgctggtgtggcaatctctgaacttcccgatacagagaagttaacaggaaaagaattttttccagttgttcaggataatgaaacccgaaaagtaccgctggaagaactatcaacattaatttccgttgatgggattaatgcacaagggggcaatttttgtctctcaccagtagcctatcgcttggcaaactcgcagggttccccaactacatttaaagccgaatatttaaatgaggcgattagcattacttacagaatctattttggaactaacggctatctcaggcttgatttctctaagtgggattttgattttaacgaaagtcagaattataaaatcatacttacaaataacagttcaggtgagttttcaattgtcgcccctggcaatggtcttgtaattaataacgatggtactgttggtgagcctgaggttttcaaaattgataccaaagtaacaattattgaaattacccagtcctctcacgatagcaagcttatattaaggcgtttaactccttatgagcctggcaaggatggtgagtctgcttacagcttttgggccggtaagcagccggaaggcgctgacatcagtgacgaggcgtttctgaaattcatggaaggtaaggaaggagaaccaggcaaatcggcttatcagctatggcttgatgaaggaaatgaagggagcgaggctgattatctggagtggcagaaagccagtatttcagtagatggaattgaaccgattaaaggcgggggggtgactctcacacaaaaaagtaaagttgtaattgttagtaatgatgaggtaattaaaccggatttaaataagttcattaatttaaattattacatcgttgcaaataattgtactgttacctttgatttatccgaatgggatatgcaatttcatgaacttcagaatataaggttttctgcatttgctaatggaactggatacgttacattcattactccacttgaaaccatgtatcggcttgatggaagttatggtgttccagaaataatcactgttaaacgtgatactcgtatttttcaaataacacaagacccgtatggcagtcatctgcgtgttaatcaggttggccccattgctaatggttcagctggtgcatctgcctatgacatatgggccgccgctcagcctgatgggaaagatacaagcgaagaggcatatcttgagtcgatggaaggtaagaaaggcgatgaaggccgttctgcatatcaaatctggcttgatgcgggcaatgaggggaccgaagatgattttctaaactggctttcaaaagcagcagatataaatttggatgcatctccaaaaaatattttatcgcaaactgaagacggcctgcttgttgatgggacgcatcctgtaatacctaaatattcagatgtaagtagttggcaggtgtttcctgaaccagaagaaattccaggtgggtattttgtttattcccgtgtgctgactgtaaaaaatcctgttggtgccatcttggttaatgattggccaatattcaaacttgtaaggggaaatattggtgggctttattacgatgccgatgataatcttttagatgtaaggtgtgtacccgtaaaatggattgtgagtaataaaaaaatcgatattacttttcatgtaattatgagtggaaagcctcataaatcattgtcattatattctttagttgaggatgggaatgaagacgaaggaacactatatttgaaattagaagcccaggttcttactggagtaacgcttaatcaacttggaatggaataa

SEQ ID NO: 166750 - DNA, 861 bp, Enterobacter cloacae
atgtctgaatttagcgataaggcgaaaagccgaatttattgggagtacaaaaacgccccgaagcttatcgagtggattttgtctctccctgatgtggcccagagcagaattgtcgaacagatagagaaggtccgcaacattctagacatcgataaagctgaaggtgaacagctcaatatctgtggtcgaatagctggataccgaaaacggccggtagggcgcttttaccctggctgtaaggtggaagaagtggacgatgttctttatcgaaaaatgataaaggccaaaatctgcaagaacaacgggatcgccacgatagacgatgtaaaggccgctgccgattacatccttgacgttaaggtcacggttctggatgcccaggacatgacaatgcggctggtgtggcatgaggacaccgttagcgttgctgttcaacagctggtggaagactacgatttgatcccccgtcctcagggtgtgggaatgcgaaagttccgcatcattaaacgcaaacccttcggatttggtcgccacttcaacaatttcggtaacgctgcattctggtacggagacggcagacctccgatctactactacggatcaatcaaaattagctgggaaaatggcgtgctgtcagggcaaatcgtcgttaacgaactcgacgtttccgaccaggacgtgacggtagttattaccggttctgacggcgtgcagcgcgtccagcgtgctgtcactgattctgatgggaaattctccctttcaaccatcaccccaccagcaacggttgttgctcgcgcacttctggtcactctggactgtgaagcgctggaactcgaatccgagtctcttaaaataaattaa

SEQ ID NO: 166751 - DNA, 1206 bp, Enterobacter cloacae
atggttgaaatcacgaaagacggagtgacgggaacgaccctccaggaatacaaagacgagatcacagagaagtatctcgcaatagacagcggctggaacctctcgccggaaacgcctgatggtatggcgattgctatctgggccgaatttttcgcaaaccttgatgaagaggttattcacgcttatcacgcggcagaccctaacgcggcgaagcgccagcaacttgaccgcatcgccgcgtttgcgggcttgcagcgccagccagaaagtttctcaacggatgttgtggaattcgaaggcgatggactgattgagataccggctggagtaaaggtccggcaccgtatatcgggtacgctctggactactgacgcgaaggttattaccaataccagcgggaaagcatccgtcagtgtgacctgtacgaccccaggagctgaaagcgctaacccaggcactctaaccatcatcgcttcgccagtggcccgtatacgctctgtgacgaacactcagggcgcaagccttggtaaaactgaagaaagcgataacgcttttcgggtgcggcgaaactactctgttgcgctgcctggtaacaatcagatcgataacatcaaagccgcgctggataacgtgacgggcgttaagcaaacgctcgttcatgagaacgtggaaaacgagactgatgaacacggcgtttacggtcactcgatggcaatctttatcgacggtggcgagactgacgatatcgtgctggcgatggccacccataaaaaccccgggtgtggcctgaaccgttacaacgttttcccgaacaaaattagcgtggacacgtttacgccgaaaggccagcccgtaaatatcacctttttccgccctgaatatgttgcggtttatgtgcaggtggatatcaaaaccagcacgctgggtgaggacgaaaagcagaaaatcaaagaggcaatagtggattacacgcttgttggctttgatgaaacaacgggcttcgctaagcagggttttcgcattggcgaagcggtcgcagctggtcggctctataccccaacaaactactttgtcggtgccgatgattatgtgagtaacatcgccataggtacggctgcaggggaggtaaacaagggcgtcattccggttaagttcaaccagcttggcgtattcagtacggagaacatcacgatcaattatgtctga

SEQ ID NO: 166752 - DNA, 348 bp, Enterobacter cloacae
gtgatacgcaatttctcagacggcgatatcgtgacaagtggcgatcacttcgttaccggaaaagaagaaaccagacaggcctgtatttgcaggcttcgtctttttttgggggagtatttccttgatgccactgatggtacgccgtggtttcagagcatcctcggtaaatcctcgcgcgatatcgctgaagccaatataaaacagcgcattctctccacaaagggagtgctggcgatcaacacgttcgatatggatagcgacaccagaaagcgcacgttcacgattagagccacgctgaccgacatcaacaacgaacagtttgaattcctgtacgacaaggatctctga

SEQ ID NO: 166753 - DNA, 129 bp, Enterobacter cloacae
atgaaaaatggactcgaacttgaagcaccagtaacgcaagaaattggatccgcagcggcgtttgctatcaggattctcgccgtttctgttggcgtctggttcatcattagcgccgttcgctggtggtag

SEQ ID NO: 166754 - DNA, 603 bp, Enterobacter cloacae
atggctgagcctaatacgttcctgaccctgctcggaaatctgcgccagaacttgctatgggacatgatgatcggtatgcctggcaaagtgatcagctatgaccctgatattcagagagctgtagtcgaatgcggaatacagcgacatgaaggcggaggtgagtttgaaaccttgccagggataaatcatgtgccggtgcaatttgcaggttcagcgaaatggtccgtcttccatgaactacccgaaggaacggagggattcattcatttttcgcaacgagccgttgattactggctcagtcagggcgggcccgttaaacctttcgatgcgcgtatgtttgatgctaacgatgccttttttgcccctggctaccgctcccgcgcaacatgcatttctggactaccaactgaaggtatcggaatgagcaacgccagcggctctgtgcggcttcatctgtctgatggtgggataaacctcaaagtgggtagtcaaacgctctctctgtcgtctgatgggcttacgcacaacgggaagaatatcggctcaacgcatgaacatggaggtgttgaacgtgggggcagtagaactggtggccccgaataa

SEQ ID NO: 166755 - DNA, 906 bp, Enterobacter cloacae
atgagtaaatattttggcaggttttatcatcttgaagttaaaaccacagcaggtgaaacgctaacctacagtccgccaatggaaattaaattcgcagtagacaatttccctcagaactcagcagggctggcacgcattacaatttacggcgtttctgcgcgtgcaagagagttgatccagctcagaaaaaacgacgagcaccattttggattcgtatcacttcaggccggatatgaagagcagtatggaaatatttttgccggaagaattaactctgttcaggttttcaaagatggtgttaatacctgcatacggcttaattgctcgtcggtgggtacagaatgggatgcttcgacatatcaaacatggggagaaaatacgccttatcttgaagtgatccgcgacatcgccgctaagctgggaccacctgtagattttgtgggcgacttttcagatctccctacgcttccttttggggctaacggtggcggtaaattgtgccgcttgtggttggatcttttagcgcggaattttggtttttcctggttccatctgactaaccgaaccgtcattaccagaaagggagaatcgcgagcctgggtgaagcacgaattaagctcaaagaatggtatggagtcagcgcccagatggtacgccgacaggctggaagttgatgtgaaacttaatcacctttaccagcccagcgaccgtatagatatcagttcaagtttctggaccctgaatttcagcggagcgtatcacacggattatcaggatttgtacgggtttcagaaacgcactggtgttttctctctcctgaatacctctcatgagggaagcttttggggtgacccctggaaaacaacgctcgggtgcgtgtggtatcaggaggcaaataatggctga

SEQ ID NO: 166756 - DNA, 324 bp, Enterobacter cloacae
gtgagactttcccactcccagaatacccaagagacatttcagtcggttcctctcagtagcggctattcatttcaaaaattcagaatccagctcggacctcactatttaatatttaggcttcgctggcttacccgctttgaatatttctgcgttgatatctatgagcaggacgagccgatcgttttgggtagagcgttgcatcctggggtgaatctccttgccggactcaatacaacaattggctctttgattctacgcggagagtctcccactgtaagtaatttgggaattgagaataaactggagtgggttcctcatgagtaa

SEQ ID NO: 166757 - DNA, 717 bp, Enterobacter cloacae
atggcgatcacagggctgtttaccagaaacaggccaaagataggcaatctgtatttcgacgcgctgttaagagaaacctcagagctacgaacagaggttagcgaatatccgcttgagacaggcgagacagcgcatgataacgcagtgacaaggccgctgagcatcacaatggagatcggcgtttcagataactggtttcgcggtctgatagcacagcaggaagagctggcccagccgcttgtaaatatcggagggggattaactactggcgtggccgcatctttgatgtctgggaggacggcagcactatctggaatagctgccagcgtagggctggcggtttaccagagcagccagggaacaacccgttcgcagagcttattggaccaactgcgaacaattcagcgcaaccatgaaacgtttgatctggtggccagcaaaggcgcgtcatacaaaaactgcatcatcaccaatacacgcacggagtcagacaaggattctgagggcggcctgatcattttggttgatatgcttcagctaacaataattcatgacacggttgaagaaactaacgccaatcttccatacggggatagtgcagccacacaggctcagagagaagtttctggtggtgaagtagtaataacggaggttaaaagtgagactttcccactcccagaatacccaagagacatttcagtcggttcctctcagtag

SEQ ID NO: 166758 - DNA, 1677 bp, Enterobacter cloacae
atgtctggagcacaaaatgcagccataattgatgaattatttgtttctcttggattaaagacggattcagaatccttcaggagaggccaaaacgcggttggggaacttaaaagcggttttctacaattggcagcattgactggcactggtttgggttttaaagctattactgctgatcttgcacacactgtacaaaacatggaacgtctaagccgcacaacgggctttacagtggataaattacgctttttgaaacacgcatttgttacatcaggacttaatgctgaaagtgctggcgcatgggcgcagcaattaaaaaatatcgagcttactattcgcaaccgtagcttgagtgaagctgcatatcgaagtagtaatttcatacctgaagaatacagggctcgttatgctaaaaatccttatgatgcgatgcaatatttaataggaggattgaaccaagaaaaagacgaagcgctcaagcagcaagttcttggcgcgttaggcatttcttcgaataaagattttcagacgttttttgataatggcttggctggtattaacaaggctcaagcatcatggggtaaatacggtaaaggtttgccagaggggttagataaagatgctgagatctttgtcgagcgattagggatattacaatcacaatttggacagcttagtgaaactatgggtggtcgattacttcccgttgttaattcattcttaaaaattatatccgactttataaatgaacatcctgatgctacagaggctatagcttgggcttctggagtaggaggtactgctggcggatatttgcttgctaagaaattcttcggaaaaaaaacgccaccagcaacagcagccaaagggggtaacggttttttacgtagtcttctaactaaccctgttacggttggattagccgcagctgttacgcctggcaatgcctttacaagtgaagacgaagcaagggcaatgagcaatccagaggctctaaagcgtcgtaattgggaaagaaacaatcctggtattccttatcctgaagatgttcagcagtacgcccaaactgctaaacgtggtgcaggaggcccacagcacgcgaagtttgctgatctagaacaaaagtacggtctaccttcagggttgcttaacgctacctatcagaaggagtcaggcggtggaaaatacctcttctctaaagccggtgcgctgggaccattccagtttatgcctggcacagccaaagatttggggttagagggtgatgacgtattcgacctggacctttcagcagaggcggcagcaaaatattaccaaatgcttttgaggcgctataacggcgatgtagcgaaagcggcagcagcttataactacggcctgggtaatatcgacagaaaaggactttctaacctcccagccgaaacgcgtgattatattccgtcgattctcggcggcctcgatgatcctgattacctcgctgattacaactaccgcagaaaccagccccctgttttaggtagttcatcagcaggaggaagcataaccatccagcaaactaatcacagcaccgttcacgcctcaggcgcagatgccgatgaggttggccgtatccttcagcgccagcagacggcgagtctggaacaggcgcttgcgcaaactcttacggagaaatattaa

SEQ ID NO: 166759 - DNA, 231 bp, Enterobacter cloacae
atgaaaaccgttaaagtctctatttcttcagataaatttattcaacgagaattttatggttttatttccgttgactcaggcgggatgatagttattccatttaaggggatggttaattatgttttgagtagtaatactttaaatatatcttaccctcttagtaatggaggtgttaagcatttttcatttgatataagtgaaatccccttaggcacagaacatagctgctaa

SEQ ID NO: 166760 - DNA, 393 bp, Enterobacter cloacae
atggcacgtaaatttgagattcagattaaccatgaagtttatgtaggcgacacagcgccagcgcgagaccagttagaaatgctcaccatcgcaagccaaaatggtttgctgatggtagtagggaaaaaaataagtgatatgggcgtagcggtcgcaatgtcctctcttgatatgtcagttatcgacaggctgaaagacctgattttgaagaaaggcgaagtgtgccggcagtcagacaaagttccagttagtgaaaacatgtttgacggtaatacttttaattacctcctgcttctcgcgcgtggcttggaggaaaacatcggccctttctggaatctcagcaaaggagaagagggagggggcgagaaagttcaggatccgattcagcaataa

SEQ ID NO: 166761 - DNA, 264 bp, Enterobacter cloacae
atggagcaaattgaaacaggggtgatgcttacgattgatatcacccctctgaaagaaaaaatcaatcagttaattgcagaaagcaattcgctatcttctgagggcacctttgagcaactctctggcagcgttacgagtctgctcgatgacatcatcttttgtgaactctcgaccgcagtttccgcaaacggtgttgttcagatcgtccagagagttgactttggctccaggtttgaacacaccctcgccgcacttagggcatga

SEQ ID NO: 166762 - DNA, 405 bp, Enterobacter cloacae
atggcaatgaagaactacggcgccagccacgctgacctcattatcaacgggcttccgattgacgagttcggggatacggacccgccgatcaccattgaagatattgaccctcgcgccaccctgaaacgcggtatcggtaaaacctccgttcgcctggacgggccgacacgacctaagcgtttatcggtgagtttgatccctggctgcgatcaggtccgtcagctgttggcgcttgagaagtcgggcgtggattttttctttaccttccggcagcgcggcaccgatgaaaccgttgaagcgtttgatggggtaatgactcagcgcggcgggttggggcgtggcgggaagcagagcgccagcgacgaaacgtttacctttgagtttgcagatagcgaggaaacctga

SEQ ID NO: 166763 - DNA, 1251 bp, Enterobacter cloacae
atggcgtactcagtagaaaatattattccggtcaacgtaattatcggagcggcgggcctggggtacgccgatttcacaacggcttttgtttttgccgatacgtcagacctcccaaaagacgagccagctattctgactgaaggcggcgataagctggagaccgaaaagcgggaagctatcctgccggaaatggtgcccgttacagcgcggggagaagatttttcggtagatactttccgcgactattcaggcgcagcggatatcggaaaagatttcggtaccgagtcagaaatttttctgatcgccacccgttattttgcacaaatcccccgaccttcatcactcaccgtctggatgaaaaatcctgaagatgaaagcctgatcgccacggtgaataaagcgaacgaagccgcctggcgttataactactttttcaaaactgaagatttcaatgatgataatttgctggtgcttagtgactggagtgacacgaccgatcaccctgtctggtacaccaatacggatgatgaagttatcgaccagaacgagactaacgatattgtttctcgcctggcgaaaaagggtaaccgtcatatgctggtgggctggcgtgctcctgaagcggtggaggtggacccgtcacaggctcactcaatggtccaagtcgccgcaacgttcgctaaattccgtcctaacggcctcaacacggcgattacggcagagtatcaggttttacctggtatcgacggcgacgagcttactacgagccattacaacgcgctgaaggctaaaaaggcagtgttcttcactccggttgagctggcgggccagaaagatagctgtcgcgtgatcaacagcctttcaatgtcctcttatggggaattcattgatgacgtgattaatatcgacgtgctgaaaaatcaccttcaggttgatggctataaccacatcgccaacgtcggcacgaagcggcccttaacgccacgcggttatgaaagtctgcttaatgtcctgaccgatactctcaagcgcttctataacaacggcgtgctgggagagggaacctataccgatgaacagacgggtgaagagaaaaccgcaaaattcggttacgtcattctgtcgaaggctgaagacgttctttccctgaccaaagcgcagcgcaaaaagcgcgaattcccgccaacaaaaatcctcgtcattctgtcgcgtgcagggcatgtggcagagctgaacgtaacagtggagtaa

SEQ ID NO: 166764 - DNA, 540 bp, Enterobacter cloacae
atgagggagatcagcgaactccacgaattgttgcaggggctggtttcggtctgcacaggtctggacagggggagaatcattctcgctgaccagggcagagcaccaccagcaggaggcacgctctacgcaacgtataacccgatccccgttcgggcctacggacagccttcacagcgccttgaatatatcgacgcactggaagagcacgatgaagccctgggtgatgattggcaggatctggaggaaataaccgcgtcatcaatggaaatgatgctgtccgtgaatttcttcaacgagggcgcagctcaggcggcgatgatgctgcataacgccaacttccgcaccccaatcagtgactacctgtttatccatcagctgggcttccgctacgtcagcaatccccgaaacctcagcacgcactttcagtcaggcatccagccgcgctggcaagccgacattcatctttttgtggatcacgaagtcagcagcaaggttttacgcgctgcaggattctccatcgaacattacacagaggagtaa

SEQ ID NO: 166765 - DNA, 420 bp, Enterobacter cloacae
atgtacgggaacgggctggacatgcgcggccatgtcgattcgacctttaaatccaagatagaggggggcatctggttaattcgtaaggagggggattacagcggccctggcggggtgtggcaggaaacggaaaccgaacgggaagagctgaagcgcgtaaacgtccagcctggcaaatggcgggaaataaacctgctggtgggtgaggggggcgtggcggtcatcagtgacttcagaacggtccatatcaacgatggcaaaacgtatctcatgccggatgaaagcggacagtataccgaccagcttgaattcagcgacggggtagtaatgcggcgctggcgcgtcatgacagcagacaatcgcccgtggcgtaatttctgccgcgccgtcgttcaggtcatcagggagccagttacatga

SEQ ID NO: 166766 - DNA, 468 bp, Enterobacter cloacae
atgaaagttaaaaccgaagtacgtggcggggaaaaactggcgaaaaagctcaaacaaattcaggaccgtctgaccagtaaaaagcgggttctgattggactgccggcagggagcggagtttatgaggacggcgcaccgatagccgttatcggtgccgttcaggagttcggatccgctgacggtcgtattcctgaacgttcatttctgcgcgtgccgctgcgccagaacgtggacaacatcaaaaaggggttcgcttcgctatcccgccaggtaaccaggggggaaatttcagcgttccagatgctggatcagatgggggcgcgtgctgcgggttattgcaaggaggcgattgaaacagggattgcacccgctaacgccccgtcaacgattaagcgcaaaggctccgcaacgccgcttatcgataaaggcattttgaaaaacgcgatcacccacgttgtggaggactga

SEQ ID NO: 166767 - DNA, 468 bp, Enterobacter cloacae
atgtttaatcagttttttgttccctctgccgtcatgccttcctccggaaaaaactctgtaaaaatcacggctcagatcgtggctaacttccgcgcgtattatcccgcttttgcgaatgccgatctgtggcctgatggcattgttatccgtgctctggaagaggctgacgcagaaacggggccgcgctgggggaaatacagagctaaaaccgcatcaataaaagcccgtgggatgtacgcgtatgcggcccacaggcttcttatgtggaagcgtgcggaagaggaagaggatgctggggcgctttacgcggtttcagcaaagagtgtcggtgatgaatcgacctcttttgccgttccatctgtaaccaccgatgacctggttctgaatggcgaccttccaatgacgcagtacggcgttgagtttttacgtctgcggcgtcgggccagtgcggggccagccatcgtatga

SEQ ID NO: 166768 - DNA, 312 bp, Enterobacter cloacae
atgcagacgttaattaactggaccaaatctccggtagtggtcgttgatgaaaatggcgaccgcatcaccatcaaaccaggtcagggaaaacccgttgcgggtgatttcaaaaaccatccatgggtgaaaaaagaccgccttgaaatttccagctcggaagagcgtgaagagccaggtggtcccgaagtcgatgaagagctggctgccctgcgcgagcagttcaaaagtatcttcggcaaacctccgcataagaattcgggtaaggcgaaactccggcaggagatcgaaaaatggcgtgaagagcaggactaa

SEQ ID NO: 166769 - DNA, 963 bp, Enterobacter cloacae
atgcgacgcaatatgtttgatatgtctcctaccgcagcgatgggttttctgatccagcaagctgttcacctggagcaaaaggtatatgaaaaaaaataccctcagtacaaatacacccaacttgtgccacttgatgactctgcgccagattgggtggagtctgtagcgtttcaggccaccgatgcgcgcggcgagctgcaattgctgggcccgaactcaacggacatcccgaccgttgatgtggcaacgagcatcggtttccatcagatcaaaacggcggcgctgggttatacctacaccatcgaagagattggccgcgctcagctctatgacatgccgctggatgcgcgtaaggctcaggcggtgcgtgatgttacagagcgcgggctgaacaaaatctatctttggggccgtcatattggcgaaggtctttacaccagcaaaaacgtcacccgcgaagtcgctccggccacgctcaaagcgctggtggcagatatcccaaacaaaggtactcagccgatcattgatttcttcggcaacgggtacaaccaggtttatctgaacaacaccaacacggtataccgtccgactgatttcgtgcttccaccagctcagatgcagcttttgatgcgcaccatgctttccacgcataacgcatcaaactacacgttgttgcagttcctgcgcgaaaacttcccagacatgacgtttaccgatgacattctgctgtcaacggaagttaaggacgataacggccagccggaagaaaccccgctggacgatgatcgtatggttgtctactgcaaggatatggaggtggtgaaaggccatgacgttatgccgctccagttcctggctcctgccaccgcagacaacgtgaatttcaaagtaccggctttgacccgtactggtggtactgaaattcgtgtgcctggtgctttccactacatcgacgggatctaa

SEQ ID NO: 166770 - DNA, 552 bp, Enterobacter cloacae
atggctattgcacaggactctttcggcttgtttaacggcctcggctatgaaggccaggtatccaccatcgaagtaaacaaaatcgtgtcacgcctgacggaagagcaatttattccgttcggtcgcgcggtgatccgtggtgcggctcgtcgttctgtcgctcctgtaaaggctgatactgtcgcggctgacattgttggtttcaccgttcgtagccaggcgcaatcaagccctacaccgccgaatgaggaaggtgtatacgcaagtggctaccgcatcaacgatgtggcctccgtgctcgaagacggtgcgatgttcgcgctgtgcgtagatggtgctgaaggtggcgatcccgtcgaagtcattgttgatgatgaagagaatctcggtcgcctgacggctggcgggaacggcgtagcgctgaaccttgttaagtgggtggatgatgttgaagccgggaaaatcggcgagtttcgtgtccacggcatcctttctgttgatgctggtgcatcaggttccgacgctggtaacggctccggtaacggcgaataa

SEQ ID NO: 166771 - DNA, 1188 bp, Enterobacter cloacae
atgcggatcacggtaacggatcggctgtctttccgcgtcgattctcagcgaaaaattcttgataacggatatctctccgtgcctggaagggtggcgcgtactggcgtgcagcagtacaccgcgcaagagctgggattaacggacaggccaccgaacgagttagtaaacgtctatcgcccaccggaagaagtttttaaaccggaaagcctcgccagctacgacaacgccgatatcacccttcagcaccccgacgattttgtcgattcgaaaaccttcaaagaggtttctgtcggccatgccacgaccgcagggcgcagatttggtgatttcgtcgttgttgatcacctgattaaagatcaggccgcgatagacgcaataaacgctggcaccgccgagctatcagcaggatatagcgctgaatacatccgtcagcctggtgttgccccttgcggcacgccttatgaatttattcagactgacattctcgttaaccacatagcgctttgtgactccgctcgggcggggcatctggcgcgactctttgattcaaaaaaaccacaggagcaaaaacctatgccacaaatcactctcgatagcggcgcaaaagttgaagtggcagatcaggccacggccacgctgattcaaaccactctggacagcctgatgaagcgcatccgtaccggtgatgaaagtcaggaaaagctggaaggggaaattgcccagctggaagtgaagctggagaaaaaagaagaagagctggaagagctgaaaacgcagacttcagacagcgccattcaacagcgcgtggatcaggtcgtcgttgcgctgggcggtgcccgcaaaattgcagggaaaagtttctcctgtgattcgatggacccgttgaccattaaacgcgtggcgctcgatgcggccggtatcaaatgcaaaaaatacgcgacctgggataaagcgcccgatgcgtatgtttcggcgttctttgatgcggctgaagagcaaaaagaaaatcaggatgaagaccctgatgatcagcagaacaagagcaccaacgattcacatcgccttttcgcaaaagacatgaccaacgtcatgaaccgtcagacgggcgatgcgagccagcagcgcattaacgcccgtcaaaacttcctcgaccagcgctacggtcgcaaccaagaaggtaaaaaataa

SEQ ID NO: 166772 - DNA, 816 bp, Enterobacter cloacae
atgacggttaacggcgacctggagaagtattacaacggccagctcaggacaatgattaacctgatggcccgaagcgttcaggaagcgttgatccccgtcctcaaacgaagttataccgccgacagttttctcaccgacctgattaaagccgcgctaaaccatgccgcagaacgtttctattctgacgcctatcacgggcagcagaacaggctggcgcagcgcgtagtaagcctggctgagtcggaaacatcggcggcgttcgtcgaacaaattaacagggcgctgggcgtggatatcgaggggcttttgacgcgtgaaagcctgggtgattttttcgatgccgcggtagaggaaaacgtggccctgattcgctctctgtcgtctgattattttgacaatatccagcggcaggtgatggacagcattttgaggggagacagcgttaccaccctgacgcgcaaccttcaggcggtgacaggggcaacgtatcgcagagcggcgctgatagcgcgtgaccagacgctgaaggtcaccagtgacattaaccgcaagcggcagacttcatccggtatcagccgtttcaggtggtctgattcgaaagatgccagggtgtcaggcaatcccgcagggaaatatcctcgcgcaaaaataaaatgtttctacatcgccagaaatgacgtgggctacggtccaggcgtttatctctggtcacgcggtgccatgtacaacggggaaacagggctttacccggggcgtgcgcacataaactgccgctgtactggcgttcctcagatacaggggctggattacaagtaa

SEQ ID NO: 166773 - DNA, 1413 bp, Enterobacter cloacae
atggccgagaaagaaaccaaagcggctaagccccgctttaaattaaccaatagcggcggggtgatgcctgtctttgacagtctttctaatgtcatcacaggcatgggaacgaatcgcgaccgtcgctcttataaccgcttcaccattacccagctcaatgattatctggaaatggaagccgcttatttcgataactggatagcaggggcagtagtcgatcaccctgtagaggatgcgacgcgagaatggcgaacttttacggggaaagaggcggcaaaaattcatgaggctgaaaaattattcgagcttcaggaaaaaacacaggccgctttcacctgggctggcgtgtacggtggtgctggcgttttgctgattaccgatcaggagctggaccagccgttagaactggacaaaataaagcagggttcgcttaaacgtctggttaatctcgacagaacgatgatttccccctccacttacaactattcggatccgaccgcagaaaactacatgcgagctgaaacttaccggataaacggaggggtgcagaacgtacaccacagccattttattatcgcgcctggcgaagccttgccgccgcgcttgcgattgctcaacaacggatgggatgacagcgcgttacggcgatgcatggaggatttgaaggactcagccgcagcgaaagccggtattgcgtcactcattctcgaagccaacattgatgtgatttcccgcgataacctggctacggacctttcatcgggtgatatggaccagtcgatcatgaaccgcttcctgaattttggaatgctgaaatccatgttcaggctggctctgatggattctacggagaatttcgaccgcaagccgatttcattcggtgggcttggggaaattctctccgttctcatggagtggacagcaggagccgctaaacagccaatgacgcgcttgtttggcgtccagtctaaaggcctgggtgattctggtcagggggatgcaaagaactactacaaccgcgtgcgtggcgaacaggaaatgaagtaccggaaattcctgaaccagatcgacgaggttttaattcgctccacgctgggcattgcgcccgacgacctgaactatgaattcaaccctctcgaaattccgactgaatccgaagtgaaggatcgcaacctggcagaagcccagaccgatgacctgcgccttcagcaaaaagtcattcctcgatctgctgtggttcgaaaactcaaagagagtggccagtatgttatcagcgaagaattccttaaacgcgttgaagaggacgagcgagcagaagccgctggggagttccgcttcaatatcggagaaactgaaaaggagaattcaggaacaggcaacccgccgccgtccgattcagttgatgacggttaa

SEQ ID NO: 166774 - DNA, 1539 bp, Enterobacter cloacae
atggcagatttagcgatcaactctcagacagggaagcaccaccagacgaccagtaataagcgggagctgacgaacaggcagatcctggagggttttaaaaaaagggcagtagagaaagcgcgggagtcgatgctggatttcacgctttacacccacccgacctatgagacgggctggtttaacgaattaatttgccttgagctggataaatttctggaggacgtggaaaaaggccttatgccgcgcctgatgattttcgctcctccgcgttctggcaaaagtgaactggcctctcgtcgattcccagcaaaggtgctggggaaacatcccgactggaacgtgatttcgtgttcgtactcttcggacctggctaaccgcatgtcacgcgacacgcagcgcatcattgaaggtgagcgttatcgtgacgtgtacccgcaaacaaggctgggaggagggcgtaacggcgctatcagaacggctgaactgtgggagacagtagacgacagaggccagcttgctggtggctcataccgtgctgctggcgttaacggtgggatcactggtcagggtatgcagatcggtatcatcgatgaccctgcaaaggattacaaaaccgcgtcttctccggtgtaccaggaaacagtcatggactggtacgacacgacatttttcacgcgtgctgatccgaaattaaacggcgtcatcatcatcctgactcgctggcataaggacgatctggcggggcagctcctgaagaaagcgaaggagggcggcgaagagtggcgagtggtcagtttccctatggaagccgaaaaggacgaataccacgaactgaacgggaaaaaatatgcgctgagaaaaaaaggcgaaattctttttcctgagcgtatgcctcaggcctttgtggagaagtgcaaacagcgcggctcactggtctggaatgcgttgtaccagcaacggccagcggcgaaaggtggtggcctgattaaatcggcgtggttcggggagtatacgcagcttccgaaactgaagtggcgcgccatttacgctgatacggcacagaaaataaaagaagttaatgacttctctgttttcgagcattgggggctgggcgtagacggttatctctatctgattgacctgatacgcgggaaatgggaatccgacgagctgaagaggcgagctatcgcgttctggaacaagtgcaagccgatgcagaacgggcctctacgcttcatggccgttgaggataaatcttccggtactggcctgattcagtctatccgcaagggcgctctctgccctatacgcgcgatacagcgcgatcaggataaatacacccgcctcatggatacgcagggctggatcgagtctggttacatcaggcttccggcttccgctccctgggtaagtgatttcctacaggaaatggagggtatcaacgccgcgtttaacactcacgatgaccagcttgatccgatgatggatgccattaaagaggcgtttgacagcggcgttaccccatacaacgaatggtaa

SEQ ID NO: 166775 - DNA, 1071 bp, Enterobacter cloacae
atgaacgaaacggactggggggccatcagacgcgagtatgaaactgatggtacatcggcccgtcagctgggaagaaagtacggcatcagtcataccacgataaacaacaaaatcagggatgaaggctgggtaaagggaaagaaaaaagtttccacaaaaaaagtttccacaaaaaaaatggaaactaaaaaagtggaaaaatggaaagtggaaactggaaagtccagcaagaaacctgatgaacgggtttcaaaactatccgcagaaaaaaataattctgagaatttttttctaagcttcaaccccgcggatttcgggctttcagaaaaacagggaatttttgctgagaacgtcgcggcaggaaaaaaacttgtcgaggcgtaccggattgctggttacgaaggggaaggaaatacagcccattcgaacgcttcaagaatgctgagaaatgccagggtttttcgtgcagtaagttttctcagagataaacgccagcaacgtctttcgatcactgaagacgaaattattcaccagctctctgctatcgccagcgctaacccaaatgaactcgttcagtatcgccgcgttaactgccggcactgctggggcgagcgtcatctttatcagtggcgtgatatcgaggaattcgacaaggcagcagagaaggccagcaacgacggcaaagaggaacctgaatacggcgggcttggattcgtcgagacaggttttcccaatgaagattgccccaagtgcaatggagaaggggaaacgcagctctttgttgctgataccactcagctggaaggtgatgcccgctggctgtatgcagggattaagcagacacagaacgggttagaagttcgcatggccaatcaggaggcagcacgccgggatctcctgaaaataattgaggccagaaaaaattgggcggcgaaaaaagagggtggagatccggagccggaggaaaacgacatcactgatgaacagttgaacgatgctttgcggagtttaggttatggcagatttagcgatcaactctcagacagggaagcaccaccagacgaccagtaa

SEQ ID NO: 166776 - DNA, 219 bp, Enterobacter cloacae
atgacagaaaataaaaacgggttaactggcctggtgctcaccgccgagcaaattaaaagcctggccacctttgcaaaagaagatggtcagccaaaatactgcatcacgcacacaacgatccctgcgttcactgctgaagatgaccgagatattccggaatacacgggccttattgcctattccgaatcgacagagcacggcgttctacagctggactag

SEQ ID NO: 166777 - DNA, 378 bp, Enterobacter cloacae
atgacaagtaactttaagttttcccagcgtagcgaaaacaatctcaaaggcgttaagccgcagttagtggccgtggttcgccgtgcgcttgaactgtcctcggtggatttcggtattactgaagggcttcgcacccaggaacgccagaaacagctctacgctgaggggaaaagccagaccatgaacagccgacacctaaccggagaagccgttgatgttgtggcttacgtaggcggaaccgtttcgtgggatttcccgctttaccggaaaatttcggaagccttcaaacaggccgcgcaggagctaaacacaccagtggaatggggcggcgactggaaaacgcttgtggacggtccacattttcagcttaagcgatga

SEQ ID NO: 166778 - DNA, 588 bp, Enterobacter cloacae
atggcttggatgggtataccttttccttttcacctggcgaaagcagctgaagcgatcgtcatcgataaactacctgaggtagtggtgagcaccccatttgcatgggaaactattatcagctcattcatagctggcgccataccggcactgattgcctggaaagccctcagcaaaaattttgaaatagccagatttcaggcgcgaatgactgaacaaaaggatgtcgctgataaacttagagtagcggctttagattttgtttcttcagtcgataaagtcgcccagttgactcaaaggctaatcaccacccctggtataagtattgattcgctttccaaaggtagatttcctgactattaccaagaagcattaaacgatgctcaaaggtccatgaggaatcttcattttttggtcaggcccgatgaggcaggtatgaggttactgtcttgtttaccacctctccagcaatcgctgaagccttttttcacctttgaaaatttaaacggtaatgaaactctacttctgaaagagagaattgatgattttatttttcattttcatgagtacatatattcattccgtgagtag

SEQ ID NO: 166779 - DNA, 201 bp, Enterobacter cloacae
atgacctcgcgcgatgtgcttcactttcagtggtttcaggatgaaagccgaatccgtctggtggatatgtatcgccactatctttataacggcaagttttacgtcccacctgaggttgctttcgaaccgactgttccagaagtcgtaagaggggcgcctgaagccaatgatgatgatagtgatgttccagaagctggatga

SEQ ID NO: 166780 - DNA, 639 bp, Enterobacter cloacae
atgaacacgatgacggcggtaagttttaccttagccacaatcatctcttctactggagctagtgttaccaacgccgccagcgtacctgctgcgtttgttgctggtaacttcaagccggtggagcgtcgttctgtgcaacctcgtagcacgcttcaggcacgtactggcgcactgcaaagttacatccgcttcgttgcggagcttcagggaatgattaaagctattggtaacgaaaacgcaaagttggaagcggctatcaacgaagctcttcactcattggagttgggtgaaaatgtagaaatttcggacgaagtagaaacactggcttcttccggtatgaaattcgcaaatgcaggcttggaagtatgtatccaagcaattgataaagccctggcagatgcgaatgcgcgggaagtgaaacaccttctggcgctgcgtgaaaactccactgcaactttaacgggggtaatcacatctatgaataaagtgactgagctgaagaaaaaagcggcggaaaatcaaccggagccaacattagtcattgatttacctcgcatggaaatggcattatcttccgagaccgtaacggtcgataggaaattatcacgtcaagagatccttgatttgttaagtgcttaa

SEQ ID NO: 166781 - DNA, 684 bp, Enterobacter cloacae
atgaacgcgcagcaactggaatatgtacgcattcaactacgcgctgcgctggtcgatgactcaggcggcaccaaagggcaactggaggccttcgcagagcacccaccagctgataagaacaggaacccgcgtcagcaggtacacgttgtggaactggataacgggcgcggcggtgttcgtcgggtaaaagttgaaaatagcgctgtctacgtcctggaaacgcgcagtcgtcgccgtccgatgcctccgataagagataaggctttctcttcgtgtgcgtggcgcagagccgttttaaaactcgatgttagccaacaggcctggatcagatactgctacgggtacgatttgacatacaagcttcaaatagatatctgctctcatatttggagtgagtatttaacctcggccggcaatcctaaattacagaaaagggtaagagagaaaatggtggttcttacctggctggctgcgcaagacgctgcagcgagaaacgaaaacggaacatttaaagagagcgctggagccacccttgcgcacacggtagacgttgcaaaatcttcctggtcagatacctacgccacaccatgggaaaagctgaaagagatcgctcgtgatcttgatgcttctgcgttaatgaaagtgagacaaattgtggagcttgatgttgcgaccataaaataa

SEQ ID NO: 166782 - DNA, 597 bp, Enterobacter cloacae
atggcacagattatacaactctttaaatcttcacccaccaccctgaccacggctacgcccgaggccagcgattttttgcaacgtatcaaaatcggcgtgtggcttaactgcgacgttaagcaagccagaaactacctcttccataagcgcttcttcgctctgctcaatcttgggttcgaatactggacacccaccggaggggcgatctccgctgtagaaaaagaatatctacatggttacgtcagattcctcatttccctggttggtaatgaagacacactgatggacagtgagcagtattatcacgagcgtcagggtagatggcgcaccaaagaaattgctatcaccaaatccttcgaggctttcaggaaatgggcaatcgtagaagctggcttttacgacgagtacattctccctggcaatatccgccgccgagaggcgaaatcaatctccttcgccaacatgagcgaggccgaattcttccaggtttacaaggctgtttttaacgtcttgtggaacaacattctgtttgaaaaattccgtaattatcaggaagccgacagcgtggcgatgcaatttctggagttcgccgcatga

SEQ ID NO: 166783 - DNA, 342 bp, Enterobacter cloacae
atgtctgaatcaaaaggaaattctggggtaaaaattgttacatacgagcggtttgttgaagtcataaaagacataggcatcaacattgtttgtccgatatgcaaaagcgaaaactggattgttcatgcggaaacaccccgtttggttgaagggaaagatacttttacttcagcggtcattcctttcggtacatcaggtgatttccccaccctattaccgaaagagggagagaattttctgattttagtttgcgaagattgtgggttttctcactttttccatcgagatactttcctggcaaagatcaaacgtatgcacgagaaaacgggagatactgagtga

SEQ ID NO: 166784 - DNA, 303 bp, Enterobacter cloacae
atggaaaatcaaaacaactgcattggaaaaatggagttttgcatcggcctgggtgcatctttgtttgctgtacttggcaccgtatgcgtagcagcctggacgataaacagttcaatcaacgactcggcaaacaataccagggcagaacttacccaaacgattaacaccacccgaactgagctttctgctcgtctggacagagttgaagacaagatggaccgtatcgactccaagactgactccaagctcgatcagatactgacgcaagtaaccgtaatgcagcattctgtttcaggaaaataa

SEQ ID NO: 166785 - DNA, 1287 bp, Enterobacter cloacae
atgagcaaacaaaacgcagtcgacttagcacgtacagcccgcagtgaagcagaaagcatcaccaaaggtgacaagcgcactatcaccgcaatcatcaacaactggaatgagtgcgttaaacaagctggcttctggtgcatttacgattttccaactacaggctacacccgtaaatcacagctggtggccgacctgctccgctgcgctgatcagcttgatgattacgttgaaccaaacccgcatgcagctcagaccgttgaacagcaaacacgcgagttgaatgcagctcttacccgcgttctggatgttgaagaggcccacgctgaagctctggacattaacgcatggattgatgacctgactcagaacggagtggacagcaaacgcctggatgttttctgtattcaagttcgtgaagaagaccacgccgaagctctggaattgaacgccaattacgacgaagcggtaaaggtggtgctggcagacaacccaccattaacacaggatgatttcaacgctcacgtttatggaatccgtgccgaactggttagaagagcacacgccgaagccctcgttatggattctgctaaagaacttgcgggagtggtagttgaagcaggttgggatgtagtgaagcgcgagtttcatttccatgcaaaatcagttcagagcgagattgttgagttagcgcacagtgcagcgctggaaatgaacgttgggatcgaacttgcgctacacatcatcaccaagctggctaagcctggcgaggtagttgaagccggtgatactgccgggggatgcctataccgtgatggttttaatgatatcaactacctggtatctgaggcgttaagaatgtacagagagcgggaggaattacacgctgaagcattgcaatggaacgcctttattgattactgctggcctctggatgttgaagacgtcctggtaggtatcgagatttccgctcatgaagacaacagccgctttgactggctggccaatcgctggagtctgttttgggctggttgtgactacctcacccgccgcacgatgatcgaagaggctcatgctgaagctctggaaatggatctgaaggtgaatgaggctttattagctttaagttcaaacccattatcagctggatggaatttacacagtccaacaatgaaagcccaggctatcaaaattgctcatgttaccgctctggagattgatgctgagttaaatcaacttgcctcattaggacgcatgagcggcagcgcttcacaggttcatagatgttaa

SEQ ID NO: 166786 - DNA, 291 bp, Enterobacter cloacae
atgttaggtattagcatcaaaaccacaaaattaactgccattaacaacgaacttgctaccttcaattgcgatggtcaaatctccggtgttattcactctccagcagacggtagctacacggttgtgattgatggtggctacaagcttgcaatgcatcgctgccctcactgtgcaatcaaagcggttcataaccttgcagaccagattcacgacgctgataaaagcttcggtatgaattacaacagctataaaacgatctttttatcaggtgctaattctcgcactcattaa

SEQ ID NO: 166787 - DNA, 2379 bp, Enterobacter cloacae
atgactgaccagaaaattttcatcgcgggatatttcccagatgaagaatcagaaaaggcaggtattaagcgtgtcgctacagccttcaatgcaaaggatattgaacgcgctaaagcgaaagcgaacttcatcttcctggaagagtatgaacatgctcaggatgcagcatttaaaatccttgtatgtgaagacactcctgatgttgctggtcgcccttctcgaggaacctggaacgaagaattcctttacgaatacgactggcctgaagacgttggccaccctataaaacgccaggctgagaaagtcgattttgacaaactctcccgcgaattgcagatcgcgtgcctgattaaatacggctctaccgagttaactaaaaacgatctgcctggtgcgctggaaattacccaggacgatgacagttttgaagggcatatgtacgccgccattatcaaaacgccttcagtcgctaacatgttccacgagcgtattgaaaacgcgatcggctggttaggtgctaagtgcgatcactccgctaaatggcctgaaatccagaaagagctggctgcgtgggaaaagcgccagaacgctgaacgcaaacaaactggttcatcaaagtccgttgtcgatatcgcccgcgagaaagctgcggctgaaaaaatccgtcagcaaaatcctgctcctgttcaccttcaggatgaagagtctttaaagcgcaatattgccctgggcctggttgctaaggcgatggatttcgacatcctcaaccctccggcgagcatcgttaatcgtgcgcgcgaaatcatcaagctgaaagagaaacccttcccttcttggtttgcggcaatgagtgcgacgattgggatttacgaatactccaccgtccagatcgtctacagcgtgaaaatctcgcctgaagatatcgacaagactgccggctctattcaggcacatattaaccgcacgttcaccgaaactgaccacgccaacccgtccgctgaaatgctggctatcgcctgtggcacaatgaaaactgaagagggaaaaagcaatgagaccgaacagaaccaaacgggcacaactggcccactggacgatgcagcgtcaacggctggcgcagtggaaccggaacacaatgcagacgggtcagcagcggggccgctggaaactgcgccacaggtagagcgtacgggcccgttctattacctctttgctgatggtgtgaaagtaggacgcgctaacaagctgccaggcctcgaaaaagcgctggctgatggtggcaaggaaatcagccaggacgaatatttagcgcgtaagaacggcacatacgaagcccctgccgccctcgctgataactcaggcgcaggtaatgagcctgaaattaccaatcacggcgcgggtcgattctccattgatgggctcatgtctgaacagcagccttcaggaacctctcaggaaaatctcccagagactcctgtatctgatacagcaggatctacagcaccagcagcaccattggaaaggaacgaaaagcccgaattcaccctccgtgccgacgagctggagaaagagctgggtgatagtgacaatatttcactctggaaaggagtgatgcgcactaacccgcgctacaccaaagatatgggtgatcttggcttcggcggtaccgcgattaacgctgagtacatgatcatgcgggctactgagaaattcgggcctgtggggatcggctggggttggcaaattctcgaagacaagatgatcgaaggcgctcctctcacagaaaaaatctttgagggaacaaagtttgtcggtaagcgcatcctgcgtgatgccgacggttccttgatgttcgaactgaatcactacatcagaattggtctttggtacatcaaagacggtaaaaaaggcattgtcgaaaacttcggttccacaccttatcgccagacaacaaagaacgggatcttttgtgatagcgaagttcataaaaaatcgctcactgatgccatcaaaaaatgtctctccggtttaggcttctgcgctgacgtatggctcgggctatatgacgatgcggcttataaagcagaaagtgtcatcgagtttggccttaaagatgcgaccgagaaagcggaggactcaacccgcatccgtgaagaactggacgaacgcttcaaacaaaatgtcgaaaccatgcgtaatgccgtttcacaaaatgaagtatcaaaaattgctagcagtctgacgcgagctgtcagtattcacttaaaagccgccaaagatattaacgataatgaatacgtcaaatatctggaaggccgtttacgccgcctggaagatattaaaggcgagtgcctttctaagctggaggaaaaagcatga

SEQ ID NO: 166788 - DNA, 144 bp, Enterobacter cloacae
atgttcaacctaaaacgcggtaagtctgtgttcaaagttcgccctctcctgtttaccaacagcttcaagtgggcaagcgtaaaagtatttgatacgcagcagggtaaatattacgggcgagaagcgaggaaaagttatgggtga

SEQ ID NO: 166789 - DNA, 273 bp, Enterobacter cloacae
atgggtgatatgggtgattattttcgcgacatcgccccctttctcaaagaggggagaaaaaaggcccgtgatggagcacatcagagaattaaaggtttcttcgcgcgtaatggcgttgtgtttgaagaaggcaataacaccctcctcttcagaactcacgaaggaacagtgtgctattacacaccgagccagaagatgcagcataaaaaccagtggactcagtgcagccctactagatgcatgaagtatgtgaaaaagctaaggggtaattaa

SEQ ID NO: 166790 - DNA, 288 bp, Enterobacter cloacae
atgaacaaggtagagaaagaacgtttagttagttatcgccgctggctccatacggcagaactgaacgagacaaagctgatcgcttataactgccctaaatgccttgagaagttacaaaccactaaagcgccggaaggtgaaacgtgggacacgttttccaactgccctttttgtggatcgttactttttaaggtcacacaaggggccacagtgaaaattgatttaattcttaatattggggtcaagccggatggtaaacacaaagcagcaaatccttacgctgaatga

SEQ ID NO: 166791 - DNA, 1185 bp, Enterobacter cloacae
atgttaatacaatcagaggcattaaaactgcttgagtcaactttaaatgatttagagtcccccaaaggaacaattttttcggcaattcaaaaattatatagagccgctgatttagttgaagatgaagatattaaaaagtggtgtgcaatacaattggctgatcaaaaatacactgatcctttagggaggcttttaaatctttatagggaaatacatggtaagaaaaaaggaacaaaaatctatgatgaactttctactaaaataaccgctcaatatgaagatttgaagaaattaggtcttaataagaaacatttcaacactgaagaattaaattcaaaatataatgaatctgggggtggttatgttggaataggttttttagaagaaagatattttgatctggtaaggcttaaagatggaaatgatggaacttattataaaaatgatctctataaacatttaagctatgttaggaaacttgcacatgaatatgctaaagagttattcaaaagattaaagttttcaggaacagttaaaagttgttttgatactctaaaagatgctgtagatgatagattacttgaaataaaagaagagctaggtgagcagttaatgctagccttcaaagctctttcttcagataaaccagaagaatggtcacatgctttgacatcttgtcgccgcttaatagaaggtttagctgatgagttatatccgcccagcgaggagaaaagaaatgggagagctttgggtaaagggcagtatataaatagattgtgggcttttatggatgattcaataacatcttccagtaataaagatttggctaagtctcatgttgattacttaggtgcatggctgcaaggttcttataagctaacaaataaaggggttcattcagagttaactcaaatagaagctacaaaagccgtatttcatacatatttaatgatttctgatatccttgagtatataaacttagaaaaacataggaatgggaagaaaaacattaacgaagcgtctattgatgaattggaggttatacttgatgttaaaagggggattgccaaaaatatagtgaaaaaaagaatagaaaatgggatgttaactcttgaaatgataaaagatgtccccggagtgggaccaaaaattttgtcaaaaattcaagctgaatttgatatttaa

SEQ ID NO: 166792 - DNA, 702 bp, Enterobacter cloacae
atgcgggcgataactgggaaacgttctgacgttgtgcgtttcgccgggtggcggctacgccttacccggcctacggattgtgggttttgccgggtggcggctgcgccttacccggcctacgggatgtgcgttttgccgggtggcggctgcgtcttacccggcctacgggatgtgtgttttgccgggtggcggctgcgccttacccggcctacggattgtgggttttgccgggtgacggctgcgccttacccggcctacggattgtgggttttgccgggtggcggctgcgccttacccggcctacgggatgtgcgttttgccgggtggcggctgcgtcttacccggcctacgggatgtgtgttttgccgggtggcggctgcgccttacccggcctacggattgtgggttttgccgggtgacggctgcgccttacccggcctacggattgtgcaatttgccgggtggcggctgcgccttacccggcctacggattgtgcaatttgccgggtggctgcgtctgacctggcctgcggaattgggttttgtaggcccggtaagcgcagcgccaccgggcgattttacagaggcaggcacatggcgcagcgggaaccatacgctaaaccgtgcgctgtctcttcttcacgtttctggcgcatttccggcgtcagcgtcgtcatcatttcaaaccctaatcgcctgtag

SEQ ID NO: 166793 - DNA, 2307 bp, Enterobacter cloacae
atgagcgcaaaattttataccctgctgacggatatcggcgcggcgaaactggcaagcgccgccgcgctcggtgtcccgttgaaaattacccagatggcggtgggcgacggtggcggcgtgctgccgactccaagcgcgcagcagacagcgctggttgctgaaaaacgccgcgcttccctcaatatgctgtacatcgatccgcagaacagcagtcagattattgctgagcaggtgatccccgaaactgagggcggttggtggattcgtgaggtaggtctgttcgatgacaccggcgctctgattgccgtcggtaactgccctgagagctacaagccgcagctggcggaagggagcgggcgcacgcagaccgtgcgaatggtactgattaccagcagcaccgataacatcaccctgaaaattgaccccgctgtggttctggcaacccgcaaatatgtggatgacaaggtgctggaacttaaggtgtatgtggatgacctgatggcaaagcatcttgctgctgttgatcctcattcgcagtatgcaccaaaagacagtccgactctgacaggcatgcctaaaacgccaacgccaccggcaggaaacaacagcaccctgattgccagtacagcctttgtacaggccgctattcttgccctgataggtggcgcaccggcaacgctggatacgctgaaagaaattgcggcagctatcaataatgatccgaatttcagtaccaccattaacaatgcgctggcactgaaagcaccgctggcaagcccggccctgaccggaacgccaacggctcctactgctgttcagtcaacgaataatacgcagattgccactaccgcgtttgtgaaatctgccgttgcggggctggtcggttcgtcgccggaggcgctggatacactgaatgaactggcggcagcgctgggaaatgatcctaactttgcgacaacggtgatgaacgcgctggcggggaaacagcccctcgatgccactttgactaacctcagcgggaaaagcgtttcagcccttctacaataccttcaattggaagaaacggtaaaaaaagctgacggtgctattcagaagtccggtggcaacatggaaggaccgcttggtctgacacgaacatcttcatttggtgtggctaccgagaacacgctcggtggaaattccattgccatcggtgacagcgattcagggtttaagtcaaatggtgacggtaacattgcgctgatggcaaatagtgttcttgccgggtatttctcggaaaatgaattacagcatcacgaaaaggtactgacaaaaatctttcgggctatttcaaccggaaacgcgacagagggggctggagggtttggttctcaacttaccagcggagcaccattttatagcccggcaatagtgcgtcaaaataatgataacaattactttcctttatggaagcaaattgtaagtcttcagtcaggttatccggtagctgcgtcaatgggattactcactacaggagagccgaatttcccacaaattgtgctccatgcgaaaacagattttgaggttaacgataaactttgggtttttgatgttgcaacaggtgagctgcgctctccagcactaattaaagctggagaggctgttttaaacacaaacggagatattagtggctccgcatggggtggggcgctaacaaactggctcaatagtcaactcgctactcgcgacgcaaatattaatgcgcgtgccacggtagactgggttaatagtcaactcgctactcgcgacgcaaatattaatgcgcgtgccacggtagactgggttaatagtcaactcgctactcgcgacgcaaatattaatgcgcgtgccacggtagactgggttaatagtcaactcgctactcgcgacgcaaatattaatgcgcgtgccacggtagactgggttaatagtcaactcgctactcgcgacgcaaatattaatgcgcgtgccacggtagactgggttaacagcaattttaataagaaaaacacggctacattaggtttctcaggctggagtcgtgatgagtcaacggggctgattatgcagtggggtaatgtggataatgccaggggaacctactcgttcccacgggcattcaatgacacctgctttgccgtctttgccacaaataaagatgggcagggcggcgcgattgataacgcttatggttatccggtaagcaaaacgcaattctatctggccagcaaagcgaactctggcgctgataccgcatacggcatttcatggtttgcactggggtactga

SEQ ID NO: 166794 - DNA, 624 bp, Enterobacter cloacae
atgggacaacatgcagaaaaatctgagtcactctttgcccaaatcggacagtactcgtggtgcataacccttataggtctttgcatcgctcttctcggatggcgagttgcttataacaattcgaaaaggctcgctacccggtcagagtccaagtccataatcgattcagtatcgaagttagtgattgaaatttctgatctttctattgacttctggcttaataaatcatcacccattgatcattgcttagatccaggacagaagaacaaagaaagggcgaataagataaatcagtcctcaatttatctgttcaacgtcctagctaaggcccagcagatcgcaaagctcgcggaagtattgcatctccgtgggctatctattcctgacaatttgctctcaacagtaatggaaaaaacaactctggactgtgagactgcttatcaactcgactctgaactccgcactataaggtctcaggaaatcgtgagcgcttgtatgcaagttgttcatgctttgcatgaaaccttccagttttaccatcctccagctaagcaagagacgttcctccaaatggtatctcggaagtatagtgaagtggaaaattggcataacgaattaagataa

SEQ ID NO: 166795 - DNA, 327 bp, Enterobacter cloacae
atgagaaacatcgtcattgcgaaggagttctccagaacaccattcggacgctataccacagacagtcccaacagtgctgaacgtttccgcagggattttctggttccagctctgaaaggtgaagaaaaggaagtcattgtcgacttccgtggcatagctttgggcgtcggttcgtccttcctcgaagaggctttcggaggattaatccgaaaagaaggtttacccaaagccaacatcaaagctcggctcgtaatcaagagtgacgtgccgttttacaaagagcaaattgaaaaatttatcgatatggctcagccggaacgagcttaa

SEQ ID NO: 166796 - DNA, 912 bp, Enterobacter cloacae
atgactgtacttgccccacctcctgaaatatgtatttattctgacgaataccgacctggtacccttcagtttctcaacttcatcgagacgatgggggtcaagcatggtcgtaaacttgagatcgatttatccaaggtaagatttgcatctgcagcggcatcgttacttttttttgcggtagtgaatcgagcacagttgctaacaggagatccccacttaatacgcttcaagtggccaaaaaaggagaagaatcctgaggggcaccgctggatcgtaagtacggggctctcgcgagcattgctggccgggactgaagaaaagcttcaggctcttacccacgaggaacgtttttttcagtctgctgtcgaaccttttgagcatatcgttgaaactgtaaccatgctgcaaaggaaagctgtcttaaatgatgaacagctggatttgttgctaacagctatcagtgaggctttgcttaatgtctctcaccatgcgtatgaagacgatgccttcaaagatgatttgcttctattgaaaggtaaacgctggtggcaatgtgcttggttcaatccagaagaaaaccgcgttgttttcattgtatgtgaccttggcttggggatttttaagagtttcatgcctgatgatgatggtcttagcactcaaaacgaagtatcttctgtagaaagagctatgctggttggtgaatctcgttttgttggctctggtcgaggcaacggttcagaagatatcaaacggcctattggcgtaggttgtgtagatgatgagacactactaatcctaactggacgtgctcaatacaactataattctaatgacagctgtcctcggtgtgagagacttactgaatacataccaggaactttactacagtggtcgctggttcccaggagatga

SEQ ID NO: 166797 - DNA, 1071 bp, Enterobacter cloacae
atggttactttatctctttttaataacaaaggcggtgtaggtaaaactacacttacatggaaccttagcgttgctttagcagccaaaggtaaatcagttttactgatcgactttgatccgcagtgtaacttatcaattgcaacactgagtgatgcaaactttgctcgtctattgcacacaaacgcacaggctcctttcggtcaaacgattagagccttcgggcagccttacattcaacaaaacagaacccctgaagtagtcataaatcatcctaaatatcctatgcctcagggatctggccatctagatatcgttgccggagatttttggcttaacaatctttcagacacactcaacgttggtaccgatcttattgctggtacaagtatttatcgcttcctgatgcctcatttgatctcgaaagctgctgaggaaacaacgggcattagctacgattatgttctcatcgacttgccgccatcattcaatacattagttcgttctgctctttactgctccgattactttatcgttccatgtacagcagatatgttttcggcctactgcatcggtttaattggtgaaatgcttcctaagtttgccactgactggcaacaaggcgtctctcgatatcttgctgggaatgctcacgaccccattttgtccataaaaggacagcctaaatttgcagggtgggtattcaatggattcgatatgagaaagaaacaaggggcaacagtagcaactgaagtaggggctgacctagcacatagaaatgttattagtaccgcagtacaaaacgcattaatccctagcctacaaaccatcacttcatacaatgcagtgcctagttttgttactagggaaccagtagcgaaagtggaagatttaaacgttatggctcctgacagcattattcaaagcgtcccgcttaaatacctcaagactgttcgcccaacttcacacgttttagttcgtggacaatgggctaaaaaccaaactgacttgatggataaaatggacgcagagcacgacaaacttgctgaccacgtgatcgctaactgtgtgtaa

SEQ ID NO: 166798 - DNA, 228 bp, Enterobacter cloacae
atgggtcgtaagacacgtaaaagtcgaaagacgcatacaagtcgaaagacacgtaagaaataccaggctagtgttcagcaaacgttttgtgtgaaggagaaactaaagaaatactccaaagataccggtaagtacatccttgccttggttttcagcgaagtgttttctacggtttttcattctgaagctgttacctccttctttgcatccatcaagggattcctgtaa

SEQ ID NO: 166799 - DNA, 282 bp, Enterobacter cloacae
atggctaatctacaactggcagtgaacggagaatacttcgaccagatgaaacgcggcgaaaagattgaagaatatcgcctggttaatgcgtactgggggcgccgaatcagagcgcgtgactatgaccggctgattatcactcgcggctatccaaagcgtggcgatatgagcaagcgtatcgacgttccgtatgacggatacgaagtgaaggtgatcactcatcctcacttcgggcccgacccggtgaaggtcttcgctatcaaggtgaatatccatgcctaa

SEQ ID NO: 166800 - DNA, 216 bp, Enterobacter cloacae
atgaacagaaagcaatttatacagagtcagggcgccacatgtaagaactggaactggtctttcatcagccacgaccgtcaaatagttatttttggtgcctggggcaccgagcgcgagcaggggcgcgcggttatcctccgcgaagaatgggaattcagcgccaaaaaaagaggcttcctcggtatgcacaggctatcgagcatctcggctacctga

SEQ ID NO: 166801 - DNA, 156 bp, Enterobacter cloacae
atgatatcgacagccttaaaacgctcaaaggatgaaactaatctagctaaaaagcttacaagactgagcaaaacgccctgcgtgagctgtttctttgaagcgcatccggaattcgaatggctcgattttagtacactagaagcatggaaatgctag

SEQ ID NO: 166802 - DNA, 312 bp, Enterobacter cloacae
atgggaatttttgaaagaaaactagatgtcagtaccacggctcattttcagatttttacttcgatacctccgcaaatgaaagtcttgaaaaacttcggtctagtaaaggccaccacatcagaaataaccgccaaataccgtaatgaagatgatgaactacttgctgctctatttaacgaagcaaaaaaattaggagcaaacgcaataattaatcttcagtatacttccggttcatatcagagaaacggacatacttttgttacgagttatctgatagcaactggtgatgctgttctgctggaagatatatga

SEQ ID NO: 166803 - DNA, 2820 bp, Enterobacter cloacae
atgcaggccatatacgtgattgcgggcggagactggctgagccagacgctgaacgcgatagtgactttcatgagcaccgacagctgggccatcatccgccggatcgtgactgcgctctcggtgctggtcgtggccgtctcctggctgcgccgccataacattatggacatgctgggctggatagccaccatcgttctgatgtccctgctggtcagcgtgcgtgcaccggtgcagattatcgacaacagcgacctgacgaaggtgtacaaggtcgataacgtgcccgtgggccttgcgctgcccgcatcgctgacgaccaccatcgggcacgccctggtgcagggctacgagatggtcttttcgcagccggacagcgtgacctacagcaagaccggtatgctgttcggcgcgaacctggtcgcgcgcagcaccgacttcctgtcgaagaatcccgaaatcaccacgctgttttcggactacgtgcagaactgcgtgatgggggatatcttcctcaacgggaagtacaccctggacgagctgatgaacagcaccgatccctacaccatcattttctctaaacccagtccgctccggggggtttttaacaagaacaatcagtttatgacctgcgaacaggccgcaaatgagcttaaaccaaaactggcgctggatacccagacgggcggaaagagctggagctattacgcgcgctggatctttgggggacgtccgaaccccgatctcctgctgaaccagatgctcggggaaagctacagctatttctacaactccgggacgagcgcctcgcagataatccggcagaacgtgacgatgaacgccctgcgtgaggggattatgggctatgcggcccgcaacggcgacacatcgagcctgctgaatatcgccaccacgacctcaatggagaagcagcgcctggcgcacgctacggtcggtcaggtggccctgcgatccctgcctatgtcccagacgctgattgtggggctgaccatcggtatcttccccctcatggtgctgggcggcatgtttaacgcggtcacgcttaacgtgctgaagggttacgtcatggcgattatgtgggtgcagagctggccgctgctttacgccatcctgaacagctgcatgacgttctacgcgaaggcgaatggttcaccggtggtgctctctgagctgtcgcaggtgcagctgaagtactcggacctcgccaccaccgcgggctacctttcgatgcttattccgccgctggcgtgggggatgctgaaaggcctgggctcgagcttctcaagtctttacagccacctggcgtcctctgccatcagcccggcggcgacggcggccgcgggagcggtggacggcaactactcttacgcgaacatgcagaccgaaaacgtcagcgggaacagtttcaacaccaacagttcgaccctgttcggccagatgagccatcagctgtctaacggggcgacgtcgacgcagatgcgggatggcagcacggtgactgactccacgcaggcgacgagcaagctgccggtgagcattaactttgcccgccagctggcctccgcacagcaggagatggcgcgtgaggcgcagacgcagtcgcagagtgcgatgcagagtttcagcagcagcatgtcgagcacgtggcaaacactcagtcagtttggcaccaaccgggggaacagcgacacgatgactcagggcgccgacagcaccatgagcgcgcaggactccatgatggccagcaagatgcgcagtgcggtggagagctatgcgaaggggcacaacatcagtaatgagcaggcgactcaggagttggcggcaagaagcacacgtgattctcttggtttttacggtgatgctcatgttaagggaggtatgggggttagcattcttggaaatggtgctcagattggaggacagttcggagttaaagcagctcgagatttcgaagataatgattctcatcaggctagcattagcacaagagccagtcaggatgcccgtcatgatctagatgcaaaagcctctcaggattttaaagaggccagtgattacttcaccagccgcaaggtcagcgagtccggcagtcatacggataacaacgccgcttctcgcgcggatcagctatcggcctcgctgagttctgcaaaacaaagccttgagcagtatgcgaccagccaggcgcgcagcaaggagtttgctgaaatggcgtcccgtaccgaaagcatgagcggccagattaatgaagaactgaaccagcagtttgcgcagtacgttcgcagacaggcgccacatgatgccgacaagctgctgacagatacggcatcatctgaagtggctgataagcgcagggagctggcttggtcgttcgttcaggagcaggttcagccggctgttgatacggcatattcatcggggcgttcggaaattggggcctcattggaaggggttgcgtcgggcgaaaacaaagaggctgttatggctgaccatcagttacatcagggtattattaaccaaagaacattggacaataatatccgtaatgatgtgaaacatcaggttgaagatatgacgtcggaatatcgttcacagattaatacgactgtaagaagtgttcgtgacggggagcaagatataaatcagcagtatactggattacagaaccatcataaaaaagatgaattatatcaaaaccaaaaatttaatgaagaaaaggctacccaagagcgactgccgggggcagacactccggatgaactgcttaataaggccagagagtatatggataagaatagttaa

SEQ ID NO: 166804 - DNA, 1854 bp, Enterobacter cloacae
atgaaacgccatgtaccggtcgtctcacttttagcgctcctggctctcacgttcagtgcttacgcaagagctgatgcgaacgcgcagtataaagccggctccgactttgcaaaacagatcaaggggcagggggaaagcagcctcagtaacttcaacccgtcagccacgcttccgggctataccgcctcacctgcggagacaaaatactacggtggcgtgacggcaaccggcgacggggcgctgaaggcagatgcggccactggctggaccaccaacgaggccacgaaggcggtgaccgacgccttcattaacaacccgaaggagactatctctcaggacgcgccgttcatcacagccagtaaggacgtgcaggggcgcgctgacagcatcatcggccagaccggccagctacagtgcagcgcgcagaacatcagccgcagcgagttcaccaactatacctgtgagcgcgacctgctggttgagcaggcctgtacgcgcacggccagcattaccggccactatgaagatacatctgaaacaaaacagattgttatccagtctcagaatatttcgtttgcttcctccgaagcgggatacacaggaacatggactgcgccggtgacagggaaggttgttgctgcaacagctacctattcctggaataaacgtctggcgttcagtaatcctaactggtttatgcgagtaaccacgcctttcgggttgatttccatggataacgataccggtagcctggcgctgagtagcggcatgcagctgaagaaaggcgctgggatggtgttttccattcgtaccaggagaaacaatcccactacagattcaatctggaagcacagcaatatgcgctacagcttcaccgttacgctacagattgaaattcccgcccaaaaatgggtaccagacgtggtctggaacgaatcctgcccgttcagcaagagcgaaggtacgctcaaaaaaaacgagtgcatctcgccaggcagcacgaaaacggtggtcgtcgacggcataacctatccggtgacgcaggcctgctggcagtaccgcgacacgtacatgacccaggccgccgattacggcagctgcaaaacgtatacggataacgccgcctgcacgctggcctcgcgcagctgcgccttcacggctgaagacggcagcggctgtcttcatgaatacgccacgtactcctgcgaaacgcgcaccgccggcaaggtcatgatatgcggcggagacacgttctgcctcgacggcgagtgtgaccgcgcgcagcagggcagcaacaacgactttgcgccggtggtctcggcgctcgcggcccttgccgcagcgggtaaggatgcggctgcgattaacagcgtcaacgtccgcgcctttaccggcagcgcgaagttctgcaagaaatttgcggcgggcttcagcaactgctgcaaggattccggctggggccaggacgtcggcctggccagctgcagcagtgacgagaaggcgctcggcaaggcgaaggagaaaaaactgacggtaagcgtcggggaattctgctcgaagaaggccctgggcgtgtgtctggagaagaagcgcagctactgccagtttgattcaaagcttgcgcagattgtgcagcagcaggggcgcaacggccagctgcatatcgggttcggcagcgccagcagcccggactgccgcggcatcacccagaccgagttacagcgaattaaattcgacgcgctggacttcacgaacttctacgaagacctgcagaacaaccagaacatcccggacaacgatgtcctgacccggcgggtgcaggaagaaatcgccgtgcagctgaaggcgcaataa

SEQ ID NO: 166805 - DNA, 291 bp, Enterobacter cloacae
atgagtatcagtaacaacactaacgcaacgttcagcttcgacgagtgggaaaaaaacgcgctcagtaaccttggatgcctgcaaatccgcatcagcaaagccctgcttaagtaccaggggagcaccgataaaacggcggtcggagaggatgcaacccgctatatgagcgaactcagggatgcagccagacgcatccagaaagccacgccagccattcagcagaaagtagacgagattgtcgacatgctgtgcgtgatggcgcaattttccggcattacgttcgacgaataa

SEQ ID NO: 166806 - DNA, 891 bp, Enterobacter cloacae
atgattgaatacctaaatattttcatacaggttgttgagcagggtagcttcacgaaagctgctgatgtacttcagattcatcgccccactgtgagcaaagcgatacaacagatagagcatgatctgggtgtaaaactcatttatcgcacaacccgaaagctgagcgttactgctgaaggggatgagttctatcatcatgccaggcatgttctggccgaagttaatgacatgatggccagtttttcaccgacacttccaccgcgaggacgcctgagacttgatgtgcccctggcgctggcgcattccatattgatccctaatctcaggcattttcaggcactgtatccaggtattgaagttgtgctggtttcttccgataaaaaaactgatttgattacggaaggcgtagattgccttgtccgcctgggtgcgcttcaggattcaagttttatatccagacgtcttggtgacatccggatggttacctgtgcagccccgtcttacctgcagcagcatgagcggccagaaacacttgcggatctggataaacatcgggcaattaacttttttagcgaccacagtcgtgacgtcatggaatggaagtttatcgaagacgggagcattgtttcgctatgtcctgcgggcagcctgctggttgataattccgatattctgctttcttgtgctctggctggtctgggcattatccaggctacctatgatgccgttgctccccatattgcttccggcgctcttgaagagattctgccgcaatacccatcggtgtcaaagcccgtgtcagtgatgtatcccgacaggcgctacctttctccaaaagtgcgcgtctttatcgactggttcagtgatgttctggccacgcagatccgctga

SEQ ID NO: 166807 - DNA, 993 bp, Enterobacter cloacae
atgtctaaagttattacctttaaccgcaccggtggcccggaagtgctggaagttgttgatgtgcaggtgcctgcaccgacagcgggtgaagtgcagatccgcgtacatgcgataggtatcaaccgtgcagaaatcatgtaccgcaacggccagtatgttattgagccggaatttccggcacgtcttggttatgaagcggccggcgttgtacaggcagtaggtgagaatgttgatgagtttaccactggagatcgggtaagcgtgatcccttcatttatgtttaatgaatacggcatgtatggtgaagtggtcaacgcaccggttcatgctgtcgtaaagcatcctgaaaacctttccttcgaggaagccgccgcaagctggatgatgtatgtcaccgcttatggtgcgctggttgagtatggcaaccttcaggctggtcagaatgtcgtgatccgcgcagcatcaagcagcgtgggtctggctgccatacagattgctaacatgctgggtgcaaacccaattgcactcacacggacctctgaaaaaagcgaaatgctccttaaagctggcgcagccgccgtcattgctactgcggagcaggatatggttgctgaaatcagtcgtgcaacagatggcgcaggtgcccatattatttttgatcccgtcggtgggccggacgtggcaaaactgacgcaggtgatggcaccacagggtatgtttttccagtacggcgcgctcgatagccgtgacatgcttgtgcctgtatttgatattctcggtaagcatctcaccctgcgtggatatgagctgtttgaaatcacgacggactctgaaaaaatggcgcgcgcaaaatcctttatcattgagggtttacgagccggaaaactgaagccggtcatcgataagacgttcccgttcgaagagattgcagacgcccagcgctatatggagtccaatggacaggtcggcaaaatagttgtgaccgttgagtaa

SEQ ID NO: 166808 - DNA, 729 bp, Enterobacter cloacae
atgatcccttcgcatctttccctggtacccttctgtccggagcgacgcgccgcgatggaggccattgccggggttgagcgcaggcgctcgcgcggcgcggtgtccacggcgttcccgtatgccagcgcctttttccgccgcctgaccggacgcaaacgcgtcacactcaaagagatacgcctgttcgcgccggtgctgagtgcgcaggagctgcggggaagcagggacagctggctgagggccattgatgccctgatagagagccgtggagtctgctgctggctgccgctgcccgtcaacgccggcgagcggctctttccggaagaaagcttcaggcacaccgaacgggcgcgccgacaggacgcgatgtttgccgagaaatacacccgccagcgccgcaaggactcctgcctgcgtgaacgggcgtaccaggcgctggcgggacaggcggaaatcgacctggccttccatacgccggaaacggtcagcagctggagcgcccgctggtcaggaactgacctgcgccagttcgacctggaggagatgttctggcgctggagcgagcgattcccgtcacttgatccacttgagcgctgggcgatggaaaaccagcctttctggagcgttatggccgaaacggatgcgctggcaagggaaagtcaggattctgtcaggcagctggagcgctggatggtccccaacaagctgaccgcgcggggtcaggtttga

SEQ ID NO: 166809 - DNA, 261 bp, Enterobacter cloacae
atgagcgactttaatatcgcaaagttttcaaaagaagatcaggacaaagtagccgtggacctggtggcgtcaggcgtggcgtacaaagagcgcctgaacctgccggtcgtcgctgaggtcgtggccagagagcagccggagcatctccgggagtattttattgaacgggttaggcactaccgcatgctcagtacacagctgccgaacgcaaacgatccgaagtatatagagatggccgaagccagtagtaagcccaggtaa

SEQ ID NO: 166810 - DNA, 1131 bp, Enterobacter cloacae
atgaaacgcgcctacaaatacagattctatccaacggccgatcaggttgagcttttggcccagacgttcggctgcgtgcgtttcgtgtataacagcatccttcgctggcgcactgacgcatactatgagcgtcaggagaaaatcgtctatacgcaagccagcgcccgcttaacggaactgaaaaaggagccagaatttacctggctcaatgacgtttccagcgtgccgctacagcaagccttgcgccaccaacaagccggattctcaaactttttcgccggacgcgccaaatacccgacattcaaaagcaaacgccataaacaggctgctacgctcaccgatgccgcgtttaaataccgcgatggcaagttgtacatagcaaagagcaaagcgcctttagaggtgcgctggagtcgcccgctgccgtccgtgccgtctactgtcaccgtgtccagagatgctgccgggcggtactttgtttcgtgcctctgcgagtttgagcctgtatcactgccgatcaccgcttccacggtcggcattgatgttggtttaaaagatttgttcgtcaccgataccggattcaagtccggcaatccccgccataccgctaaatacgcggcacgcctggcgctactccagcgccgtttaagcaaaaaggccaaaggctcaaagaaccgcgccagagcacgcttaaaggtggcccgactccacgcgaaaattgccgattgccgcacggatgccctgcacaaggccacccgcaaactcattaacgaaaaccaagttgtttgcgtcgaatccttgaaagtgaagaacatgatccgcaacactaagctatccagagcgatagcagacgcgagctggagtgaacttgtgcgccagctccagtacaagggcgaatgggcggggcggtcagtggtcgccattgaccagtttttcccgtcctcaaaacgctgtagctgttgcggtttcactatgcaaaaaatgcctctcgatgttcgtaaatggcactgccctgaatgcggcgcagaccatgatcgtgatatcaacgcggcacggaatataaaagcggcgggactcgccgtgttagcttgtggagagcctgtaaatcctaaaccgcttaacgcggcttag

SEQ ID NO: 166811 - DNA, 333 bp, Enterobacter cloacae
atggacgagaaggaactttttcgtgaactgatggatagtggtcacaaattcgtctggtatctccgtgaaccaggcgtccgcaatccggatggtaactctcctgacgttcagctaattgtcgatctgaacggaaaagaactggcccgtcgcattgatatcccggaaacgccagaaaatggctggcgcatcgattcctggcatgcgagagattttggggggctgccagaaggagctgcgaaaatgaatttgcatcaggtgtcaaccaagttccttctgggagaaacgcggtccatgcttcctgagtccatatctcatagctgcagagagaagtga

SEQ ID NO: 166812 - DNA, 975 bp, Enterobacter cloacae
atgcgaaatgatataggaacagccaaatcaactaactcggcaaaaaaacctgatcagtctctatggcagagagctgctgactggatatctgaaggggtgtttcattctcttggaaggcccgccaggctaaagcgtgccattgcttccggacaacttattccttacccaatcattgcccctgctgatacattctggttacggtcggtggttggctggcaggactggatgtccttatcggtgtctgccttccattcccgtccctggacgcttcactatcgcagaccgggttacctgcaccggttagaaagccttccgcttgctgttcctgaggttcagcagctgattagcaaggaatacattccccatttttcatgcgatatcacggatatccggggaattttggtatcaaaatcgatggaacatgatatccgtgacatcgatgagtttcccataatcagatgtaaagaaatggcggaaccggtgactgaagaacacctgaaaaaaaatatgcgccatcaggagataaggctcaacaatatgctgtttgccgaatacccatgggcagaacgcaggctctactggctgaacgatggtggttcacatcactttagtgctgcccgctatcaggcacgccgcctgggcattgcggttccgattaccggcacactttgccgctataaagttaacgtgcagatggtttccgtcctacgtaataaatggcatctgctggttattccaaaagatgaacttttcgacattttttttgatgttatggactcatttgaatgcgcgtttggttgttccgatttaccgccccgcatgcatgatgagaataaatccggtgttgcactaaaacttatctggcttgatcatgacaatcccagagctaatgctgtcgcagctgaccttacccgtgcaggttttcctgattttgcgaaacaactgacgcggctggccacacaaacatctgtctga

SEQ ID NO: 166813 - DNA, 1689 bp, Enterobacter cloacae
atgccaacaaatgagttcaaacccttttccattgctggtggggctaacgttatttctcaggctgattatgaggcactttctgcattgtcaactggattttcctcaggggtggcaaagtctaatgaaattaataaggtgcttagacagtccacctttattgctgctgccattgctcaatttgtaagtgataaggcaaacgtgaatgtaatggatgatggtagcctttctggatttattacgaagcttgttaatgcgctgaataaagtatctcagcctcttgatggaaccctgagcgcactggctacacttaccactggtgataataagcttccgtatttcacaggaaccgatactgcctcccagacggatcttacttctgtaggccgtgacttaatcgggaaaggatctgtctctgaaatcctgaaatatcttggtctaaatgacacagtagataaagccaaaggagccgtccagaaaactggcgatgaaatgagcgggaagctaacgctgccgcaaacatcttcatttggcgtaaatgttaataacaatatcggtggaagttcgattgcgattggggataatgacaccgggtttaagtcaggtggtgacggaattatttcccttatcgccaatagtgttgttgccgggtatttttcggaaaatgaattacagcatcacggaaaggtactaacaaaaatctttcaggctatttcaaccggaaacgcgacagagggggctggagggcttggttctcaacttaccagcggagcaccattttatagcccggtaatagtgcgtcaaaataatgataacaattactttcctttatggaagcaaattgtaagtcttcagtcaggttatccggtagctgcgtcaatgggattactcactacaggtgagacgaatttcccacaaattgtgctccatgcgaaaacagattttgaggttaacgataaactttgggtttttgatgttgcaacaggtgagctgcgctctccagcactaattaaagctggaggggctgttttaaacacaaacggagatgttagtggctccgcatggggtggggagctaacaaactggctcaatagtcaactcgctactcgcgacgcaaatattaatgcgcgtgccacggtagactgggttaatagtcaactcgctactcgcgacgcaaatattaatgcgcgtgccacggtagactgggttaatagtcaactcgctactcgcgacgcaaatatttatgcgcgtgccacggtagactgggttaatagtcaactcgctactcgcgacgcaaatattaatgcgcgtgccacggtagactgggttaatagtcaactcgctactcgcgacgcaaatattaatgcgcgtgccacggtagactgggttaacagcaattttaataagaaaaacacggctacattaggtttctcaggctggagtcgtgatgagtcaacggggctgattatgcagtggggaaatgttgataatgccaggggaacctactcgttcccacgggcattcaatgacacctgctttgccgtctttgccacaaataaggatcggcagggcggcgcgattgataacgcttatggttatccggtaaacaaaacgcaattctatctggccagcaaagcgaactctggcgctgataccgcatacggcatttcatggtttgcactggggtactga

SEQ ID NO: 166814 - DNA, 393 bp, Enterobacter cloacae
atgaaagtgagttactgggtgctcattgtgacgtttatcgtctgtattgcaggcggtctagtctggtcagcggatcactaccatggaaagtttctggaggaacagcgtcgcgctgacgatgcagaacagcgcgctgattcctctgagaccatcaccgcgaatgtcctgcgcaccgtggcaataacgaacatcattctggagacaaaccaacatgccaagcagcagatcgcactggagtcacagagaaccgagaacgatatcaaggctgctgttgcggatgatgagtgtgctgttcgtgttgtgcctgctggcgcagttaagcggctgcacgactacgcggacggtctacgtgccggttccggtagttccgttaccagccagcctgacggctga

SEQ ID NO: 166815 - DNA, 366 bp, Enterobacter cloacae
atgcccacctcgcccaccagcgataacgtaaacaggtgttttatacgcgatggcggcgggcagcgcccagccgacaggagtaaccacgacagcgacatgctcgaccaggcgcatcagctctttgatattgagctcgccagcgtgcattttcagatcggcctctggctcttcacccaccagccactcttccccgtcctgcaaatcagcaacgctaatcacgcagaaatgtttccgcaggattctcgatgcgcgcaggaggtaatcgggatcagggtttctggagtcgcttcgccattcagcacgaaccgttgccggacggatgacggcgatcggcttttggtgcgtaaactgcgccgggccaaatga

SEQ ID NO: 166816 - DNA, 747 bp, Enterobacter cloacae
gtgacacgcaacgaaatcaacacctaccagaagagttccatcgaacgtgcgacgtttccaactgcgcaatatctggagtttatccggcaacaactgattgttgcgaccgctgatatgagtggggcgacaaaagggcaattaatggcctggctggaaaacgcccagtttgataccgacacattcaagcgaaagaaaccccgaataatggatgagataacagggaaaatgatcaccctggataacccgccaatacccggtaagcaatcccgcgccaagggatcgtcagttgcgttagtgagtccagttgagttttcaacggcgtcatggcggcgggcagtgctggcactcgacgaccaccagaaagcgtggctactgtggaactacagcgaaaacatcagctttgaattccaggtctcgattacgcaatgggcgtgggcagagttcaaatcgaaactgggtgcgcgcaaggtggcgggcaaaacaatggagaggttgagagctctgatatggctggcggctcagacagtgaagaatgatattaaaaatggagaagtcccccccagtaaatggcttgcggaattggttgaggtgagcgtaacgaactggtcacagaactatgcggagcactgggaagccatgttgcgcctgttccgttatcttgatgctgattctttaaaagctgtagccagatcacgttcacaacaaaaagcggcaaattatcaaccaagtattgcagaaatgaattaa

SEQ ID NO: 166817 - DNA, 183 bp, Enterobacter cloacae
atgagctatttcttcctgattatggtgatcagcagtcaaagcatgaatatgcaggttgagccgatggagagcatggaacagtgccaggcagcgatcaaagcgattaaccttgccgacgagcagcgctcatggaatgaaacgtcgccgagcatcaacaatatcaagtgcgtggaggtcaaataa

SEQ ID NO: 166818 - DNA, 591 bp, Enterobacter cloacae
ttgcggctgatcaaggtagaaaccggtagagagaatgcccttatagccgttctgcgccacctgccccagcgcgtcctgtccctgccaggactggatcagaatgcttttcggcagatcgggatggtagatctcatcccagccaaccatctgccggtggtgcttctcaaggatcgtctccagcttgcggttgaaatacgcctgcaacgcatggctgtccgccagtttgttgtcgcgcatgaatctctggatcgcagcgttcgctttccactggctgtcgtcaacctcatcgccgccaatatgcagatacggatccgggaagatcgccgccagttcgctgaccatcgcgttggcaaaggtataggtcgcctctttggtgggatccagcactggcttaagcacgccccagtggcgctccatggcgtacggccccggcgcgctcatcagctccgggtaggcgacggcaatcgccgaggcgtggcccggcatatcaatttccggcaccacgcgtatgccgcgctcggcagcgtaacgcacaatctcgcgcatctgctccggggtgtagaacagcccatcgctggcaagctgggttaa

SEQ ID NO: 166819 - DNA, 699 bp, Enterobacter cloacae
atgagcaccagagcggagataaaggatggtgcgcagtttgacgttttgcgaaggggtgtcgtttatactgaggtgcttggctgggttgacatggggcacgctcggggtagtgatatcatggagcttaaaagccagtttatcgcgggggagcttagcggcaaaccttcctacatggtgatgtatcggcaggacatgcactttgtgaaattcaactcacaattcggtgtaggcaagttctctcgctgggagattaaacgtggccggagtaccgaagatattaacagaatcatgctggcgatgatgatgaacacagcagctcgatttgaaggcttgcaaagcctgcgggctttctcttggtacactgatagtggctttagtggtgaagacttggtttctgatctgttcggattccatcgagctatcatgccaggacggtacggataccgccttaaacctgtcagttatgatgccgccgttcgtcgctgggatcattacggtgctattggttcccataaaaaccgtggtttccgtccgattctgttccctgacccggaagatccgtgtgtgcgtcaccagccgtacacggtgaacctcccgcattttatgacatggctgaagccgtgggacgatttcagctctggtaatgtcaaagttattacagacaatgggacgtcacttgggtacacaggggtgaagtga

SEQ ID NO: 166820 - DNA, 1125 bp, Enterobacter cloacae
atgctgtttctattatctcctaactcaccacgatttcaggtatttgtattactcaatgcggagctactgcatttcatcgaacattcagtttcttccggaatcttccgtgaaaatttatttactgaaggtgaagtcggtaaggcttgttggaataattcaaagggtaataatcaaaaagctaagaatgatctaactaaagagaaattcgaaaagctatatatagagttacagaagactactgaaggtgtgcggcgccagttatttgaatcaattcgtgataatcaaaatctacagctttttttcagcaaccctaatagaggaattctggattttttaccaaaaacatgttttgaagctttaaagaatgttacaactcatctttattgttcgactaaggatatccaagcaataaaagatcaggcgggtggggtagatataaacgcccactttaatgcttttcgcaatgacggagtaaatggaaatatctgtaaagcctgtgggatgagagaacttgcacctttcagggctggcgttcaagaagaggagcagtggcgtgcagattatgatcatcaactctgtaaatcaaagtatccgatttttgccgtacaccctgataatcttattccattatgtgatgtttgcaaccaagatgcaaagaaagcaaaagatcttttccgagatagcaacagtaataatcggttatcattttatccttatttagaagaagccagaaattttatagatattgacatagaaaggcttagagatccggaaccaatgatcagtgttatctggtcaactatggatgaagagcttattaacaagctgaacacttgggatgagatctatgagatccgcagtcgagttgagggtaagttaagatcgcttgaattggttgttgaggatgaaattcatcctattgatttatccgatcttcaggaacagttaattcgtagggccagacctatccctgaagctactcttaaacgaaaagagtgggcattctggtaccagaaattattttatctattatctcaaatcgacttggagccatttgaagaaaaacttttttttattcaacagcaaggactcgatggtggcgaatatatattgggtgaagattaa

SEQ ID NO: 166821 - DNA, 1713 bp, Enterobacter cloacae
atgcgcatcttgttaatacacctgcaaggacagtataaagggttaaaggatcaaatttttaactttagtgagactgagggcaacatcgttgcattcattgggttgaacggttctggtaagtcacaacttcttgaactgattgcggaaacatttggttatctggaacgttattttcgcagtgattttaaatgtcgtaactggtttccttctgttgccattgaacttcagtattgtaaccaagcctatgattctgataggacaacatttgtctataccgtgaacattaataaccaaggacaagtttctataagtcgtgatggaagccatttggatctgaatgatccagttaatgaaggagttagagaggagattttacctagtcacatcgtaggttactcttcaggactgaatgaaaatctccaaagaccatttatgaaaaatacagttcaatatctggacgttatgaacattaaacgcgcttgggagcgtcgattatcaattatcaatgaagcacgaaatacgatcgggaaacatctaaccgaatcggacctagaattgtttggaagccaattctctgaagcctacctttactaccaaggtcgatatcctgcgttgtttccagatttgcctgtaggttcaagtgtatcagacaacttaagcattggcctacgaccaacggcactacctcggcttaagtattttgaccaagatactacggcgttaatgctggccagtatgggaatgatgtctgataccgaacaaaaggaaatatggaaaaataaacaacggtttaacaaaattcattccgtaacactacgttatgatcttcgtaaatttacttatgactcgggagcgttattagatattgccaagctgataaaaagtatccgtagcatcgatcctagtagctataatccattatcgggtgtaagtgaaacatcggaagagttttacaaccagtttgaactcgattatttgggaggtgaaatcaccattgactatagtgctcgtaatatacaagaagtactttctgatagtttctttactccacagatattgttcgagaagctgtatcgtttgcaacttctagctgctgatttttggatgggtgagactaaacgtcagcttagacaagatagctttgttctttcggtcaaaaaaccccaaaaatggaagtcccctattcaagtattgtcattgaagcttaccgatggtaataattgtatcgaatttgatgatttgtctgatggtgaagctcagcttatccaaattttatcaatggcgtctatatacaaggatagccgaaccctcttcctcttagatgaaccagaaacacatctaaatccatcttggcgtacgtattttcattcctatattgaagatgtaatttgtgctgataatgatacagttcaattatttatttcaacacactccccctttatggtgtcgtccctaaatcgaaaaaatgtttaccagtttaggcgaaacaataatggaattattgatatgcaagttgtgcagaatgaaacatatggtgcttcattcgatgtattgataaaagatctttttgagcttcgctcactgatctcacaaagtgtagttgatgaaatccgtgagcagctgaaacttggagacggacatgccaaagaatggattgaaaacaaccttggtttatccgctgaaagagcatatctactaaggaaattaagttaa

SEQ ID NO: 166822 - DNA, 1494 bp, Enterobacter cloacae
atgaatcgagcagttttaccttctggctggaaaaccgtcaaagtaggaagcattgctcgagtgataaatggtgcaaatatttcctcaaaatataaatccaaatcagatggaaatatccctgtatataaagctttagacatcatagaagctattttaaataaaaatggtaatttaacaaccgctaatcacctcattgataatgaaaaaattgctgagctaaaaagcgaaatgttatcgataggaactactgtattcccaaaaaatggtgaatccgtaaatttaaatagaagagcttatgttctgaaagaaggattcgctgacaataatgtcatggcaattttgcctgatcattgggaaagttcacgatttatttaccactttatgcggtcggttgatctgcgggatatgtctcgatcaactacagtaccttctttacgaaaggaggatattgagaatttagcgattgcatacccatcactcaacgaacaaaaatacatcgccaacttgctagactctttgctaactcagattgaaactaccactacgcgcgtagaacatatcagggccatcttaagaaactatcggcaagccatattaactaaggctttcaacgggacattaacagctgaatggcgaagagagcataagaaactaaaaaaaatcagcttatctgagatcagtgattactgggcagctaagaacaaaaaaaataataaaaagtcatcaatcccgaaatctcaccacatagatctaaccgaaaatattcctatcacatggttatccacaacaataggccatgtttttgacgtccagattggtgcaacaccaaaacgtaatattcatgaatattggaatggcgatctcccatgggtcaatagtgcagaagttgccttttgcaagattagctccacaaatgagacaattaccgagctggctctgagtaatacgtcaacagcaatacatcctccaggtaccgttatgcttgcactaaacggtcaggagaacgtgaggggtcgtgcagctattttggatatttcagccagtcatagccagaatactgctgctttgcgcatccctgaagggtatgtgatgtctgaatttttgtattttttcttgatgcagcaacatgaacacatactgcgttatggagtggggagcatacaaccaactttgaataaaagtcttgttcagtccctagcatttaaacttccaccacttgaggaacaaattcaaattgtccgccacttagaagaactcttcgacctttctgatcgcatagaaaaaaagctgaatgcagctttagcttctatcagcaatcttaaccaatctctgctggtcaaagctttttgtggcaatctcacatcacactggcgtgctgctaatccggacttaatcgctggggataattccgccgaaacctcacttaacaaaataaaaacagagcgtgaagcaaaactaccgcccaaaaaaaaccgtgaaacaaaggctaactga

SEQ ID NO: 166823 - DNA, 1608 bp, Enterobacter cloacae
atgactaacaatgatatcgtacaaaaactctggaacctttgtgatgtcttacgtgacgatggtattagttacagtgattatgtgactgaattagtgtttctactattcataaaaatggctcatgagaatactgcagccggcatcatcaaggaacacccactcccagcaggttgtcgctgggaggatatcgctggtaaatcgggaataatcctgctcaatgattacaagcgaattctacgatgcttatctacaggtaaaaatgacgatggtgaacttgcacatgaagatccgctcatagaggctatttattcaaacgctcagacccgtctcagtgagcccaaacgtttagagcaaataatcaaaacactgaatcaaatcgattggtctagcgctcaaaaagatgggctaggtgctttgtacgaaggtttgttggaaaaaaatgccagcgaaacaaaatccggtgccggacaatattttacgcctcgggcactaatcaactgcatagtacgatgcatcaagccacaagttggcgagcttattcaggatcctgcggcaggtaccggtggatttttagtttcagctgaacagtatatgagatgcaatacagataactatcaaagactctcttctaacgctttaaaatttcaaagaaatatagcttttactggcgtcgagctagtgcctaatactcgcagactcgcactaatgaactgccttcttcacggcatggaaggaggcaatgaaggcgtagtgcatctaggcaatactctcggagaggcaggtgaggcattaagcccagcagatgttattctcgctaaccctccttttggtagcagcatgcgtgaggatatttccaattcacgtatttttaagtacagtacaaccaacaagcagttggcttttttacagcatatttatagtaatttaaaacctggtggccgagcagctgtagttttacctgataacgtcctgtttgaaggaggagtcggaaccctggtgcgccgcgacttgatgaataaatgtaatctgcacaccatattgcgcctgcctacaggcattttttatgctcatggtataaagaccaacgtgttattttttaccaaaggtagtgctacggatcgatatcaggaagagaattgtacacaaaatgtctggatatatgatttgcgtacaaatatgccaaattttggaaaacgcacaccttttggtgattccaccgtaggcttcgcaaaaaaagactttggcaaagaccctcaccttggtgcatttgaaaaggtctatggtaataatccaaacggaataagccctcgcactgaaggtgactgcaacttagacgttagagtaaatgacaataaaaatgcgactaaagaaaaccaaaactctgaaaaacagcttgttcactcgtattggcgtagtttcactcgagagtggatccgtgatatcaaaaatgattcactagatattaactgggtaaaagaaaacgaaaatatagatgttgcaatacagccagaacctgaagaacttttaagtcaagcaaaggtagaactgaatattgcgttaaatgagttaaatatactgatggctgcgctagaaggagcaaaaatatga

SEQ ID NO: 166824 - DNA, 171 bp, Enterobacter cloacae
atgctcgccaatcagcacgaaggcaacgtatttaccccgcagcatccagacatcgcgaaaaccatccaccttcagggcatggtctggcggcgcgggctcaacgcggggtacatagctaataacctggcggttttgttgacgaagaggtttcataagcgacgggttcactaa

SEQ ID NO: 166825 - DNA, 420 bp, Enterobacter cloacae
atgactgaacaatattactacagctattcggcaaaaggttttttctggctaagcgaagatgaactaaagggaaatgatattcccgctgacctgatacccgtcagcgaggaagagcacgacgcactgttcctcggtcaggagcggggtaaatacattaaccatacacctgatgggccagttctggttgaccagcctgattactcgccagaagaactcattgcgcaggcggaaagcaaaaagtcacgtctgatgcagacggctaacgcagagattgctccattgcaggatgcggttgatttggggattgcgacgacaaaagagattgccgcggtgtctgaatggaagaaataccgggttatgctgatgcgtattgattgtcgggcgattcctgatattaactggcctgacgcaccggtatga

SEQ ID NO: 166826 - DNA, 753 bp, Enterobacter cloacae
atgggattactcactacaggtgagccgaatttcccacagattgtgctccatgcgaaaacagattttgaggttaacgataaactttgggtttttgatgttgcaacaggtgagttgcgctctccagcactaattaaagctggaggggctgttttaaacacaaacggagatattagtggctccgcatggggtggggagctaacaaactggctcaatagtcaactcgctactcgcgacgcaaatattaatgcgcgtgccacggtagactgggttaatagtcaactcgctactcgcgacgcaaatattaatgcgcgtgccacggtagactgggttaatagtcaactcgctactcgcgacgcaaatattaatgcgcgtgccacggtagactgggttaatagtcaactcgctactcgcgacgcaaatattaatgcgcgtgccacggtagactgggttaacagcaattttaataagaaaaacacggctacattaggtttctcaggctggagtcgtgatgagtcaacggggctgattatgcagtggggtaatgtggataatgccaggggaacctactcgttcccacgggcattcaatgacacctgctttgccgtctttgccacaaataaggatgggcagggcggtgctattgataacgcgtatggttatccggtaagcaaaacgcaattctatctggccagcaaagcgaactctggcgctgataccgcatacggcatttcatggtttgcactggggtactga

SEQ ID NO: 166827 - DNA, 2202 bp, Enterobacter cloacae
atgacagtaaaatataaaacggtcatcaccaaagccggtgccgaaaaactcgcggcggcgaccgtcccgaacgggaaaaaggtgaattttacggcgatggccgtcggtgacggcggcggtacgctgccggtgcctgacccgaaccagacaaagctggtcaaagaggtctggcgtcatgcgctgaacaaaatcagccaggacaggaaaaataaaaattatgtcgtggcggagctgctcatcccgcctgagaccggcggtttctggatgcgcgagctcggactctatgacgacaccggcacgcttatggcggtcggcaatatggctgaaagctacaagccagcgctggctgaggggtcaggccgcgcgcagaccgtgcgcatggttatcatggtgagcgacattgagtcagtcgagctgaccattgacacctcaacggtgatggcaacgcaggactacgtcgacgacaagctcgctgagcatgagaagtcccgccgccatcctgacgccacgctgaatgaaaagggttttgtgcagctcagtagcgccacaggcagcgtgtctgagagcctcgcggcgacgccgaaagcagttaaggaggcgtatgaccttgctaatggtaaatatacggctcaggacgcgagcacagcgcaaaagggcattgtgcaactcagtagcgcaactgatagcagtgacgaagggaaggctgcaaccccgaaagcggttaaggaggcgtatgaccttgcgaatggtaaatatacagctctggatgcgagcacaacgcaaaagggtattgttcgcctcaacagtgcaattgacagtgatgctgaaaatcttgcagcaacatcgaaagcagtaaaaatagcgatggaaaatgcaaatgcaagactcgctaaagacagaaatggcggcgacattcctaataagcagttatttattcaaaacataggcatgcaggatactgtaaataaagctgacggtgctattcagaggtccggcgacaacatgacaggccctcttggtctcacacgaacatcctcctttggtgtggctactgagaacacgctcggtgggaactccattgccatcggtgacagcgattcagggtttaagtcaaatggtgacggtaacattgcgctgatggcaaatggtgttcttgccgggtatttttcggaaaatgaattacagcatcacggaaaggtactgacaaaaatctttcaggctatttcaaccggaaacgcgacagagggggctggcgggcttggttctcaacttaccagcggagcaccattttatagcccggcaatagtgcgtcaaaataatgataacaattactttcctttatggaagcaaattgtaagtcttcagtcaggttatccggtagctgcgtcaatgggattactcactacaggtgagccgaatttcccacagattgtgctccatgcgaaaacagattttgaggttaacgataaactttgggtttttgatgttgcaacaggtgagttgcgctctccagcactaattaaagctggaggggctgttttaaacacaaacggagatattagtggctccgcatggggtggggagctaacaaactggctcaatagtcaactcgctactcgcgacgcaaatattaatgcgcgtgccacggtagactgggttaatagtcaactcgctactcgcgacgcaaatattaatgcgcgtgccacggtagactgggttaatagtcaactcgctactcgcgacgcaaatattaatgcgcgtgccacggtagactgggttaatagtcaactcgctactcgcgacgcaaatattaatgcgcgtgccacggtagactgggtcaatagtcaactcgctactcgcgacgcaaatattaatgcgcgtgccacggtagactgggttaacagcaattttaataagaaaaacacggctacattaggtttctcaggctggagtcgtgatgagtcaacggggctgattatgcagtggggtaatgtggataatgccaggggaacctactcgttcccacgggcattcaatgacacctgctttgccgtctttgccacaaataaggatgggcagggcggtgctattgataacgcttatggttatccggtaagcaaaacgcaattctatctggccagcaaagcgaactctggcgctgataccgcatacggcatttcatggtttgcactggggtactga

SEQ ID NO: 166828 - DNA, 201 bp, Enterobacter cloacae
atgtctgactatccaaccattgcgctgattggtcccggtgcgattggcaccaccattgccgcggtgcgcatgacgcgggccgtacgccgctgctgtgcggtcgcaccgcgcatccggtattacgcctgcgtcacgatgaggatgaaactgtggtgcccggtccggtactcaccgatcccaccgtcattacccgccccgtag

SEQ ID NO: 166829 - DNA, 591 bp, Enterobacter cloacae
atggctgagtatttcccggcagtttttgagggtgaggcttttaattgtccatattgcggggtttatgctcggcaattttggcgtacattattcggtagtagtcagcgtctgggggcaaaggatacacccttcaaaatgtcgtcatgttcacattgtagtgaaagtgcctattggttcgaagaaaaaatgatggtccctgctgcgggtaatgttgagttgcctaatccagacatgccagacgactgcaagtccgactacatggaagccagaagcatcattaatctgtcacctaaaggcgctgccgcactccttcgtctttgcctccaaaagctaatggtccacttaggcgaaccggggaataatattaatactgacatccggtcactcgttcagaaaggactacctgtacgcatccagcaggcagcagatatctgtcgtattgtcggcaatcaggcggtccatcccggagagattagtcttgatgatgacccgcagttggcacatggtctctttaagctgctgaacattatcgtcactgagcagattaccagaccgaaagaaattgaggctatgttccaaagtatgccttga

SEQ ID NO: 166830 - DNA, 954 bp, Enterobacter cloacae
gtgctgaaagccgctgttggtgctggcacaacgaccgatcctcagtgggctggtgcgctggtggagtatcaggaatacgcaaatgattttgttgaattcctccgcccgcagaccattatcggtcgtttcggtcagggtggtattcctgcactgcgtcaggtcccgttcaacattcgtattccggcacaaacttccggcggatctgcaagctgggtaggtcagggtaaggccaagccgctgaccaaattcgactttgagtccatcacgttcagcttcgccaaagtcgcagccattgcggtgctgaccgatgagctgatccggttctccaatccggcagctgatgcactggtgcgtaatgcgctggcagaagcggtcattgcacgcctggatacggacttcatcaacccggcgaaagctgaagttgctaacgtctctccggcctcaattaccaacggtattgtggctgttccatcaaccggcgatccggatgcagatgctgaagcggcattcgctcagtttgtctccaataacctccagccaactggcggcgtgtggatcatgtccagcaccaacgcgttggcgctgtccatgaagaaaaatgctctgggccagaaaatgtatccggaaatgaccctgcttggcggcacattccaggggcttccggctatcgtttcgcagttcgccggaagcaatcttaccctgctgaacgcgccggatatttatctggctgacgacggtggtgtggcagtggatatgtcacgtgaagcctctctggaaatggaaagcgatcctactggcgacagcgtcagcccaaccggaacggagctggtttccatgttccagacgaacagcgtggctatccgtgccgagcgctggatcaactggaagcgtcgccgcacggcagcggtggcggttatttctggtgtgaactacggctctaaccagggaagctaa

SEQ ID NO: 166831 - DNA, 531 bp, Enterobacter cloacae; identical to SEQ ID NO: 34053

SEQ ID NO: 166832 - DNA, 366 bp, Enterobacter cloacae
ttgctgctggatgaagcgtttgaacttgagggtgatacggggactgagtttgatgttaatgcgctgctgcgtatggacagtgaacgccgtatcaaatccctgggggaaggggtgaaaaatactatcctcacaccaaacgaagcgaggaaaagtgagaacctgcctcccctggctggaggggactctctttaccttcaacagcagaacttcagccttgaggcgctggcgcgccgtgatgcttcggatgatccgtttggtaaaagcagtttgtcccaaccttcagcctcaacgaatgaaggaaaggctttaaccgatgctgagcagtcggcagccaaagccatgatcagaggatttcttacaaaatga

SEQ ID NO: 166833 - DNA, 252 bp, Enterobacter cloacae
atgaccaaagttaaaatcgattacagctacacaaggaatggcacaacgcaagaacatactgtcacattagatcatgattttcatatcattgatttatatgatgaaatttcatctattgaaaatattccttggctgatacctgctcgtaaacgaggtggagagcgtaacgaaataaccgatgttgcttataatgctatcaagcaagctggagttactgatattaagtggacaagtgaagttattgagcgttaa

SEQ ID NO: 166834 - DNA, 192 bp, Enterobacter cloacae
atgacgccccagcaattccgccagtggttcgcctcgctgcctgaaaaatatcagcgtcaggccaaagccatgtacgacaacgcccggcgtggcggtggtgttcataccgcatcaagcctcgccttgattaaaaaccttgtagaagattcgattaactttgacggagagtttcagtatgacaaccaccagtaa

SEQ ID NO: 166835 - DNA, 1062 bp, Enterobacter cloacae
atgaatcttgtgaatgcgatagccaacctgcccaaaaacaggcagtttgattatgtgaatgaaagtaatgctgggaagatcgttgtcgactcgattaagtcgccacaaggcccgatacgttttaagcgttttaacccaaccaaaggcgagacgctcaaagatgcaaagatggacagcatctctagccagatgctttggcgtttggctaacgcaattcaagaggatgcgcctatcaatttagatagagtgcttggtgcaagctataactctcgttccgttattgagagtttgcttgcacacacgccgcaattttattggtgtaaacttgaccgtttagaagttattaacactaaacagacggtaaagaaaggccacaagcatcttgtatacttacccaattcgccacacgaaaacggtaagctctctgaatacaaagctaatattgtaatatcagagatgaaaacagaggttgtatatcaaagcgttgatctggaaacgatccgcccagttgagggcatgtcgattgaagaatcaagaagacatgcacaaatccagattgcattagtaaaaatcggccaccacttaggctacagaacatgggtggcagctaatgatcgtggacttaaatataacggaaaagtcattgctcaaatggacggggtaattgatagcctctcaaatgaaaaggtattaagctcgtacagcgaggccattgacggtgcaaaactaatagattgcatttggtttagaaatgggaaattaatgcccgccgtgatggaaattgagcacagcactgggattaaaagcgggttaacccggatgaagaatttttgtgactatgccccacggcttcaagatatcagatggacaatcgtagcacccgatgaatatcgtgctaaagtcattgagtttgcgaatatgccgcaatttcgagagctggacacaaaattcttcccgtactcagcagtcgaagaactgtattctctttgtgaacgacgcaaaccacaaggaattacagatcaattccttaatgcgtttatggaaaactgcgtaaaccactga

SEQ ID NO: 166836 - DNA, 1140 bp, Enterobacter cloacae
atgtccacacttaaacccgccatcttctctttcttttccggctcaggctttttagaccttggctttgaaaactcaggctacgaagtggtttttgtgaatgaatttcacccgccgtttatggatgcttacaagcactcgcgtgcggtaatgaacaagcctatccctcgttttggctatgccgaaaagagcatagaggaagttgatcacaagcagttgaaagacgctattaaagcactcaagaaagaaaaaagactgattggcttcattggtggcccaccttgccccgacttctccgttgcgggcaaaaacaaagggcgcgatggggagaatggtaagctgtcccaaagctacattgatataattgtagagatgaaacctgacttcttcttgttcgagaacgtcaaggggttatatcgcacactcaagcatcgcgagttttttgagcatctcaaagagcagttgatgaatgtgggttacactcttcatgaaaggttgattaattcgattgaatacggtgctccgcaagaccgagagcgcattattctattgggtttccaaagtaagaaattagccaagtcatttaattggagtggcagattataccctgatcgtaatgcctttagttacagttggccaacaacaaatgaattttccgaagactctatactggcaatgccagagtcactcccaaaagaattaactgttgattactggtttaagaaaaacaatgtttctgaacatgtgaacgcaaagcatgtgtttacggccagagccggattagttcgcttcaaggctgttgcagaaggtgacgatagtaaaaaatcttacaagcgcctccaccgctggagatattctccgacggctgcttatggtaacaacgaggttcatttacatccatataagccacgcagaataacagttgcagaagcgcttgccattcagtctttgccgaaagagtttgaattgccaccttatatgactctttcaaatatgttcaaaactgttggcaatggtgttccttaccttgcagccttcggaatagcaaaatctatattagagcatttagggataaaagatgaatttgacagcaatgaatcttgtgaatgcgatagccaacctgcccaaaaacaggcagtttga

SEQ ID NO: 166837 - DNA, 1182 bp, Enterobacter cloacae
atgaccattgatgaatttctggcgatggcagggattccaaataccggatcaggcgagtatgtgtctgcgggtactgcggaatctctgccggcggtcatgaacgccgtatcagttatcagtgaggcggtggcaacaatgccctgctacctctaccgcgtgcgtaacgataacgggcgtgaggcgcgagaatggctgagcaatcatccggtggattttctgctgaacgagcagccgaacgactgccagacaccttaccagtttaaacgcacgatgatgcgccattgtctgctgaatggtaacgcctatgcggtgatccagtggggccgcgacggccagccgcaatccctgcacccgtatgcgccgggagcggttgttcctgagcgtatcggccagcataagtacaaatacaccgttactgaaccgtttaccggggctgtgcgcacctacctgcaggaagagatcctgcacctgcgttactcgaccgatgatggttttctggggcgttctcctatctccatctgccgtgaggcgctgggtttaggtctggcacaacagcgccacggtgccagcgttatgaaagatgggatgatggcgtcgggcgtggttactacttctgaatggctcgacagcgtgaagggcaaacaggctatggatgctctggatcgttataaaggggctaaaaacgcagggaaagtgccgatcctcgaaggtgggatggattacaaagaactgggcatgaacaacaaggatgccgaatggctggcctcccgtcgcttcaccattgaagacattgcccgcatgttcaacgtgtcgcctatcttcctgcaggaatacagcaacagcacctacagcaactttagcgaagcgagccgcgcctttctcaccatgacgatgcgcccgtggctggctaacttcgaacaacaaatcaaatctgcgctgttggtggcctctccggttccgggaacccgctatcaggtggaatttgactctgctgaccttctccgcgccacgccaaccgaacgttatgccacttatgagcgcggcattaagaacgggattatgaacccgaacgaagcccgtgaacgtgaggggatgccgtcgcgtgatggtggtgacgaattcagccaggcatggaagcaggaagtgaagatcagcaaagacggcaaggaaggtggcgaatga

SEQ ID NO: 166838 - DNA, 639 bp, Enterobacter cloacae
atgtttaaacgtgttaaatacggcttgaaggaattcgattcatccttctcaatagcggaaaaactttatcaaacagctcaattcttaataatatctctaggcggaacgggtgttttgggtttactggcatggatagatccatattttaaaaaaattggttatcttgcatatggtttggtttttctgatctgcgctttaatattttttagtatgttgtatttctataagatggccaaacttataactatcaaggaaagatattacttaaatttatctgagcaaaaaacaaatatcaaccctttaagtgattcattttctgacttagttattaatttggaggatttgagacttccattgaatgaatcacataaaaataaaacattcaggcgttgtaaactaaaaggtccaatggcgatactaattggtggcggagtagtaaacaacaataacttcgcatactgcggggagtttataaagttgcctttaggaaaaaaccaagtagatctcgctggtgttttggttttcttaaattgtacttttgtggagtgtacatttattaatactacaataatagttcctcatgatgttgcagcacctttaagtagggatgtgccgaatgtgagatttgtaagtatataa

SEQ ID NO: 166839 - DNA, 465 bp, Enterobacter cloacae
atgctgagggggtacgctataacaaacgccgtgtatcagccgcggcagtgtgatgtagtcatcctgaatcttatccgcaacaatcagccgttcagctatctgcatttgatactgaggtgggcggccagtgcccaagtaaaaactcaccaacgtttccgggaaaccattcagccattcaccaacgcgttcaataaaatctggaacaggcagcgcgtcgtcttccagcaccactacccggcaagattgctcagcagcccattcgatagcgcgacgatgattccagttcgcgccgtggtgaccgtcatcaataagcagatgagcatccagcaacgcggcaagacgttgcgcttgtcctatgcgggtgtgatggctgaccaccacaaacttaatctcttcagccaccagcgaatctccaataaaaaagccgcacgatggcggctactgttcatttgtcagggtgtttaa

SEQ ID NO: 166840 - DNA, 1149 bp, Enterobacter cloacae
atgtcctgttgtcgtggatggactatttccatcgataagaaaacacatgggaagtatatttcctcaacgaatacggaaatctctcgtcttgcaaaagagaaccttattccactgcagaaggggaaaaacagttactcaagagtgaagttaaatgaggaaggcaattgtccatttatcgacgaagataaactttgcctgatacatcgcgagttaggtgaaagcgcgctgtcccatatctgtagcacctatccgcgcggttcaacgcgttacgaagaagaaacccggcatacaatgacgctttcatgcccggaggtggccaggttagtgcttttcgaccctgatgccatgctcctccaggaggaggaatcgttacgggcagtatacaaaaccaaccttataggtcgtcgtcagtctatgtctgaagtcgatcgggttatccacctgtttgcctggaatatcattcggtctccgtcacgtaacgttgaagaaaacttgatggcgttggctcattttattgtatgcctgcaacatgttgattttgatctgcataataagcttaaccaggtagaagactattatgaaatgctgatggccgatctgagaaatggtcattctctgttaaagacaactaatataggtcgttcaaacgccatgaagtatctggcgttatctgtcatggggtctactgttgctcgcttttctgcgagggaagaaatcattctaagtggacatagagctattgcggactatctggatttcaatcagcatcatgaccctttggaactggataaaaaatttgacgccctcactcagcaatggcattcgctttgtgaagatagctgtttatccgaaccgcatgttttacggaactaccttttatacaaattatatagcagttacttccctggcaatacgcgtgccaccatcctgcgtcagttttatcgcattgttctggattttttctatctgaaaatattcctgagcgtgaaggcgagtcaggaagagattcatccgcataccctaatgaaaactatcgcaggtttctcagaaaagacgatgcataactcaagcattgatgcgcgactggataacgcgattgataaaatcaacggcggcgacgatttgtcttgtctgctgcttattggctag

SEQ ID NO: 166841 - DNA, 195 bp, Enterobacter cloacae
atggtcttgctgtacaccggcaccgaaaacatccatgtattaaaacgtcacgggttagacagaaaaagggggaaaaaaatgagcagaatgggcatgaaaaaaaacaacacgaaaagcccggtgagggcctctattttctggtcagtggctagtccagtagagaaagtgcaagatccaggtgtttgcatggcctga

SEQ ID NO: 166842 - DNA, 330 bp, Enterobacter cloacae
atgaaatatatcaaaaagctgattgatagcaaaaaaattgtatttgaatgtacaaatgttagtgtagtggatttgcgatttacgtcagcgaatgctaaagaatctaacgcgaatatactttttgataaatctaccggagtcggtctagctttatcttataaaggcaacggagtcagtggcgatgtattgtggaatggggtgcctgtaaccattcctatacaaaatgatcgactttccttggaactcagcctccactggaacgtcgagcatgagagtattaaacccggtgacttcaacttcactggtgtttactacgccgagtatcattaa

SEQ ID NO: 166843 - DNA, 204 bp, Enterobacter cloacae
atgttttttttaacaagcaagcttcgttcactatctggctttgactttaatgagatctcccccatattcaacgacagtgactccataggtgcagcattaagtaattggctcattataagaagggttatggacaagattgttttcatattaatcatattatttgcattccacctttttcttattcagtatgactggagtcgctga

SEQ ID NO: 166844 - DNA, 2448 bp, Enterobacter cloacae
atgagtaaattatttaatacgtttagtcgcggggcagttattctgctgttggttgattctggtcctgtatccgcccgctttaactttgactcaggttttcttcaggccgtcggtatggatgcacagggagctgatttcagctcctttaatcgcggggcgacttttcttccaggtgaatacaggctcgctgtatatgttaatggtatctatatgtctagtcggagcgtaaactttaaagcttctgataatgagggtgatccgcagccttgttttacggttcaagatctggatgcgttaggtattgctctgccttatgagaatatttcagaatgcatactgccgaaggtagaagatcgtttttactggcgcgcagatatgagcgccatgactttggaactgacgctgccgcaaatctacactaaacattcagatatttttctcagcccctggcagtcatgggagcagggaatgaatgttgtcatgctcaattatgactattcctataatcaacaacacacggatactaagaaaaaagatgatagtcactatctttcgcttgaaagcggattaaatattgagggatttcgtttcagaaacagtagcaccctcacgcgcaacagtagaggtgaaaatgcatatgactccctgcagtcctatattcaaaaagactatcactacttgcaaggcggggaattcacagccggccagacatggactgatggctcactttttgagagtgtgcaattcaagggcatttctctcgcttcgtcggatggcatgcttaaaaatgaataccggaattttaccccatcaattcaaggcgtggttcacagccaaaccgcgacagtaagcgtgaagaaaaacaacaggattattcatcaaagtaatttgccttcaggcccattctcgttggatggggtcatgagtaatggcggcggtgattatatcgttgaaattgaagaggcggatggagcggtcaggcgttacgttcagtcgtcggaatcacttcctgagttacagtcaaaaggtcgactgaaatatgcattttcatcagggcgcagcgatcttgtcggggcagataatgcttatttcaaccagttagggattttttatggaatggatcacaacgtcaccctctatggtggtacggtactggcttcagcttatcaggcttacagtctgggcgtggggaagatgacggactcgctgggcgcggcctcggtcgatgtaattgcctctatggccgatcatgcacgtatctctcacccgacgtcggggcactcggttcgcgcctcctactttaaagattttgaccacaccgcctccacgtttggcctgtttgcctatcgctactcttctaaaggctttttgagttttaatgagtttctggagagtaccaggtccgctcattcgctggataacaaaaaaaatcgctttgagttaagcctgatgcaggggtttggtgatttgggctcgatgtctctcagcggtcgaaaagtgacttactggtcggataaaaaaggcacaaaaagttatcgtattaattatagctacgcaggaaggggctactccgtcaatacttattacgatcagagcaaaacgctaaataataaagatgatgaagtatttggtcttgctctcaccgtcaactggaatgagaacggaaaatgggccggtttatcgcagcgtgtgacgagagacaatgatcaattagtcagtcagagcgccgttaattttaatcctcttgataacaatcgattaaatgtagcgctgaatgccagcatggcagaatccgagcatggcatgtatggaattaactcgtcctacctcggaaatctctctgagctaggtgtagggtattataaatcacacagttcaaccaaaatcaatgcccgtttaagcggcgggagtgtatttcatggcaaaggggtcacgcttgggaagagaatatccatggattctccgacagcattagtcagcaccaacggtgtttcaggaattcgtgtcactaatggtaataatatcgaaacagattattttggacgggcactggtacctaatttacagccctggcagaccaatcaggtgtctattgataccctttcagttgctgagggaattgatgcgttgcaaaccgacaaaacaaccgtaccgatgaaaggcgcaattatcccagtaaattttgatgttattcgtgggcaaaaagccctattccaggtgcagtacaaaaagaagacgatccctttgggagctcaggcaaaagtcaccggtaagtcgggtcaggtacaatcagcctattttgcagaccagggtcaggtttatttaactggactggatgataaaggctatgttgaaattaaatggaactcatcttattgtcaatttgagtatgattttagctcagcgactccagtcatactgaataagaaaaaggtggaatgcaaataa

SEQ ID NO: 166845 - DNA, 708 bp, Enterobacter cloacae
atggctatcattaaatggattgtgttctttttttctatgcatatatttactgtatatgcgaatggaggaacctaccttgatacaacccgtgttatttacaatgaaaataacggtgccaaggcagtcaaggtgaccaatacttctgcggattatccttatttggtgagaggctgggtatcctcggcagatacggatggagctgatgataaatgggttgtcactcccccggtttaccggctaaatgaaaatagtgcgattcaactgaaaataaccaatattgattcatctaagttgccaaaagatcgtgaaagcctgtttttcttaaatgtgttaaccattcctggtgattcatcaaaaaataaaaaaaacataagcgaatcgttatctggtaagatcaatattgctttaaactctaaaataaaaataatgtatcgccctgagagtattcaatctcaggacgggagtcaggcttataagcaacttgcctttctgtcatttgaagataagcttgttataaccaatcggtcaccgtttcatattaattttagtaatatcgctatagacggtgttaatcatcgcattccccgtcagatgattgctccattctctactgtcgatataaaaacaatgtcaacgccaacgacaataaagtttaacgttattactgactttggtggtgatatagctgttagtaaaaaattatcgtga

SEQ ID NO: 166846 - DNA, 600 bp, Enterobacter cloacae
atggcttttaaaaataaattatctttgggtcttatttgtgctgcagcaatgtgttcaggcgcagcatccgcggccgaagtaggtagagggactatcaatattgccggtaccattggtcctgcgacctgtaccgttgcgccaagcaaaacatctattaccgtaccgcatctgacgccagcagtaattgttaacgctagtctggcagcagaactgtataaagataccttcaattttgattttgctaactgtggaaatatcggtaatacccttgagtttgaggttacccgtaacgttgcaccacctacaggtacaggtggtgcgaactacagcggtggtttcacctactctggcgggaatgcaaccgacatcgcgactggtccagtgttttataaggtcgatggtcctaatggcgcgcttcctatggttacaggtatcactgcacccagtaagaccgttgatatcagcggcatcaccgataaaagtagtttctcgctgccgatggcaatcactgtacataaagcgccagccaacagtgttcaccctgctgagtacaacggtaactttagcgccagcctggcatggtcaatcacatacccttaa

SEQ ID NO: 166847 - DNA, 282 bp, Enterobacter cloacae
atggggcatagaaaaatctcaggttctctggttcccggaaatgtgagtgaacatcatttacgcctactgatgatgatccgtccaataaaaaatccagcgatgagaaatgcgcttaaagatgtgttaattagaggtgtgacaaggaaacaagcctgcgagtattacaatatagcacaaagccatttttcagtgaagttcagagagatgcaatttattaatcaaattattgccggagttattcctcatttgtctgatgaagataaccacgaaagagatgaatga

SEQ ID NO: 166848 - DNA, 492 bp, Enterobacter cloacae
atggatatcgcaccgcgagtgtcggctaattttattaaccatattagggtaaggcatcctgatttacctattgtagtagtgcaggactcttttttatattctgacagaatagttgcagaatattttggttttaccattctcaaagagtaccaggcgctgctggaagcttttccccaccgctcggtagatattttatttaatagtgtggagtttgcgggggcatattattacagcgcccaatgtaagggagggtgtagtgcctccgaagatgtgaatcaatggctaaaaatccgtattcagcagattgtttcttcaccaaaagctttggatataacctttaactggctggtgcatggcgtatcgcctagatgcgtggcacgacaactaaatatcagtgataaagtgatttacagttatcgaaacaagataatgaatgttttagctattactaaaacgcgtgattttattccttcactgagcgtagtgaattaa

SEQ ID NO: 166849 - DNA, 1011 bp, Enterobacter cloacae
atgctgattgccaacgcgacgggctgctcgtcaatctatggggggaacttgccgtctacgccttataccaccgacgcgtatggccgcggcccggcttgggcaaactcgctatttgaggataacgcagaatttggtctgggattccgcctgacggtcgatcagcaccgcgcccgcgtaatgcgtctgctggaacagtttgccgataaaatcccggcagagctgaatgacgccctgcatgcggaggccaagcctgacgttcgtcgcgcacaggttgctgaactgcgccacgcgcttcagggtgttgaaggggctgaacaactgctgaccgatgctgacgcgctggttgaaaaatctatctggctgatcggtggcgacgggtgggcctacgatattggtttcggtggtcttgatcacgtcctgagcctcaccgaaaacgttaacattctggtgcttgatactcagtgttattccaacaccggcggacaggcctcgaaagcaacgccactgggtgcggtcacgaaatttggtgagcatggcaaacgaaaggcgcgtaaagatttgggcgtcagcatgatgatgtatggacacgtctacgtcgcgcagatttcgctgggcgcgcagcttaaccagacggtgaaagccattcaggaagcggaagcgtatcctggcccgtcgctgatcatcgcctacagcccgtgtgaggagcatggctacgatctggcgcttagccacgaccagatgcgtcagcttaccgcaaccggcttctggccgctgtaccgctttgacccgcgccgtgccgatgaaggaaaattaccgctggcgctggattcacgtccgccttcagacgcccttgccgaaaccttacttcaggagcagcgtttccgcaggctgaacgctcaacaaccagaagtagcagagcagctatggagggacgcggcagcggatcttcagaagcgttatgacttccttgcacagctggcggggaaagcggaaaaatcaaccagcgaataa

SEQ ID NO: 166850 - DNA, 723 bp, Enterobacter cloacae
atggcttggcaaggtattccatatccggtagccggaaatctgggcttattaattgaaaagataccgcacattgatgtaacaaccgatagcgggtttggctgggatactattgttgcaagtgttgctggtgcattcatcgcagccgcgataccagctttaattgcatggtggtctattaaaaacagtaataaaactcttcgagaagatcgagcggtgcaattgagggatattgagcatggcagagatacacaaattaaattagcggaagaaagtagaaaggctcaagtaattgcttctaacaggcttgtatggataaaagatctgcgagaggcttccgctgagtttgtagctagtgccgttacatatttatccataagtcaaaagtatgttcttgaagttaaatccagtaatcatcccgctattacccagaatgagaaggcggatcttctaagttcgattgctcagactaagattgaattgcatgcggcaatgatacaattagtacttcattcaacgcgcattcagttgatgcttaatcctgaaagggctgatcacataagagttataaatgccatgaatcaattaaaaacacactcagaagacatggttaaaaatatttatgatttggatggggaagaagctaataaatatttaaatcaatttgttagtgacatgcagcgccttttgaaagaagattgggagaaagctaaaagaaacacataa

SEQ ID NO: 166851 - DNA, 1506 bp, Enterobacter cloacae
atggagacggtagcgaattttattcacggcgaatgtgtcaccggttcaggccagcgcgttcaggcgatcttcaacccggccaccggcgagcagatccgccaggtggtgatgagtacggcacaggaggcggagcaggcggttgccgcagcgcagcaggcctttcccgcgtgggcacgccaggctccgcttaagcgcgcgcgcgtgatgttccgctttaaggcgctgctggaggagaacatggcgcgcctggcccgcctcatcagcgaagagcacggcaaggtcttctccgacgcggtgggggaactgacccgcggtctggaagtggtggaatttgcctgcggcatcccgcatctgcaaaagggtgaacactctgcgaacgtcggtaccggcgtcgacagccactcgctgatgcagccgctcggggtctgcgccgggatcgcgccgtttaacttcccggcgatggtgccgatgtggatgttcccgattgcgctggcaaccgggaataccttcgtgctgaagccgtcggaaaaagacccttcgctggcgctggcgctggcgcagttgctgaaagaggccggtctgccggacggcgtgttcaacgtggtgcagggcgataaggagtccgttgacgtgctcctgaccgacccgcgcgtgcaggcggtgagctttgtcggctccacgccggttgcggaatacatttaccagaccgcctccgcccacggtaagcgctgtcaggcgctgggtggggcgaaaaaccactgcattttgatgccggatgccgatatggagatggcggccaacgccattatcggggcggcctacggcgcggcgggcgagcgctgtatggcgctctcggtggtgctggcggtgggcgataataccgccgacgacctctgcgcccgtctggaaaaacagattgccgcgctgcgcgtcgggccgggcctggaccagacgccggaaaacgaaatggggccgcttatctccgccgcccaccgcagcaaggtgctgggctatatcgacagcggcgaggcgcagggggcgaagcttcgcgtggacggccgcggcttcagcgtgaaggggctcgagcagggttatttcgtcgggccaacgctgttcgataacgtcaccccggagatgaccatctataaagaagaaatttttggcccggtgctttctgtggtgcgcgtagcagattacgccagcgcggtggatctgattaaccgccatgaatatggtaatggctcggccattttcacccgcgacggcggttgcgcgcgccgcttctgcgaagaggtgcaggcgggcatggtgggcgtcaacgtgccgatcccggtgccgatggcgttccacagcttcggcggctggaagcgttccatctttggcgcgctcaacgtccacggcaacgacggcgtacgcttctacacccgtatgaaaaccatcaccgcgcgctggccggaaatgcagcaggagacaggcgccgcgttttccatgccgacgctgggctga

SEQ ID NO: 166852 - DNA, 444 bp, Enterobacter cloacae
atgtcccaaaagatggttaaagaggaatattgtcccgttgcacgcagcgtcgaggcgatcggggatcgctggtcgctgcttatcgtgcgtaatgcctttgacggcatgacgcgcttcggggattttcagcgaagcctcggggtggcgcgcaacatcctttctgaccggcttcgcaagctggtagatgcggacattctgaggttacagggggcatcagacggcacggcgtatcaggaatatgtgctgaccgataaaggtgagagtcttttccccgtggtcgtggcgctgcgtcagtggggagaacagcatctgttttcgcagggcgagcgccactcgctgttggtcgacaggcgaacgggcaagccggttgcctttatggcaccagcggcgcaggacggcactgcgctgctgcatggggatacggaagtgcagaaagtcgaatga

SEQ ID NO: 166853 - DNA, 876 bp, Enterobacter cloacae
atgactatagccgcagcttgggtaagaactttaagaaattgcaaagaattgattgtagtatcagatagtagattaaatggtggtatgaaaatggattgtgggcagaagataataactctgcctcgttcagatgctttcatatgtttcgcaggtgatactagttgggcatatcctttgatgcatcaagtggcatcagcaattgatatatatgatcgttgctcctcacgagcccaagatattaaagaactcaaaacccatattcttaaaatttttgaacgactgagagagcaaattcacgatgccataggtgacatggatatacccgatgcaaaattcatattcgggggatattcatggataagaaaaaaattcatgatttggcacatcacctaccaaaagagtaccaactcttttcgtgcggatcctgcacgtgaaatatatggatcacctgttgtatttactggtgatgaagaacatgtaattgtagctaatgctatgcttcgtgaaaaattaaaatcaagagggaagctggataatttagaaaaaggcatgaaaaatactgttaaatttgaatgggaaccatttgaagttattcgagacatgctttacaaagttaatgaaagttcttatgaatttaaaaactcatcaattggaggcgcgccccaaatcctaaaaatctatgaacatttatcaagtcaaaaacttggtgttctgtggaagaacaggatggatagtgaaccgaacatatatttatctggccggaggcttactaattatggtccgcgagatatgtggatactagaccctgaaaaactgataacgtacaatccattgaaaagtaatcctgataaggaggtaattaatcaattcatttaa

SEQ ID NO: 166854 - DNA, 345 bp, Enterobacter cloacae
atgcttattattgaaactcacaaattcttttccgatgaccacaatgtagaaattcagaataaagagatctggcagtatggatcattagtttattcttgtaagaatggtttggaaaatgatgatgctagtcaggtatcaccattcgaaggtgaacaacctattcaaactttatacgaaacaaacaaaggaacgattcaacacaatcacgaagatgatagtttttactttcgtcttgctgatgatgttactatggcatcctatgtagatagtgaactaaatattgaagatccgaatggtcagtttaatgatcatgttacctttgctaattctctgatggcgaagtaa

SEQ ID NO: 166855 - DNA, 150 bp, Enterobacter cloacae
atgaaagaacagaaaacacgtggcgtaggagtacgcctaaatggaacacaagaagcatttcttcaaaagctaatcagcgaaggtaaggctaaaagtgtcagtagtgctattcagtacttaatcaatctatcaatgattaaaggcgaataa

SEQ ID NO: 166856 - DNA, 267 bp, Enterobacter cloacae
atgggaagactagcaagttatagtaaattgaaaagaaaaattaggactaacagaaagtcattgaacagatcagtgcgaaggaaagaaaaggtagatttcattcaactaacatttacacagtacgaaaatatcatagtaagcgacatgacaagtgctaggatttgtaacgtactaaaagtgaattgtgataaacatttcattaggaatttacgcaaaaataaagttccagagtatcgtgaatggttcaaaaaggtacgcggagtgtaa

SEQ ID NO: 166857 - DNA, 477 bp, Enterobacter cloacae
atggcaggaaagcagcaaaacttcgataatagtgaatttatttcattagctggaaacttcagcaggtttagtgatctaacgattgaagggaaaagaatagttatcgacattattactaagtgttctggcaagaaaggttatccgaaggaaaaagtgtattatgtactattcaattgtttgatcgtgaacagggatagtgtcaagtactggctacagcactactatgggttacatacgagtgatacgtcaccatccgataacacagtccgtaagtttctcactatcaccaagcaattgtccgtagcgatggtagaggcacacaacaatggcgtgaggttattcaaaaccgcacaagatgggctgtactacataacacctgtacagaagtatgaaatcgataagatgtacgatagtggcctttcagcacaggaaatgatcatagaactacagaaaatgattgatgattctgcgaaataa

SEQ ID NO: 166858 - DNA, 468 bp, Enterobacter cloacae
atgagcatattaacagtagcagctaaatataaagatgtgttaactattggtttatcagtgctttcatttatcatagcatgtacgtccttgtttttttcaggtagaacagcatggcatgacagagcgagattaaaaataacagggcgagttgtatacgatacgatttacggaaaagcttataaaattgaagtgacagttcttaatgttggtcggcgtgatgctgtattggaagggattctatgccactatgaagggaataagaccagatatagttttgaaaaaaatggttttgttcttaaagaaaaacaaagagagaagtttcaaatagaatacagagatttaatacttacggatgatgatggagatatttatgagttagaaaacattacagtattagatgttgaagggaaagaacatgaaattcctaattcaaataatcttgttacaaggttttctaaagatgcttaa

SEQ ID NO: 166859 - DNA, 792 bp, Enterobacter cloacae
ttgcaaaatattatttctaataacgatatgattaataatgtatataataatgcgactacaacagctgaaaagataaactcacagcttaccttgtcagaaagtaaaaaaaatgatctggataggttgtttgcaagggcgaatgaacaggtagatgaaattaataaaagtatagccgaatataaaggtgaatatggatcgactgcaaaaaaatttgaagatctgactaatgattttaatgagaagctagagtttgtagaagggaagcacgagtactttactgaaaggaattcatatttagacgatcttattggtcgagaggtaggggcttcactatttgagacattcaaacagcgaaaaaatgagttatccccttcagtcacattttggaagtgggctgttccatttttggctgttgcgacagttgcatggatatttttacttttccattggtcctcagataaagaaatgagctatcaactgttaatcattaactcgataaaagcattgcccgcaattggtttgcttttattcggtatcgcccaatatgggaaagagagaaattttcaagaggagtatgcgtttaaatcagctgttgctttaacattgaattcttatgcagagcaactcaaaaatattgagaataaagatgcgttgatacttgcttcagtctcttcaatttacaagtctccaatatttcacgctaagattaagttagacgatggaaagggagttatggattccctctcagaattaattggtcgagttagagatccgggcgcagctaaaaaataa

SEQ ID NO: 166860 - DNA, 696 bp, Enterobacter cloacae
atgaagataaaagaactaatgatgaaaataaggctctcacatataatgtgtatatgcattggtgtattaatagcaatatactgtgatgtactatttttacatggatttgatagtggtactgtatcggcaattatggatacagtaattgccgcatcagcattacttgccgcattgagtgtacgtaactggttaaaagacaaagtcaaaaacaaaggttttgaacatgcaaaagaaatattaatggatatgcatttaatcaccaacttactatttgaattacaatcaaattataagaatttcgccttgaattacatggatggttctgagctaaacaaagaattccaaaaagctctggaagttgaacatagtaatttattagtacaatgctctagtgttagaaaaaaagctgttgaattattagtttcaattttcagcttaagctcgtgggatatgaagtgcaactatcaagaagagtacattgaatatttaagagtgttagaggacgcaagagaacttattgaagaaaagctttctaatctagatatcgatggtcatacgagtcatatcattagaaaaaaaacctggatagaatctaaagacgaatttgaaaaaatagtaaaaaaatgttctgctgattatagggcattaaataaacgattcgtaagtgcattctcttataccccaccaaaagagtaa

SEQ ID NO: 166861 - DNA, 534 bp, Enterobacter cloacae
atgaagcttaataacgcgctgcaaagagttattttcggactggcttttggaatgctctttctgaattcaaacttatatgcagctaacattacatccacaaattttactattaccggagttcttgaggctaagacctgttcttttaacgaaacttctctatcaatagatctccctgaggttgatacaagaagtttaaacaacagtaattccatacaaggagaacaattttttactctgcaattgaattgtaatggaggagttaatgaagtgaatataactccctccggcatggctgttgcgaacggtgatagtacattgtttttgaatacaggcactgcaaaaaatgtcggactaaggctactggatagagcaggaaacatactgacgcctgacggacaaagaaaagtgacaattaattaccaagaaacagaaggaaaatacacgttctcagcagggtatgcacgaactggcgcaggacgagtaagtggggggttatttcttgcaacggttactttttctctggattacagctga

SEQ ID NO: 166862 - DNA, 864 bp, Enterobacter cloacae
atgaaaaatacaaccaaagcaaccgttattgtagtggcaagtttaattacattacctacaaaatccgcaacgctccagtgcgaaatattacgcgcgacaagtcttgacacttcggccacaacaccatcgggaacaggaaacttcttagcacgaataaccccctacaccggagctgcgttaggttcgccaaaaataaaaaattttcacgtcaccttaacttttaatgatccgattgttagccaagccgttgcagggaactgggttgtgattgtaaatacatctctcaaccagtcaaatattttggcagccactaatacagtcattccggatgtaaatccatacactgtgacaataccatgtaccgagacgatcagtaatcaatgcgacatgaaaactggggcattccgtgtaatgctgtcttcacaatccgatcgtgtagaaaatgcacagattaatcctgtaacgattactacccaaaacaaaggaataaatgtttctgttgttgtcacttccaataatattcaagtgtccgatagtactcattatggacaaaccagcttaaaaacaactgccgtagtgatggactctataatcatccctgaccagattgaccttggcactttaactgccggcgcaaacaataactctgttgaaaaggtaatatatgattccaacacaaataaaataccggttctcataacatctagcgcagagacagaatcaaccatgttattagtaaataatcttccaacaacaccaagccaaaggtattacccaccactaacatttggattaaacattggtgaatcagctcagcctggaactaaatctgcttccgttactgcaagatggacatgtccttaa

SEQ ID NO: 166863 - DNA, 870 bp, Enterobacter cloacae
atgaaatctgattctaaaaaaatcattgtcgccttatcaatttctatatgctggccaacttatgctgctgaactttcttgtgcatcttttcattcagactctgtacaagggttatccgtaaatgcaggcgcagggaaaaatggtacagtccttggttttagtaatggcataaccgcacctaaggaattgacagtagcaacacaacttaaagttgtcttgccaatttcatggatgaaagaagcactgcatgggaactttctatacctcgaaaggcagaatcgtattgatgggaccactgcgctgagttctcctttagaaataaatagagaaagagatactacttacactataactttaaactgctatacaagcagaggtgatgattgcaatgcctttaataataattggtatggatatctttccggaacaaataatagtcaaataacaccaccaaagatcaatagcgtaccatctcagtccggggaccttagtgcggcagtccacattgcaacgttcaacagcacaagtacccttccaatacataatggagataataagcttacaataatatcaaaagaaaaaattactgataaaattacaatgccagaggaaatcaatcttggcaaacttaatatcgggagcaataattccgatacagtaatcgactactcgattaattctaataccattccaatattctttaaaaactctacagctcctagcagtgcgcaattaatgcttaataatagctctccagtcctatcgacaaaaggatacacgcctccattacgctttgggatgaatttattatctagttcccaaccaggcaattacactacgactgtaaacgcaacgtggacttgtccataa

SEQ ID NO: 166864 - DNA, 231 bp, Enterobacter cloacae
atgaattcagttgaaaatcagcagatatgctcccgttttgttgagccagagaaattagcagacctgcgtacaaagcgagagattgagatgatgaacggcaggccgtggacgcgtgagcttccccctccgccggtattgccgccttatggtcctctggagaaaatatcaggacaactggagtcttttcgatatgaaagattcagggagtattttggtgtaaatgcctactga

SEQ ID NO: 166865 - DNA, 129 bp, Enterobacter cloacae
atgacagccattgcgatcgatattaacaatccgaacgcaataaacttcttaccatacaagttccagatttcatttagtgtttttccttcactaatcaatgaactgactcttgggaacatcgcttgctga

SEQ ID NO: 166866 - DNA, 1023 bp, Enterobacter cloacae
  misc_feature (974)..(1011): n is a, c, g, or t
atgatgcacattagcagagttgaattatcggggctttggggttgtaagtcctataatataaatttaaaccatgactttaacttctttattggacctaacggctcagggaaaacgacaattcttaccctaatcgcttcaattattaatctagatcttaactctattaataagattgatttctatgaatgtacgttagatctcgtcagtgaagaacaggcgtataaattaagcgtactcaagggtgaagattcaaacggcgataacgttgtaaattatataattgatgatgcgttcaccgatgagaacgtaatttctgattttttcagaagccgtagaatacctggaaacggttcaaataatgactatttcagacttaagcgacaaagtagtaaccatactgcctcagaaaaactcatgagttttttaaataaaaatattaagatgacatggttaccaattggcagagcaaacttattgaataattttgacgaccataagtttgataactcagtagatattcgcctggagtatgtggcggatagttttgtaaaatatgtgtcatatatcaatcaaacaatttcagaaaggatgaatgagttccaaaaggatgtttttttatcagttattgatttttcattttttgatcaaataaaaaacaagcccaccaatttagacatccaaaaagagaaagatgttttaattgaagcatttagagaggttggaattagagagggtttgtaccaaaaaaaaatcaacaaaatgtttaacgttatcaaagccgtcgaagagagaaattcaaaaaccaggaaccctgatttatctttcgaagaaataatatggatttttaacacctggaaagcacattaccttgttgagaaatacaacgagtataaagtagaaaaaaacaaaataaacaccagtgttgattctttcataaagattttaaatgatttgtttgaaggtagaaaaacatnnnnnnnnnnnnnnnnnnnnnnnnnnnnnnnnnnnnnnttttgtttctaa

SEQ ID NO: 166867 - DNA, 867 bp, Enterobacter cloacae
atgttattttccaggactattggtggtttaagtgcccaaaaagttttttatggcgctgatttaattgcttacattgaaggaaaagtaagctgtgaaaataattgcatttatgatgatcatttttacagtgcaatctttaaggaattcttaccaaataagaacataaaaataaaaatattaggtaactgcaatgatgtattagatgtgtactataaaattatcaataacaacatccctaattcttttgctatagtggatcgtgattatgatggggttttatatagccgtttaaaagattacagacttatttttacttatggttatagttgggaaaatgatttctggtcacagaatatgtgtcgaagcctcctcggaattttaactatgcaatcaaaaattgcacaagatgaattttttaaacgtgtcgcacatgcagagcgaagactgtgtttcgctcatcgagtcaacctttcctgtaaattggatggttcacctctatttatacttggaaaaaaaggtggtgataatgggattgctataaatctaaaaagcaattttcttattacaaaaaatgaaacaaaaaaattctttgataaaataaaacaaaaaaacgatcgcgcttttataatcaacttcatgtgtgaaaataaactacctgcaaataggtcgattcaaggtcacttttgggagtatttatctcttcaaacattgaatgccattgttaaaaaacactcaattggtaacacaacagcgccaccaagtacattaaaaaatatggcttttgctagcttcaaagggcaggtcaataactatctggcaagagaaacttatcagcactatcaatcttgtttcaatccatttatttaa

SEQ ID NO: 166868 - DNA, 240 bp, Enterobacter cloacae
atgccacgcactgcagacatacagaccgcattcaatgaggctctacagcttaatccaaaaggcaatcgctacctgagcacggacagctttatgacaaagattcaagagatgaacttgcatttcagccgggacgaagcaaacgcatggatcgaacatcaccaacctgatttcgccaacaagactatcgaaggcagtgataaccgttactggatcctgcgcaatatggggaaggtattctaa

SEQ ID NO: 166869 - DNA, 438 bp, Enterobacter cloacae
atgagcaataacaacctaacaaacgagcgcctgagcgcactgatccgtgtcgctagggattctcttgaattgtatgaaatggagcttcctgtcattgatgatgtaatgctagcgctggcagaactacagcaatgccgcgccgccatgcttcagggttccgaacctgtaacgacgactaacaagttgccattcgagcagtggctttcgcaacagacaggcaccattgacgtcgaatgtggatgcgtgatgacggaggtgtttttccactggttgcgcgttgcttatgaggctggcaactctccggtgactccggatggttgggtgctggtgccagaagaacccacccatgaaatgcttgaggctggtgatgaacaattcggaacttacgatgtctatcgcaggatgatagcagcagcaccgcagcaggaggtgaagtga

SEQ ID NO: 166870 - DNA, 642 bp, Enterobacter cloacae
atggctgacattcttctgaagtaccttacagatttgccatcagcatcaaatgcagattcaacagacctgatgcatatcaatcaaaacggcaacgaccgctcaatcacacttgatgcgcttgctactgccttattcaacatgcgctaccccgtaggtaaggtcgaatggtttgctaacgacgtaaacccaaacgcaatctggcagggttctacatgggcaagaatacctggcgcaggaagaacgattcgcctagcaaatagcactggttctgatgtcctgcagcagggtggcagtgactctatagcgctttctgccgcaaatatcccatcacatgtgcattccgtaaatatccgtacagagcaatttgattacggaataaaaaacacatcacaagacacgcactcacacacagtgcctcttcgtagtattggtcagtggacaggcggatcacaggatggtagcggagacgatattacatccattcaatcaacaaacacatcgtcataccaacactaccacactgttgcaattggtgcgcacgatcatctggtgcagggggagacaggtagtaatggcgaaggcactcaattctccatagtaaaccaatacattaaacttgctggatggtacaggactgcataa

SEQ ID NO: 166871 - DNA, 1989 bp, Enterobacter cloacae
atggccgagcagaaagtaaaattaacagatttaccagaagcaacagatacagttgacgcagctcaacttctaattaatcagaacagtacagaccaaaagctatcagtaacgcattttcttagagcaaaaaacaatttatctgaacttacaaataccgctcaggcgcgcgcaaatcttaacgttccttcagtagacgaagtcaacgataagttatcagggttattcaatggggataacacatttaacttgggcgcatcacttgcttcacgatctgattttatttgggatgaaaactccaaaagttggtattactggggtgggacattgcctaaagatgttccagcggcatccacacctgaaacaaccggtggttttggcataaatgcctggcttagcgtcggggattctgtgttacgcagtcagttagcatcggcgaatggctatacgttagtaccaagcgttaacgtcataaattctgtcgtgcctgttgagagtttcagggcttcaggattaacagatcagcaaattgtgcagcaagctaacgattacgccgcatcacttggacgcgcgctgctttttcagtctggcgttacgtatgaggttgttacgctaaattgcacatgcgaatggcgtgggccgggcaccattaagcgtaaggctggcgaatcatcaacgctgatcaacatggcatccggttcgcgtattacaggcaagatgatcatcgatggtaacagcgcaaactgcactggctcagcatcaaacgtcgttatgaacggggtcagcgggtgcgtcttgaatgatttctcttctatcaatgcctgcgggcacaacatcgaaattaacaactctgtttacagtgataccaggctgccaaataaagttaaaaatggtgtggtaaatggcgctgtcattgggcattcaatcagcctttataatgccgccaatgaagttcttgaagagcttgagttgattaactgtggtgacgggataaacgcatccggcagctcacgatcaatcagaccactcgttattagcaaaataaacgcacgaaagaacaggggtaatggatttgccacgaacttcatatctacggctgatacaccagtttatgacatggttaaattcagcgattgctttgccagggagaatggtcttaacgggtttgcggtacagagccattatacaactctgacaaactgccatgcttacaagaacgggactacaaaggaccatcagggatttttgtttaatgctgatggtatcacgtttagcagcctaatcgcattccagaacaagggtgttggttttgattttggagactgtcgaaaatgttctggatctggtctgtttgctgaatcaagtggatggcatggtcttgaaataaactcatgcgaggatattgctatctctggtgttgtgctgaatgacagctttaaggggcaagttgacggcgcgcttcaggccgctctgataattcacaaaggtaatggtggctatccattccctggtgacagcaaaaatatctcgctgagcgcggtaacaatcggtagtggcgaggggcagcgatacgcagtttatgtggatgctgattcttacaacgttactattgacggtgcggtatgtaaaacagcagccctgcttgaggatatctttaccgcctcttctgatgtcagggttagaggtcaggttaccaggtgggacccaatgggtgcggcaagggctaccatttcttcaggggtggttggtataccgagcgtggcagatacggtacaggttaacgggacagggagtgtgatcacgattaatatccagaatggaggggcttacattaaggacaggtatgtcaggatcctttctgttaatggcatgacgcttgaaaactcgggaggttcaagtggcaaccttttcctgggggaagcaatagttctagctgccggtgattcagtacgactatggtctgacggatcaggtggttggaaaaaagcgtaa

SEQ ID NO: 166872 - DNA, 1275 bp, Enterobacter cloacae
atgaaagccattgtgaggtctgtgatttctatacaggccattgctattgcatgtatctatgttcttacatttatgtactcaccactaaacggggaggattatgggctcacaaaacggtttaccactgagagcatttcggaacgcttatcgtgggctctggaaaggtcagcccatcagatagattcctggaatgcgagacttggtgagcaactatcaattatcacactcagtctgcctgattatactttccttctagtggcagtgatttcaatagctatgctctgctatgtgatttcaactttactgttcgatgatgaaagtaaatcatcctctttaatgattggcgttatctttgttttcctgctgtggccggggtttgagttgtttacatggaggactgttataactggttatacagttcccatgctcctgacgctttctgtaattcgtaagttcatgacgcattccaggcgtgccatgctgaaagatagcaaagttcaaatggtgtcgtattgcttcgttggatttctttccggtctctcattcgaaaatgtgccagtagcaaccatctttttcttgtttgcgacgctgttcatgaacaagcagcttaaaacgcgactagcacttgttcctgtgtctgtgctggcggggtgggtattgctcattacggcgccatctacaacattcagaagaattaaataccatgagtggtaccacaaagacatttcattttttgatggcattcaagcgcgggctatcgatgttgtgtctgtatttgctcagacatctacaattgttttcattgcggcaatactggctcttgcttacctctaccataaaaaacttgtcttcaaagagcatgacctgttactaatttcttctgtattagtggtggggtctatggttgcctcaccatatactgaggccaggtcttttatgttcgcctggtgcgtcatgatcgcctttgtggttgccgctgtaaaagcattgattgacacagattggagatataactttgcaattatagccgtaggcttcatttctctttatgtaagcaaagaactttacattaagacgcgaaatttttatgagccgatgcatatcagagagtcgcttattgaatctaaacttaatagcaacgaatgtggtagtggaataaaggtaggtttagtgaaaggatttgatgattaccgttacgtaaataacagggatgaatggtactactataatttgccacttgtttccgaatactacggatgcaaaattattaaataa

SEQ ID NO: 166873 - DNA, 885 bp, Enterobacter cloacae
  misc_feature (837)..(872): n is a, c, g, or t
atgaaaatcaaaaaccagacgagggaattaaccctaccaacggcgattaattctgataatcgtaccgttgaagttgctttttgttctgaaactcctgtagcacgtgaaatagaaggaaagttatataacgaagtacttctatgtaatccagaaaatgtagacctatcgcgtttgaacaattcaggggcagtactttttaatcatgaccgagatcatttgattggcaaagtactagcggcacgtattgattcagacaaggtaggccgtgctgtattacagatttccaatgcttcggaaaaagaatgggaacaaatcaatgaaggtgtattaacgcatattagttttggttacacagttaatgattaccgtattgaaggaaacattatctatgtaactcattttaccccatatgaaatatcactagtaacagtgccagccgatgtatccgctggagttggtcgttcattgataaataacaatgatgacaaccagaaggatatgatcatggaagatgaaaacgaaattgaaagtactgaatctgaaatcaaagatgaatcagaagtagttagtactgaagttgaatctgaagaagaaattactgaacaagaagaagtagaagaatctgaagaagaagtacgtatgagcgatgaagaactattagcactaatgactaatcgtccagacttgcttgaacaaatgataaataaaagcgacgttgaagaacaacgcgaagaagtacaagaaagtactgatgattctgaagtagaagattctacagaagaagtggaacgtaaacgtgaattggaatcaatcggcgtagttctaaatattgatgtnnnnnnnnnnnnnnnnnnnnnnnnnnnnnnnnnnnngaatttcagttga

SEQ ID NO: 166874 - DNA, 396 bp, Enterobacter cloacae
atgaaaaatggatttataacagagtacctaagtggtttagttggtgaaccattagtgtacggtactaatgattgtcatatcatggtgctaacagtaattgatatgatcactggcagtaattaccgtgatgaaatctatcaaaaatacacaacaccaacagcaggtagaaaatatgctaaagaaaactgtagctattctaccttacttctattgtgtaaagacaaaggccaattagtaacagagccacttgatggggatattgttatctcatcaggtcacagtactgtttattggcgtgggaaagtcataattttatccgaggataaaacaaattatatcgtatctcaatatatcccaaatgagaaagacaaaatatatagattcaaaggggaataa

SEQ ID NO: 166875 - DNA, 1140 bp, Enterobacter cloacae
gtgttcggccaggatgaactggtatggtcgcctactatcggttttaaccaaaacacgaaagtaccgtacagtaaattgaacgaagacgttattgatagtctacttaacagtgatacggctactggcattgttgagaaacagatcgtagatgaacttggttcacgctggcagctacaggtatcaaacaacggtaacgtaacgggcattgccttagcagcagatgaaaaaacatcggtgtttaccgtcatggcggatcgctttagcatcataagtacagacagtgccaagctatcagacagggtatatccttttgtggttcaggggggtaagacttatatcaactcagcggtgatagcatcagcgagcatcaatgaggctatgataaataacctttccgtttcccgtgcgaaaattcaggatgccgcaatcgacaatactaaaattgccaatgccgctatccgtaacgcccacatcatggacggcgtgatcgactcagcgaagatcagccagcagatacaatccagtaattgggatggtgtaaacggttggatgattaacaagaacggtacagccaactttggtaacgtaactgtacgtgggaatatccaggcaacttctggtgtacttaacaacgttactatcaatgaaaactgtaacattcttggtactctaagtgccgcacgtatcgtaggtgacatttgccgtcctcaatcgacgggtatcaaccctgtaccgtttatctttggttcacgtactgtttcaggtggtcaggccgcattagatccagtagcaaaccaacactatatagcgttgcgtattcgtggtgaagatttcgcacgttactttgatagtgatttatcaattagcttgacctcatatgaacgtcaatacttctatattcgtatgggtggtgatggaattggtttaactaacttgttctattatgatgctggtaacggtggtagttctacatcgttcagattaaattctatatatgttccgcctgtaggtcgtggtaactggaattatatctatgtgatgtgtacaacttcacgtagtggtattgcttcacttaatgttcctgctaactggtcatcattcttatatcgtgctggtgatcagcctttatataatgcgtaa

SEQ ID NO: 166876 - DNA, 384 bp, Enterobacter cloacae
atgaaaccatatgtgatgttttatagtgaaacctatcgaaaaccaacccagtcattagagcattttattgatactacggtaagaactttcacaattgaatctgatgatagtgattcgattaatgcaggaacaatgataacaaaagtaaacgaaaatggagatgacgattttatgtatatgtcaactattgaaacaagagagatagaaaacagtgatcagaatttctcttatcaaagcactgttgttacagagtcgattgaaaatgatgataatgattacctatcatgcgcaactttggttacaaatgtggtagaatcgaatgataatgattttcattcaatacatgacgacgcactagtaagtcatgttcatttaataaattga

SEQ ID NO: 166877 - DNA, 876 bp, Enterobacter cloacae
atgaatacgctccctatgagtgtccgagaccatatatttacatatgtggctgggcataatcctggtttatccgactcccttgtattggctgaaaacttccatgattattttaaagatggcgcttattctgatttaatgagttttgaggacgatattgcaaatatatcaactcttgttgttatttgccttgaaagtgctggatctttagtcgagttgggattgtttgtaaacaaaaaatctcttgctcagaaattacatattgtagctccgttggcggaaattgaagggaatgaagagaaaaaaatcccaccaagatcttcttttatatatttaggccctttggaatatctcaaaagaatagatgatgcttcagtatctgtctacccatggccaaaatctgagagtatgaagtacgatgaagttgagttgatctatcacgacatatactccagactgaaacgagttaaaaaaacagagcgttataatactgagaatactggacacctcgcaatattaatatatgaaattatacttttatcagagcctattaagaaaacagaaatagagtgggctctatattgtatggacatagatgtacctcaaaaaatcatctctcggttactttatttattgggtaaaatgaatttgacatcgtctctgtcatatagtggtacagattattattattcccgcggacgcagagaaagcaaactcaagtttggtattagcgctagtggcaaaattaaagactctatgaatattaaagtcgccatccgtcagtcttaccttagcatggatgctagggatatggatgagacagccaaaaaaagaaaaaatgcgcttaatcaaataaatattgtacgaggaggtgcttga

SEQ ID NO: 166878 - DNA, 906 bp, Enterobacter cloacae
atgattttagttataacatcaagctttgataaaactatagattatataattaaaaaacaatgcgttgatgacttttatgttttcaatattgacaaattttctgaatatcaggtttcctatacaaagaatggattcgaaataagaaatcaacattatggtgttatttttgaaagtgactgctcgtctatttattatagaaaaccaacaccagaaaatcttaatgatataatcggtgtaaaatatcataaccattgttatagagaagttttttctttggttgaagggattgctgaagcttttgatggaaaatgtttgtctcgaccatctattcttagaaaagcagataataaagtattacaagcaaaaatagctgataagattggtttttcaactccagattattgtttaacaaacagccctcacctattaacatcccatttggctgaagatatcatagttaaacctctttctaacggagtcgtcgaggatgaacatcacaaagagattgtacaaacaaatttatttgataaaagcaaaaacatgagcactctaaaattcagccctgcttattttcagaaatattcaaacaaacaatacgaagtaaggattactatcgttaatgaaatattctttcccgttaaaattgaatccgaaaataaaattgattggagaaggaaggataacaaaataatatatagcaaaatcaacatcccacagaaaataaaagataagtgtttggtctacatgcaattctttggaattaatttcggctgttttgatttcatagtttttgataatgaatggttatttttagaaatgaatgccaatggtcaatgggtatggctcgaacacgaaaccgggcttaacatttcaaaagaaataatgagatacttgaatgataaataa

SEQ ID NO: 166879 - DNA, 174 bp, Enterobacter cloacae
atgataatgaataacggcgtgttccagatgctccgccagcgctttaccaccactaaagccatgcagctcttcaaatacgccatgcttgcccgaatcactcgggatctggatcatgcgtacttcaaccccggcgtaggttcgctctccggcattggcggcgtgctcgaccagtga

SEQ ID NO: 166880 - DNA, 1245 bp, Enterobacter cloacae
ttgaaattaattcatctgaaaattgataaattatttggacttctggattatgagattccgctagatcatcatgagattactatgcttacaggtcctaatgggtatggtaagacgatgattttgaagattataaatagtatcattactaatgaattaaacatattttgtaaactaaagtttggttctgttaaaattgattatcaaggtggttctgttgatattgcgcaagatgctaagaaagatactttgatattgaatcatctggataatcactcgggaaaaattatcactgagaagctaaaattagaaaaagctgagcctagcatggaggaggttttctatatacgttggaatggaggggaagctaaaccgaaacaaaaaacccaacctgataaaccactagtttccaaactattaagtgcgattacatcgagtgaagacgtttcctttatttgtgctgaccgattacaggtcaaggctgatgatgaaactgtaatcgatttatgtgcaagaaaattaaaagatttaatggaaagtgctcaagatgattccgccgaattatctcaaagattggatgcaacatttccaattcgattgtttgatcgtttagaacaacaaaagcgattttcatcagagaatatacaagcacgtctaaatggtattcaagataaacgtcgccattatatgagatatggtcttattcaggggggtaatgacctcatgcctgaaaaaagcacaagcctctatagtagtaatgaatatttaggcgttttagatctttatattgaagatgcgctcgggaaattatcaccgttccagatgttacatcaaaaaattgatctatttgaaacaattttgcatgaaaagatcctggcatttaaaaaagtgatgattgatagagaaaatggtttttatttcgaaagtttaaacggcgacttgattgacaggaatatgctttcatcaggtgaacagaaccaagttgtgcttctatttaatcttatttttgatctcgtttctcaaaaagtaatcctaattgacgagcctgagatatcgctgcatgttgcttggcaacaaactttcttggattcacttaagaaaatacaaaaaataaatcaatatgagaaagtgattatcgcaacacattctcctcaggttatcagtaaaaattgggacttgacctatgatctttatgagatgattaaaaataaggatggaaaggaacaatctttagaaggtaatgaataa

SEQ ID NO: 166881 - DNA, 858 bp, Enterobacter cloacae
atgatatcgttacgtgatgcccttagcgaggataattggcttagtggtgtgaggttaatgtttagtaatgaaatgcatcgtcatagcatactaattgttgttgaagggattactgatataagatttttcaatacctatcggttagacaatcgattgatatatgaatctccagaaaatggcaaaagagaagttatatgtgctgtgaatgagttgcgacaagctgggaatgatgctgtctacggcgtgtgtgatgctgattttgatggattgagtggaataacttatgaaggggtattttatacagatgcccatgatttagaaatgatgctagttaaaggtggcgtagtcgataaatttataatgtcgcacacaaagcgtaaacttgttcaaggtgatttagcagaatcattttgccgtaaggttaaagaaaatattctttgtgtatgttatcgcgtcggcttgttgaagtggtacagctatcttactcgcagtaatctaatttttaagggaatgaattttagagagttcattaccataaatggcagtgaggtgattatagatgaaattgcctttgtgcgtcatatcttggctaagaatagagcttatgccgagttaggtgagtatgaattgcacaatgaaatgcgtaaactggaaataatgtcaccagagcatttttcaatatgtaatggtcatgattttactagtattcttaaactgttatatgaaacagatctttctgtaaacaaaaatatgcgattggatgaaatagacggttacatgcgtctgagttatgatcaacctacatttagaacaacgaatttacattcttcgttgaaaaatctcttacggttgcattaa

SEQ ID NO: 166882 - DNA, 2448 bp, Enterobacter cloacae
gtgagtaaggcgcgccgtatccacgatttaaattgtgatggtatggtcggttcaaatgagccgaccagctacgcctatccgtggaatgaaccgaaacaggccattgctgtcgataagactcccgctgttgatctatatgaattgggtcaagagcaggagtttttcgcgtgggttgaagataccctcaagccactacctacatttatccgccgccgcattacttcttacattaattccgttcaccaggataaaggtcgtcatatcgcaaaactgaagttgcgcgatattgtgaaacgcgagcttccatatgtcagaagcgttaccaaacaatacgctgtgccagaggacaatgattggatcattttctctgaacaaaatccgctatttcacacctttgaaaacctacgtgagctagcgcgccgcttcaatgcgttagctgattgcactgatgaagatgtagatttgcttgcccaggacatcgctatttatgccaatgctgttttggctgaagttagtgataacgctagtgcgttgaatgatgttaagtacgcgcagagtatggtgcgagaagggtcgaggctgatcggatacttcaaacttatcccgccttgggcatcaaaacgccgaatgtcgcttgatcaaatggcggcgacagtccgaaaaatcattgatgaccgcttttggtcgcgccttctgcgaaagtacgcgcgccgctggcgtgagcatttgcatattgcttatggtgatgtgcgcctcgatgtttcaccgtattgcagcaagcactacgttacacagtgggactcccgccgcaagcgcagccgcgcaattatgagccgccttgagcttgaagatcaggtaactggcgagcgcatttcgctgatagagcagattgataaaagcgtctcgaacccagaaaaacgccgtgttgaattgatgacgcgtataggtggttttgagaaggtggcaacggaaagcggctatgctgggagtttcttcacgcttactgcgccgtctaaatatcatgcttacacagcgttcggacatcgcaatcacaaatggaacggggcaagcccgcgccggacacagtgttatttaaatcaaatatggcaacaaatccgcgctgaactcgcacgccgtgaaattcctgtctttggtcttcgtgttgctgaatcccatcatgacggcactccgcactggcacggcctgctatttacggccccagagcatacagcagagttgcaggaggtgatggaagactacgcaacgcgcgaagacgaggatgagttgaaaggtaaggctggtaagcagcctcgctttgaattgaagccgatagatccggcgctgggtagcgctacgggttatgtcgtcaaatacatctcaaaaaatatcgatggttacgccctggacggcgagagcgattatgaaagtggacgccctctgaaggaaaccgcgaagcacgcaacggcctgggcgtcatgctggggtatacgtcaattccagtttttagggggcgcgccggtgtcagtctggcgtgaactgcgccgcctgaaaaatcaggatttagccgacagggttagtcctgtttttggtgagctgcaccgcgcggctcacgcgggagattggcagggttatatcactttgcagggtggcccttttgtttcccgttccaggttggtgctgcgcgcctggtatcaatacaaaaacgagccaagcagttacggcgagtatcagaaagctatcaagggtctggttatgccagcatccagcattccgccagtagaaacgcgcctccattcttaccgcattgtgaagatgaagcctaaatcttcagaccgcgccgatccgggttttgaccttaagggcgcgtctgcgccctcttggactcgtgtcaataactgtactgagtataaaaaacatacagattcaccgcctgtctattcgccagatctgactatgactactggcgaagaacagccagaacaatttgaaatcggtcaattaagccgagatcagagaaaacagattgcggaagacatcagaaaccacaaatcaaatcagcgtgtttcacctgctgatcagtttgaggcgctcgctttaagcatcactgccggtgattgttccgactatgacagaacaagggccgaaagctatatgaaagccgctcatgctatacgtcaggaacaaagtgcagtgagcgatgaagttgaatccttagttaaagaaatcttgagctgggcgaggttaagaaaaatacaaatcaatccagttcaagcattgaaactagctcaaggtcgagaggttacagtacttgatacgacatatcgtgccaacctcgtaaccggtgaattgattgtgactggttcagatatgcactggaggaagacgctggcgcgtcacaaagcagagtttttgatcagccgctggcgtcaggctgcaagcgacttatga

SEQ ID NO: 166883 - DNA, 915 bp, Enterobacter cloacae
atgactgcctattacaacgaaattgatccttatgcggcccaatggctgcgaaatctcattgacgccaatttaattgccccgggcgttgttgatacgcgttctatcgaggatgtaaccccaaatgaccttattggatttaaacagtgccacttctttgcagggtttggaacctggtcactcgccctccgtcgctcctgttgggcagatgatcaaccagtctggacggcctcttgtccatgtcaacctttcagcacgtcaggcaaaggtaaggggtttgctgacgagcggcacttatggcccgccctgcattggttggttgggcagtgccgccctgtcgtggtgtttggcgagcaatctgcgagcgctgacgcaaacgactggatcgaccttgtacaagctgacttggaagcaatgggttatgccttcggggcgtgtgcgtttccgtctgcgagcgtcggcgcgccgcacatcagagatcgagcgtactggctggccgacaccaaccgcgagcaatatcaagaatgcgtatcaggatgcagacaaagtgattgcgcggaaactggctggtcgccaatcgaacttgcaggactttgcatgtctggcgggctggcccactccggcagcgagggatcacaaggggggttatcaaggaggaaggattcgcaatgggaaactttcgaccgatacgctggatgtggtagcgcagatagctggcccggcccggttaacggcttctggaaaaatgctgactggttgttgtgcagggatggaaagtggaggccagttgaacccgaacttaagccgctggttaatggggctgcctccagagtgggacgcttgcgcgcctacggaaacgcaataaacgtagaagctgcaatagcttttataaagtcatacatggggctggcgcggtga

SEQ ID NO: 166884 - DNA, 708 bp, Enterobacter cloacae
atgtacaacgatcttgtctcgtatgtggtacgaagagcggtgtgtggcctgacgcccaagaactataacaacgtctttatgaatgtcgtgcgtcacttagctaaaaccggcatttccagtattgagttacgcagcacccttaatagcttgaatggtgaggcctcccgttggccgactgactcagaattcctcaatgcttgcacctctgcacgactttaccctggcaggcttgatgcgcagaagatgcgctcaatgctaaccgagcttgagggggaacttcgtcgctcggtgaaaactgaggagccagttgttccaaacctttccagtctcgatattgatcacctcatgcctcaaaactggtactcccattggcctctcgaaaatgggtataccgtgacaaatttagacgctacgtcagtgaatcagatagttctggccggcgctgagcttacacacgagcagcaacttgtctggaaacggcaacaagctatcgcaacgctgggaaatctaaccttgctcaacctcagcgtgaatcgttcggcccaacactctgcgttccttaagaaacgggatggtcttattacccataccagcctgcgcttgaacgtgccactgatcgctatggataaatgggatgaggagcaaattctcgcccgaagcgagttgctggggaatgctgcactgagaatgtgggcgaaaggcgattaa

SEQ ID NO: 166885 - DNA, 513 bp, Enterobacter cloacae
gtgaccatagattccgttatcgtcccactgatacaccacgtagtcagacactttcaaatcgcctttgctgtcccaggcttttttgcccataaccgtgtcgacggcattggctttcagccattcgctggctttggccgagtctttaccgcccgtggccttgaaggccgcggcaatggcctgaacggaggcataagagtagagggtataaccttcaggctcgaattttccggcgcggaatttctcaatgaccgctttcccatccgggatcagacgcgggtctttaccaaaggtcatataaatccccttggtatattgtggcccacccgccgcggtcaccatctcttcgttgacgatacagtcgccggagaagaatttcgcttgcacaccctgttcacgcatctggcgaaccagcgggccggcttcagggtgacaaccgccgaagaacaccacatccggcttttgtgcgccgattttagtcaccagcgcgttaaagtctttctcaccacgggataa

SEQ ID NO: 166886 - DNA, 528 bp, Enterobacter cloacae
atggatgatgaccacacgtttggctttcagcttatcgataatgaaatcgctggcgacctggccctgctggtcatcgcgaccacacatgcggaacatatcggtcatgcctcgttcggtaatgagcgggttggtcgagccgggggtaatggcaaggatccccgcgtcgctgtacacctcggaggcgggcattgtggaagaggagcagaaatggccgaccaccgcgttgactttatcctggtcgaccagacggttggcgacggccacggcttgtttcggctcgcaggcatcatccccctgaaccagcttaatcttctcgccgttaatgccgcctgcggcgttaatgtcttcagcggcctgcgttgcaccgtgccagtactgatcgccataggtggcgtttgggccggtaaacggcccggccacaccaatgacaatatctgcatgcgcagaaaatgccgtcaccagacaaccggccagcacgagagaaaggggagttctgataaatttcagcgacattattatgttccttag

SEQ ID NO: 166887 - DNA, 183 bp, Enterobacter cloacae
atgcagatgtccgcgctgggcttgctacacctcatcacctgtacgctggtctatctgctggtgggatacggttcaaaagccatcctggccacccgcccgcaggccgcgcgtctggtgagcagagcatcaggaggaatgatggtagtgattgcggtggtgctgctgtttgaacagatcagataa

SEQ ID NO: 166888 - DNA, 348 bp, Enterobacter cloacae
atgggaacgaggccgaaccgttggcaacgcttgcatatggtctgcaagtaccgtgtacaccataaacctgtttatttcctgcggcatctcgcggcgatcgagcaagggaatcgggataaaatgcacttcactaaaagtcttcaggatgatgctgtaggtggtttttgttggttaccagagtgtcgcagaaagaatgttgaaataactagcagcccatcgctatgctcccgactactccataccaaccacacgacagtcgcggcgatcgtgcaatgtgtagttacggcggtatctgcattagcggagaaaattaactatctgataaacaataatcttatttatcagtaa

SEQ ID NO: 166889 - DNA, 474 bp, Enterobacter cloacae
atgggattgcctaggacatttgtaggatttagtagtacggatattcactactaccgtttgatgcttgcatggaaagagcatgagcatattgattttaattttactaattgccaactttctcaagaaatacattccaacgatgaagtctacataaaacgcaagtgtcgcgagcggatagatatggctggaacatttgcggtgcttattggtgcagatactcgtagcaagcataaatatgtcaggtgggaaatggaaatcgctctagaaaaaaaatgcagaattataggtattaacttagatggggcacgtagcgtggtagaagcaaaatgtccaccaattattcggaatgttggagctatttttgtgccgttttcaccgaggatagtttcttacgcgctcactaactgggccaagcaaccggacgatgattggcactataaagatgagatttataagagccttgggtatgagtga

SEQ ID NO: 166890 - DNA, 6327 bp, Enterobacter cloacae
atgaacgttcagcaactgcattatgcgccacttctaaatcagcttcatcagcgtgcggtgaggtcggtggtaagtcagctggcattgcggagcaagtcgttgagtcaatatctggaatctcaatatttccagcctccaggtctgggggggtcactgcttgcagatccggtattcgaaagtacttttggctggatgcctgcggatgaaacaatggaggatttgcgtgacaaactgatctccagcccgctggttgatgctttgagcaatgcgccagtgccgtttcgtcatcagctaactgcgtggcgaacgattcttgaagacaagcagtccctattagtgagcagtggtacagggtcaggaaaaacagaatgttttatggtgccggtgctggaagatcttattcgtcagcaaaatttgacccggcagtcactaacagggacgcaggctattttcttgtatccgttgaatgcgctaataaatagtcagcaagagcggcttcgcgagtggactcgcgggtttaaagggaagatacgctttgcgctatataatggcgaaacccggcataccaaatatgaagttcaggaagaccagctcaaagtacctgaacaggcattgagtcgggaagccatttatgaagccccaccgtccatcatggtgacgaataccacgatgctggaatatatgctgattcgtcgcaaagatgcccctgtcattgaaaagtcccagggaatgctgaagtatatcgtccttgatgaggctcacagttatattggctctcaggcagctgaattagcgctgcttttacgtcgcgtcatgcaggccttcaatgttggacctggtacagataaacctgtgcaaatcattgctacctcggccactattggtgaagattctcctgaaggtaataaagaacttgctaaatttgttgccgatctcgcgggggtcacagaacgtgatgtaaaagtagttcgcggctatcgacaaataccgccgatatcggagtctcttattcgtcatgaatatcccacatctttagcatctcttaactcactaagttctcaggaactttaccaacagctgtgccattaccgtgtggcccagcaattgcgtcaggcgttaactcgccccggacgcctggcggtacgtttgagtgaattgctcaatgttgccagaagaacctggccagacattaatcaccgtgagctgctgcagcttctcgatctgatggcgaaatcgcgagagggtgaatctaaattttcactagcttttacgccattacgtatgcatgggtttatccgaacactcgcgggcctatgggcatgttcaaataaacaatgcgcacataaagcgagtgaattaggtgagagtgactggccatttggtcaggtatggtttgaacaacgccaatattgtgactgtggtgcgcctgtatttgaaatcttacgttgctccgggtgtggttcagcttatttgtctgccaaggaggaagtgcgcggtgatggaacgagctggttggtggcgcaacctgctgctgccgaagaggatgagtttgctcttgatctcgatgtttattctgaagatgaagataacaacgaattagaaaataactcccaatttgatcgtcttatagcgagcgatggtgaaaaatatatcatttcactggaggaagcgacggcgggtaaaatcgaccgcgaggcgcaaaagcactatgagataaatctgctaagacctgaatctcgaggtgagggacgcaataattcctttgcttgtgtttgttgtggtgacacccaacggaaaaataatcctttgttccgtccgcttcgactcggtgcacccttttttttaaatgaaattattcctactctgcttgaattttcgcctttaccgcaaacaagagaagagcagttaggaccgtttaatggtcgacgtttgctcacctttacggattcacgtcagggaaccgcccgtatctctgcccgattacagcaggacgcagataaagctacgttacgaaccctttgttatcaggaactggcaaatattaatgagccatcagtaaagctcagtccggcacattgtgcattgttagagagttttattacccagttttctatccctccgttaaaaaattccatcgacgcactgagaaaagcgatggtttcgaatgagaagcttagcccagcagacgttcaggcgcttagaattatcgagccgatggttagttccttaagtcaggaacatgctgaagcaatgcaaatactcctcgtcaattcaggcaatcagcagaagaaaaccatgtcgtggcaaactctgtctgaacaacttgttggcagtgtggaccttgcggacagaatgagaggcagttttaaagacttgtctggacttgagcttactaaacaacagtttgctgatttttgtttatacagtgagtttggtcgccgccctaaaaatgcctggaccctcgaaagtctggggctggtggccattcactatccatttattgataaagtcacaacctgcccgcaggactggaagacattattacccgaccccgataagcaattaccagaatggcgtaatttattgaagattacccttgatttctttatacgtgaaaacagtgccgttttttacgaaaacgaggagtaccctcgctggatgggagcacgtttcccggtaaaaatgctgcaggggccagataaaaaatacaaagggcagaaacgtgatcaactttggccacaaatacgcgatcgtcattataaccgggtcattaagctattaattgctgtctttccggcaatacagcctgagcaggctcactggaaagcgctggttaattacttaatgaatgaggtctgggaagctattcgaccatgcctgcgtcagtttgaatcgggttatcaattggacattaaacaacaagctgaattttacagtccaaagcaagtctggcgttgcccctatactcgccgtgcgttagatgtcactttattgggttattctccgtatttaccaggtagcaaagagatagcacctgaaaaagctgtattgattgaaatgcctgagcttcctgcgcgtcactggcgtttatctggtggtggagaaatggcgcgagaagagcgcctgcactggctggaatgtaatgaacgcattcaacatgctcgggaggagggggtatggtctactcgcagtgatcgattggccctgaaagatagctggtatcgtctggaggaacactcagcgcagcgaacaccagagaagaaccagtttaatgaaaaacaatttaaagcagggaaagtcaatgtgttgaactgttccacgaccatggaaatgggcgtggatattggtggtatgagtttggtcgcgatgaataacgttcctccggctccggcgaattatttgcagcgtgctggccgtgctggccgtcgcggtgaaagcgcatctgccgccattacgttatgtaaaaacaccgcgcatggaatggaggtattcaaagaccctctctgggcgttcaacaccgttgcgagtgccccacgggttcgttttggtagcagtagtattgttcagcggcatgttaacgcattggttttaggtgcgtttttacgagctgaagttcctgatgcgacaaaactgagttgtaaatggttctttgaaggtgatgagagccagtgtcttcgttttctccattggttaaatcatcaggccgatcagctggcggataaacttaaacgccttacccagggaactgtactgatgtcattgacgccgccacagctcttgactcgtacgcaaacgatgatgcagctggttgatactcgttggagaagccaacttgccatactgttggaaaacatcgaagcgttgaaaacagataacagcgcgtgggaagaaacgccagcaggcaaagcaatcacttatcagcttcgtgattatcgcggtgcttatctgttttctaaactcatcagtgaagcgttcctgccgggtcatggtttcccggttggcgtggtcaatttcaattatctgaccgcggatgaactggaaagacgtcgcgcaataaaagccactcaggctgaccctaatgaagggggagaaaacttttctcgccgcattgaaaaactgcccagccgtgacctgcccacagcattacgtgaatatgctcctggtgctgatgtggtattgggcggaaaagtatatcgttcctcgggtattatgcttggtaaagtacttgccagcgggcaggagctgtctggcgatcatcatattccgtggttctggcattgccgtaaatgcggcgcgggagcgaccagcgccacccggcctgtcgaatgttgccactgcaaggcagatatacagcagcttgatgtgaagcggtatttacagcctgtcggtttcgcgacagacattcgttatcaggcacataatgatgtatccatgcctgcgcaacttccctggaaagatcctcgtgttcttgtaccttcttcggtatgggtctccttacccgatgctggactcggacgttaccgttttagtcatagcggggaattgttccactttagtgagggtgaatttggtcatggctacgcaatttgtctttcctgtggccgggcagaatctcaaacccagccccagcgtactccggagaatctaaagaacccggagaaggaaaatacacactacctgttgagaggcggtagtaatgatcggcaggggaacaataaattgtgccacggtcatgttcataaagatctgtggttgggatatagcagccgtacagatatggttgagctgcaactcagtgatgatagtggcttactgatcagggatgatgttgccgcgcgttcccttgcggttgctttgcgtgaaggattagcgcataaattgggtatcgaaaatactgagctgggcgtgacgacacagcaagcgcgcgatatcgatggcttcactggatattctatctttatttacgataataatgctggtggtgcgggttatgcagtgcaattgatcgataattggtcggatgtctttaattacgccagaaaattgctcgattgcagctgtgataaattctgccaccactgcttgctcagctacgacagtcagcattatgtcggcaaattagatcgtcaccaggcattaaccatgctcactaatcttcgtctacagcggcttaatctcgcgccagaatatcagtacttcggagaaagtagtcgggttgaaaccaacccactcagtttgcgtattgcgcaatgcctgaacagcgaggtttatgattcttgctcgttggttcttgctgggtcgcaggaacagtggagttttgcgcaatggccattatttaaagagttactccagtttgcttcctctgggggcaatgttgagttgctgattgccacgcagctggaaaacttagctgatagcaccagacatcagctttccgcgctagcggcgataccgggtgaatgcttgcaagtgaaatctatagacactgcgcaacttgtgcaagggaatgggcacttactggcacaggtcactcgtgaggggcaaacccaacagtgggccgctgccgacagtgccaccgtttcgcccggtgaattatggggacaaagctcggcatcgccggtagtgacgattaaaggggcgtccagaaaaacattctcgggtcagactttgagtgcagaagacttactgccagcattgcccgccggggcggtacgcatcaatctcagccaacaacttgacggtcaggtggaaggttttggttcgcgtttctgggcactgatagctcagcagcatgctggctggaagaaggtttttactaatggacgcgaaattactcacgtccattatagtgatcgttatctcaatagcccatttactgtacgtttgttaggtgaaattttgacggaattggttgaacaggggctggcagaacgtgccgaactcactgtttcagttaaaaagttagagtacagttctcgccaacacgattcactctataacgcatggcttgatgagcaggatcgccagcaagttatgaccacgttgctggaagagggctaccttgggccagcctggtcagggaaaatctcatggttagcaggagataatcagaacaccgatcacggacgtgaactgaccgtgaccttcagcgatggcagtgaacattatgtgttgctcgatatgggactgagttactggcgttgtacaggtgacacattcttcgatttttcaggacgaataccgaatcaggtcgagcgcctggcaacatgccgggcattggttatagccccggataatggattgaagagttatatcatcgcaggctaa

SEQ ID NO: 166891 - DNA, 450 bp, Enterobacter cloacae
atgaaacgtccaaattggttccaggtatctgcagaaggttcaaaagcactgggaacgctgcatcattttgccacaacaggaacaaatctcccggaagagttaatacatttggtttttttaagagtatctcagattaatggctgcgcgcattgtattgatattcacacccgcgatcttatgaagtgtggcatgtcagtagagaaaatagttctgattcccgtatgggaggaagctacatatttattctcggatctggagcaagcggcactggcatgggctgaagaagttacccgagtaagtgagacacatgcctcggatgaagcgtattctgcagcgctttcagtatttggtgaaaaagatttggtcgatctgaccatcgttattgcaacaatgaatgcacttaatcgtatgggcgtcagctttcgaatgaagccgctggccaaggcataa

SEQ ID NO: 166892 - DNA, 480 bp, Enterobacter cloacae
atgtcgtcacgtgtgaatcattttaaaaccattcccgcactggctaaaacactagccgatgcctctatggcattaggaaaagtctcgctggataaaaaacttaagcacttagtggatatccgtgcctcacagatgaatcattgtgcgttttgtctggatatgcacgttaaagaagcaaaaatgcatggggagcgtgaactgcgtctttatcacgttgcaatctggcgggaatcgccactgttcagcgccaaagagaaagctgctctggcactgactgaagcgttgacacgcattggtgataatggtgtaagcgaagcgctttacagcgaattgcgcgaacatttctctgaagtggaagtatcagagttaactttcaccattgctgtaatcaacgcctggaatcgtctccagattttatcacagatgtcaccaggatcgatggatagcgcttacggtctggatcgtgctgaattacattaa

SEQ ID NO: 166893 - DNA, 609 bp, Enterobacter cloacae
atgatgaaactgcttcacattaaagtcagcccggatttatcaggatcgacatcccgtgtggcgtctgagcgcctggtagaaaaattacgcgcgcatcatgccgggcttcaagaatcagtgctggacctggctaaaaggccgctaccacatcttgatgcatttaccattgctggtttttttaccccaccagacctacgcagtgaagctcagctcaccgctattcagacttcggaacaactggtagatcagcttttagattgtgacacgctggttatctcatcaccgatgtggaacctcggcctgccttctgtgttaaaggcctggttcgatcatataacccgcgccggacgaactttcgcctttacgccagagggcaaaaaaatagggctcgtcagcggcaaaaaggtgtattgcgttgtcgccagcggcagcgtatttgcacacggtccatttgtagcggatgaccagtttacgccatacattcgcgtagcgcttgaatatattggcattaccgacgtgcaatttattcgggtagacggtacgcatgatcccgtcgctcgtactacagcgttacctcatgcactgcaaaccattgatcgtttattttaa

SEQ ID NO: 166894 - DNA, 426 bp, Enterobacter cloacae
atgaagattgtacattacgacaccgtcattgaccttgcccgttgctttgcgctgatgcaggagctacgcagcaaactaacgaatgagaaacaatttatcgcccaggtacagcgccagcaggcgcaaggctatcggcttgcaggactggagcaggatggcaaaacaatggcgctggccggttatcgactgctcgaaaatttcattcacgggcaattctgttacgtcgacgatctggtaacagtgaacgaggctcgcggtcaggggatgggtgcaacgctgttgaatcacttagcggtcatcgcacgtgaatacggttgtggtcagatggtccttgataccgccattagtaattcaggagcccagacattttatcagcgtgtcggatataccgccctcggcctgcattattatcgcgatctcacttga

SEQ ID NO: 166895 - DNA, 1380 bp, Enterobacter cloacae
atggggtacaaagagatttatgcccgctatcgtcagcaaattcaggacggccttttgaaaccgggggagcgcgttccctcaattcgttcgctggcgagcgagttgcaggtcgcgcgaaaaacggtggaaaccgcgtatgaaattcttactggagaaggctattttgtaagtctgggggcgaaggggacctatataaatccggagctccggctgacctcaacggtcagagaagacaattatgtatcgtctcgttcacttgacacgccggttactgaaaggaagggtgatctccgactcggcattcctgcactggatgaattcccccataaaaaatggctgttgatatcgggaaaagcggcgcgaagtctgcgtccggaagaaatgctcatgcccccggtagtgggctttaagccactacgtgaggccattgcaagttatctcactatttcaagaggactgaattgccgaccagagcaaatcttcgtcaccagcggctatcgtgccaatttacggtttattctgtcggtacttgcacaacctgatgataaagtgctgtttgaagatcctggctacttttatggtcagcaattattgaagcgaatggcatccaaactgcactatatacctgttgatagacagggcatggatgttgattatcttcagcgctatcacaacgatgcacgcttcgctatcgttacacccactcatcaaagtccgctcgcagttagcctttcattaccgcgtaagcatcagttactgtcctgggcacagcaaaacaatagctggataattgaagatgattacgacggagagtttcactacacacgcaaagtaatcccggcgttgaaaagcctcgatacgcatgaccgggttatttataccggtacatttagtaaaacgataatgccagctatgcgtatcggatatatggtagtgccacaggagacggtagcccgtttcagtgaactgggtgaaatccttgaaacgggtctgccattactaccgcaaaaaatccttgcacagttccttagtgaagggcacttctaccggcatataaaaaagatgcgtttactctaccagcagcggcgtcgcatgatgcttgacgcaattgaaacgacctttccaggtttttttgaatttgagcttacagatggcggtatgcatattgttgccttcctgcaacgtggcattgaagatactgcattagctgcattatggacacagcacgagctttacgtccggccactctcgagctggtatgcgcagacacgaaaacgttatggattagtcattggatacaccaatattcgttcaaccgaggaggcgcagaaaattttgcagcgtgttaaggaaaaaacactggcacttatgcagcattaa

SEQ ID NO: 166896 - DNA, 1029 bp, Enterobacter cloacae
atgaaattttcggtatcaagaagaacgactctgctcagcgcattattaatcctgatgatgacgatgatatttttcgtctggtcgacaatgctgaacaatgatacccgtaccaatgatgcctatgtgaatgcggattacacactggtagcaccaaaagtatcgggttatatcaaaaatatctatgttgcggataaccaacgtgttaaagcagggcaaacactggccacgctggatgaccgtgactacaaaatagcgcttgaaatggcgcaagctaatttgcagcttagtgatgcaaaacgcctgagcagccttgcacaactggagcagcaacaatccattattgctcagacaaaagcgacccttttagccagtcaggcatcggcgcagtatgccagtcagaatgctgaacgttttaataagctttatcaaagaggtaccgtcgctgcggacgatcaacaaaaagcccattcaacacagcgttctgcatccgcagtcgttcgtcagaacgaagctgctctgacctcagcagagaaacaggtaggcgtgttgagggctgcattacgtcaggcggaagccgatgttgcagtcgcgcaggcaaaagtcagtcaggcgaggcttaacctttcttatacgcatattgttgcaccagtcgatgggatggtaggccagcgttcggtgcgcctcggagcgtacgttaacgcagggacacgtctgctggccgtggttccgctacatcaaacttacatcactgccaattatcttgaaacacagttggcaaatgttcagcaggggcagaaggtcttaattaaaattgatgccatgcctggcaaaaagtttactggacatgtcgatagtatcgctcctgcaaccggcgcaacgttttcagccatccagccagacaatgcaacgggtaactttactaaagtcgtccagcgtttaccggtgaaaatagtgctggatggtaatcaacccgatgcaaaattattgcgcgtcgggatgtcagccgttcctgaaattaaaatccgctaa

SEQ ID NO: 166897 - DNA, 1584 bp, Enterobacter cloacae
atgaatgcacagcgttctactccaccttcgcccccctttacctggcgccttgcaatgggatttgtggggatactcatcgcagccttaacttccggacttaatggtcgggttatagatatagcgcttgcggatgtgcgtgccggaattggcgtgacttatgatcaagccagttggttcacctctgcctaccaggccgcagaagtagtggcgatgatgatcgcaccatggtttgctgtgactttttcgctgcgtaaattcgtgcttacttgcgctggcggttttatggtttgcggcatacttttacccttgctcccgaatgcgccgctgtttattctcttgcgaacgatacagggcctgtttagcggtgccctacctcccttactcatgactgtggcgctacgttttctgccaccatcgataaaactttatggacttggcgcttatgctctgactgcgacttttggtccaaatgtggccccttcactggcggcattctggacagatgatgtgagctggatgttcatgttctggcaagtggtccccgccattttgatttcgatgctctttattggctggggtttgccgcaggacccgattcacctcgaccgatttaaacagatcgacctgttcggtatgattaccggctgttctggaatggcgtttttgataatcgccatcactcagggtggacgtctggactggtttgaatcgcccttatttaatggcctgttatccagcgccttcgtgtgcctgacgattttcctgattaatgaatggtttcatcccctccctttgttcaaattacagatgctggagagaagtaacttttcatatggcctgatggcgctcgctgtagtgttggtactggcactggctggctctgctttgccgtccaatttctttggtaaagtagagggctttcgaacagtgcagtttgccccgctggctttgataattgggctcccgcagttaattatcaccccgcttgttgccgcattgcttagtctgcgctgggttgattgtcgctggctgatagctttcgggattgttctgatgatttctgccagcctgatgggtatgcagataaccagcgattggtcacgccagaatttctgggcaatacagcttctgcaggcgattggattaccgtcaattattttaccgttgcttatgagcgcaaccagcgttgtggctccccctgaaggacattatgcctctgctatgttcaataccgtacggggtttttcaagcatcgcagctggcgttttagtggaatggtttataaatgacagagagcaatttcattctaatgttctggtcaataacgtagccaaccgcccatggttgatatcgacaccggtcagcgagcaggccagcagcagcattcctttattacacgacggcagcatcagcaacaccgagaacatcgctggatttatcaccttattaaaacatcaggcaattgttctgagtctggccgatagctatctgctgatgactggctttgccgtccttctgttattactcactgtctggttgccaaaacgtgtctggccgccccagacacttttcaacctgcaatga

SEQ ID NO: 166898 - DNA, 786 bp, Enterobacter cloacae
atggccgtaaatgtttcaagctttgaggatgaaaaaaccggcgggattcaggttatcgcccgcgcagctgcaattttgaatgtgctgggaaaacaccctggcggcatgagtctgggagaaattgcgcaggaggttgctctccctcgttcaacggtgcagcgtattgtcgcggctttagatagcgctcaacttgtgcgtagcagcggggccggtggcctgcgtctgggacctgcactactcaaacttatttccagtgtgcacagcgatgtcgtggatcttgtacgtcccttcctagagcaactttcggccaatattaatgaaacagtgaccctggcacgtgccagcggtacacagctggcaatcatccactacgtcgtagcaacacgggaattacgtgttgtacctcgtattggacttaatttgccgctctacagcacttccggcggacgtgtgttactggctatggaaagtgatgaagatgtccgcatactggtaggcgaagcctatgaagatctcaccggaatgacagttaaaactcttccacagcttctggagctgatcgctgatgttcgtgccaaagggctggctatagatctgggggaaactcttgagggtgtctgcacgatagcggtagcgctggacacactttttggtcgtttttctatctcattattagttccagcgccacgtttccataaacatgaaaccttttatcggcaagaactcatgcaatgcaaggaggcaatagttaatgaaattggaagaataatttcggtaggagaataa

SEQ ID NO: 166899 - DNA, 441 bp, Enterobacter cloacae
atgaatacacaaaatcatcagttcgcggagcttaccgcaattactgcctcagtggtcccagacgagttacgcatcggcttctggccgcagcactttggttccatcccacaatggataacccttgaacctcgcattttcgcctggatggagcggctgtgtgccgattaccacggtggtatctggcgcttttcgatactcagcaacggcggcgcttttatggctccggagcccgacggtgagaagtggacgttgttcaacccgatgaatggcaacgatgcggagatgagcggagaggctgccggtatagcggtctgcttgatggcatacagccaccacgtctgtcgcaccgagtgtgacgcaattagtgagcactattatcgcttacgcgactacgcgctaaaccatccagaatgcagcgccattatgtatctaatcgactga

SEQ ID NO: 166900 - DNA, 246 bp, Enterobacter cloacae
atgataaaaaaaactaccgttaataaacttgtaacctttaactccaaacttgatacgtctcaaaaaataataaggaatcttattgttgcagtcgtcatttgttttcttctaaatttccttgggttagacggtttgtggaaggggttctttatactgactttgatttactggagcttttcggtattccatagtctaattattatttataaaaagcatatgaaacaacattgggtaaatggatcctaa

SEQ ID NO: 166901 - DNA, 243 bp, Enterobacter cloacae
atggagtcgttcataacccagcgtcgacatcggaccgtgtccagggataaacgtcacatcatcgcccagcggcaacaacttctgtttaatcgactgaatcagctgtccgtggtcgcctcgtggaaaatcgctgcgtcctacgccacctttgaaaatcacatcgccggaaatcagcagacgggactggtcatcaaagaagacaatatggcctggcgtatgcccaggacaatgcaacacctgtaa

SEQ ID NO: 166902 - DNA, 789 bp, Enterobacter cloacae
atgtctgttgataatatatccagaatgggtaccgccaaagtggcactttttgtggatgaaacaggtcatcaggtagtcgagaaatttcctgtcagtgatgtggagtatagtttttatcaacacgcagccaagagtctcgctcaggtagacattgtcaccccaaagctcttgttcgccgatccatccttacgcaagttgagactggaatatatcccacatcaagttggtcaggacgcagttgcaggagatgacgtgttgtcatttctgtctcgcttgcattgctatccacctgacccttcgtgggtttatcacaatcacacttggtcagaatcagcgctcgaaaaatcgctcaatcttttggcattacctggcagatcagcacaacagttacggcatttccagcaggcaagtgatgctctgtttagtggtcagtgcttaatttcaggtgatagtaatgccggtaattggggaaaaagggatgacggtgatttagctcttttcgactgggagaggttcagcattggaagcccagcaattgaccttgcccccctaataaagggaatgggctctatacaaaaatttaccgatttttcagaacgctataactgtatatctcgccattctaagcctaatgatttggctaaagaaattgcaattgccaaagcatggattgttaccgaggtagtggtactgcttaatgaacggcagaaaagtgattttcatttatatctcaactggtacaaagaaaatcttcccgcttggttagattacactgtaaaaatgctttga

SEQ ID NO: 166903 - DNA, 177 bp, Enterobacter cloacae
atgaaaccatttggacttgccggaaaaccgcagcctgagccctgtggctgctgctggtactacccggaggattgccgttatgctgctgcgaaaccgctttaccgccgcagccagcgtaaggctgagcgtcagcgtcagcgtgcgactattacccgcacactggccgaatcacgatag

SEQ ID NO: 166904 - DNA, 174 bp, Enterobacter cloacae
atgccggtaattaaatggtggttaacaaattactctaaagtggcttctgagccagcgtctgagtatataacccgcacccgactaatgcagtcccgttttatcaaatccacaaactctagcatcatcctgaaactactttcctcttccgatctcttaagaaggaattacatttga

SEQ ID NO: 166905 - DNA, 1047 bp, Enterobacter cloacae
atgataacgttttctatggatgaaagtggctatacgggttatgacttacttcacaaagagcaaaaattccaaggcgcgtcatcaatactaataaaccatgatgatgccagtcgtctgataaaagaatatttccccaaacttcaagctgatgaattgaagtatagttcactgaaaagaagagattccaaccgcaagcccttatttgaattgcaaaagcatctcttatctaattacccatgtataacatgtgtaggtgataaacgttttttactaattcttatgttcatcgattatgctgttgaaccattttattatgattttgggattaatctttatgaggatggcggtaacttctcaatggcgtcaatggtgtattacgttggatcagcgtattatggctctgcctttgatgatattctgcttcagtttcaaaatgcaatgaaagaaaaaaaattagattcagtgaatttgctaataagtaaaataaggaagcttgactggcaaaggttaaaagagttctttggtcctttggcatttaaccacccagattgtattgatgccatcatgactgatggaattagtactgatgcctcatttactattttaaatgcattaatttctcgtacagaaatgatgtcctctggagagtatgcgattgagcatgatcgttctaaaaatctactaacttacaatgaacgccttaactatttgatcaattgtgataaggaaggagagtttaagcattccgaaatagcaactatctcattccctctaaaccttaaaaaagtctatcaaattgattcgaaagaaagcccaagcgtacagttgtgtgatgttcttataggtgcatgtattgaatcagtttatcaattaatggactctaaggagctaaatgaaagttccgttctttcactttatcaagatagccagttaatccattttatacctgatatagattttgaaggacagaaaaaatttaggaaaggcagtcagagtgaggagtatcttacgtttattcaaaatgaaatctactctagtaaaccttaa

SEQ ID NO: 166906 - DNA, 645 bp, Enterobacter cloacae
atggcaaggaataagaaaaacaaaaatgctttcagctacaataatcatgatgttgcgaatcggaactttataaataaaaattttaataaaacacacagttaccattctaatttttttcagtcaaaattcacgaacacgtcttttattggaacttcattgaaatggtgtaactttactggcagtctttttcaatcctctttattaagaggagtccttttcagaggcgggagcctgcggcatgttgtatttaaagaatgtataataaacgcttgtaatttagaccgttgcaaaacggaaggcttgatatttgataagtgttacatagttagtagcgataatttaattaaccgtttagatccttctcaaattattgattcgaaaatttacaagtcctttccagaagaggagctattcaaccctattttgaccgatgttattcaagagttaagaaaaaacgatattgtgaggcgttcttcagttttacatagaaaattgaataaaattgatactattactctcacgtaccttttagatcgcttcgatgaaaactttcttatcgaacagttgccaaatgtttgtatgaaaatcgaacgtgaatttcatacgatcagctatattgaccagcttctaagaaaacaggtatga

SEQ ID NO: 166907 - DNA, 309 bp, Enterobacter cloacae
gtggatatagtcaatcgtgctttagtccgctctttggcggcgagcatcgtaaagttagagcaagaaaagggaaagcaatacacaccatcttctgttgttgatgtctggaatactgaatatgatttggttgaagacgaagatttatcagcgttacagactcaggtgacgttcgaggttgaagccgaacgtaatgctactcgatcaagctttaaagtctcaaaattgggcatggcaaacctgaaaattgacgagctatcagggaatctgtctccttcccctagctcgcccgatggttttaatcctgcctaa

SEQ ID NO: 166908 - DNA, 381 bp, Enterobacter cloacae
atgaaaatggataaatggcggctgtttgataaatcaacagatgggagtgaaatatatataaaaggaggcgttattgatgggggtattacttctatctggtataaattcacatcaaaatcgttaaatgtatgcagtaatgggaatgtgctcatgacaatagatgaaaaattaatatgtgattcccaaaagaaaacaaaaactcaatcagaaatagcacgggtattttacaaatgtaaggaaagaaaaatgaagttttcagaccgcacactgtttaattatttcggtgaggctatttatagtaacggttcagaagggagatggaaaacaataattcctgatacgtttgcagaagatttatattataaggtttgcaagaattaa

SEQ ID NO: 166909 - DNA, 156 bp, Enterobacter cloacae
atgataagtatccggttgagttctgattcgattgacggggtcacctttatcatttcgcctcacggtcaggggtgtcgactatctgtcgaacctgaataccggcgcaatgggacgcaaaattacgatggctggtttgacctgctccccgttgattag

SEQ ID NO: 166910 - DNA, 780 bp, Enterobacter cloacae
atggtacaagtactcaacaccactggtttgaattatcaacttgaaaaaaccatcactgaagctgaggaaaggttaattctcattagcccataccttaagcttagtaatcgcattaaagagctgatcgaagataaaaatagactaaaagttgacatcagaattgtttatggaaaatcggaactaaactctaaacaatatgaatggttaacaaacctgccttttgtacgccttagtttttgtcaaaacctacatgcaaaattatatgccaatgaaaatcaatgcattgtttccagtcttaacctttatgattttagtcagattaataatcatgaaataggagtcttaattattaaagagcaggagaaggatgcatacacctcatctttaaatgaagctcagcgattaatcagaatcagcacggataatatccacccccaaacaacagaaaaagaaaaaattgaatcaaaagaaagtgaagaaaccaataaagagtcatccgacttctcctcaacctttcatgaagaaccatcaaaaaatcaaaatggattttttactgatttaaatacgagttcaaaactcacttcgacaaatctagcaaaaaatcttaaaactgatttgttatctctatataaaagattaatcgacgttgggtatctcatggacgtagaaggaaaatacatattgaccgatgcaggcatagcggcaggggcagaagccaagcccaatcgttataaaaaaggagaaaactactttttgtggcctgaagatctagaattatga

SEQ ID NO: 166911 - DNA, 924 bp, Enterobacter cloacae
atgacaatccaacatcctttactgaaaattgcgcttgatgatgatggacgtcttacgtggcctgtttgcaccgggcagactcaccgctgcccaacgtgtctgcgactcgttactacgggcccggatggggatttggtgcattcgatggaggagggcggcaacgcctgcataccttcagctgctgttgttatttcaaaggcgattatagagttgctcagcgcaggcgaacgtctctatgttaatccggtcaagaatgggaataaaaccctggcaccttcatttatctttctgcatacaggccagcaactccgcccatttatcaattcgtattatcagccagccggtgccagctggagaagtgataaaggtttcaggcttggccttttctttatgaatgagcgagcctctaaaattaataaagaccagttcgattttattgcagtaatagatccattgacctttcaaactgaatatgatgcgacatggtcccggggtgaatttgatgaccctcttaaggcattacggtattcacttgtttctgaaaatttgtcttccgtctgggtgaaatggcccgtaaaaaacctgcaaccgaggaaagaaacggtgaagaccgattactggtatgactattattcacctcattccccagttcagcaggctgcttgcacagcaacggtgacgggaatagacggaaatgtatccggagaaactatttacatgcttcagatcgccgtagagcggtcgacagttgagtaccagcttgtaaaatcgctaggggtcatactgctactggataatacgggaaatttggtatcggaggcgcagccgcactttgatataatcatcaaagcatgtatatcgggcgtcagagactttgttcttcagaatcctcggatgctgggttttgaaaagaaggttgcatag

SEQ ID NO: 166912 - DNA, 1428 bp, Enterobacter cloacae
atgaacaacgagagaactgagcctgcaataaaggcgttgcctaatgatgagtcaccggcctctatccataaattactggttcaagtagccagcgtatatgacgttaaggatctggttgagagacttaatgacgcaaccggcagcgattggtcgagagcatcgcttattcgccaggtcaaaggtgcagttaatgaatgccgactcactcaggaagaatatcgttatcttcgttcgatgctgccctcacggccagcggactatgaccagaaatttttccgctttattgacttgtttgctgggatcggtggccttcgcaaaggttttgacgcgatcggtgggaaatgtgtgttcaccagcgaatggaatcagttttcccgtcgaacatacagtgcaaactggtactgcgaagagtcggaccaccaattcaactcagatatccgtgacattacactcagcaatctacccgaagtgtcggaggaccaggcctatgcttctattgatgcttccatccctgaccatgatgttttgctcgccggtttcccatgccagccattcagtattgccggtgtcagcaaaaagaactctttgggcagaaagcacggatttgaatgcgacactcagggaacgcttttttttgatgttgccaggatcatccgagccaaacagcctgccatattcgttcttgagaacgtaaaaaatctgaaaagccacgataagggtaatacgttccgcgtcatcatgaatgcacttgatgaactcggctacgatgttgcagactgcgatgctcacggcccaaaagatcccaaaattattgacggtaagaactttcgtccacagcaccgggaacgtatcgtgctggtcggctttcggcgagatctaaagcttaaggatgggttttcgttaagtgaagtatcggctttttatcctgcacgacgaccgacccttggggaactgctggacgctgaggttgatagccgatatatcctttctccaaagctctgggaatacctttataactacgctaaaaagcaccaggcaaaaggcaatggatttggatatggactggtaaattcgtctgataaatctgcggtttgtaggacgcttagcgcacggtattatcgtgatgggtctgaaattttgctagaccgaggatgggattttagcataggcgaagaggactttaatgaccctgaaaatattgctaggcgcccacgtcgtttgaccccgcgagaatgtgcccgccttatggggtttgagcaacctggaaaagttacttttcgcatacctgtctctgatactcaggcataccgtcagttcggcaattccgtcatcgttgacgtgtttgcagccgtcgcctgtttactgcgtagtcgtattgagcgagctgttgaagctcggatcaggggcgaatttgaagcggcatcttaa

SEQ ID NO: 166913 - DNA, 168 bp, Enterobacter cloacae
atgacatattttgactcagccgaagatctgactatttcaaaacagagagctcttcaagagctttcaaaacatggtgttgccgccagcgacatcaaagattttttttccgagttgggtgagaaggaagagtacaacgcgcaggatgtattgaaatggctgggctattag

SEQ ID NO: 166914 - DNA, 495 bp, Enterobacter cloacae
atgcaggatggcgttgcagtaatcagcgtaaataatattgaagtcggctcaatgccaatatcacaatatgaagaaatcgttaagtcagttaaaaaagattggcgcatacgcatctctgctgtattcagttacgtgggctttatctggaaattcattataaagctatgggtttatttcgctcagagcattgcagttattattgcattttctatgctctatttttttactcacccaggcgagacaacccagtttgttactgaacttcgtaatgcgtcctcagagacaattgctgaggccattcattcagttgcaaatatatgtgttttcgttacggtcattgcctgtacactcaatcttttaattaaaggaattcctgcatttgtgagtacagccgaaattactattaataaaaaaattcgtgaactaatggaggttccggcagaggggcaggttagtatcaccttcaaaagggacggattgaacagtgtcagataa

SEQ ID NO: 166915 - DNA, 630 bp, Enterobacter cloacae
atgaaaaacgctattaagttcctgagtttggttactatgattcttggtgccgatcttgctttcgctgatgaatacattgataaggttaaatctcaagtctatagcgagttcagagatgaacgaccactatcagtggttatgtcctctcgtcaggactgtgaaaagggggagtggaaatctttcgactgggacggaattcagaaaggagtgaattatacttgcactgtgtctaaatcgaacatcgaaaagattaaagaacgatataatcgtaacgccaaagctagcctagataaaactttatctacgtataaaaaaggtgacgatggttctcctaagtttgcagaatggtatcaacggacttccgaatcaatcatcaaaagtcatcttacccgtaaccaaatgctccgacttgatggcatcaccctttcaaataactgggcaattgagttcgatgggacggttaaatactcaggtgttaacattacttatgctggaggtacatctgtatccaaaacgcataagtacataaaagacttttcacttcttggctgggcttacggcaaaccaacccaaacaccaaaagtttatcttgaagctttaggccctgacttctataaggaagataagtaa

SEQ ID NO: 166916 - DNA, 285 bp, Enterobacter cloacae
atgatggcagttatcaataactcttattatgctcgtaacgaaaagtggattaggccagtactggttgcttttatgttcgcatttggcactagtctcggtgatattcttggggttacgaaccccatagtttccaccgcgagtatgtggttggctgcaattgcgtttattatcaccggcgttggggtgatgtttactgatacgctttcagcacatattttaaaattgctcgcgttcgtggcattgttaggggcagtcatcattttagtgattcgctatttcacatag

SEQ ID NO: 166917 - DNA, 744 bp, Enterobacter cloacae
atgaaactctcttcccgtttagcgtcgattacctttgccttgctggctagcctgcttttgacttcgcctcctgcagtggcgtggaaaaccgtgtttgatccgtcgaactacacccagaacacgctgacggctgtgcgcacgttggaacagatcaacaatcagatcacccagcttcagaacgaggcgcaaatgctgatgaatcaggcgcgcaatctgaccaatctggacttcaatatcgtcaaccgtctgcgctctacgttggcaaccacggaacggctgattgccgaggcgcaagggctgaactatgacgtgacgaacatggatcgggagttcgcacggctctatccggaccagtacgccgcaaccgtcagcggcgatcagatggcgcaggacgcacgagagcgttggaagaacacgctcgacggtttgcacaccgcgatgcgcatgcaagcgcaggtgtcgcagaacctggcgcaggacgaaagtgccttgaccgacttggtaagccaaagccagtccgcgaccggcgcgttgcaggccatgcaggcgaccaaccagctcctggccttgcaggcgaaacagtctatccaggcgcagcaactccaaatcacgcaggaccgtgcggcgtcgctggagctggcgcggcaagcggcggcgaccgagcgcgcccgagaggtgcgccagcgcttcatggatggcggcacgccgtacacgccgcattccgtgcagttttacggcaactga

SEQ ID NO: 166918 - DNA, 2463 bp, Enterobacter cloacae
atgttgaatcttgccgaatactgccagcgtcccgcgttactggccgactggttgccctgggccgggctggtcgcgcccggtgttgtactcaataaagatgggtcgtttcaacgcacagcgcgttttcgcgggccggacctggatagcgcgacacaaagtgagctgatcgcgacttcggcgcggttgaacaatgcactgcgccgcttgggttcgggctgggcgctgttcgtggaagccaagcgtctgcccgcggcggactatcctcaatcggactttccggaaagcctgtcctggctggtcgatcaagaacgccgcgccgcgttcgatcaagcgcatagccacttcgagagcggctaccacctgaccttaatgtatttgccggccgaggaagcccgcgcccgtgcggcgggcttgctctacgagaatcggccatcgcaaggcgtggactggcgcgagcggctggacgccttcgtctcggagacggatcgggtcttcgacctgctcgatggcgtcatgccggaaattacctgggttgacgacagccagacgctgacgtatctgcatggcactatctcgacgcgccgcttcgcgctggcggtgccgcaagtgccgtttcacctggatgcgctgctggctgactgcgcgctggtcggcggcctggcgcccatgttgggcgaccagcatttgcgtgttgtgtcggtgcgcggctttccgacctccacctggccaggattgttggatgatctcaaccgattgggctttgcctatcgctggagcacacggtttctgtgcatggacaaggccgaggccgagaaagagctgggacgcctgcgtcgccagtggtttgccaaacgcaagaacgtcatcgccttgctgcgtgaaaccatcttccagcaggaaagcccgttggtcgataccgatgcaaataacaaggcggccgatgcggatgccgccttgcaagagctgggcagcgatcaggtggcttttggttatgtaacggcgacggtgacggtgctcgacgacgatgcggcccgtgccgacgagaagttgcgaatgatcgagcgcgtgatccagggccggggcttcgtcactatccctgagacgctcaatgccgtcgatgcctggttgtcgtcaattccaggcaatgcctacgctaacgtgcgccagcccattatctcgacgttgaacctggcccacctgatgccggtgtcggcggtgtgggccggccccgagcgaaatgcccatctcgatgggccgcccttgatcgtcacccgcaccgatggcgcgacaccgttccggctggtcacgcacatcggcgatgtgggccatacgttggtggtaggtccgaccggcatgggcaagtcggtactgctggcgacgctggccttgcagttccgtcgctatcccggctcgcgcatcttcgccttcgacatgggccgctccatgcgcgccaccatcctggggctgggtggcgagtattacgacctgggcaatgacggtgagatcgccttccagccgctagcccgcatcgaccaggagggctatcgcacctgggccgctgaatgggtggaaggtcggttgctgcacgagggcatggatgtggggccggacgagaaggcggccatttggtcggcgctgggcagccttgccggtgcgccggtggagcagcgcacgctcaccggcctgtcggtgctgctgcaatccaacgcgttgcgtcaggggctgtcgccctatgtgctgggtggcgcccacggcaagctgctcgacgcggactcggatcggttgggttccggtgccgtgcagtgctttgagatggaagagctgatgcacagcaaggcggcggtgctggccgtgttgggctatctgttcgcgcgttttgatgaacgcttcgacggtgcgcccacgctgctgatcctagatgaggcgtggctgtttttggatgaccccgtgtttgcggcgcgaatccgccagtggctcaaaaccctgcgcaagaaaaacgtctcggtgatcttcgccacacagagcctggccgacatccagaactccagcattgccccagccatcgtggagagctgcgcgatccgcatctttctgcccaacgcccaggccaccgaaccgcagatccgttcgatttaccagaactttgacttgaacagccgccagatccgcatcgtagccgaagcggtgcccaagcgcgattactactaccagtcgcggctgggcaatcgcctgttcgacctggacttggggtcagtggcgttggcctttgcgggcgcgtcctcgccgcaagcgcaacgcgacatcgaccgtgtcgtggctgacaccggcgtgtctgggtttgccagcgcctggttgcgacatagctgtctggattgggcggcggacctgttgcctacgtttccaaaccctacgcaagtcgcttccccttcttttgccaatcctcctcaggagcatctgtcatga

SEQ ID NO: 166919 - DNA, 378 bp, Enterobacter cloacae
atgacgcccgttgatgctttccgtatttccgccgatccgcttctcaaccctgcacgggtgcgctgcctggccagtcctgcgaagcacggtctgctgctcgctgccctgttgctgtttctggtcggcacggcgcaggccgccggttccagcatgccctgggaagggccgctggaatccatccttgactccatccaggggccggtagcgcgcatcgtcgcggtcatcatcattattgccaccggcctggcgctggcctttggtgacaccagcgggggcttccgcaagctgatccagattgtcttcggactgtccatcgccttcgccgcctcttcgttttttctgtcgttctttagtttctccggcggagccatcgtatga

SEQ ID NO: 166920 - DNA, 1065 bp, Enterobacter cloacae
atgagcgccgggccgcagtcctcgcctgaaccccgttcgtccgttgcgacgtcactggatcgccgcattcagatgctgcgcacggcgatggggccgctgatcgccgccgccttggaagatccggacgtggtggaaatcatgctcaatcctgacggctcgctttgggtggatcgcctgtcgtcgggccgtgcgccgctgggcgtggaactgtccgaggccgatggtgaacgcatcatccggctgatagccgcccacgtcggtgcggaagtgcatcgcggtcagccgctactgagcgccgagctaccggaaacgggcgaacgcttcgagggcatcctgcctccggccgcgccggggccggcgtttgcgttgcgcaaacgcgccgtgggcgtgattgcgctggagcgctacgtcaccgacgggatgatgaccgccgcgcacgcggactttctggtgcgcgccgtgcacgagcggcagaacatcctgattgccggtggtaccagcaccggcaagaccacgctcgccaatgccttgttggccgaaatcgccgctaccggcgaccgggtactggtgctcgaagacaccatcgagctgcaatgcgtcgcgcgcgaccatgtgccgctgcgcacccgtgccggggtcgtgaccatgcaggaattggtgcgcgccacgatgcgcctgcgcccggatcgcgtgatcgtcggcgaggtacgcggcggtgaggcactggatctcatcaaggtctggggcaccggccaccctggtgggattgccaccatccacgccagttccgcgctgggcgcgttgctgcgcttggagcaactgattctcgaagtcgccgtgaacccgccgcgtgcgctgatcgccgaggcggtgaatgtcgtcgtctacatcgcaggacgcggccgcaagcgccgcatcgacaccattacccgtgtcgttgggttcgacggtgcgggctaccgcttggcggatgcgctggaaacgccgtgtcccgaattgccacctgtttcagattttcctacctcaactcccaccactctggagaatagctatgacgcccgttga

SEQ ID NO: 166921 - DNA, 1995 bp, Enterobacter cloacae
atgcaagggacgaacgtgctgctcgggcagatcgtcgtggtattcgccgtcgtgattgctggagtgtggggagctacacaatggacagccgccgccctgggttaccaactacgcctgggctcgccctggttcgattttctaggcacgccggtttatcacccctggaagttgttcgaatggtggtttttcttcgatgcctatgcgtcgcatgtgtttgacatcgggggtgccatcgcaggcggcagcggtctggtggctgtggtggtcgctattgccatgtccgtgtggcgttcgcgtcagtccaaactggtgactacctacggatccgcccgttgggccgatgccgttgaaattcgcgaagccgggctgaccgatccggcgggcgttttcctcggcctgcatgacggccagtacctgcgccatgaagggccggaacacgtcctgacctttgcgcctacgcgctctggtaagggcgtgggcctggtcgttcccacgttgctatcctggcctgcgtccgccgtcatccacgacatcaaaggcgaaaactgggccatcactgccggttggcgttcacgcttttcacactgcctgctgttcaaccccaccgattcccactccgctgcctacaaccctttgctggaggtacggcgcggcacccatgaagtgcgcgacgtgcagaacatcgccgacatcctggtcgatcctgaaggtgcgctggagaagcgaaaccattgggagaaaacctcgcacgcgctgctggtcggcgccatcctgcacgtgctgtacgcggctgaagacaagacgttgcgcggcgttgctaactttctgtccgacccggcgtgcccgttcgagctgaccttgcaccggatgatgaccacgcgccatctgggcgagagcatccatcctgtggtcgcatcggccgcccgtgaagtacttaacaagagtgacaacgagcgctcgggtgtgctgtctacggccatgtccttccttggcctgtaccgtgaccccacagtggccgaagttacctcgcgctgcgactggcgtatcgccgacctgatttccgtcgaacatccggtatcgttgtacctcgtggtcccaccgtccgacatcagccgcaccaagccgctgatccgcctgatcctcaatcagatcgggcggcggctcaccgaatcgctcgacggcagcgccggtgtggagcgccgccacaagctgctgctgatgctcgacgagttcccagcactcggacgtctggattttttcgaatccgcgctcgcgttcatggccggctacggcctgcgcgccttcctgatctcgcagtcgctcaaccagattgacaaggcctacggtcagaaccattcgattctggacaactgccatgtgcgcgtgaccttcgccaccaatgacgaacgtacggccaaacggatttccgaaaccctgggcaccgccaccgaactgcgcgcgcagcgcaactacgctggccatcggctcgcgccgtggctgggccacctcatggtgtcgcgccaggaaacggcgcgcccgttgctcacgcccggcgaagtgatgcaactgccacccgatgaatcggtggtgatggtgtcgggtcatgcaccgatcaaggccaagaagctgcgctattacctggacgccaatttcaagcagcgggtactgccgccgccggtgttggcggacggaggctatgccgatgtgcctcccgcccggcgcgacgactggagcggattggcgattcccaccgtgcttaccacagcggccaccgtatccgttgttggcgtgggcagcgccgatgacggcggcccgcgccagcagcctgagttgtctgacgccgcgacctacaaccccgagccggaatacccggccagcgacctgtcgctgcttgatgacgacgtgccgcccctttttcacagccagctcgatccgaccctgcaacgcacggcgcggctggtatctctcgaccctgacgacggaatccagctatga

SEQ ID NO: 166922 - DNA, 945 bp, Enterobacter cloacae
gtggaactacgtcatctacgctgttttctcgctgtagctcaagagctccatttcgcgcgtgcggccgaacggctgcacatcgagcaatccccgctgtcacgggctatcaaggagttggaagaagagctcaatgttcctttattcgttcgaaccacacgtagcactcgattgacccgagcgggtcaactgttcttggagcacgtgcctcgtgttttcactgctttacagcaagcccgagacagtgtggtcgcggccactaacggtttttatggacagttgcgtgtggcattgtccgattgcgttacaccatctcgtttacccatcttgttggcattgtgccgtcaagaggagccggaagttgagattcggctgtctgaagtgccgttgtcccagcagatcaaagggctgcgtgaggacctatacgacgtgggctttgctcagtcggatgacgttgatgacggtatcgttgctacacctgtctggagagagccgctcatggtggcggttccagcccggcatccgttgttggcccacaagcgcatccctctggaagaagtgttgcgctatccgcttgtactttgtgatcccgaagtaagcgagggacacgcgaagcaaattgagcgggtgctgcgcaaggtagatatggagcccatggtcgtcgagcgcgttacctcgtgcgacctaatgatggccttggtgtcagcgggcttcgccttgggtcttgcgggagctggacgtattgcggccagtcgggaggagggcgcagtggctcggccactcgcagggcattcctctgtgttgacaacctatttgcttcggcgagaaggcgagccgtccgatgtgttggcacgttttattgagcgcgtgcgggctatcgaatcgcccgaatcatctagatccacgtcgggtcaccttcctgattccacggactcgttcacatcgtga

SEQ ID NO: 166923 - DNA, 537 bp, Enterobacter cloacae
atgagccgtatcactattcccgctatcgaatcggccacaggcgccactgccgatgtttacgcccaggtcaagaaggtcgcgggcggtagcgtccccaacgtgtacgccattttgggtcacttgatcccggctcccctggctgcagtgctcaacgctggaggtgcactgagctcgggtagcctgagcaagcaagacatcgaaacgatcaagttattgatcagcgagcagactggttgcgactactgcgtggctgcgcaccacatggtgggcaagatggtcggcctgtcgaccgatgctctacaggcaattcgcacgggccataccacgggtgacgctaaacgggatgccttggtgcgtttcgtgctgaacctgcaaaacacgagcggtactatcaacgaggaggagttcgctgccattcgcgctgccggctacaccgacacgcagctagctgagatctcgctggccatggccttagggatcttcactaataccttcaaccgcatcaatgatactgaaatcgacttcccagccgtttag

SEQ ID NO: 166924 - DNA, 723 bp, Enterobacter cloacae
atgacgaatacaaaggccattgtttttgatctttacggcacgttgtgcgacgtccattcggtcgttcaacagtgtgatgccgcgtatcctgggcaaggcatgcagattagcgagatgtggcggcagaagcagctcgaatatacctggttgcgcagcttgatggggaagtatgtttcatttgagcaagcgaccgatgacgcgctcgtctacacctgcaatcacctgaagctagatctcgacgagacggcttgcgccatgctgtgcaatgcttatctggatctgtcgccgcacccagaggtacccgctgcattgcagcgattgaaaaacatgggactgccgctggcggtcctatcgaacggatcagttttctcaattgataaagtcgtcaggaacgccggcttgcgagagcatttttccaatctgatcagcgtcgagcaggtcggggcttttaaacccgatccacgggtctatacgctggcctgccaggagcttgggctatcgccgcaccagattctttttgtctcgtctaatgcatgggatgtggccggcgcgggccactttggcttcacggtgtgctgggtgaaccggcgtaacagtccactcgaggagctagatgccaccccggatgcgatggtcagcggactggatgagctgcctgaattaatccgtgccgcacagggttattgttttgaccctaatgagcctctaaatgagcgaatctag

SEQ ID NO: 166925 - DNA, 807 bp, Enterobacter cloacae
atgaacgtccagggaaagaaagttttgattaccgggggatcaagtggcattgggttggctacggccaccgagcttattcacaagggggccaaggtctttattgttggacgccgggcttgtgttgtcggagaggcggtcgagctactacgcgccgtaggtgggcaggccgatggcactgatgcggacgttggaacgacgcagggtcgagatcgagctttggtggctgcgcgggcctggatgggcgggttggatattctaattaatagtgctggaggcgtgcgcgcgggcaggctggaagacacaccggaaagcgacattgcaaagatggtggacgtcaatctattggcgccgatcctgctcgcacgtgcagctatgccggatctgcgtgcatcaggcgacggcatgatcgtgaatgtttcctcgggcattgctctagtgggcgtgcccttttacacaacctatgccgccgtcaaggcagggatctcgcattttggggaagcgttgcgccgggagttgaagggcgagggcgtgcacgtgctgacgatctaccccggcgctaccgatacgccgatgatgacgtctaatcgagcaggtcccgatctgggtttcgttcgcgagccagccagcgcggttgcacaagctattgtcgagggcatagaagccaacgctttgcaggtcattcgtggcggggaggtgcgtgaggccatgatcgcccagaatcgcttggatcccgcttccttggatgagcggttcttgacgctcaagcccaagcttgccgaggcagtcaaggaccattccgccctctga

SEQ ID NO: 166926 - DNA, 705 bp, Enterobacter cloacae
atgatttgtttttattatcatccgactcctaatccggcaaaaatctcactctttctcgaggaagcggggttggagtatgagcttgtgccggtggataccagcaagggtcagcagcatgatcccgagtttcgcaaaatcaatccaaacggcaaggttcccgcaattgtggatttggatgggccgggcggacaaccggcgacggtcttcgattccaccgcaatcctgatgtaccttgcggagaagacggggcgcttcctcggccaggctcaggatcgtccgcagctcttgtcatggctgctttttctcggcagtggccttgggccattttcggggcaggccgtgcattttcagtatgcggcgccggcgggccaagattatgccgttaatcgctaccgccgcgaagtcgagcgtcattacaaggttctggatgatcatttgagtgatcgtgagttcgtcgtcggcaatgaatacaccattgccgatatctctgcttggggatggctggacaaagcgtccagggtaatgaagggcgccgaggatccgttggcgccttacccgaacatcaaacgctggtttcaaaaggtcgatgccaggccagctgtcgcacgtgcgcgtacggtcggggccgatattgcgttcaagaaggtaaatgatgaggaaacgcaacgcgcgctgtttccctcgaacttcccaccggcggcctga

SEQ ID NO: 166927 - DNA, 489 bp, Enterobacter cloacae
atgggtagaccaagagaattcgatgaaaccgaagtcctcgttgcggcgatcgactgcttctgggaacgcgggtacgaagcgcgctcgatcagagagctggccgacaagatgggattgactggcgcaagcctgtataacgctttcggtgacaagcgaaccctatactgcagggcgctccatcattacatcgaaaccaccttcgcggatcgcgtacagccgctcgaaggtcgcacctttgttgccgacgagcagtacacaatcgccgatatggcctcttacccatgggtagtgccatggaagcgccagcagcatgatcttcaagcctttcccaacctgcaacgatggttcagtcaagtgcgagcgcgcccttccaccatccgagcctacgagaagggcgaccccttctcgaaccagccgacggtcaccgaggaaggcaagaagctactgttcgggcaaacggcgcacaatattccgtcacgcgcgtactag

SEQ ID NO: 166928 - DNA, 1947 bp, Enterobacter cloacae
atgagccgtaacgatgatgaccgtttccgcctccgtccaggagcgcccaagcagcgcggcgatgccttcatcagtcaggtgctgcgccagacaagcaaggctggcgtcaaggccgccaaggcgggccatcgacccggtgcccggctggggcgcggccacacggcggcgcgggttacccgcgcttcgctgaccgccggttcccggcgcgtgaccatcaagactcggctggtcaatctcgccaaggccggcccgcgttcaacggctacgcacctgcgctatatcgagcgcgaaggcgtggggcgtgatggagagccgggtaacgcctacgactccgcgaccgatgatgccgacttggctgcctttgaagagcatggccgcgaggaccggcaccaattccgccttatcgtctcgcccgaggatgccgaacagcttgatgacctgcgcacctatacccgctatctgatggcgcgcatggaagctgatctgggtacccgactgaagtgggtggcggtggatcactggaacaccgacaatccgcatacccatgtcgtgctgcgcggcaaggacgacggtggccgcgacctcatcatttcccgcgactacatcggccagggcatgcgcgagagggcctcggaattggcgactgaatggctggggccacgcaccgaactggagatccagcgcagcatgaccctcgaagtcgatcaggagcgatggacgggactggatcgcaccttgcagcgcgaggcggtggatggcttggtgcgcacggcgcggctggaggcggaaccccgactgcaacgccagcgcctgctgctggtgggacgtctgcaacgcttacagcgcatgggcttggcaagtgaaatgcagacgggcgtttgggctgtccatgctgatgccgaaccgaccctgcgggcgatgggcgaacgcggcgatatcatccgcacgatgcagcgcgccatgagcggcaagccgcgtgaattggccgtgtttcagcccggcgaagatggccgcaccgttgtcggtcgcgtggccggcaaggggctagccgacgagctgtacgacaaaggttacctgatcgtcgatagcaccgatggcaagacgcactatgttgcgctgccgtctaggacggaactggagcaatacccgaccggggcggtggtggaggtgaagggatcgactgccgtgcgcgtggcggacaagaccatcgccgcgttggccgtcgatggcatctaccgcaccgatcatcatctagcggttgccaagaccccgccgcacccagaccgaaattcgcacgaagtggtcgaggcccatgtgcgaaggctggaagccctgcgccgagccggcttggtggaacggcagagcgaaggcgtctggcaagtgccgcaagatttacccgagagaggccgccagtacgacttgcagcgcctgggcggcgtggccgtggagctgaaatcgcacctgcccatcgagcgacaggcctgcgtgatcggcgccacttggctggatcagcagttgatcggtggtggcaaggggctgggtgatatgggctttggtgacgaggtcaagcaagccatgcagcagcgcgccgatttcctggccgaacaggggctggccgagcggcgcgggcagcgtgtgatcctggcgcgcgatttgctggcaaccctccgcaatcgggaattggcacaggctgtaaaggacattgccaatgaaacagggctggagcatcgtgccgtcacagacgggcaacgcgtggccggaatctaccggcgctccatcatgctcgccagcggtcgctacgccttgctcgacaacagcatggaattcagtctggtgccatggaagccgatgatcgagcagcggctggggcagcaggttgtcgcaagggtaagccggggcactacgtcttgggatatcggtcagacacgcgggccatctgttggatag

SEQ ID NO: 166929 - DNA, 600 bp, Enterobacter cloacae
atgaccgttcaatccaccgttgccagcaccactggcggcatgccgcgtcttcgctcacgactgcgcgctcgccttgtgttggcgggcttgtccgcctgcggcctcgcggcgctggcctgggcgtcctttgtgccgccgctaccgcgcctgatctataacccgtccgacagcgtggcggtcggctggtatcgcgtcgaaccgctttcacaccgggccgactcgctgcagcctcctttgtcggtgggcagcatcgttgtgacccatcttccgactaatgccgccacattggccgcccagcgcggttacctgcccgcgcatattccgctgctcaaacgggtgggcgcggtcgcgccgcaacatgtctgcatcatcgccggtcaggtgcgcatcgacgacgtcccttcggctgccgtgctccctgctgatcggctgggccgaccactgccattctggcagcattgccgaccgctggccgagggcgaactgttcctgttgagtgcgaccaatccggcgtccttcgacagccgctatttcggcccggtcagcgcgtctgccgtgatcggcgtagcgcatccggtatggctggagagtcgtccatga

SEQ ID NO: 166930 - DNA, 534 bp, Enterobacter cloacae
atgacaacacaaccttcagggacaacgaacgtgtcatcgccttcgttgtgcgcacgcgctggccatgtcggcaacatgcctttgacccgtgtggcgttggctttcgtaaaccagcgcatcaacctctatctgcgcttcggcgaacctgcccgcaccctacagcttgaccgctggcggcgctgtgcggtgtttttgccagcgtccatgttttgccgtatccgctgggaatccaatcactacggaacgatccgctggcagctcatggtgatgcaggcttgcacaccgctggacgcggtgcagcgcatccctggcgtgcagcccggcgcgcgtctgctgctgcacgccgagggcgaacagaaggtgcgcgccgtgttggaacggatcgacggcatggaggcgctgggcattgccgccatcgacgtgtcgcccgcgtactggcacacgctgggcaaccggcttgcggcaggacaggtgctgcccgattacactgccgagcggcatgctgcctggctggccgggagggggctgtcatga

SEQ ID NO: 166931 - DNA, 276 bp, Enterobacter cloacae
atgagcagcgcaaacgacaaacctgtcggcaaacgcacgggcaagcgcatcaccatcggtgcgcgcccgcccacgaatccgcacgccgaggcgtggattcgccaaggcgataccgccgacctccagaaaggcgacctctacacggcccgcctgaccatcgacatcacacccgccatgcgggcgcgcatcaaggtctcggccttcacgcaaggcgtgacggtggccgagctgctgcgcggtttactggaacaagcgttcccggagaaacctcaatga

SEQ ID NO: 166932 - DNA, 858 bp, Enterobacter cloacae
atgtccagtccatcgctgccatcccggcagcggccagtgcagcagcgggaacagctcgacctgttccgcgcactgccgggcgacatggcgccgcgcgacgctcaggacttgatggcctatccgttcttctcgctggcgaagtcgcggcgtattgcgccgatcgactttcgcagcggcaatatcgccatccgcgtggagggcacggccgaacacggcattgccacgatctgggatgccgacatcctgatctgggccgccagccagatcgtggaggcgaaggacgcaggcatccagccatcgcgccggatgcaggccacgccatacgagatcctgcgcttcattgggcgcggcaaatccctgcgcgactaccagcgtctcaaggccgcgctggatcggctgcaatcgaccacggtggccacgtccatccgcgagaccacggggcggcggctgcatcgcttctcgtggatcaacgaatggaaggaattggccgacgccagcggcacgccgctgggcatcgaactgatcctaccggattggttttacgcgggcgtgctcgacgccgccctggtgctgaccatcgacccggcgtatttccggttgaccggtggtatcgaacgctggctgtaccgtctggtgcgcaagcatggcggcaagcaggagcacggctggcagttcgacttccggcacctacaccgcaaatcgggcagcagcagccgcttctcggacttcgcctacgacttgcgcgctctggtggacaagcaatccttacccggctacgagttgggcatcgtgtgcattcccaaggatcgcatcgaattgctgacgttccgacccgtgccgctcacggcacggggataa

SEQ ID NO: 166933 - DNA, 789 bp, Enterobacter cloacae
atggcagacccgagcgcgaaacactggtatccgaccgccgcatatctctacgtgctacacctcgatggcctcgccttggcctgggaatacctgcgacgccatcccgactaccgacgcgattggctgcgctgtcgccgccggccagaggccgccgagcgttggggcttgcgcgtgttggaagatcccggcctggatgcacgcaacgcgcacccggcttggtttcccgatcacgatagtgtggtgcagctttatccagatgctgacccgccgccggatgccctggtcttcgagttttggcgtattcctggcgacaagcgcctgatccatgatggtaagcgcttggtgttggtcacgcagtggccaggctactgtgtgcggctggccttcgcgccgggcttggacgatggaatggcctacgtctacgccatccgtgcctgcatcacgactaatccgcgttatcagatgctcgttgcggagttgaacaagctggccatcggtgctgtgcttgcagcatccaagccgcgaccatctccggcgtcactgctggagttacacaccttgcaggcgcttgacgccaccctggcgggggcgtcactgcgcgaggtggccgaaggactgttcggtgctgatgcggtgattgcgggctggtacaccgacggtggcctgcgctcgaaggtgcgccgcttagtgcgacgtggtaacgcgctgatgggcggcggctatcgctgtctggcacagatcgaatcccctggggagggtcgttctgcactacctgcaaaacgaccctga

SEQ ID NO: 166934 - DNA, 351 bp, Enterobacter cloacae
atgacccaggcattcatcaccgccgaggagcgcgcgcaactgctcaccaacggccaggcccgcgttgctggccaagacaccgacccgctgcccgtcgtgcggctgttcaccccggacgcacacgtcacctggttattggcatcgctcgatcctgcggatagcgacatcgcatatgggttgattgatttgggcattggcatgcccgagctgggccatgtgaagctgtccgatttggcgtccatcgtcgggccacgccagcagccggtcatgcgggatcgatatttcaaggccgcccgcacgctgtcagactatgtgcggctggcgcaggccaatggttctatcgttgattga

SEQ ID NO: 166935 - DNA, 303 bp, Enterobacter cloacae
atgacagcgaaaaactcattagcggccgcattgaaggcagtcaggaaagcgcgcggcctgagccaggaagcgttctccgatgtgtcgagccgcacctatctgagttcgctggaacgcaatctgaaaagcccgacgctgaacaagctggccgagctgtgcgaggtcatggagattcacccgctcacgttgttgacgctcgcgtatgctggcaacgaacagcacaaaattagccagttgctagatcgagttcagcacgagctgaatgccatcgtggacaacaaggggaacaaaagggatgagtga

SEQ ID NO: 166936 - DNA, 894 bp, Enterobacter cloacae
atgggaatacctgaatcgcaactcgaaacatggtcccaccaaggatctattacgcagtccgcctcaacttacagcactataaagaacgcgctagagagtgcaggtgctgcgtatcacggaaagaatttcaaagtattccttcaaggttcctatggaaacgacaccaacatttatgcggaaagtgatgttgatgtggtcatacggcttgatgatgtctactacagtgatctcatgcagctatccccggaagacaaggaggcgtacgaccgcgcattcgttccagccacctattcatatgatcaatacaaacgggatgttctgaaggcccttactgaccgttttggttctgatgtgaaggctggagataaggccatcgccgtagcggcaaatgggggtagacgcaaggtagacgttatcgcatcaatgcaatttcgtcgttactggaaattcaacggtacttacgactcgcactacgacgaaggaatctgcttctttaatggggctggcgaacgtattgccaactaccccaagcagcattcggaaaacctcacgaagaaacaccagggcagcaacaaatggctgaagcccatggttcgcgtcctaaagaatcttcgaagcaagctcgttgccgacggcacattgaaggctggaatcgctccgtcatactacctggaagggttgctctacaacgtgccaagcgaaaaatttggagtcagctatttcgattgctttgtcaacgccatgaattggattcaaacggaagcggataaggataagctgctatgcgccaatgagcaatattacttactctgggaaggcactcatacctcgtgggagaaagctaactcagaagcgttcatcgaggcggccatcaggacgtggaatgactggtga

SEQ ID NO: 166937 - DNA, 1746 bp, Enterobacter cloacae
gtggctggtagcatcatttatcttttcatgtggcgatatcaaacgagctacagggtccacatccagattctggcacggaatgtacttgagaaattgggcgcaccgcctgatgcagaggtgctgcttgttggcgcacgccgccccgacagcaagaataccaacccgatatgcgtagagccagaagacggaaagtggcagctatccttatttgaaggattactggattcggttgaattgacttaccagaaccatcgatcgcagaacatgttttttggcgatgaaccaagcatgcgtgacaagccggaatggatacgtcgagactcggtacggacatcggttggcaaggcactcgaagcctttgatgcagagcataacgtgacatcattttgcggtgaagtcagacgcatagacgattattacgtcaccccaatcatacagattccaaacgcaactttcatgcaattccctccactgccttccaagcccattgacaagggtcagcgaggaagtggattgcgcagcctgatacatgcagcgatatatgcagttcttcatgaagccaccgaagagttgcataacccagatcctgggcgatttacacatcaaagcatgagaaatgcagaggaaatcgtacaaattgcagtaaaaagatttctgcacacgccggggctatcgatcgaacgatcgtacacccataccgatcttttcgatgccttgaatcttgcctcctctctcatgtacgagggaacgaaaggcattggccaactcattctcgtcgatccagagagtgatgtgatcgagttcctggcaaggtttgttgaaccagtctctcttcgtgaaccacgatgggttcgtaaagtcttgcagatggcaactacaggtgtcggaatcatcgcaaatagtcggtacatatacggacttgggcagttgaagaagttacacgactccagcgaacaagatgcgttcacggttaccttcctcgatcattatcactgggagttgcgctgtggtggccagccactacttcgcagtcactatgctgtgcctaaacttccgcaggaacccttcgataaaacagccttcctcacgaactatgcgaggctgtttccgctatcaacacaagacgacggattgaacttgtggagcctattactaatccaggttcgccaagagcatggcagcatgattgttgtcgcggaagatgcagcaagtgaggcgctcaggctcagcaagcaaggcaccaacatcgcaccaacccgacttactgaattactactccggagtgtcagcagcatcgacggaacaatactgctcgatcccgctggattctgccacgccatcggaatcattcttgacggtgaggcaaccgatcaatgcactccctcacggggctctcgatacaactccggcgtgcgctacgtacaggcaagtggctctcgaaggcttgcgatcgtcgtgtcggacgatcgaacggtcgacatcactccccaaatcagaagattggcaagccgctcaaaaatcgagcaacatgtcgcaatgtttgaggcggcaacgttcgataactatcatgactctcgaaattggttagacggccatcgcttctatgttaatgccgagcaatgcgaccggattaataaaacgatcgacagactagacgctcttccaaaggaagtaggccttctctattttggtacagagagattcgaaattgaccccgagatggacgaaagctatctcaccgactaa

SEQ ID NO: 166938 - DNA, 312 bp, Enterobacter cloacae
atggcaaatatcggcatcttcatcgcagacaacgacggcttcaccggtacgctgcgcaccctgacgctcaacgtcaagctcaaactcatccccaacgacaagggcagcgacaacgccccggacttccgcatccaaggctccaacgggctggaagtcggcgcggcgtggaagaaagtcagccaggccgagcggccctacctgtcggtgagtcttgacgatccttatctgccggcgaccatctatgctcgtctgatcgaggaggaagacggcacgtacaacctgatctggtcgcgcagcaaaccagcggcctga

SEQ ID NO: 166939 - DNA, 2064 bp, Enterobacter cloacae
atgaacgccattacccataccgaagcccaagccctgcaaaccgtcaccccggtacagccttcgcaaggcatgctgctggtgccgctgtcgcagcttcgccgctcatgccgcaacgtgcgcaagaccgcaggccagtctatcgacgcgctggcatcgagcatcgagcgcgtgggcttgctgcaaaacctgaccgtgattcttgctgccgatggcaagcattacgaaatcgtggccggtggccgcaggctggccgcgttgaagctgctggcgaagaagcgccgcattgccaaggattgggaggtgccttgcctgttggtggctgatgccagcgcccgcacggtgagcctgaccgagaacgtgcagcgtgaggccatgcacccggcagaccagtttgaagccttcgccgcgctggtagcggaaggccgacccattgaggatgtcgccgctgattttgctgtcacgccactggtagtgcaacgccgcctgaaactcggcaatgtctcgccccggctgatgatggactaccgctccgatgccgtgagccttgaccagttgatggcccttgccatcaccgatgaccacaccgcgcaggaagcggccttttatgatgcgccggaatggcagcgcagcccccacgccttgcgcgaacgtttgaccgagcgtgaaatcgacgcctctcatgcgctggtgcgtttcgtgggactggacgcctacgaggccgcagggggtggtatccgccgcgacctgttcgcggaaggtgacgcaggtgtgtatctgaccgatgccgcgctgctggaaactctggtgtgcgacaagttagacggccacgccgccgccgttcgcgccgaaggctgggcatgggtggatgccacgcccgccgccacctatgccgacttgcaagcgttccagcaggcaccgagggagcggcgcaaccccaccaagcgggaaagtgaacgcatcgacaagctggaagaaaagatgcaggccattagtgaaaccctggatgcgctggacgaagacgacgaggaaaaggccgacgccttgcaagaagaaggcgaccgcgtgggtgatcaattgcaggcgctggaaaaccgtctattggactacagcccgaacgttaaagctgctgccggtgccattgtcacgcttgaccgacaaggtgagattgtcgtgcatcgcggcctgatgcgcgaagccgaagcccgcgcactgcgcacgttggagcggctgcgccaaggcttcagcggcgaggacggtatgagcgacgacgaaggcgacacggcagacacagtgcctaaggccgcttccatgtccgaccggctggcgcaacgcttgagcgcccaccgcaccgccgcgctgcaaatccaagtcgcccggcatccgcaggcagcgctggccgctaccgtgcatggcatggtgcaggcagtcttgcagcgtgaccgataccatcgcgatggcctgccgctggatatgcgtgtgaccgtgaaggaccggctggaaaacatggccccagactggccggaatcgtctgccgccgtggcattacgcgaattgcagcaagccgtgggtgagaaactgcccgaggacagtgctgaactgttcgccgagctgttgacaatgcagcaggatgatcttgtgcggctgctggcagtatgcgtggcggcaaccgttgatgtgatcacaccccgcgccacgcaacaccaacccggcgcggaactggcgcaggccgtagggctggacatgaccgcatggtggcagccaaccgccgaaggctacttcaagcacgtttccaaggccgtgattctggatgctgtgggcgagttcgcgccggagcaagtttcccggctggcgaagttgaagaaaaccgacattgccagcgaagccgaacggttgaccgaaggcaccggctggatgcctgccgtgttcaaagccgaggatgtggaaaacagagcgcagaaagaaagcgaagcaggcagccagcaagatgatggtgacgagaacgcggaaggcgcggagaacagcgtcgcagctatcaaacgcgaagccgaagaactggccgcgtaa

SEQ ID NO: 166940 - DNA, 825 bp, Enterobacter cloacae
atgcttgcatcccgtttcgcttcccgttccccggtactgcgtagtgattacccgctgtctgatgaccagatcagggccgtggtgccgtccatctatgccgacgcgccacaccaaagccgttccgagcggtacagctacatccccaccgctgccgtgctgacggaactgcggaaagagggtttccagcctttcatggtgacgcaaacccgcgtgcgtaacgaagaccgccgcgaccacaccaagcacatgattcgcttgcgccatgccaatcaggtcaatgacagcatcgccaacgaaatcatcctgttgaactcccacgatggtacgagcagctatcagatgctggcgggcgcattccgctttgtctgtgccaatggccttgtatgcggcgataccgtggccgatgtgcgcattccgcataaaggcgatgtgaccgggcaagtcatcaaaggcgcttacgaggtgttgagcggctttgaacgggcgcaggaatcccgcgaagccatgcaagccatcaccttggacgaaggcgaagcggaagttttcgcccgcgccgcgctggccttgaagtacgacgacccggacaagcccgcgcccatcacggaaagccagattctgatgccacgccggtatgatgaccgccgccctgatctgtgggtggccttcaaccgtgtacaggaaaacctcaccaaaggcggcttgcgcggtcgcagcgccaacggtcgccgccaaagcacccgagcggtgcaaggcattgattccgatattcgcctgaaccgttccctgtggctgctggccgagggtatgcgccagttgaaagcctga

SEQ ID NO: 166941 - DNA, 810 bp, Enterobacter cloacae
atgagttccgttcaatcaatagatgcacaacaactctgcgaaaacatactcttggcagagaagcaatacaacagcgagcaccatatcttgcccagcgaaagcgccgtcgcagatcgtctgctggttcgcagcgtcgagatgaagagcgtgtacgaagaattacacggcaaactacatactcatccgcccgcacttcaggtttttctccgcctggtcttgagtgcggccgcgttctggagtccggagaaaattcagaaagcgcgtgcgcaacgggatgacttggaaaacgtcaatcggcacattggaagaatagcgaccgatctcgcaaccttattagaacaacgcgacgaactgcacaatacgtccggcttcagtagtgacacccactaccatgttggcgaagtcatcaacgcagcatcccaagacaactacctatttcaagtccatgtccgcgataagctagacagcctttacgggcagttcgacttaaaatactggcctccattgagccgttttgtagccgaattagcgtccgacgccaataacgctgccatggaagcgacagacccgatgacggcagccgccacctcggctgcgcgatcatcacaagctgattttttcaaggcactgttcgcttatatcgacgaaaacagcgccgagaatcacggcaaattaccaaaagaattcaagctcactgaccggaccttggcgtctctggctaactgcgcgttgaatcttggcccagacgaactagtcgacgatacctatgtgaagcggcttcgccagcgtgagcgcagtaaagtgacttag

SEQ ID NO: 166942 - DNA, 528 bp, Enterobacter cloacae
atgcagcaatattctctttcccttgattccgataccttgaatgccggcgcgttgctggtgcgtgaggccgatggtgccgtgcgtgcggctagccgtaaggaaatcctgacggtggcgcgtgagctggtcaacgtcgatgagttgcatgggcaggatctgtcccagcccaggcttgtcaaagactttctacgactgcggttgaacgcggcgctggagcacgaagtctgcgggctgattctgctggacagtcaacatcggctgatagactatttggagccgtttcgcggcacgatcaatcaggcgtcggtgtatccgcgggagatcgtgaaaattgccttgcatcgaaatgccctgtcggtctttctagtacacaatcatccaagcgggttggccgaagcgagccaagcggatattgcgctgaccaagcatctgaagcaggcgctggcgctggtcgatgttcggttgctggatcacttcatcgtggccgggtccacggtgctgtcgatggcggagcgggggcttttctaa

SEQ ID NO: 166943 - DNA, 1167 bp, Enterobacter cloacae
atgggcactaagctaccagtagacgcaacgcttctttttaaggcacttcaatatcagttgtttgtagccgtagaccattgctacgcactggagtccgaggagtgcttgtggcttgaggtgtttggtgacgttaccgtcctaggcaagacacaagtcgaggtgaagttctactcggatagccttacagatggccactcgaatttctggaacacactgaagaattggctcaacgatgggtttgaccataaggagtaccaaacactggtactcctaaccacccaggaatacggtgcccaaaccgccctgaagggctggaatgatcgtactgctgcagaaaaactcaatgtgatgcaaaagattttcgacgcatcgcaagataagttaggaaatgacgacgttgaaacgtcaaagtcttccaaatctcaaaagcttcagcaatacgtgatggctgccgagcgccgtgatgatctacttgaaattctggaccgaatgaagataacgaccgacgctgcctcgttggaagagcgtattcataacttcaaaacgattcacctcaagactatccgtgatacgaagcatcagagcttcatcgatgacctgcttggcttcatgtgtggcacagagcttatagcgactggctggaaaattacgcataaggcgttttctgataaattatcggagctcaacaagctgtacatgaagcacccgatcacattcccaccgcttgatgaagatgcgctcaaggaatcgatcaagatagaggacatcaagtcgcgggtgtttgcgcaaaaaatcaacgaaattgggggacaaagtaggctcaataaagcagccttacatcttctgatcgccgagcaaacgatatcgcaactatacgacgacggcgtgctttttaaatccgacgttgatcgctatttgagtaaccatttggtaaaacatctggatggtcgagagcttgctatgctggattgtgaagagatttcttgcgagaaggaactcaaaaatcgctcaatgaaattttttcttgcccgacatatctcgcctgtcgagcaattctgcagcttcgagaacaccagggttgagttccgcaatggcgtttaccacatgttggcagatgagcatccagaggatgagcaggatgagtttcaccggaggctatggaattga

SEQ ID NO: 166944 - DNA, 462 bp, Enterobacter cloacae
ttgagcactcgggcatcagatcatatctatacattacaccgtactccgttcgcactggctccgctcattcatagcttttacgataactgtgagtcgattgagaaagatattttgttgagctatctaattcttccattagtgtcctacaagcctatgcacaaatttttggcaggcgccaagcgaagcagctctttgagaacaatggccgccgactccagcaggttgctcgggctggcactgcgcgttgaagaatttaaatctataacaaattcagcgctactgatattgactgctgagaaaagtctgaaaatcaactcggacatgtcagtgatttcgataaataagattcgtacagtgaattcaaataaagatttgttgaggtacagcagtaagctagcaatggtgttttctggcgaagatgtcgtctctatttacagaaatttggggcttaaatcgttatga

SEQ ID NO: 166945 - DNA, 1995 bp, Enterobacter cloacae
atgaattgccacgtaagatacatcggcctagtcgatctggacaatgaggttcatgctgtgccttttaggccaggattgaatatcgttacgggaaaatcgtcgaaaggcaaaagcgccatcctcgatatcttcgatttctgcatgggaagcactgaagatacgatcccagaaggagttattacagagcgctccaagctgtttttcacagttttgcaattttcatcaatggcgctggtcatcggacgtggactaagatcgaatcgctgctttctgcgagaggtccctgaaactcgggcggatagcatcttcgatttgatcaagaacgctgacgtgttcttcgctgatcgccatttcctccctcgcaatgagtttgtgaaaagcttaggacgctattttgggatcacgcttgagaatgttgacattgatccgttgcataaagagatcactggccagaaaagtccgacgccttctgtccgcagcttctcgtcattaatgcttcagcaccagaatctggtcgcgaacaaacacgcgattttttacaggtttgatcagaagcacaagcgcgatcaggccatcgatcatttcaagattttgatgggtatcgtgggcgaagattattttgaccttgcgaaggagcataccgaggccacatacgagcttcgcagggtgcaactacagattccgaaacaggacaagatcaaggcagctactattgccgagttcgccagacacttggatgagtatgaggcacttgcaggccttccgttaactgaactgagtccagaagaaatctggattaaaccgaaagcagcgctaacgcatcttaccgggcaatcagtaaaggttgatggtttgtccagcgcgtttgaaatcaaaagggctgagttgcagggcagcaaggcggagttcatgtctctcattcagaaagtgcttggcaaacgccatcttctcaaagtttctactgagcatgcctctggctttggtgaatctctgacggcattggccatcccgaaatctacagatctagggagcacgatttgcccagtctgcgagtctcactctgatgtggcggaagacgaagcaaacaaacttacagaggctattctttggttgaatgatgagctcaagctttccacctatattcgagagggattgggtgaggagcgcagagtacttgaagccgagctcaaagagcttcgcaagaagttggatcttgttcaaaaagcgctcaagcctctagaggaggaggctgatcgattaacaaaatcaaaatcagtcgatgcgtcggcccagaaagccaagcttaagctggaattggcgattgagcgctgcatcgagtctccgccatctgagttggccgaattattggagttttggcagaagaaggttgatgcgctggttcttaaaatgtccaagtttgatgtggaaaatgcactgtggacattgcagaataacatcaacaaaaagatgaaattgcttgggcagaagttcgattttgaagaaacctacaagtccggctcgctaaagtttgatgtcgatacgtttgacctttggcatgaaaagcctgatggcaaaaaagtctacttacgctcgatgggcagtggtgccaactggctctactcgcacctaactctgttcatggcattgcattatcagttcgccgcgtacggtagcaagtgtaaggttcctccgatccttttccttgaccaacctacacaggtgtattttccatcgagggatgaggctgaggagttcgtggctgaagaactgcggggagatagggtgccgatgcagacagctgacgatgatgtgggggcggtatccaatatgttcactcagcttgccaagttctgtgatgacacccacgtggagactggcgtgatgccgcagatcatcgtgtgtgatcacgccgacaagctggagttgcaagaaaattacgtattcgaagaattcgtgcgggtacgttggaggaaacgtgggttgatcgcagagtaa

SEQ ID NO: 166946 - DNA, 333 bp, Enterobacter cloacae
atgaatattgacactgaagttcgccatatcaccaaggcaggaagcaatatattcctcgaactgggtttttcgcctgaagaggcaaaacggctgctagccgaatccaaacaacaaataaatgacacacagttactcaaagagcagttgatggctgagctggcttcgtggatggaagagaaccacctgaagcaaaccgaggcagccgagattctgatggtgtcgcgtccccgtgtttcggacgttgtgaacaaaaaaacgagcaagttcacgattgatgctctggtaggtatgctgagccgcgttggtaagcctgtgacgctttcggtgggctag

SEQ ID NO: 166947 - DNA, 342 bp, Enterobacter cloacae
atggaacaagaaaaagacattcgatggtcagggtcgtcttacgaagacctcctagcgtttcctgaagatcctcgtaggcaagcaggctttcaactaggaaaagtccaggccggacttgacccggacgactggaaaccatttgatgatgtgggaaaaggagtacgggaaattcgtattcgtgaccgtagcggtgcttatcggattatgtacgtcgctaaattcgatgatgttatatatgtgttgcactgctttcagaagaaaactcaggcgacaagtaagcaggacaaagaaattacgaagacgcgttatcgcgccatcgtgaatgccaggagcatgaaatga

SEQ ID NO: 166948 - DNA, 1641 bp, Enterobacter cloacae
atgatccttctcacaagccgagccgttgatgctctgaaacccaaggaccagccttacaagatggcgatagatcgcggtcttcaactgcgggtcgccccggatgggatcaaaactcttctagtccgttataccgtacaaggcaccagctccgttcgtcagtaccgccttccgcaagattatggcaatgggattggtcaaattaagctggcagacgccagagcagaagcgcaacgcattcgtgcgctcgcccgtgccggggttgattggccggctgaagaagcacgtttgcaggcggaagcgcaagctcgtgagacgcgggcttgcgcggatgaggcaacgtttgccgaagctttgcgtgcgtatgttaaagaaaagcgacgggccaaggacgggttgccccttaaagcccgaaccaaggccgaatacaccaacatggtcgagccgggcaaggtgggcaagaatggccgcaagtttgccgatggcggactcgtggccttggccgacacgcccttgccggagatcacagcaaaggatatacgggatgtctacagcagcttgttgacacgttcgaagcgcctggcggactacgctatgcagatattacgcgcggtcctgcgctggcatggggttcacatacccaacagtcccttaagtcaagagacggctgggcgtgatcgcattgtgatggcgccggcacggggcaaccccaagcccatcccgatggaaagacttggtgcttggtggctggccgcttgcgcgtgtccgcagcgcgtagcggcgaactactaccgcttccaactgctcactgggtgccggggtgtcgagattcgcggagataagaggtatgactatgtccccctgaaagtgggcgatgtgaatctcaagtcaggccgggtgttgttacgcgataccaagaatcggagcgaccatcttctgttgttgtcgcgagaagcactggcgattgcagaggacgcctgcaaaggccgtaaacctgatgagccgttgtttccgatcgtcgatgctcgtaaaacgctggcttggattaacaaacaggcagacacgaccgtccagggccacggcttgcgttcaaccttcactagcattgccgaagaattggtgtcagggggtgtcctcaagcgcatcattaaccatgccgtgaacaatgacgttaccttgggccactacgtcggcaagggcgaagcgcagttgcgggcaggctggcagacggtggcggacttcattgccaaggcggccagcgaggaaatggctcgcctagccgttcctgacagtgtgctcgctactgcggcggctccggacaatggaagcgcagcccaagagcaggcgttgaaggcactgcgtcaagccttcaatcggcgatttgcaccggcgccggaccccgatcctgtgcttaccacggaagaggcggcgcggctggtcggtgtcagccggccctatatggtcaagttgatcgactcgggtgcggtggcgctgcatatgatggccggcaatcggcgacgtgtgcggcgcagtgctgtgatccgttggcacgaggctgaacggacacggcagatcaaggcgctcaagcacctatccaacggtttggacgaagaggccttatcgcccgaacccttgcctgcgtga

SEQ ID NO: 166949 - DNA, 723 bp, Enterobacter cloacae
gtggttgtgaacgtcatcgactttttcaaaaaccagaccgataagtcttacggcgaaattgcgctggataataccccgccgacggccgcgttctcatttgacggaaaaccgattaccgacagtacagtggtttacgggctggagaacatccgaatagctctgacggataacctgaccactcccaggatcactcgtcttcagataaccggagggcctacttcggataatgttgagctaacttggtcgcctgctggtacgaacgtttacgcgccagaatatccaaggcttttcccctctttcgaaccttccgagaactacgcgcttagcgtgacagtctcagacagtcagtcgaatagcaaaacctacacccagaaattcagctacctgccgaacaacctcgtgcagttgcataatttgcggacattgtccgttagttcggcactcaaaacgtcggcaaatgagccgcttgcttatctgtcgaccaacgttttgcgtaagaccaatggtgagattgcgaaaggcgttcagagtgcaacactgacggtacgtaaagacgcagccttcggtattaagttcaacggcgtacaggcggcaccaggtgagtctgcggaggtgaatattgatatggggaacggtgataacctcttgatgcctatctaccctgccgaaaacggcaaggtgggtacatccgagttcatgatccagatcgatgagctaaagtga

SEQ ID NO: 166950 - DNA, 567 bp, Enterobacter cloacae
atgattttaacccagtatctcaaaactcgaacaaaatggagcaccaaaagaatgaaaataaacacgggcatgatgaaaagcgccgcaccgctcataattctgattggtttaatgattgctttttccgcctatgttaaatcatggtcattactatataccttgctggcgacatcagtcttactcacgatcatgatatcactgccttttatcgtttctcctttacagcactcaaaatttatagccctgcgtattttacgtttaatggttatttcgctctgggggattggtcttatctgcgtactattttcagttgttgaacggcttgtatgggttaatgcgaacagctacccggcatggatggcaaaggaactggattcccctgccataagtgatggtgaaggttatattaaagcaacagagtcatttgagaagatctgtgggaaaaataaaggttctctcagcgttatcaccaagcataatggtatgtttatgcgctgcgatgatagcgtgtctttcgactcttggtggaagggggtttaccaacttaaaacccctgagactcgatga

SEQ ID NO: 166951 - DNA, 327 bp, Enterobacter cloacae
ttgtcacacaatatctttgtcgctaagtttgatgatgggctgcggatgtacggtattaataacggcactgcttgccatatgtatgcgtttttgtttcagagccgggaagaagcagaatactggctggtaagcaatgctcgcgattcccgcacattccctgtaatgccaaaaaacgcctcaatgacggatgaaaacgtcactatcggtcctgatgaggaatgggcttttcgctcccgagcctcacgaacagctaagtggatcaccggtcccctagaaaatgtgggtgagtcatgggaagaccagtctatttatggcggttgtagctga

SEQ ID NO: 166952 - DNA, 186 bp, Enterobacter cloacae
atgcaaaaatttgtttcctggatggccagtttcgacccaaaggcgccagtggccatgaaagtaagctgccgctcaacgtcccgcattagcggacggagccagtggcgcggagcgccgctggtgacggtccgtctcgatgcggtggttgggcgtcatctcgtaccaagcacgcgggcgagcatgtaa

SEQ ID NO: 166953 - DNA, 753 bp, Enterobacter cloacae
atgagtgactccaccacaatcatcatctgggtcggcctgacgttcgtcgccgcgggcttgatcaaaggcgttgttggtatgggcctccccacggtcgcgatgggcgtgctcagtctcgtcatggcgccggcttctgccgcagcgatgttgattgttccatccctcgttacaaatgtctggcagttgctggcagggccggcgtttggagcgctacttcgacggctggcaacaatgatggttgcagtcttcgcagggaccatccttggtatcggtgtgctcactgggcagtcagcatcattggcgggtgcggcgctcggagccgtcttggcgctctatggggtagtcggcctcgccgcgccccgcttcacggttcccgcgaaagtcgagccttggctctcgcccctgatcggtcttgtcacaggccttgtcaccggcgcaacgggagtcttcgtcataccagcggtcccttacctcaattctcttggcctggcgaaggaagatctcattcaagcacttgggctctcctttactgtctccactgttgcgcttgcgtgtgccctgggtctgagtggtcaatttcagctcacagcagcctcgaactcgctcctggctgttgtgcccgccttggcgggtatgttcatcgggcagcgcgtacgcagtaagctccagccagagatgtttcgcaggtggttctttattggcctcgtcgtacttggtgtttacatgctcgcccgcgtgcttggtacgagatga

SEQ ID NO: 166954 - DNA, 915 bp, Enterobacter cloacae
atgtcctccaagtcagcattacccgtacgacgagtccacggcttggccttcgccgcgctctcggtcttgatattctccggatggttcgtggttacgcgattcacagtcacacatcagttgcgcatctgggatgtcacagcgctgcgctttggagtaggggcggttttgctagctccgatactattcaagcaacgcctgccggcggctgcgtggctggaaggcctgctctattctgtgctttggggcgccccatttgtgctgctcgtcgctatgggcctgaagctcaccacggcagcgcaagcttcatcgattgttcccgcactgatgcctgtgatggctggtctgcttagctggcacgccagcaagcggcggccagcgggatcaacgatatggagttacggggcgatcttgctcggattggtagcgttggtgataagtcgcccgatgtccagcggagccattgatccgctaggctacggtgcgctggtgctggcggcgatgacctgggcggtttactcggtgcgctttcgcaccagccggctgtcggcgcttcagtcggcggcgctgatctgcttctggtcggcgctgattttcattcccgtgtatgtcggggggaacctgtccaggctgagtcaagcatcctctcaggaaatcgtgttccagcttgtttatcaaggcgtgcttatgagcggcgtggcgctctttgcctataaccgggcggttgctgtgctcggggccggtgctgcggcggccatgatggcgctggttcccgttctggcgacgctcctggcggtacctgtattgggagaagtcccgtctttgctcggcgttgctgcaatcaccgtcatcgcactcggtgtgatgattgctgcctggcgcccgttacccgttgccattattgaaactgccaagtag

SEQ ID NO: 166955 - DNA, 627 bp, Enterobacter cloacae
atgggtagaccaagagaattcgatgaaaccgaagtcctcgttgcggcgatcgactgcttctgggaacgcgggtacgaagccacctcgatcagagaactagccgacaaaatggggttgactggtgcgagcctgtacaacgctttcggtgacaagcgaaccctataccgcagggcgctccatcattacatcgaaaccaccttcgcagatcgcgtacagcggctcgaaggcaagctgcctccgctgcaagcaattaaggcctttttctcggaaatcattgaacgatctctggatgataagcagcgaaaaggatgcatgcttgtgaactcagccttggaaattgccccgcatgatccagagttccgggagactgtcactgaggttcttgagcatatcgaggctttctttcgccgatgtgtccaggccggccagcaagacggaacaataacgacatcccagtccgccgcagacctgggacggctcctatttggcgttcatatcggactgcgcgttattgccagaacgcgacccgagcgaacattgctcgaagggatggttcgtcccgcgctggcgctgctcagccctaaaacggcgcacaatatttcgtcacgcgcgcatagtgcaacttga

SEQ ID NO: 166956 - DNA, 417 bp, Enterobacter cloacae
ttgtccgccatcgttgacagccgcctcaccaacgtatttttcgctaatgcgagagtgtcggaagaccaggcaggcaaagaccagcgagggaattccagccttttgccgaaagcaatctctcgtcagattgatgccggtcgccgcaagcagggggggctgtgggtcgggggcaaggccgtactgacgacctcaacgctcaactttgccccgaacagcatgaaccaggcgctgcatgctacccccgaaaatctggagatcagcatatcgttgacgaacatcagtaatgttgcggttcatcgaggtttgattactgacgtcattgaaatccgaaccgacgtcggaattttgaagatcaaatgcgtaaaggccaaggctttcgccgccgctattgaagcgacacgcatcgccgcacgttga

SEQ ID NO: 166957 - DNA, 180 bp, Enterobacter cloacae
atgacctaccacaccccatacgtcgtagctttcgtctattcgacgaatatgctgatctatatcgatgatcgttccaatgataccttccaaggccaaatgcctcgcagtggcggttccggcttgtccggcgccgcaaacgtgcccggctgcatgacgccgaaattgatcttggatttatag

SEQ ID NO: 166958 - DNA, 285 bp, Enterobacter cloacae
atgaagaaactttccattgccgttttgactttaggcatggcgttcgccgccggctcggcttttgccgcagacgagatgaagcatgacaacatggagaagggaagcgccatgaagcacgactccatgggtaaacacgactccatggacaagagtggttccatgggaaaggactccatgggaaaggattccatgggcaaggattccatggggaaaagcgacggcatgggcaagcatgattcgatgggcaaggccgatgccatgggcaaagacggtatgaagaaatag

SEQ ID NO: 166959 - DNA, 789 bp, Enterobacter cloacae
atgattttcacacgcaaggccaatagggcgatcgatggtgaactcgtcctgaaagaggccaggaagatcgtggcttccacggtcgaagacgctacacggcgatcattcctgacacgtacgctgacgctgggcggtctggccatgttgtcgggatgcacactggacgacaacgagaacgtcgaaaaagcgttgatggcggtttcgcggtggaacgaccgcgtgcagggggcaatcttccagcccacggccatggcacccacttacgctgagtccatgatccagcggccatttccgttcaatgcgttctatagcatggacgaggcacccgcgatcgatgaaagcgattaccagcttgaagtgagcggcctggtcgccgataagcgtgcctggcggctgcgcgagctgcgcgccatggagcagaccgatcaaatcacgcggcacgtgtgcgtggaaggctggagcgcgatcgggcgctggggcggcgtgcgcttttctgacttcctgatgcgtgtgggcgccgacacatcagccaaatacgtaggcttcaagtgcgccgacgattattacaccagcatcgacatgccgaccgcgctgcatccgcaaaccataatcgcgctgacctatgacgggcagacgctgccgcgcgaatacggctttccgatgaaattgagaatacccaccaagcttggctacaagaaccccaagcacatcaatgccatttttgtgaccaacacttacccgggcgggtactgggaggatgagggctacaactggttcggtggcagctga

SEQ ID NO: 166960 - DNA, 627 bp, Enterobacter cloacae
atgtccataaccgcaaggccggtctactcggatgcgcccaggcccggagccattcagcccggctggctgcgcctggtgcattggctcaatgttctggcggtcgtcgtaatggtggccagcggatggcgcatctacaacgcctcgcctttgttcgattttcgctttcccaacgaatacacactgggaggatggctgggaggcgcactattatggcatttcgccgccatgtggttgctggtggccaatggccttttatatttgctgctgaatatcggcagcgggcgaatggcccggcggttcttcccgatcagtgcacgaggcatcgtgcacgatgttttcggcgcgctgcggggccggctctcgcacgacgacctgcgccactataaccacgttcagcgggccgcctatctgtttgccgttctggatctcgccgcgctggtgatatcgggcctggcgatctggaagccggttcaattctcattgttatgcggtttgcttggcggctacccggcggctcgctgggtgcatttcgtggcgatgtcgctgctggtgctcttcattgtcgtgcatgtggccatggcggtgctggtgccgcgcacgctgcgcaccatgatttcgggccgttag

SEQ ID NO: 166961 - DNA, 717 bp, Enterobacter cloacae
atggatcgagcaaaacgggtgttgatcgtcgaagacgacgcgcatatcgccaacctgctgcaattgcatttgcgcgacgagggatacagcgtggcccacactgccgacggcgccgaaggcatacagatgctcgagcagggcaactgggatgcgctggtgctggatcttatgctgcccaatgtcgacgggctggaaatatgcaaacgcgcgcgcatgatgagccgttatatcccgattatcatcaccagcgcgcgatcgagcgaagtgcaccgaattctagggctggaactgggtgcggacgattatctagccaaaccgttctcggtaatagaactgatggcccgcattaaagcgctgctgcggcgcaccgatgcgctggcgcgggacgcgaaagccgaggccggcaccctggttgccgacgacctgactatcgacccggtatcccgcagcattacgctgaccggcaaggcgctggagctcacgcccagggagttcgatttgttgtatttcttcgttcgccaccccgatcgcgtgttctcgaggcttgagcttttaaaccaggtctggggctataagcacgatggttacgagcataccgtgaacacacatatcaaccgcctccgggtcaagattgaaagagatccttctgcgccccagcgcattctgaccgcctggggccgcggctataaattcaccagtcccggcgccgcagcatga

SEQ ID NO: 166962 - DNA, 1461 bp, Enterobacter cloacae
atgaaaaaacttacccttacacagcgcctctccgccgtattcgtcgtcttgctgcttgcatgcagcgcggtctccgcctggctccagatcaacgcaagcgcccgccatgaacaggaagtcgttcaacgcgtatcgttcggactagccaaacacattgccggcaccgcccagcttatggatgccagcggatggcgtccgcaatcggtgcgaaagcttttcgaccagctcatggccgtcaatccctccgtcgaagcgtacctgctggacaaccagggccgcatcgtcggcgacgccgcgcccgaggggcacttgaagctttcccaagtcgctctcgcgcccatcgggcaattcctggacggcggacacctgcccattctgggcgacgatccgcgcaatctgggccggaaaaaagtcttcagcgccgcccccgtccagaaggacggcaagaatgccggatacgtctacgtgatcctgcgcggcgagacccatgacgcggcggcgcaggcgcgctcgggcgaccgaatgctgcggctctcgctctggacgctgggatgcgtggccttgctggcgctggccatgggcctgactgcctttcgcctgattacgcggccattgcgcgcgctggcgcaaactgtgcggaacttcgatgccaacggcgagcaggccgccgccttgaccgacgcacagattcacgccgacggcgccggggacatcgccattgtgcgcgacgcctttacccagatgggaaggcgcattgccgagcaatggaaggaactggcccaacaggatcaacagcgccgggatctggtcgccaacatctcgcacgatttacgcacgccgctgacagcgctgcacggctacctggaaaccctgcgcatcaaagaagacagcctggacgcggcgcaacggcgacggtatctggacatcgccctgactcaaagtgaaaaagtgcgacacctggcccaggaactattcgagctggcccgcctcgagtccggcctggttactccagaactggaagtttttacattggtcgatctcgtccaggatgtggtcgaaaaatgcgaactggccgccgaggcgcgccagcaggaaatttcggtggatattgcctcatcgctgccgctgattcgcgcagacatcggcatgatcgaacgtgtcctgaccaatctgctggataacgccgtccggcacaatccgcatggcacgaagatcacgttgaagctggccgcgtcaacaccggatgtcgtggtcgatgtggccgacgacggccccgggatgtcggccgcccagcgcaaatccctgttcatgcatgcctcgtcgctactgcgcgtgggcggcgaaagcggcgggctggggcttatcgtggtgcggcgattgctgcaactgaatcagggcgatattgagcacatcgataccgtttcgggaacaaccttccgattccgtgtgcccatcgcctag

SEQ ID NO: 166963 - DNA, 219 bp, Enterobacter cloacae
atgagtcacagatatcacctactgcttatcgaggagcttgctactcccaccaccattgatgtaaatgatcgaaccggtctagaggcgctgcgcgaccgctaccccaaactttttatgggaggccctttaccatggaagttcgaagtcggtgcaggcacccggctcatgcttcaggtgcattccagccagcaaggtttgtgtctcgcgagcgtatcctga

SEQ ID NO: 166964 - DNA, 645 bp, Enterobacter cloacae
atgacggtacacagtcgcaggcaggcgcgcagtgtaggagacgaggggccgctggtttcacccttgcgccgccgaatgttgcaggctgccctggcgggctcattgagcgttcccttgatcggctgtgagagctccgtcgattcaggtaactctggtggtgtggactatgcaactaccattgcggatgcccgcgaggcaattcttcaggccatggctgagtccgatacatctgccgtctcggtggcactgggcgatgggaatcgtattatctggcaggaagcatttggggtaattgatcgtgtcagcaattcgccggccagcaccgataccctttacaacgttggttcggtcagcaaggtgtttgtggcggccgccatcatgattttggttgatcgtggattggttgaccttgatactcccgtgacggcttatatgcgcgactttaggatcttatcgcctgcctatacaaagataacggttcgcatgctgtttagccattcgtcagggttcccgggatcaaactatcagaatatctttacgtttaggcctctgtcaggatacgctcgcgagacacaaaccttgctggctggaatgcacctgaagcatgagccgggtgcctgcaccgacttcgaacttccatggtaa

SEQ ID NO: 166965 - DNA, 750 bp, Enterobacter cloacae
atgtgcaaattatgtgtaaaggatgccgtagtaagcaatctgcctgcgtcgcgttccaggcgggctgctatgggcatgatgggtgcgctttcattgcttggcatgtccgcagcggctggggttgctcacgcaaaattactgcccaaaccggataacgtcgtttcacccgatcaggccatcaagcgcttgatggaaggaaatgagcgatacacctccggtaagactcagagtcaaaactttgcctcgacacgggcagcgttggcccgtgggcaaaatccctatgcgtctattttgagttgtgctgattcgcgcgttagccccgagttatgttttgacgaagaaaggggtgacttgttcgtgacgcgcgtggcaggcaattacgtcactactgatattctggcaagtctggaatatggcgccgcggttctgaacgcaccgctaattatggtgctgggacataccagttgcggcgcattgagtgcgaccgtcagttcactgaaaaagcatgcagagtttcccggccatattcaaagcattgtcacagccctgatgccagccgtacgcgttgctgcggccgaaccgcatgaaggtacgctgattcacgcggctacagttcaaaatatcaagcaaaacgtaaagcagttgcaagaagcaacaccgatattgagcagaatggttcaagacggcaaaatcaaggtcatcggcggtctctaccgcctagacactggccgggtggaactcgtcgcataa

SEQ ID NO: 166966 - DNA, 966 bp, Enterobacter cloacae
atgatgattgcccggtatcagacgctacaggacccgtatgagcaggccaagtttcaaaattggctgccgatcgaaataaatcaaatatcagcggggcattactctggtcatgtacagatgcttgagcacggcgaggtaggtgtgtgttgggagagccaaaatcgtaccatccacaagcgcagtgttattgatcaggaatcgtgtacggtctcgttctttcggaataaacaattttcaaatgggttttccgagtatgcgcctgccgacggctcgttgtttattctgcccgctggcgcggaacttgatattcgtgtcgctgctaacgtcgaaactgtctactttcgttttaatcaatccgtacttttgcataaggccagggcgatgaacccgtcccgctggggcgctccaccaaccggccttatgtgtcttgatctaggtaacctgaaatcgctggatagatttgtagagaatattttccacctggcgcaagtcaataatcagttaggttcagacgataatagcgaggtgttaagcgacattattatggaacatatactggtggtgctaaattccagccagctcattaacaccgagaaaaacaacatattgactgcgcgccgtcgcgcgaaatacacagttaaccgcgtcatagactatataaaagcgcagcttgagcaacatgtctgccccagtataagcgctatctgcgccgacctacatttatcggaacgtacattgcaatatagctttggcacgatactggatgtctcaccacatacctaccttcgctacataagactcaacggcgttagagcggagttaatgcaacccgatggtaacaaccttaccattactcgagtggctaaccattggcactttctacacatggggcggttttccagagactatcaactgatgttcggcgagctcccctcggcaacacttcgccgagctctgcatgcttga

SEQ ID NO: 166967 - DNA, 1524 bp, Enterobacter cloacae
gtgcgcggaggcaacgtattggctgatccgatctggagcagtaatttagcgctccgcacccaatcagcgcctggcgtgaaggctgtgctttttatcatcggcctggtgttgctggccacggctgcgatgatgctggttcccatggtcgtcgatatctactacgggagcggggactggcgcgcttttgcttcgtcgctaattttgactgcgttaatcggcggcttcctgatacataacagtcaagggaccttgcgagcggggcttaccatccgccaagcattcatgctgactcccttaagttggttcagcgtaggggtggtgagcgcgctgccttttttcttttcgagttacggcagtgtcagcggccatgtttccaattccttcttcgaagcggtgtcgggtatcaccacgacgggagccacggtaatttctggcctggatgaggcgccgcctggcatgcttctatggcgagccatcctgcaatggatgggcggcatcggcatcatcgcgaccgctattgcgattctccccgcactggggattggcgggatgcaattgtttcgcaccgaatcgtcagatcgatccgagaaggcgataccgcgagtgcgccagctcgcgatggtcatcgggcttgtctacggtggattaacggtgctcgcggctatggtttactggcttgctggcatgtcgccctttgacgcggttgctcattcgttgacctccatatccactgggggctactccacttccgacggctctttcggcacatgggaggacaacggcattcaatggtttgcaacggccctcatgctttcaggaagcatcccgtttgtattgtatgtccggttttttgccggtgacagcacggcgctccgggaccggcaagtcatgacactgctggccttcctatctgtagtagttttggcgctaggtctatggctggtagtctcggggcgatatggcattgaagccgccttccggcacgctgcattcaatgtggtgtctgtagtgactacgaccggctacgcgaccaccgattattcgctgtggggcaatgcggtaatagggcttttcttcggactcacctttgtgggcggctgcacgggctccacggcgggcggaatcaagatattccgtttcgaggtcctttcagtaatgctcaaggcgcatgtcatgcgtttgctgtacccgaacggcgtgtttccaaggacgtatggagggcgtgtgctggacgatgaagtgatcggttcagttgccgcctttctcacgattttcttcttgttttattttgcgtcgacgttctcgctcatggcttttggactcgacttcctgacgagcgcttccggtgctgcaacggccctggccaatgtcgggccgggactgggcgatatcattgggccggcgggaaacttctctagccttcctaatggggctaagtggactttgtcggtcagtatgctgttagggcgccttgagttgtttactgtgctggttctattcgtgccgcggttctggcgtggttaa

SEQ ID NO: 166968 - DNA, 1386 bp, Enterobacter cloacae
atgagagttatcgtttgcggcgccggccaagtcggaaccaccattgccaggcatttggcctcggaaggtattagtgtaacggtcatcgatatagatcagcagcttgttcgtcggatcgatgaaagttacgatgtgcgaggtgtggtgggtcatgcttcgtatcccgctacgctgaagaaagcagacgctcgggatgccgacatgttgatcgcggtcacccggtcagacgaggtgaatatggtggcctgtcaggtggcctattccttgttcggcatcaaaaggcgtattgccaggcttcgccatgccggctatctggctgaggagagttccgggctatattctgctgaacacctccccgttgatattattatttcccccgaaatcgagattgccgaagggattgcctggcgcttgcgcactccaggcgctttcgacatggtgccgatggcgggcgggcttgtggagttgctgggcatacacgtcgagtcgacgagtagcgtggtggtcggtgaacgagtcggtgatgtttcaaagattgctcagttcgagggggcgtccattgtcgcgtgtatccgtaaggggcgcagcttcgtaccggacgatcatgatcgtatcgaggtcggtgatgacatttacgtcatagtcagagccgaaagcgcggacgaggttatggcggcattcggtcatcgtgagcgagtagccaggaatcttgtcatcgtagggggaggtaatgtcggcctgcatctggttcgaaaaatactgcagacttcgccaaaagtgaatatcaagattatcgaacaggatcttgagcgcgctaggcacatctcggatgagctgggcgcgggcgtcattgtgctgcatggcgatgcgctggatcaagcgattctggaggaagcacagaccgggcttgccgaaaccatcgtagcggtgaccaacgatgacgaaaccaatatttttgcgtcggttctggcgaagcgggtggggtgtaaacgggcgattactctcataaacaagcgcaactacgaagcgctgaccccgacattgggtattgatgccgtcgtcagtccgagcgcggtcactatttcaactgttttacggcacgttcgtcgcggatcgatagctgctcttcatactctgcgcgaagattttggcgaggtcattgaagccgagatcaccgaagagtcgagactgattcgtcgtcccctgaacgagctgggactaccgcctggaatgaggattggcgcgatagtgcgggacggcgaggtgcttattccccatcccgatactcagttgcgagctggggatcatatcgtcgcactagttacctatagttacctgcggctggccgaggccttgctgggtgcgcggaggcaacgtattggctga

SEQ ID NO: 166969 - DNA, 264 bp, Enterobacter cloacae
atgttcactgccaaattactcgtagaacgaggatcaatacacgataagtcacaagactgggggaactacgggttcgtatccctaccttctcccggcgatcgaatagcaacccattataacgacagcatccattacatgaccgtcatctgcgtacatcaccggcctgtacaactacacgccgacggggcgctggagtctgccacgcctcctaccgccgaggtagtggccaagtggaccagctcggatgacgacactcctgcctag

SEQ ID NO: 166970 - DNA, 516 bp, Enterobacter cloacae
atgagcgaagaacgcgcgctattcgcgggggggtgcttctggggtatgcaagacttgatccgtcgtctcgatggtgtaatttcgacacgagtgggttatacaggaggcaacgtgcctaacgccacctaccgcaaccacggcaatcacgcggaggcgatagaaattgttttcgacccgcaaaagacgacctatcgacacctgctggaattctttttccagatccatgatcccaccacgcagaaccgtcaggggaacgatgttgggatgagctatcgttcggggattttctacacgaaccccgcgcaaaggctaatagccgaggaaaccatcgcggacgttgacgcgtccggcctatggccgggcaaggtggtgacagaagtgaccgaagctggtctgttctgggaagcagagccggaacaccagaactacctgcagcgcctccccaacggatacacctgccacttcgtccgttcggattggaaacttccgaagcaatcgggtagtgctacagcataa

SEQ ID NO: 166971 - DNA, 450 bp, Enterobacter cloacae
atgtctacttatcaaaaggatccgaaagccattgagcggcttaatcccgagcaatttcgcgtcacgcaggagaacgctacggaacgtccgggtaccggcgaatacttgggcaacaaggaggccggcctctacgttgacatcgtatccggggaacctctattcgcgtcatccgataagtacgaatcggattgtggttggccgagtttcaccaagcctatcgaagctgcgaatatcaatgaactgcgcgacatctcgcgcggcatgatccgcaccgaagtgcgttccgtccacggtgacagccatctgggacatgtttttccggatggacctcgagatcgtggcggcttgcgctactgcatcaattcagcatcgttgcgctttatccctcgcgctcagttagaggccgaaggctatggcgcttatctcgatcaagtggaggatgtacgatga

SEQ ID NO: 166972 - DNA, 219 bp, Enterobacter cloacae
atggtcctgtgtccggactgcactgagttacggcgaaaacatccgtctgctccaccgcatcgctcattggcgttgatgatcagcgccgaccggtcggtggccagtctcgcggccgatacccgggatatgcattatctttgtcgagactgcggggcgacgttcattcgcggggcgatggacgataattctgaacctgtttgggaactatacgccggctga

SEQ ID NO: 166973 - DNA, 477 bp, Enterobacter cloacae
atgctgcaaaatggtgatgtctttccctttcttacctttgcccgcacaggtgggggagaagtccgtttgcctgatgatctggccggtgggttcggcgtgattctgttccaccgcggttcgtggtgtccgtactgcaacacccagcttgccgcatttgcgcgggcgacggacgagttcgccgaggaaggcatcagggtcgtttcagtatcggtggacgatcgggaaaagtcggaggcgctcgtcgacaagcataagctcagtttcccggtcgcctacggcgctgatgcacgagtggtttccgcaaccaccggcgccttcgtcaatgacgatcccgtctgtctccaagcaaccgggttcgtcatcagtcccgaaggccggatcctgacagccgtgtattcgacccgcgcgattggccgtttgatgcccaccgatgtgctgagttttgttcgccacctcaaaccgtcggtcaagagctga

SEQ ID NO: 166974 - DNA, 888 bp, Enterobacter cloacae
atgactgacacaaccgaatatgtaccgcccaaagtctggacatgggaccaggaaagcggcggcaccttcgcgaatatcaaccggcccatcgcaggcgccacccacgacaaggaactgcccgtcggcaagcacccattgcagctctattcgcttggaaccccgaacggtcagaaggtcaccatcatgttggaagagctgctcgcgctcggctatgcaggggcggaatatgacgcctggctgatcagaatcagcgaaggcgatcaattcagctccggtttcgtcgaggctaatcccaactccaagattccggcgctggtggattgcagcgaaccaacaccaacccgagtcttcgaatccggcgcgatcctcatgtatcttgccgaaaagttcggcgccttcctgccgacagataggctggcccgcgccgagacgctttcgtggctattttggcaaatgggttcagcgccctttctgggtggcggcttcggccacttttatgcctatgcaccaaccaagcaggaatacccgatcaatcgctacgccatggaagtcaagcgccagctcgacgtgctcgaccgtcgactagccgacaacgagttcgttgctggcgccgattacacgattgcggacatggcgatctggccctggtacggcggcctcgtgaagggctggcagtacgaagcggccgaattcctttcggtgcaagactataaaaacgtggtgcgctgggccgatcaggtcttcgcccggccagccgtcgtccggggccgcaaggtcaaccgcacgagcggcacactgacgagccagcttcacgaacggcacgacgccagcgacttcgatacaaggacgcaggaccaactgatgggagaagaaaactcggcgccttga

SEQ ID NO: 166975 - DNA, 678 bp, Enterobacter cloacae
atgtcgaacacacaggctatcgtttttgatctttacggcacgctgtacgacgtccattcggtcgttcaacagtgcgatgcattgtatcctgggcagggcatgcagattagcgagatgtggcggcagaaacagctcgaatatacctggttgcgcagcttgatgggacagtacatttcgttcgaggaagcgacccatgacgcgctcgtctacacctgcaatcacctgaagctagatctcgacgagacgacttgcgccatgctgtgcaatgcttatctgaacctgtcgccgtacccagaggtacccgctgcgttgcagcgattgaaagacatggggttgccgttggcgatcttgtctaatgggtcggttttctcgattgacagtgttgtaaaaaattctggcttgcaagcctatttctcgcacctgctcagtgttgaacgcgtgggagtattcaagcccgatccacgcgtctatacgctcgcttgccaagcgttgggtctaccaccgccccggattctctttgtctcgtccaacgcatgggatgcatcgggtgcgcgccattttggatttgacgtttgctgggttaatcgtcgcgacaatacatttgatgaattgggcacggtgccatcgcatgtggttggtgggttggatgaaataccaaatattgtaagcagcacataa

SEQ ID NO: 166976 - DNA, 237 bp, Enterobacter cloacae
atgtcagacaaaaataaactgacagaattaattttagacggacagcattctaatttatttatgaacgtcagtaacactttaatcacaaaaacaaatgaaagtgtaaagatcactttagatgaagcaaaacttcaacttgtattaagtcttctaaatgatgaaaatactgcaatcatcattccaaaatctaaggttacagaactgaacgaaattcgtgaccttttgacaaatgagtag

SEQ ID NO: 166977 - DNA, 714 bp, Enterobacter cloacae
atgtacattagccatatgctgaattggccgctaaccataaagcaaatcaacagtaatattcgtgctgatgaacttgaaggtgagcgtagtctcattaacggaaacaccagttttgtgcccagcgagcttgtaacggcgtttcaggaaggccacctcattcttctggatgaagtggacaagattgaccctgataccgccgcgaagctgcatatgcctatagagcgtaagccctggtcactagccgccaacggtggcgaagtggttaatgccaataagtttacgcggtttatgggtacagcaaacacaaacatgagtgggggatctcgtaagttcgtttcatcacagcggcaggatgcagcgtttattaaacgcttcctgattgtggagatggaaaggccttcagaggttgcattaaccaacgttttgcttaaacgctacaatagcctgcctatgctggtaattgaaaaattcgtttcggtagccgttgcagtaaacaacataggaactgaagacagtgtaatggatattcgtcagcttgtggcatgggttggaacgtcgatgacgttaaagaccatgtccttactggatacgtttaaaattgcttttgcgtcggctctgcctgcacatgccagtggtatggtgctggaagccatcgatttaaaactcggtgacgataagaaccgtacaatggagtattacactgcaaaaaagtag

SEQ ID NO: 166978 - DNA, 621 bp, Enterobacter cloacae
gtgccggtggataccagcaagggtcagcagcatgatcccgagtttcgcaaaatcaatccaaacggcaaggttcccgcaattgtggatttggatgggccgggcggacaaccggcgacggtcttcgattccaccgcaatcctgatgtaccttgcggagaagacggggcgcttcctcggccaggctcaggatcgtccgcagctcttgtcatggctgctttttctcggcagtggccttgggccattttcggggcaggccgtgcattttcagtatgcggcgccggcgggccaagattatgccgttaatcgctaccgccgcgaagtcgagcgtcattacaaggttctggatgatcatttgagtgatcgtgagttcgtcgtcggcaatgaatacaccattgccgatatctctgcttggggatggctggacagagcgtccagggtaatgaagggcgccgaggatccgttggcgccttacccgaacatcaaacgctggtttcaaaaggtcgatgccaggccagctgtcgcacgtgcgcgtacggtcggggccgatattgcgttcaagaaggtaaatgatgaggaaacgcaacgcgcgctgtttccctcgaacttcccaccggcggcctga

SEQ ID NO: 166979 - DNA, 735 bp, Enterobacter cloacae
atgatcagatatatcgcatttttagtaatactggttacttggttaatttacttctcaaaatttgatccgttcaatggttttccgattgataagtcagagtggggaacatttggagattttgttggcggtgttaccaacccaattttaactttttttacgatgattatgttgatcaaatcaattaatcttcaaaaagaggcaaatgaaagcataataaaacagaacaaacatatgcacgaggactcagagagacaaaaagagatggatgatctacgctcttttgaatcgtcattttatagcttagctgcagtttcgagaagagagtttgatgcactccaaataaatggtagaaataagaaaaaatatacggacgcaaatgcggtggtttatttagaaaagtatctgataaatgcatgcaaatcgaataatgcagaagagttaaaagagatgttttctagatttgatactgattcttccatggctatattctctgctgtccgtagtttttatattctgtttaaattcactaatgaatcatgtccagaaaaatataaagagagatattatgagatcgcaaactataccatgcctataaaattcctgcatttagtatgtcttgcttatgtattcggtgactggaaaataactaaagacttcgaaaattatggtttttttaaacgaaaaggtcttgattcctacatcaccgattttacaaatgtgaaaaatttctattaa

SEQ ID NO: 166980 - DNA, 819 bp, Enterobacter cloacae
atggaaattcatgttcccatggaagtagttgtaagcgatggtgaagagcgattcactgagttggatttttactatggttccaaagcgcttgaaggtacctccgaaattgttaccgttctcactaatactatccttaaccgtgaagtggttacaaaaatcccttccatagagggtattacagcatcatttcgtacaagttatgaaggatctttcaggcaacggttcatgctcaagatcactggggacgagcaaaaaagaagttatgaggcaattggagagggagcatttctcgatgtcatgtcctattatcttacaagacctcttttgacaccgtataatttcagttataagagagcctcaagaattgttgaagaacttgaaccggattataggtcgttaatgaaaagactctatggacccttacttaaactccataagcctattgaggaacaaaattataaagtagaattgaaacggagaagaacgaatctagtcagttatgacaattctactcttgagaatttaactattgagcgtgctgatgccgaacgaatttttattgaggcttcgattactagatttaaccgtttaactggaacgggaagacttattcttgaagaagattccgaatctgttagttttgaacctttctcgctttggagagaatttcctttggagcaaagacgcaaactttcaagaaatttagatgttaacactgataatgcaaactttactcgtttacgcttagaggttacagctatcagaaactttcttggtgatatcaaaaaatatagccttcatagggtagtaatggattaa

SEQ ID NO: 166981 - DNA, 1566 bp, Enterobacter cloacae
atgagaaaccattccgatgtacatcaaacaatgattacaagagaaattatgacgccgccaaccaaaattgatactacaagtctactgaccatactgggtgttattgctgctgtatgggcccttattaccccaaacgcacgactacgtttaaggttctgcctggcgtggtgggattggacaattgttgggtttgcattcttactaagcaactatttggtattcgcaccagcgttaaaatcactaggcgtatatctaagctttggtccatggaaatggggattagatagttcaagtgcagtatatttgatactgctttcagttgctttttacatttcatttcgcctaaaaagccctaagctttcagttggaagaacaaaaatctttctagagctagttgagaatttacaacttactaaacgatatgatgatctggcacaattgctggcaccacaattagaaaagttaatatcaataattgaaaggccagctaaaaaaagattttgtgataagatagtttacaatctccgcatcttagatagcgagacagccgccgattatgcgcatgaagcgttattaaatattgtttcatcacctgaagttaccaatcactttgcacttgcccacccatccctatgccttgagttaatcaagatcgagtcaatagttcgttctgactttagttctaattttatcagcgcattgcttagttcacctaacagtcgtctatatgttgagctcaaaaaaaatcttaatgtcattcgaggtcatcgtttattgattccaaaaaacaaccgtattctacattttttcttctctaatgctaagtttgcatctgatttggcaatattcagtgatatcggagactatctttactggaagttagatgaagatgaaaatcttatatcaaaacttaataaatctttaggttcatattacgatacttcgaagtataaatgccctatttactctggcgtcacgttatttgaaatcatggttcatgagggtattcaccaggggcttcaggatcatttatggctgcattactattcccattttgcgaaaaaaatcctaaataatatgaattggcaatctgatgaatatagtggtgagtgggaaactccttttcacttccttttatgtcatttgttcgatgtagctacgaattgggcagagcaatgcgcatatatagatgaaaaagaggtccctcaagaaaacaaaatcgcagaaaatttagatcttcattatatttcaaaggaagctaccaaattacttggcactatgctgcagatggtgatccctagccataaattaaccaagaaaaccaggaagagtattcttgctatggttgtatcttgttatattagattgaaagaaaataaaaaattggaagacgttgctgactcattattaagttttacaactagtggcgaatttaattctgcaaagttgagctatcttagagaacttctagatttattcaatacacttgatgattaccgactaagaagtgatgccacggaatttcgaacagctatagagtctgccattcattcaagacttagataa

SEQ ID NO: 166982 - DNA, 405 bp, Enterobacter cloacae
atgaaaattgatcacgaatacttgaaagggcttctcgaggctttcgaagcctcggataaaccagatacgaatattatcgagttaaatgatcgtggttttaattatgagaccgataagtttgtattccacatgcgacttcttgatgaccgtcaactaattatgagatctgatggccaaagtggattggggacctacgaaactttagacgggaaactgcactggactgcctttccattgaggctaacagcattaggacacgattttttagatgccctcagggaccaggaagtttggtctaccttgaaaactggtttcaaggacgcaagtatggggacattgatgacagtatctaaagaattgttcaatcgagcgcttgctaaacaactcgataaagtcttcgactaa

SEQ ID NO: 166983 - DNA, 516 bp, Enterobacter cloacae
atgaaaattaattcgggtcttatcggggttatcttgattgctggcctttcggtcgctctcgttaagagttgctcaaacgccagtagccttcagagcgataacgacgttctgcggagtgacaacactttgcaggggcaggtgatcgccactcaggcatttaacttcaatcggttcaatcaggttgcagagcataccaacaggcttaactccatgattgacaccaccaccgaagaaaccgtaatcgaataccgggagattctccgccgtgaaaaaacctgtgatttgcctgttcctgctgatatcgctagtgggctgctcgaatacgcgtatcgtctacgttccagcgcaatgcacgccgataccgacggacttgacgcgaccgatgatcgtgccattaccgccagctcaataacgtactgccaggctgtgctctggattaagccgctgctggccgttattgaaaagggtaacaacaacttcgctggcattcgtcaaatagagaacgaacgcagatag

SEQ ID NO: 166984 - DNA, 876 bp, Enterobacter cloacae
atggaattacgccaatttcgttacttcaccacagtggctaaactgggtagcatcagtcaggcagccaaagaacttcatatcgctcaaccagcgttaactcgtcagattcaaaagctggaggatgatttgggtgtactgttattggaacgaacgggaaggggagtaacacttacagatgccggcactcaattctggttagacgcggaaaagttgcttgatgctgcaggcgcagcacgggagcgagcgtcacgtgcttcacgcggagagagtggaaatatctctcttgctcttcctgttatacaaaatgcagccccctcaataacgagtttgctcagaaaatttaaaaacgaggtgccgcatgtaggtatcactcttcaccatcttgtttcggaggttcagcttaaaaagattgcagaaggtcaactggatgcaggttttttgttattcagacctcagaatgatccctcatttgaggggatccccattttcaaggaaagaatgttgttagcatatccctccgaatggcgttggccagataataaaaaacctcaatatttgagagaattacaggatttggattttatttggatcccaagaactgctgcgcctgcatggcatgacagactaatacattgctttttcaaagcaggttttacaccgcgttccgttatgcagggtgttgatgcggtatcgatgctaacattagtctccgccggaatgggatgtaccattgttgcggagggcacccaacatttggcaccgcctaatgttacattctcgactctagtcgatttagatttgatacaggaatgggagttagtatggcaaaaaaaccgttgttctgaggttttaaaaaagttgataaaactgatctaa

SEQ ID NO: 166985 - DNA, 1203 bp, Enterobacter cloacae
atgtcctataaaaatgaaatgaagttaaatgtgaaacgtctcacagaatttagacatgatttacatatgtatcctgagctgaaatttgaagaatatcgtacatcagagaaaatcgccgagtacctcactactttgggcgtccccttcaaacgtggtctggggactacaggtattgttggcagcatatatggtattaatcgtagtgctgagaacccaggcccggctctgggaatcagagctgatattgatgctcttccaatggaagaagttaatgatttcgagtatgtaagtaagcacaaaggatgtatgcatgcttgtggtcacgacgggcatacagcaatgttgctcggtgctgctgaacttctttcagccgatcgtaatttcgatggcactgttcatcttattttccagccaggggaagaaggcggtgccggcgctcgcgtcatgatgaatgaaggacttttcaaagcatttccttgccaggcggtttttgcattacataactggccagatttaccccaaggacagatgggtacaaaaagcggcccaattatggcttcaggaattacatttgaagtcattgttcaaggtaaaggtggacacgccgctctgccacattcgactattgatcctgttccgatagcttgcgccatcgttacacaactgcaaacattagtttcacgccgtattaatccactggatgcagcggttctcactattggaaaaatagaggcgggaagctctccgaacatcatacctgccgaagccagaatttctggaacatgtcggactctgacggatgaaactcaatttttacttttagagggggtaaaacgtatttctcgctatatagctgaagcgcatgatgcacttgccgaggtaattattaacggggcaggctatcccaacacaactaatcatcctgaagaagctaattttatggcaagagtcatgggcgaaatggtgggtgaaaataatgctaatactaatgtacgccctgctatgaccgctgaagattttggattcatgctaaaagaagtaccaggagcgtatgggtggattggtaatggtagcgctggcgttgttggtggagatcttcatagtacgtcttacgattttaacgataaaaaccttacgttaggtgcatatttttgggaaaaacttgctcgccaatggtttcttactgaggcaaaaaacagttaa

SEQ ID NO: 166986 - DNA, 1308 bp, Enterobacter cloacae
atgaacagtgataataatatttccccaagaatagatgtcgaagaaatcgcccagaaaccaactcagcaaagaatttatgtgttagcgattctttttattagcctctcggttatatatttagatcgcgttaatatctctatcattgctgcaaacactcagtttttacaagagatggatctcgttggcaaaccgatatacataggattattaatgagtttgtttttaattacctatggaatttcaaatgttgtgttaagtcctataggtgatctcattggccccagaaaagcgatgcttatagcctatgttattataagcttatctcttcttttgggtggcttatcaagtatatttggggtgttattaggcactcgtatattattaggggtgggagaaggcctttactatcccatgcaaaatacatttatcaaaaactggtttccacccagggaaagaggaagagcaaatacagcatggattttaggacaatctctctccccagctgtcgccatgcctgtttttacatggataattgctgagtactcatggaggcataccttttatttttcctttgcgttaagtttgattcctcttatcttgatttatttgttcgctacaaatactccacgcgaaaacaaatatattaataaacatgagattgagatcatagaggaaagcagaaaacccaataacgtagtaagtaattcaagtgaaaagccatcaatcattacgcgttctaaaatctatctctgcaatgctaatttttggatgctactaatcattttctcttcaaattcaatgttgtcgtggggagttgttacctggcttccaacctatttgaatactgaacgcggattttcatggtctaatgtcggctggatgtcatcattaccctttatttttggtttactcttcaagatcgcctccggaattgcggtcgatcgaacgggtaaaaaagggattattatgctcatctctgccctgttatgcgctgctggcattctggctggagtgaatatcactaacaattacatagctgcgataatgatatcatttggtattggggcttcatcaatgcagcttccctgtgtatttaccttgttgcaaggtatggttccttctgaagcgatatcctctgccgcaggggcattgaatgggatggcggtaggttttggtgctttatccccggtattaataggcttgatattaagtttaacccacaacttttattcggttatgtatttgctgattggtatagtactcatcggtggactggtttcactgctttttgcggtgaggcgcctttaa

SEQ ID NO: 166987 - DNA, 1551 bp, Enterobacter cloacae
atgaaaaaccagacagaaacaattgttattggaagtggttttggcggtgcaattgcagcgaaacgtcttgcggatgccggacgcgatgtgctgatgctggaaagaggtccgtggcgcgatacggtacccaatcgctcggtaggccttgataaccttgcgcctctgcctcagggaagaaaagcctttacgcacggtttaagatcgctcggttcgcaccgattgaagagatttgtcctgcttaataagaaaggattcattgaggtttttagtggtaagggcattaatattatctgctcctcgagcgtcggtgggggcagtcacgtctatgctgctatgctggccaaaccctccgatcccgattactgggccaatcgtcatcccctgttatcaaaaacggtaatggatggttattatgccgaaatcctggcgcttctgaaggccagacctgttaacgatgacgatcgcgtgccgaataatatcagcctgaccgattatgatggaacattatctacccaaggactggctaacccttttatcgggatcctgcttcctgcaaaacccggcacggttgccaaagtcgtggataacaatggcgtagagcgctgggagtgtgaatataagaataacagcattcttggctcccccactggcgccaaaaccacgctcgatttttcggttgtctggcctgcgatacgcagtggcctggttgttcgtgatatgtgcgaagttactgacataaacaggctacaaacaagcgatgctgacggtatgcgctatgaaatccactatcgcgatcatcataaaaacaggaatgaacatgtgcgtgcccggcatgtgattttagccgcaggctgtctgaacacggtccgtttgctgatgcacagtcgtaacgatagctcgggcctggtggggatgccgcagttgggtaaaggatttggaaccaatggcggctattttggtttctggaaagagaatagcactcacgatctctcaactggtcttcccctatgcggcccgttccgggtagcaaattctaccagcagatccgtccaggtactgcgcgccgctatccagggtctggacgacatgccatgccctgccttccttaaaaaatggtttcgaagaaacgcctttatcgttgcgctgggcaaagacaataacaacggcgtaatgtcgttaaaacgtggcaaattcaacgtggcctataacaaaacggaaagtcacgtctatcaggagatagataacgaagtcagcgagattaaagccaggaccggtacccagatctactccccttcttcacccgtcaccgtccagcccctcggaggcgcctgtctgggtacttctaatcaggatggcgtgattggtgccaacggtgaggtgtttgacaatccgggcttgtatatcgccgatgcggccgcgctacccgagtctccaggcagaccacccagcctgaccattgccgcctgggctgccaacgttgccgacagactcctcgacacgctcaatcaagagtctttgcaacagcacggtccggcttcgcaatcacgttag

SEQ ID NO: 166988 - DNA, 1545 bp, Enterobacter cloacae
atgacaaagcaagttgaagtactgattattggcagcggttttggtggcgcgattgccgcaagacgcctggccgctgcgggccgagatgtcttaatgctggagcgtggtccctggcgcgatacggtgccgaaccgttcaatcggactcaaaaatctcgtgccacttccccagggaaaaaaagcctttacgcattgtctgagaacggtaggctcgcacctgttcaaaaagacattcacgcttaataacaaaggctttatcgaagcttacgccggtaagggtatcaatattatatgctcgtcgggtgttggtggtggcagccatgtttatgccggttttctggataggccactggtcgcaaactactgggataaccatcacccggagattagccaggagaaaatggagcgctactatgacgagatcattaaagcctttaatgcccgcccgctgactgctgccgataaagcacccaaccgcatcgaagaggcgaattataatggcttgctcactcccctcggcgatccggcaatcggcatgctggtgccagaacagcccggcttcccggccaaaataacggatcataatggtatcgagcgctgggagtgtgatatgaaaaataacagcttcctgggttcgccttccggggcaaaaaccaccctcgactttacctttatctggcctgcggtaaaacagggcctggttgtacaagagatgtgtgaagccctgtccatctacaggcttgaatcgcaaacagacacttccatgcgctacgaagtgcgttatcgcaatcatcttagtgggaaagtagaaagtgtacaggcagaacatcttattctggctgccggagccctgaataccctgcgactgttacttcgcagccgcgacattgaaggggggctcacgggtatgccccggctcggccagaaattcagtggtaacggtgacttcttcggcgtctggaaagagaacagcactaccgatctgtcgaaaggaatgcctattgcttcccctttccgcctcaaagattctactaacgagcgcgttattgtccttcgcgccagcattcagggcctggacgatatccccgtaccgtcgttccttaagcgttggttacgtaaacaatcggtcatcattgcctttggcggcgacgacagcaacggctccgtcactaccaggggcggtaagtttaaaattaactacagtaaaaaagagaacagtatttatgcagacattagtgatgagttaaaaaacattaaggtgcgtaccaagacaaaaatctatgcgccgcgtaatccggttaccgttcaccccatgggaggcgcctgtctgggaacgtcaaacgctgatggcgtggtaggagcggatggtgaagtatttgatcatcccgggttgtacattgccgactcatctgcgcttccagcctcccctggcggcgcgcctagcctgaccattgccgcctggtcggccaacgtcgcggacaggctgataaaaaaactggaagaaagtgacgccaccgccgttaaagaacagcaggcagtggcataa

SEQ ID NO: 166989 - DNA, 1188 bp, Enterobacter cloacae
atgaccacagagcatgctctctccgtatctgagcaaaataacaatatcattcgcctgtcggccgctcaggcgctcgcaggagcaaattcggtagtgttttatgccaccggagccatcgtcggcaacgccatagcccctgacgcgtcgctctcgacgcttcctgtcaccatgtttgtactggggatggcagcgtcaatcctgccatttggtgcgctggcaagacgtcggggtcgcaaagccgcatttatgacgggtacaggagcaggagttataaccgggctgacggctgcacttgcggtggttatcggttcgtttttgctcttttgtattgccgcttttgtgggcggggcctacgcagcggttgcgctcagcttccgttttgcggcgacggatggtgtctcaccggcacgccgtgcacgggcgctatcactggtcatgggcggcggtgttgtcgccggagtcattgggcctgggcttgtgaccagtacaatggatctctggccacctcatacgttcgccatcacttttattgcccaggggatggtagcggccgtttcagccgttattctgatgggcgttaaaccggtagtggtcgttacggcctcttcttccggtggccgtccgctcagggaaattattcgccaaccgggtttcgccagaaccgtattcagcggcgcagtaacctatatggtaatgaatttcctgatgactgccgcgccactttctatgcatatgcacgggatttcgcaggaagcctcaaacctcggcatccagtggcatgtcattgccatgtacggtccgggattttttaccggtaagcttatcagccggtttggcgcgctgcgcgtagcggcggtcgggttgctgattaccgctagctctgtggttgctggtctgggtggaacagagatccatcattactggctgtcgctaatattattaggaataggctggaatttcggctttattggtgcatcggccaggatcattgatttccatagaccagaagagaaaacccaggtgcaatcactcaacgattttgtggtgtttggtgtgatgatcgtgggctcgttctcgtcaggggcgctacttaatctctatggatggaacgccgtattatggggttcactggttccggttatcctggcatttctggcgataatcatgggggagcgccatcaaaggtaa

SEQ ID NO: 166990 - DNA, 870 bp, Enterobacter cloacae
atgagtgtgctgggtaaccgtttatttgtactggcgcagtaccttgtcccgcaacatcttttgtcccaactgacgggctatgttgcccgaaatcgggttcactggtttaaaacccggctaataaatgcatttatcgcccgatacggtgtggatatgcgggccgcgcgcggggaaacggcagaagattatgaaaattttaacgccttttttacccgccgactgaaagtacatctgcgtccgattgctacccgaccgcaggatattgccagcccggcggacggcactgtcgggcaatttggaactctggagagcgatacgctcgtgcaggccaaaggacacaaatatagcctgcaggatcttctcggcggtgatacagaacgcgctcttcccttcatcaacggcgaatatgcgacgatctatttatcaccgcgagactatcaccgtgtccatatgcctctgaccggaacgctgcgtgagatggtttatattcccgggaaactgttttcagtaaatagcgtaactactggcgccgtgccgcgtctttttgcccgcaacgagcgtgtcgtttgccggtttgatacggagcaggggccactggctattgttctggtgggggcaatgatcgtttcctctattcataccgtctggcatgggctagtttctccccatgctgacatgatccagaccttcacttatctggagacggacaatacggcgataaggttaaacaaaggagatgagcttggccacttcatgttgggatcaacggtcattatgctctttggggcaaatcaaatgcagtgggataaagccttactgtcaggtcaaagcataaattttggggaggcgatggcaacctccctgatttga

SEQ ID NO: 166991 - DNA, 513 bp, Enterobacter cloacae
atgaatggactgcgagacagtgtcaggaaaggattgccgccgccgatgctgttgctgctgtttctgttgttcgacgtgggcagcagttggcccacgctttattatctggatgaaattatacgctggccgtggcgcacctgcgcagcgctgctcgcaggcgggttaagcctcagtctggcgatcgcggggttattaaccctaacaggtaataagacgaccctgaatgcgctgcacccggatcgcacccgtacactggtgacccaaggctgttatcgtttctctcgcaatccggtctattcaggttttgtggggctgcattttgctaccgccctgttattgggcagtgtagttggcttactcgtcaccccttttctgattttactcctgacaatcctgcatattcaggttgaagaggcaggaatgcagcggctttttggcctgcagtgggagcaatattgtcataagaccccgcgctggttctgccgggcgttattcctacggagctttatatga

SEQ ID NO: 166992 - DNA, 300 bp, Enterobacter cloacae
gtggatattcaccgcataaaacgtgtgcatcatttctattactgcctccttattgcagtaaaaatgtatcgctgtgagcgtccttctctgaacagaattgacgagaatacttttatttacacatggctaaagaaagcagcgaaaaacaatatttttgaatgcgctttgcatgatgagatcgcgtggttgagaacacagttacgcggccatggaataaggtcagacgtggcaaaaatggttgagaatatcgttgttaaattagatttccttttgagcgtagaggaggaggtgacaacatga

SEQ ID NO: 166993 - DNA, 387 bp, Enterobacter cloacae
atgaaaaatattattaatactgaagccgctccggcagctattggaccttattcccagggcgtttcattcggggatttggtaatgacttctggccaattgccgcttgacccggcgacgatggccttccctgagggcggggtaaaggagcagacacgccagtccctgttaaacgtcaaggcggttctggatcaatcaggcgcttcgctggaaactgtgctgaaaaccacctgtttcctggccaaaatggaagacttctcagccttcaatgaagtgtacaccgagttttttggttcaacaggggcaccggcgcgctcatgcattcaggcaggtaaactgccaaaagacgccttagttgaaattgaagccatcgcatacattaaaaagtaa

SEQ ID NO: 166994 - DNA, 921 bp, Enterobacter cloacae
atggatattccgatagaccttaagcacttacaaacacttcttacattgcgtaaaacgggaagcttaacgcgcgcggctatggccctgcaactgactcagtcagcgttatcgcaccaaattaaacagctggaagaccactacggcatcatactgtttgtgcgtaaaacatccccggtgaagtttactcaggccggtgagcgtctgttacagcttgccgaaacggtgctggatgcaatggaagaggccaatcgggatctttatcagttcgccagtgggaaacaggggacgctcaggatcacacttgagtgtcacacctgctatggctggttgttaccggtgatggacgagttccgtaagaaatggtctgaggttgaaatcgatattctgccgggtttccagccggatccggtgggcctgttgctacaaaacagagcggatgtggctatcgtggatgaaactgagcagacagaaatggtgagctacagcccgcttttcaaatatgagatggtggccattttgcccaacgagcatcctttagcgcaaaagccctggctggaggcggaggattttcgtggcgaatcgcttattacctatgcagtgccggaagatcgtatcgacctgtgtcgtaaagtgcttaaacctgccggtattccggtacggcgaaaaaccacggaactgaccatggcgattgttcaacaggtggccagccagcgggggattgccgcgttgccgatctgggcggtatcggaatatctggataaaaaatatgttacagccaggtctattacgaagaataaattaatgtcagaaatttggctcgcatcgctaaccgataacctggataaagactttgtacgcgactttattcattttatcaggcagcgatgcatgcgccttttacctgatatcaagattacgtaa

SEQ ID NO: 166995 - DNA, 1206 bp, Enterobacter cloacae
atgtccagtcataattttgataaccaggtgtccccggaaacctatctttgtcacggcccgttcgatcctgacgtgtttgggggggtggttaacccaccggtctatcatgcttctacggtcatttttaaaaactgtaaagagctcagcgagcgtcaccaggcactttttgaagatgctgaagacgaggtgatgtactacggccgctttggcactccgatcacctttgccgtgcaaaaggcactggcagaactggaggggggctaccgttctttattggttccgacgggtctggcggcctgcaccagcgcattactggccctggtgaaaagcggcgatcatattctggtcagcagcagcgtgtacggccccacgcgcggattcgtgaataacgttctgacgaaaatgggcgtcacggcaaccttcttcaatcctgttattggcgatggtattggcgatctgttccaggaaaacacgaccgtggtgtttacggaatctccagggtcgcaaacgtttgatatgcaagatattccggcgatcactcgcgttgcgcatgcccgtaatgcgaaagttattgttgataatacctgggcgaccccgctgtttttcaaacctttcgaccacggtgtggatgtctctgtgcatgccgccaccaaatatatcgtcggacactctgacgcgcagatgggtcttataacgaccaataaagagacctggctgtcgattcgtcgcttcgtttatctttttggcctgcatgcggcaccggacgacgtttatcttgctcaacgcggtctgcgcactatgtccctgcgccttgagcgccaccaggattcagcgcttaaaattgcaaaatggtttgaagagcgtgaagaggttgaacaggtgctgcatccggcattgccttcctgcccgggtcatgaaatctggaaacgtgattttacgggttcgagcggtctgtttagcgtggtgcttaaaccgcactattcaaaagaatcggtcgagaagtttatcgatagcctggaatatttcggcatcggtttctcctggggcggctttgaaagcctggccatcccgtttaacccgcgcaaagatcgcccggaataccactggccgtacgaagggcaatccttccgtttacagattggcttagaagacccggtagatttagtaaaagatttggatcaggcgcttcgtcatctgaagggataa

SEQ ID NO: 166996 - DNA, 1107 bp, Enterobacter cloacae
atggagggtgtcatttctcttggtggaggcattccagatcccaatttgtttgatcgcgaaggcttacagatcgccatggataatgtgcttacgcactcctggaaagacgcttttcagtatgggcttagcgaagggagcccacaattgcggggcgctatctgccagctcatgagagaaagggcaattagctgtgatatagatgatgtcgtcgtaacctctggatctcagcagtcgctggatattctggctcgtgcgttgattaacccgggcgacgttgtcgtggtagagcggcccacctatctcgcggcattgcaggtgttacagcttgcggaagcaaatctgatgtccgtcggcacagatggcgagggcatgatcgtcgatgagctcgaaacgttgctgacaaccacatcggtgaaagcggtttacatcgtgcctacatttggcaaccccggaggggtaacccttacggagcagcgacgcaagcagctggttgcgctgtctgagcgctacgatttcgtcatcatcgaagacgatccttacggcgagattaactttaccgatacggcttttattccgctcagagcctgggctgcggagatgggtaacagcgataacgtgatttatacctccacgttctccaagatccttgcgccgggcgcacgggtaggttggttagtgttgccggactggctgaaacgccaggtggtaaacctcaagcaggccacggatctgcataccagttcattatcccagtcgctgacgtaccactatctgaacactggccgcctgcctgggcaaattgcactgatccgcgaagcctataagcagaaatgccttgtcctgagtcaacaccttcaaaacgagctgggtgaccatctgactttccatcagccgatgggcggcatgtttttatgggcaaaatttagatatgagaggaataccacgcagtggctgcagaaaacgctgaataacggcgtggtgtatgtgccaggcgagttcttctattgcaatgagcccgatcaatccacgctgcgtatgtcgtacgtcagcaccacagaagagaatctgaaagaagccgtgatgcgcttaaaagccgcactcatttaa

SEQ ID NO: 166997 - DNA, 1323 bp, Enterobacter cloacae
atgctcaacctggtggttatattaagtcaattggggtctcctatgactgtaggaattaataacgaagcaattaataaaaagaatattccctttactatgtacgatttagggtgggtggtgctctgtattggcgcagccattgggtcaggcattgtttttttcccattacaggttggtctgaaaggggtatgggtattcgcactggcggttatccttggttatccagccgtctattacatgcaaaaattgtttatcgaaaccatggcacggagcgatgagcaggattcctatctgagtatcattgccagctacgttggcaaccgctggggagtgctgctgggggcgctttactccatcaccatgctgaaatcgatggtggagtatgctcttgccatcaccaatgacagcgcctcgtacctgaaaacgtttggccttacaacccagacgctctcagaacactggtggtggtcgttgttgttaatcgcagggctatctcttgtggcttcgaagggagaaaaggtcctgttcaaagtctcgggaagcatgattgcggtaaaactggttatcatcgtagccattggctttgtggtcgtacctttctgggatgtgagcaatattggcgaatttcctacggttagccatctcgttgttggcaccttcccaaccctgccattcgctatcttctccatcatgttcgttgggattttgaaccccatgaatatcgcttataaaaagcgcgaagaagataaagacgtggcgaagtacaaaatattgcgcgtgcacaaagtggcgtatctggttctggtggctaccgtactgctgtttgtagtgtccatcgtactttccattagcgaggcagacgcgctgcgggcttatcaggataacatctcggcgcttgccttggccgcaaaggtgattccgggggccgcggtgaaatatatgagcgtgattctcaatgtgttctccatcgtaaccgcattcctggcgctttacctcgccgttcatgagtcttttgttggcttgatcaaagtggctgtggaaaagctgtttaagtctcaggaccacaatagcaatgccatatctgttgctgcgtttttcatggtggtgctggtactgtggcttatcgttctgacgaacttcccaattcttaaggtctttgtatttggtggtgtaacttatggtctgatcagctgcatcatcccagggctaattatattgaagaatgataagttcaccgatctgcgtggcgtatcggtctactacgtaatcttaattggtatgctgatgtgcatcggtccatttgtgatgctgttttcacaatag

SEQ ID NO: 166998 - DNA, 939 bp, Enterobacter cloacae
atgacaattccattgactatcaaacaaattgagatgctggtgaaaatcagtgagggaaaagggctgtcggaagcggcgcgcctgcttaacctctctccttccgccgtcagcaaggggctggctgtaatggaggaaaaccttggggtgccgctcattcagagaacgacccgttcatttcagttaacagaagccggggaatactttgtttcaagagcctcggcgcttctgaaagaatttgacgatatagtcaatacgacatgtgggtatttcaaccaccctcacggtgccctgcggatcacctgttccgtggctttcggttatgctcatttaattgatatttttgaagagtatcgtaagaaaaatcatgacgttgagttaatcctcgatctcgacgaccatctgacgaatctcaatgagaataacgttgatatcgcgttgcggatcaccgccacgccaccacaaaattatgcagccaggaagttatctaaaataagctggctatattgtgcttcacctacctacctcgcccgaaatggcatcccgaccaaacgtacggagcttgcaaaccatgagtgcctcgtatatcccggcttaacgccaccgcttcgctacaacgagatcgtatcccagcatccacagtgcaatatcaaatccagaacgcctgtgcaggctaatagcagcctgttattgctcaaggcggctctctccggacagggaattgcctggcttccttcctatcttatcagtcgacacattgataacggagagttggttcccctgacgctggatggtaaatgtgcttacccgacccatagtctttatgcgctctattttccgagcaagttccgtaatccaaaagtcagatcctttatcgatttcctggttgaggagaatcaaccctggaatcgttgggaacaggcaatcgatggcctgctttaa

SEQ ID NO: 166999 - DNA, 1005 bp, Enterobacter cloacae
atgattgatctttcgcttatctggtttggcatcatcatcttctccatactgatgtatatcgttatggacggattcgatctgggcattgggatcatcttcccgttcagtcaggatgccgaagagcgtgatgtaatggtcaacacggtagcgccggtatgggatggcaacgaaacctggctggtgatgggcggtgccggtctgtatggcgcgtttccgctggcctacgccgtcatcaccgatgcactggccgcccccttaacgctgatgcttatcggtttaatcttccgcggcgtagcatttgaatttcggtttaaggctacgatcgcccatcgtcctttctgggataaagcatttatctctggttctgttattgccactttctcacagggcgtagtggttggctgcctgattaatggtttgcctgtaaatcatcgtgcttatgcagggccggagctcatctggctggatccgtttgcgctgttttgcggcctggggctcgtcattgcctatgcgctattgggcagtacctggctggtgatgaaaacagaagggcaattacagctgaaaatggccaggctcacgctacctttagtcatggcgttactgggggggatggggatcgttagcctctggacgccactggctcatccactcatagccacgcgatggttcagtctgccaaacctgttctggtttttacctgtccctgtgctggtattggtctgctcatggggagtaatccgctccattcgccgtggagcgcactacttacccttcttattgacgctaatgctcattttcctgggtttttccgggctcggtattagcatctggccttacatcgtcccgccgtcggtcacgctttatcaggcagcatcaccagagagtagtcaggcatttatgctggccggtagcctggcgatcatcccgataattctggtctataccttctggagctattacgtttttcgcgggaaagtcaggacaggggagggataccattga

SEQ ID NO: 167000 - DNA, 1419 bp, Enterobacter cloacae
atgttcgaattagatgcttttcatctggcaaggatccagtttgccttcacggtttcgtttcatattatctttccggcgataaccattggtcttgccagctacctggtggtgctggaagctctgtggttgaagaaacgcgcgacggtatatctggatctttatcatttctggtccaaagtttttgccgttaacttcggtatgggcgtggtctccgggctggtcatggcctatcagtttggcaccaactggagcggattctctcagttcgccggcagtattaccgggcctttactcacctatgaagtcttaacggcctttttcctcgaagcgggttttctgggcgttatgttgtttggccgtaataaagtcggtccaggtttgcatttttttgccacctgcatggttgcgttaggcacattaatttcgaccttctggatccttgcttccaacagctggatgcacacgccgcaggggtacattattgagaacggcgtggtaatgcctcaggactggctgaagattgttttcaatccctccttcccgtggcgtttagcacatatgaccactgcggcattcctggcgagcgcctttttcgtcggggcatccggcgcgtggcatcttctcaaaggtcaggatacgccagcgatccgaaagatgttctctatggcgctgtggatggcggtcatcgttgcgcccgtccaggcttttttgggcgatggacatgggctgaatacgctggaacaccagcctgcgaaaattgccgcgattgaagggcactgggagaatagccccggtgaagccacaccgctcattctgtttggcatgccggatatggcgcaggagcgcaccaaatatgctcttgaaataccttatctcggtagcgtgatcctcacacatagcctgaacaaacaaattcccgctttaaaaagcttcccgcctgctgaccggccaaattccactgtggtgttctggtcatttcgcatcatggtggggctggggctgttaatgattgcccagggcgtattaagcctctggctgcgatatcgcaaaaacctctactcgtcccggcctttcctctggtttgtgatgttaatggggccttcagggctgattgcgatcctggcaggatggttcaccaccgagatagggcggcaaccctggaccgtttatggcgtccagcgcacccgggacgcggtatcggcccacggcagcttacatatgagttttagtttgcttgcgtttatcgtggtttacagtgcggtgtttggcgtgggttatatctatatgatgcgacttatcaaaaagggtcccgttagcgacgaaggtcagcatctggaggaaggagggccaggccagctgcgcaccccggcgcggcctctctctgcgagcagccagcaagaaggagcctgtcatgattga

SEQ ID NO: 167001 - DNA, 522 bp, Enterobacter cloacae
atgagcaaagtacgtgttacaccgtggcaggataacgatcccgttccggctgagttactggctgctatgaaggcccgccggcccggtggcgaattaattggcatcgacaggatattattgaaaagcttcccattggcaaccggctggaatgccttactgggacgggttcgggccgattttagcctcgagctgatctatcttgagttgattatgcttcgcgttgcggtacttaatagcgctgaatttgagtggggcgtgcactacccggtttatctaaaggcgggaggatcggaagcaaaggctcaggcgctgaaacaaaccgagccggaacgcagcctgtttgatgaacgcgagtggacgctaattaccttaaccgatcaatcaaccaaaaaggtggatgtcgatattcaggtgatcgaatcattgaaagccctctttggtgaaaccaaaacggtagaggctgtcgccaccgttgccgcttataacatggtttcgcgttttctggtcgcgctggatatctag

SEQ ID NO: 167002 - DNA, 324 bp, Enterobacter cloacae
atgtccatccgcgagctatcaacagctgaattttctgctgaagttttagacgcttctgttccagtattagtcgatttttgggcgccatggtgccagccttgccgctcggttgcacctgtaattgatgctctggctcgtgaaaacgccggaaagctggcggtatttaaagtcaatattgatgagcagccggagctggcggctaagcacggtattcgttctattcccttctttaagatttttgtgcgtggtgaatccgtcatggagttttcaggcgccagaccaaaaagcgactttgatacgttgctaactaccgttattgattga

SEQ ID NO: 167003 - DNA, 1026 bp, Enterobacter cloacae
atgaaagaaacctataaggccatccaggttacacgtccgggtctacttgaaatggtggagaaagatctccccgagccagggccgggggaagtgctcatcaaagtcgaagcctgtggtatctgtggggcggacgccggggctatcgagggtctggaaaagggcgttgaatacccacgcgttccgggccatgaagtggttggaacgctctgcaaaacatccgatccgttgcccgcatggctgaagccaggccagcgtgtcggggtagggcgtttaggcggacattgcaacgcctgcgaacagtgccgtcttgggcactttaacctttgccaaaaccagccggtcaccggcagctcacgtgacggggggtatgccgaatatatgctggcgcggaccacggggctggttgccatcccggacgatctgtcatccgtagaagccgcaccgctgctttgcgccggtatagcgacctttaacgcccttaaaaaatcgcatgctcaggctggagatactgtcgtgatccagggaatgggcggtttaggacatctggccgtgcagtatgcccggagaatgggttttcgtgtcatcgctgtgggcagaggtgacgatatcgcggacgaggttatggcacttggcgcgcaccactacgtcgacacacatagtcaggatgccggggaagcaatcaaagcgcttggcggcgcggaagtgatcttgtcgaccataacggatagttctgccgtatcggcgttgttaccggcgctagtgccgcaggggcggttaatgatcgtcggcgtaggaaaggagcctttgacgctgatgccgggtgtaatgattgggcgagaattaacggtcaggggcgctattaccggtacggccattgagttagaaaaggctctcaagttcagcctgctgacaggtgtacgagccatgatcgagacgaggcctctggctcaggcgcaggaagcctttgaaaaaatgcgcagcggtcaggccaaattccgcatggttctcactctggaccatagctaa

SEQ ID NO: 167004 - DNA, 1074 bp, Enterobacter cloacae
atgatggtaaagacccaggttgcgattattggggcggggctcagcgggctctatgcggcctggctgctgcagcgggccgggattgattatgttgtacttgaagcccgcagccgcgcaggtggccgagtcctgccggctgctaattcatgtacagaccttggggctacgtggctctggccggggatccagcccgcgctatccaggctacttgttgaactgaacattgagatttttttccatcaagaaacgggtgacatgctgattgagcggacaatggataccccttcgcgtcatccggcatttatctcttcacccgcggcggctcgtgtgcgtgggggaatgtcaaaacttactgatacgctgttggcgcttctcaatcctgaatgtgtcgtcatggatgtgcaagtaacgcagattgaaaaaaataacggaacgctgactgttcgtggacacaatgcagatgaacaggccgtgatcctgcacgcccaacacatcctgctggcattgcctccgatgctggcagcccggatcgcatttgctcccgcactgcctgaacccttgctacaggcgtggcgtaatactggcacctggatggcgccgcatgccaaatatgtcgcgctctattcccgcgatttctggaaacaaaagggcctctccggtgaggcacgaagcagcgtcggccccatggtggagatccacgatgtttctgagccggatgggatgtacgccctgtttggtttcatcgggctaccgtataacgcgcgccgggccatgggagataccgtcttactcgagcagtgcagggcgcaactgacgcgactatatggccccgaggcagcatatccccgtgctgaattcatcaaagactgggcggccgatccttttaccgcaacaacgtatgatctgtctttgcaggcgggccattccgtaccgccagctttggtggatgatgggccctggcgacacgcagtaaccggaatcgccagtgagtggtcaaccgcattcccgggctatcttgctggcgcgattgatgccgctgccgaaggcgttcaacgaattctaaacgagagataa

SEQ ID NO: 167005 - DNA, 672 bp, Enterobacter cloacae
atgttgattaaccacgattttacccggcgcgttaccgttgccagtgacgattaccactgggttcactccccgcagggaggggttgatcgtgtgatgctggatcgcatcggcggtgagcaggcacgtgcaaccagccttgttcgttatttgccgaagacctctttcccataccacgttcacccgggcggtgaagagattttggtgctggatgggcggttttcggaaggtgaacgagattatcctgcaggctggtatctacgcaacccaccgggttcttcccatcagccccacagcaccaacggtacgctgctgttcgttaaactcggccagatgagcaaaggtgaaaataatgcgctgcgtatcgatacccgcgatggagcaaactggcagaagggagaggggatttcgacttgcccactgtttgaaaatgcctgtgagagcgtctgcctcttacgcatggcatccggcacgctcctggttgagccgtctctgccgggtggagcagaactgttgctcttacagggctgcctgattgaaggcaacagtattcatgccgaaggaagctggatccgcattcctgccaggcagcggctggcgtttattgccgaaaaagataacaccctcctgtacctgaaaaagggccatctcggcgctatgcaggaacttcaatga

SEQ ID NO: 167006 - DNA, 342 bp, Enterobacter cloacae
atgtctttaaactggactgaaatgcgaaaagagttacgtgccgctatcgggaaatttgcaggtctgcaacccgatgtgatgcagggcatcgataaaatgcaaaacggtgcggcggctacaggtcacctggatgccaaaacccacgagctcattgcgctggctgttgccgtcaccacccgttgtgatggttgcctgtcggtgcatgccgaagctgccgccaaacacggtgccacgcgcgaagagattgccgaggcgctgggtgtcgccattacgctgaacaccggggctgcgcttgtttactccagccgcgcgcttgatgcatttgattcattaccaaaataa

SEQ ID NO: 167007 - DNA, 282 bp, Enterobacter cloacae
atggcttacttgcagatcaccctcgatatcagtgaacaaaacagagctgctgctgctgctgtttaccaaaaatataaagcacctttcctctcaacaatcgatggcgcggtctctaaagagctgctggtacgtgcagaagatgtgcaggtattgcatggctttgagacggtcgcacaggccgaagcatacctcggatctcagctattcactgcggatgtggttgaagccctgaagccttatctgaacagtgcgccagaagtacgtatctattccgttgcctga

SEQ ID NO: 167008 - DNA, 963 bp, Enterobacter cloacae
atgaaggtacccgttcatctcaatgcgctacgtgcttttgaagccagcgcgcggcatcagagcttttcgcttgcggcagaagagttaaatgtcaccccggcggctgtgggtcagctggtacgctcccttgaagaagttgttggatttccactgtttcatcgcagcaataaccggcgagctgcccttctgctgacagaacccgcgcaacgggcgttaccggatattcgcgccgggtttcagagcctcaatctgggtatgacgctgcttcgcgaaggggccaccaacggtattcttaacgtcactatcagtcctgcttttgccgccaagtggttgctgccgcgtatagaagattttcagcaacgctggccggatatcgatgtgcgtctggaaaccagcctgaagctgctggattttaccgcgcagggtatggacgtcggtattcgctacggtctgggacactgggaaggattgcaggcagagctattgatgtcggaagaggttttcccggtttgtgccccctctttgatggcagtaaacccggcgattaactgcctgactggcgtcacggagcaaacgcttattcacgatctgtcgatggagcagcataaagacttcattacctgggatagatggttacgccgtttcaacgttcaggccatcgcccgtaaaccaggcctgcggatcaacagctccgctgcggtgctacaggccgccgttgagggccatggtatagcactggcgcgcagcattatggtcgatgaagatctcaaaagcggacgtctggtccggttgtgcccggaggtttccctcgccagcccgctagcctattaccttgtgcatcggcctggttgcgacagcctgccgaagatcgcctatttccgtgaatggatgattgagcaagctcaggcatttaataatgcggtaaatcacggcaatctctccaggaaaatcgaaccactgtaa

SEQ ID NO: 167009 - DNA, 1371 bp, Enterobacter cloacae
atgaatcgcacaaacatcgttgatgtaaaggcgtggatcgatgcccgacccatatctcgttttcagtggcatgtcctgctcctttgctttcttatcattatgcttgatggttatgacgccgctgtcatgggctttatcgctcctgcgttaattgaagactggggtattagtcgcactcagcttggcccgatactgggtgcagccatgttcggcgtcgctgtcggcgctttggtcgcaggaccgttgtcggatcgttatggtcgcaagcggatcctgctctggtcagttgctctgtttgcccttttcagcctggctgctgctgctgcgcagagtccgctacaaatggccatgatgcgctttctcaccgggttaggtttaggggctgttatgccaaactgcgtaacgctcgttgcggagtacatgcctgaacgccgtaagggcttaatgattaccctgatgtacagcggatttaatgtcggctctggtctgggtggatttattgccgcaggtctgctttcgcactacagctggcattcggcgctgattttcggaggtgtgctgccactggttctgcttcccataatgatcgtcatgctgccagagtcggctatgagcatggtagcccgccgagtgccaacaataaaaattgcgcacgtgctgaatcgtctgggtggaaacttcgatgaaaataataagttcacattaaatacaccgcagatgccgcgcagcagtaaggtgatccaactgtttcgtcatggatacgccaggggtacagttgcgttgtgggtgacttattttatgggactgtttgtcatttacctgcttaatggctggctacccactattctgcgctccgggggactctcactgcagcaggctgcgatcatcaccggtctgttccagctgggggggccacttggcggtattattgtcggctatatgatggatcgcactgccgcgaaaaaagtcatcgcccttacttacttccttggttgcctgtgtcttttaacgcaaggactgatggatttcggctccgtggcgctggcggtgctgattttcattagcgggatgtgtattaatggggcacaaaatggtcttcaggcgtattcccctgcctattaccaaacggaaattcgcgccactggtgtaagctggatgcacggcatcggccgcacgggagcgattctgagctccacgcttggcggcgtcatcatgctggccgtcccggggcactcgtccatttttctggtactcgcactgccggcatctctggctggtatcgcgattttgctgcaccgtatgaaccgaaaagagcctcgtgcaacagaggcagaactgagcgcactgtcgcaaaccttgcataaccgataa

SEQ ID NO: 167010 - DNA, 1263 bp, Enterobacter cloacae; identical to SEQ ID NO: 111504

SEQ ID NO: 167011 - DNA, 1191 bp, Enterobacter cloacae; identical to SEQ ID NO: 111505

SEQ ID NO: 167012 - DNA, 714 bp, Enterobacter cloacae; identical to SEQ ID NO: 111507

SEQ ID NO: 167013 - DNA, 1083 bp, Enterobacter cloacae; identical to SEQ ID NO: 111508

SEQ ID NO: 167014 - DNA, 876 bp, Enterobacter cloacae; identical to SEQ ID NO: 111509

SEQ ID NO: 167015 - DNA, 402 bp, Enterobacter cloacae; identical to SEQ ID NO: 111510

SEQ ID NO: 167016 - DNA, 1545 bp, Enterobacter cloacae
atgccgcagaaaaaacctacaacctggcaggaagtgaaaccaggcgcaacgcaccctcaaggatgggatgtacctcccataaatgatttacgttccgccattgagttacttaaaaaacaccctgaacagtatatcgaaaccgacagggaaacggatcctatcgccgaactggcgggtgtgtatcgttatgttggtgctggcggtaccgtaactcgccccacgcgtaaggggccagcaatgatgtttaataacataaagggatttccggggatgcgggtgctcgttggcttgctcgctagccgggatcgcgtcagcatgatgctcggggcaccagtacgtgaattggggatacagatggcggaggcaagacgcaatgtaactccgccagttattgttaagggacaacaggcaccctgtcaggaagttatttatcgtgcggaggatgaaaattttgatcttcggacactattgcccgcaccgaccaatacccgcgaagatgcaggtccttatttttgtctcggattagtattgggtagcgatccagatgaccgtgataatgttgacgtgactatccaccgtttgtgcgttcagggaaaagatgaactgtctatcttctttgcgccgggacgacatattgatgctttcaggcagaaagcagaagctgcaggtaagccccttccggtgtcgattaacatggggttggacccagcaattcccattggagcagaatttgaagctccgactacaccgtttggctttgatgaactctgtgttgcaggtggtctacgtggtagaccgatagagcttgttgaatgcgttagcgtgcgccagcgcgccattgcaagagcagagattgttattgagggagaaatacttccaggtgtcagagttgcggaagatcaacacacccatacggggaaagcaatgccggagttcccgggttatacaggtgatgccaacccatcattaccagtgattaaagtcaaagctatcaccacacggcgcaaccctatacttcagactttagtggggccgggtgaagagcacgttagtctggcaggtatcccgacagaagcaagcatttatatggaatgcgaggatgccctaccgggcctgatcaaaaatgtctatgctcacagcgcgggtggcggtaaattcctggcaattttacaagtggctaaacgtaatagtggtgacgacgggatgaccaggcaggctgcacttatcgctttggccgtatatcgcgaattgaagaatgtctttttagtcgatgaggatgtcgatctttttgacagcgatgatgtgctatgggctatgcagacacgtttttctggcgatcttgatacaatcttcatcccaggtatcgcgggacacgtactggatccttcccagacgccattatacgatcccaggataaccgccaaaggaacaacgactaaaaccgtctatgactgtacagttccattccatcttagggagcattttgttcgcgcgcagtttaaggagcttgacccgacgttatgggtacctgatttgtataaatga

SEQ ID NO: 167017 - DNA, 729 bp, Enterobacter cloacae
atggcagaattacagggtaagcatctcttaattattggcggcagttcggggattggttttgaagtggcccaacgtgccggtattgaaggcgcaaccattatgcttatggggcgaagccaggaaaagcttgacgaggcgcgggcattactggctgcacaaggaattaaggtgagtgagttgatagcttgcgatgcacacgaccatacagccttaaacagatgttttaaaagtatatcttcattcgatcaccttgtctcaatggttggagatgcaatgggtggaggttttctggcagcagatatgtcgactatcgagcaagtcattcattcgaagtgccttaccaatatattaattggtaaacttgcatctaaaaagcttcacgaaggaggttcgatcacttttacatcgggtactggtggaaaggcgcagcatgcgtgtgcaagctatattggtaatcttgctattcaagctctggcacaaggattagcagcagaaatcgcccctaaagggagagttaataccgttgcccccacctggactgctacgcctttctggcgcaaggtatcgccggatgaggtcgaaaaaacaaggcagcattttgcaaaagttataccgttgcagcgtactgcaaacgttgaggaactggcatcggcctatttatttctgatgaaaaatgattttattaccggacagcaactggcaattgacggcggcattatgcttggctag

SEQ ID NO: 167018 - DNA, 717 bp, Enterobacter cloacae
atgttaatcggaccgtatgttaacggtgctgcagtaattgtaggcggcctgttgggtgctattgccagtaaagcaatctctgaacgggttaaaagttcactgccgcttatttttgggttatgttcaatcggtttgggtattaatctcgtcattcaagtgaaatatatgcccgctgttgtactggcaatgattataggcaccgcaattggagaagttctttacgtagaacgaggtattggtaaagcagcaggttccactcgctctcttattaatgcggtgttaccaccggtgaaaggcttatcgcaagagcaatttaccgaaaaatttgtagcaattcttgtgcttttttgtgccagcggcactgggatttttggagcgatgcatgaagggatgacaggtgatccatcgattctttatatcaaaacggtgctagatttcttcaccgctggtatttttgctacaatgctcggtttcgctgtcatgaccattggtctaccattaattattattcaggtggcgttggcgatgctcgcttcgctgattcttccaatgatttcatcagagatgatggccgatttttcttgtgccggaggtcttctgatggtcgcgactgggttacgtatttgcaatattaaaattttccctgtcgcaaatatgttaccagcacttatcttggtcatgccattatcttggttgtgggttcaactcattgtttag

SEQ ID NO: 167019 - DNA, 600 bp, Enterobacter cloacae
atgtcatcaccacgcatcatcgttggtatcagcggtgcatcaggtttccagtatggtgttaaagctctggaattgcttcaaaatcgggggcttgaagtgcatcttgttctctcaaaaggcgcagaaaaaacctgtgaacttgaaactgattaccgtcttgaagaagtgctggcgaaggcagatgtcgtgcactccataacaaaccttggagccgctatatccagcggctcgtttcagacgctcggtatgatagttgccccttgctctatgcgaactctcggttgcattgctcatagtctcaccgataatttgctgacccgtgcagcagatgttgtacttaaagagcgacgcagactggtattaatggtaagggaaacaccgctcaatttaagccatgttcgcaatatgcaagcggtaacggaaatgaatggcattattttcccgccggtgcctgcattatatcaccgacctcagacagtagacgatatcatcacacatagcgtagcacgtgcgttagatctgtttggtcttaatatgcaagcgatacctcgttggggcgaagcggaattgccagcgcaaccagacagcgtcagcgtatga

SEQ ID NO: 167020 - DNA, 1488 bp, Enterobacter cloacae
atggaaaaaattaaacagaataaaattcatgatctccgctctgcgctggaactattgcaacgtactccaggtgaatacgttgaaacaaatgtggaagttgatccacaggcagagctttctggtgtatatcgttatgtgggtgctggcggcacctgtgagaggccgacgcgaaaaaatggccctgtaatgatgtttaattctatcaaaggttttccacaaacgcgcgtcgctattggtattaacggctcacgtaagcgagtaggtcagttcctaaattgtgctccagaaaaattggggcatttattaaaaaactcagtgctatcgccaattaatccagttttggttgaagatgaaaccgctttatgtcaggaagtgattcattacgcagaccagcctgattttgatctccgtactctgttaccagccccgacaaacaccgaagaggatgcgggaccatatatcactatgggcctgtgttatgcctccgatccggatactggcgagtcagatattactatccatcgtctctgcgtacagagccgtgatgaactctctatgtggttaacgcctggacgtcatatcgacgcgtttcgtatgaaagctgaagcggcaggcaaaccgctgccgatatctatcagtatcggtgttgacccagcgattgaagtcgcagcttgttttgaaccaccaaccactccactaggctttgatgaactcagtattgcaggcgcattacgtggccatgcagtagaaatggttaaatgtaagacaattaacgagcgtgctatcgcacatgcggaaattgttattgaaggtgaattactaccagacgtaagggtacgtgaggatcagaataccaatacggggaaagcgatgccggaattccccgggtacaccggtgaagctaaagctgctttgccagtcattaaagttaaggcagtgacacaccgtcgtaaccctatctggcgtaccactatggggccaggtgaggaacacgtaaacatggccggtatcccgacagaagcgagtatcctcgctatggtcgaaagagctatgccgggtaagcttttgaacgtttttgctcactcagcaggcggcggtaaattacttgccgtaatgcaattcaaaaaagctgcagccgttgacgaagggcgtcagcgtcaggccgctcttctggcctttgcagcattcccggaactcaaacatgtcatcctggttgatgaagatgtggacatttttgacagtgatgatgtgatgtgggctatgcaaacacgctatcagggggatgtggacactgtgtttatacctggtgtgcgatgccatcctctcgatccttcccaggcagcaggttacagtccctctatcacccaagatggtatgtcttgcaaaactattttcgactgtactgtgcctttccatcttaaggaacactttgagcgttctcgcttcaaagaagtagacgtgaagcgtttcctccctgatttccagtaa

SEQ ID NO: 167021 - DNA, 882 bp, Enterobacter cloacae
atggatcttaaacgaataaaatatttttgtaaggtggctgagcatggctcaataagcgaagctgcgcgacaactgaatatggcgcaacccccgctaagtaaacgcatacaggaacttgaagatgaaattggagctccgttattaatcagaaataacaatggagtagaaattacagcagcaggtaattttttttaccagcgcgcgtgtcatcttcttgttcagttagaggatactattcgcgagactgttaaaattgcacatcgagaaaattcatttttacgtataggtctcacacatctttatcaaaattatttcagacctttaattcttgaattgtacagacgtaatcctggaattgagttaagaattactgtgtctgattccagtacccttgaggcatcgcttcatagcggcctattagacgtagcatttattcaaaagccaaataaaaatgatgcttactcttgctatgaattttcacctgtttctacggttgccgtgataaataaaaaacttatgccgcacttaccttcagacgatcttaaactaacagacttctcaacgtttcctttagttttattgcgtcgttatgatggcgctggggtttatgaaaaatttatcgattcaatatcaaaagatggcacatttcctaacgttattatgcatatcacccagcctaatgctatcatcgactgcctcgagtccggactggaagctatttctcttcttccagaatccgaagtaaatgttaatcgtttacaagcatgtgatgtcatacactttggccagcacccagcgtttttttttcctacaatggttaaattgactactacggcagaaataaatgaaatcaataatattttagctgagcataaattttaa

SEQ ID NO: 167022 - DNA, 930 bp, Enterobacter cloacae
atgaaaaattacctgttaaccttgagcatcgctctctgtatgtctaatgtccaatcagtatacgctaattttccgaacgcaatcccccaaggtggtcctactgttaaagagaaaaatttacgccccaactattcggatgtctcgtacggcaacagctcggcaacgcaaactttcgacctgtatttaccagaaggaaatagaggatctttcccgatagtaatctatgcacatcctggggggtttaaatttggagacaaaacaatggcaccatatagtattgtgcatgctcttttggctaaaggatatgccttcgcgagtgtaaattacagattgtcggttgaaagcaaattccctactgcagtacaagacttttttaaagcatctgagtttattacggatcatgcaaatcaatataaaatagatatcaataagatatatttttttggtgagtctgctgggggtaatattgttgcattagcaggattagctgcgaacagtcctctcttcaataaggggaagattaaaccaggtaaatatattttccctaagggtgttataacgttatatcctcctgttgatttttctaaaattgatgagttcaagcacgctcagggctgtaatagtagtgaggcacaaccagaactgacgctggaagaacaatatattggtggcaggttagctgataatcttgataagattcgatactcgaatcctgtaacttatattacaaattcagcccctgcatttttcatcgaaaatggagaccaagattgtaatgttggatctgaacagtcaaagctactatttgatgcattgaataaaataaatgcaaaagtttactactatgaacttgaaggcgccgggcatggcggtaagcaatttgaaaccacagaaaatattagtaaaatcattgactttattgagaaataa

SEQ ID NO: 167023 - DNA, 1395 bp, Enterobacter cloacae
gtgagcagaaaatttcaagtaaaggcaattccaagctcctggttggaaaacaatggacgtcgtctagactgcggaccttacatgtctggcgcgatagaggcagctgaactaatgaaacagtttagtgcggagccgcttgagagtcttaccactgacatatttcatgctggacgggagggaaggcaatatgtattggatgctaaacatggtgttccctttatgggcagcacagatattttggcctttgatctatcctatcagccgctgctgtctaagagacaagtgagcaggaatcctcagttcactatacggaaaggttggacgctgattactcgctcaggaaccacaggtagaatggcttttgctcgtgagagcatggacggtatggcatgctctgaacacgttatgcgaatagttccagatgctaacaaagtaccggaaggctacatatttgcttatctatcatctcgatttggtattccattggtagtgtctggcacgtatggctcaataattcaaagcattgagccacaccatgtcagcaatttacctgtgccaagattgggagagatagaatctgtcgccgaccagttaatacagagagctggggctcttttgagtgcaagtcaatcaaagttgaacgaagctacccagctctatttcgatgctgttggattatcagatatttcgccaactgactggcattcttggggaagtgaccttggctttaccacctcagccaacgttaagtcattgagggcattgaatttcaatccccgttttgaccgtctttgttcccaaatcaaaaaaggcccatacaagttgcttggagatatatgctccgaggggacattgcggcgaggcaacatcttcaagcggattgacgctgatcccgaacatgcttaccagttgattggtcaaaaacaaattttttggcttcgaccagaaggtcgttggatttcaaaagcttctgccagagatgaggttattgtcccggacgaaacgattctggtagcggctcaaggtacactaggagaaggagaattattctgtcgagcagagtttattactggagactctcttgatagagcatattctgagcattttttgcgagttattgctgacgagacaaaaatggagcgaggtgcactattcgcctttatgcgctcagaaatggcatttagaatgctgcggtcctcttcgacaggaagcaaacttcaagactttcattatgcagttttaccgtctctaccaataccgtatccagaacaagcagttcgtagaaggtgtcacgagctggtcattgaggcttaccgagtacgtgatgaagccataaggttggaagatgaagcacgttcccttgtcgagcgcatcattgaggagggaggtcgctaa

SEQ ID NO: 167024 - DNA, 2019 bp, Enterobacter cloacae
atgaacgatcaagatgacattcttgaaacctcgcaggatgctgccgaagatagtggctcgaataattttttcatcaatatcctgaccggcaacaaagagagtgcctccgtcaagaagctattggtacagaaagttttacgtcagtttattgaaagctacgggttcgaccgggatgatctggaggtgaactataacccccagatccccggccaagggcgcaagcgcatcgacatcgctgttttccaccccgatgctgagcacaacaacgataatttgcaacggattatcgtctgcaaaactcagaagaaacgtgacaagctccgttccattaccgaggccgacaccgacctgcgtgagcttaaggagctgctggaactgatccctagcgcgacgctgggcatgtggaccaatggtcaggaagagttcctgttccaggtcgaacgcacccggtttgaagtccgtgccaagccgttaggtgtctggccggtgccgggagaacgtactgccgatctcgaccgcaccggaggtgtcattcaggtcagtgccgaagcggaagacctagaagatgctctgctgcgttgccgtcagtatctgaaccgtaacttggggctcgatcacaaagattcctttaagcagttggccgtgctgatgttggccaagatctttgatgagaccctgtctgctggcgagcgtaaattctggatcaagggtgacgagcctttcaccgaggctggtcaacaggctgttgccctgcgcatcagcgaatccgttgccgccgctaagacttggcagccgaacctgctggctcgtggttgggatctaactctggaacctcatgaaatagcccgcgtggtaatggagttagctcgctataacttaagcgaaacccagccccgtcaccgcaccggagcctttcgagcggtcgtacgcagtgtgatggatggccgcgagggccgctatcccacgcccctaaacgtggccgaaatggcagtggagatgctcgacccgaaacccagcgaacgcgttatggattgctccagcggcactggcactttcttggccatgatcgccgtacatatcttcaagaagcaattagcggctatgggtactactcctgcagaagcgactagcgaacagctccgtcaggcacaaaacgaaaccgccgcttgggccgccagcaatgccttgggctgcgacattgatccttttctggctgtggccagccgcatgaacttgctattcacaactggcaatcccggccgtgtgtttcgtatagatgcccgtaccttcccagacggcgatctggatggtattgaagccgccagctcagctataccgttaggtagcatggatatggttctacttaatccttggttctcaactcaagacatggtgagcgacccctctattctggcgcgctatgacttaggcaacaactgggagcgagatgaagaaggtggattccgcaacaccggtaatcttaacagcggtggcgttcctcccgaggtgctgtttatcgagcgcgccctacagtgggtgaaacccggcactggccgtgtgggcatcctgttgcctgacggcttgttgggcaaccctagcgatgaatacgtgcgctggtggattttgcaccactgcgaggtcttggcctcggttgacctgccggtggagccttttaaagtcacggtgaaggaatatggtctatcacccgcactaccgagtttattgatcctccgccgccgtagtcaggaggagctgatcaatactgaacatccggaatatagagtgttcatggccgtggtggagcgagccggggttgatgcccgggggaatctcctgttccaaaaggcccccgatggtgaagagctggtttttgatgaagatgtgaacgagcgggttcgtgaaggcggcgaagtggaaatccgtagggtcacgcgtcgcaaccgccgcattcatgacgagctgccgctggtagctgataaatacaaggaattccgcataaccggcgaggtgatattgtga

SEQ ID NO: 167025 - DNA, 240 bp, Enterobacter cloacae
atgttccgactttactggttatatgaattaacactacaattaggtctgaagtattttcaatacattctgacgccagtaggcttgtttagagaggtgtatatacattacgacctgtcttatgaagagaatggtttcagtctcatttttgttgtttccaaaaaaaatacagcttatttccacttgaaagactgtataaacgaaaatggtgtagctattcagaacctatctatgacaaagtag

SEQ ID NO: 167026 - DNA, 177 bp, Enterobacter cloacae
atgacccccgaacagttccggcactggttttcctcgctgcctgaaaaataccagcgcgtagcccgttccatgtacgacgacgcccgcaagacgggaacacacaccgcttccagccttgcgctgattcacacgttggttactgaccagatcaaatttgattcggagtttaatttatga

SEQ ID NO: 167027 - DNA, 645 bp, Enterobacter cloacae
atggaaactatcaatacaaaagaaacatgcccttctgagttttatattttcgtaaacgatatgaatcctataacacataataacgtcaatattgtaggttcaatatcctcagcagctatctcagctttagccatgaatggaaataaccctcaaaaatatatagacggtgatctagactaccttccatttttaccaaatgaaaacatgttccctgcattgtccatgtatcatgttagtgcaatcaatgactatcgcattgagtataatgcagaaataaatagaaaggcatatttcaaaacatatccctccagactttctgctgtatacgcgtttggtgattatgatacttgcgtcgaggtacatcaaaggcataattgggatctaaatactgttcgacgttttcgattgaaggacttaccctatacacgagtagcaaaagttaatatggaaatagtctctttaatgagacacgcatataaaatatcaacatttgagtctgactacgaagtatggcagcattactggagtgggcaaggaaacctaggactacaaatcccagaccgtgatttcaaaccccagcacatcgaaagcggtgttatttgggagtatttgatagaaggagcgctagaattaattagagaataa

SEQ ID NO: 167028 - DNA, 264 bp, Enterobacter cloacae
atggaaaagacgggatcaatcaaaaaggtactgggtaacagaatcagggcgctacgccgtgagatggacctgtcccaggaagcttttgccgataagtgcggcatcgatcgcacctacatgagtggaattgagcgaggagtaagaaaccccacgcttgttgttatttgtgcaatctcggacggtctggggatggatctcagccatttatttatgtttgacgataccgcagaaaaagacggagaatcaacggattgtgactcatag

SEQ ID NO: 167029 - DNA, 471 bp, Enterobacter cloacae
atgattacaagtaagaatattaaaaaaacaacaatggaacttgcatttgagttcttttattggttttcgcgttttgaattttgcttaaaagaaaataaatttctagaatccgagaacgaagggagcaaagcgaaaccgggatgggataagtttattaataaattttcacagcaatatacgcaatcgaacaatgcgaagaaatttgttagtttaaaaccattacagcaaaaagtcggaaagaatagttctgtagtatggggcgatataaatttagcaaatgacaatgaattacagcaagttgtaagaactttaaaaacaataagaaataatcttttccacggtgggaaacatagtgttgaaggatgggatgatattaagcgaactgaagaacttttagttatgggagtgcaggtaatgaaagagatagttaaaatggctggctgggaagatgatttcgaacgcatttattag

SEQ ID NO: 167030 - DNA, 309 bp, Enterobacter cloacae
atgcgacatagtccattatttctgttactgacttttcccatagggtctctggcctatgcttccccggaatccacccagctagccctcgcgctgaagcaactcgagggcgtaaaaacctcgctggagcgcgcccggagcagcgccagcagcgatccacaatcgcgctatttcttcgactatttacaggcgcagcaggacatatccgccgttgagcagggcatccgtctctatcttgccccggcaagagcgcagccgcgtgccgtccagcccctgagcgccagctaccaacgggagaactccgatgactga

SEQ ID NO: 167031 - DNA, 633 bp, Enterobacter cloacae
atgagcgagcaacgggccccaccttcgcctccaccacaggggccggtcggttggctactgtcgctggccggacggtttatcgggttggttattggggcgctgatgttgcgggtggtgctggaactggcggggctgtatttctggtggccgcaggagggaagcaggcatgtttctatggtgatgaagcaggagcaggctgaactggttattgcgttgcagccgcaccctctggggaatgaaattctggtgctgctggaaaaaggagcaactcacgggattatggtaaacaaacttctgcagaaacagttcaccgccctggcttatacgctggtgagttttatgcagcgcctaatatggcttgccgccatgctccccctgctttgcctgtgtgcggtaatagggctgacggagggactggtgcagcgggatttaagacggtttggctccgggctggaatccgtttttctccaccgttatgtcatcagttccggcagttcagtcgccaccacgctgtgggtgttttatctggcgcagccgctatttctgcctgcaatactggttttactgcctgccgccttctggtttggggtaacgatatggatagctgtagggagtttcaagcgctggttataa

SEQ ID NO: 167032 - DNA, 348 bp, Enterobacter cloacae
atggtaggtgtatttatccccctctttcttacagatatctttcagcagactgtccaggaatttacgtgccaaggtagcgccgaggtcaaaaccgaaaagggagacagaaatgagtttaacggggaccgggctttttttaacggcttctttgtatccctcttcaaacgttattttggtcgatacaatacgggtatcggcgccagtcaccagcatatccgctattgtggggttatcgcgcagccagggggtggcttcgatactgacttttttggccgcattttttgcagtgtcgaaggccagatttttccattccacagggttaaggagtttcttaccctgatgttttaa

SEQ ID NO: 167033 - DNA, 1203 bp, Enterobacter cloacae
atgtcgaacagaggtatccagcctttccagtttgcatgtcccgtttgtgaagaaagaataacattcacattcggctcagaaaatggagagcttattggagcaaccgatattatagactttgaagcgccctttaaaggtgacaatccctttgttgatctccatttggattttcctgtctattatgggaaatatgtcaaagggatgacaacttttttcagagtcttagacgaaatagggcatgaagcatttgaacatctttcttttcgccttgaactgcttaataaattacaccctttaaaaagagatttagaaagagttattacacaatttaaaaaaggcgatattgataactttgcaaaagtatgttcccgcatcccttgtgttgagcttaaaagtcataagaaagaggatgtcttagccgcactatatagtgcaacttcaattatgtcgtctccttttactatacacgagcaaaatgaagaattagttgatggctttactaaattattcatttatctgcatcaaaaaaatgctgatgcattaataggtatgattgataaaattattgacaataaattcttagtcaatctacatcatgattgcttaagtctttatcctaaaatcgttgaaatggatttgccattacgtccggcatttttttatgattatgtcgaaaaagaaaattttggggccgtacctgctcgtgtttccactgcttattttgaactttgtaataatcaatataaagatttagcagaagtattttcgcgtcaactgacattacttgctggtttgaacaaccttctaaaacgtggtgattttaacgagtttgaaccaactttgaaaaaaccaattgataaaaaacctctgagagaacttcaatctctagatagctttgcagatgttgatcttggtaagaaaataaagtttatagatgattgtttttactcaatagatatgaatgcaattgataaccgacttagaaatggtattgctcattataagtatgagtatgtggagtcaacacaaatgataacgtattatcccacaagagaaggtatggatagaacgaagggggaggtgctatcatttatggagtttctccgtaaaaccctactccttttcagagaggtgcataatttgaaccatcttattaaatcaacacttttctatagcgtattgattttgaagaagaatgtttaa

SEQ ID NO: 167034 - DNA, 1119 bp, Enterobacter cloacae
atgaatgagacacctattttaatatcaaatttcaaaccattcaggttgatttcaagagatgaatccgatgaatggagtcctagccttgacgagataaataatgctaattacaactatgttaaattgcatagagcaagtaagttctttgatgcaaacttaccgaaaaaaatgccagcatgcttaggttttgatgggagccttatatttccatttattgaagaatttcaaaatgatgactttgttgttgaagaggttaatcgtattttagcatccatatttgttggcggactttatgtcgagtcaatctcacctatggatgtttctagggggacgatgaacgtacttggttactatcgacattcttctacatatagtagtcgttctgattttcatcgtgctataggagaatgtgatgctggaacattagcttctattaaattgttagagcccgaagtaataaatgctgatgtaattatttctgcttataattatggtcatgttattctctctaaaataccaaatctatctccctctctttttattggttcgtttacatattataagcatcaccaacttagagaagctctagcacatgcatggatcagtattgaacaaatactggagtttatttggaatacaacagtaattgaagatgcaaaatctgtaaatatactaaaaagacgtaagtttcttgagtcgcaacaatggaactcagcgcataaaattgaaatgctctaccagaatgattttctatctgaagatctctatgtatatttaaataaagctagatttgcgcgtaatgatttcatacataaaggtttaacaccatcgtacgaagactctcattcggcattaatgtccctaattttacttctggaagttacttctaaaataagtgaggtttgtttcgagagatttagacttgagaaaaatattgtagatcattccgttcattgtataccccagacttatatacctaaaagtaataaagatgtcccggtgaatgtaaaatattggagagagttaaaagtaattccaggcgatcctaaatgggagggggaatacgagtctttcgctgatattacattatcagctattaattcgaataaagacaagtaa

SEQ ID NO: 167035 - DNA, 228 bp, Enterobacter cloacae
atgaccacaccgagagtaacccccaggcaggatgaagagcccgttgacgccgatcttctcaacgcgataaaggcccgtcggcccggtggaaaactgataggtattgaccgggtattactgaggagttcccccctggccacgggctggaacgaattgatggtacgggtacgtcagcaattttcgctcagccttgagtaccgggaactgatcatgctgcgcgttgcctag

SEQ ID NO: 167036 - DNA, 1488 bp, Enterobacter cloacae
atgccacgccgctcaatcctgtccgccaccgagcgcgaaagcctgctggcactgccagatgccaaagacgaactgatacggcactacacgttcaacgaaaccgacctgtcggtgatccgtcagcgtcgcggcgccgcgaatcgattgggcttcgctgtgcagctttgctacttgcgattccctggcacctttttgggcgtcgatgagcctccgtttccgcccctgttgcgcatggtggccgcgcaactcaagatgccagtggaaagttggagcgagtacggccagcgcgaacagacacggcgggagcacttggtcgagctgcaaacggtttttgggttcaagcccttcaccatgagccactatcggcaagccgtgcatacattgaccgagctggccttgcagaccgacaaaggcatcgtgctggcgagcgcacttgtcgagaatctgcggcggcagagcattatcctgcccgccatgaatgccatcgagcgcgcaagcgccgaggccatcacccgtgccaaccgacgcatttacgcggcgctgaccgattctttgttatcaccccaccgtcagcgcctggacgaacttctcaagcgcaaggacggcagtaaagtgacgtggctggcatggctgcgccagtcgcctgccaaaccgaactctcgccacatgctcgaacatattgagcgcctgaaatcctggcaagcacttgatctgcccgcaggcatcgagcggcaggttcaccagaaccgcctgctcaaaatcgctcgtgaaggtggccagatgacgcctgctgatctggcaaagttcgaggtgcaacgacgctatgccacgctggtagcgctggccatcgaaggcatggccaccgtcaccgatgaaatcatcgaccttcacgatcgcatcatcggcaagctgttcaacgcggccaagaacaagcatcagcagcagttccaggcttccggcaaggcgatcaacgacaaggtgcggatgtatgggcgcatcggtcaagcgttgattgaggccaagcaaagcggcagcgatccgttcgccgccatcgaggccgttatgccctgggacaccttcgccgccagcgtcaccgaagcgcaaacattggcgcggcctgccgactttgatttcctgcaccacatcggtgaaagctatgccacgctacgccgctacgcgccgcagttcctgggcgtgctcaaattgcgggctgcgcccgccgccaagggtgtgctcgatgccatcgacatgctgcgcggcatgaacagcgacagcgcgcgcaaggtgcccgccgatgcgccaaccgcattcatcaagccgcgctgggcaaagctggttctgaccgacgacggcatcgaccggcgttactacgagttatgcgccctgtcggagctgaagaacgcgctgcgctccggtgatgtctgggtgcagggttctcgccagttcaaggaggggtcagtttggatatcgaaaattattgtacgttaa

SEQ ID NO: 167037 - DNA, 219 bp, Enterobacter cloacae
atgccgacactcgacgcctttctgaccgacgtccgcgcctgcacgcgctgcgcaccgcatctgccacacggcgtgcagccggtcttccagtttcacccgagtgcgcccatcctcatcgccggccaagcaccgggggcccgggtccatgcctcaggcgtgcccttcgaggcactgttgcaaatagtcggtggtgataaacttatcatccccttttgctga

SEQ ID NO: 167038 - DNA, 2706 bp, Enterobacter cloacae; identical to SEQ ID NO: 157166

SEQ ID NO: 167039 - DNA, 372 bp, Enterobacter cloacae
atgataagtttatcaccaccgactatttgcaacagtgccctacaaacggtactgcccgcgctgtggtttgccgatggtccttcgcgtgttgaagtgagcggaggtaccgataacccgtcggccccgcctgcagattttatccgccgggtgctggagccgctgctggcaaaaataggaattcatcagcaaaccacgctgttacgtcacggtttttatcctgccggaggcggcgtggtggcaacggaagtctcgcccgtggcatcgtttaacaccttgcaacttggcgagcgcgggaacattgtgcggatgcgtggagaggtgctactggctggtgtgccacgccatgtcgctgagcgtgaaatcgctacgtag

SEQ ID NO: 167040 - DNA, 216 bp, Enterobacter cloacae
atgacgccagctcccctgtccgtcccggatcagccgtgcaaccggacagcactgccacgacgcgttatcctcatgctcaaaacggatcgccagattaaagcgggcaacagcgacggactcctcttcgctgccaaacgcatcctgaacattgacccactcctcacgatagcggagcggccgatcagccactgccgcttcctggagcacgttatttaa

SEQ ID NO: 167041 - DNA, 483 bp, Enterobacter cloacae
atgtccagcaccccgcctgcggccttctgctgcccgtccgcagtgacaaacagcccctttgcgacgcgaatgacgccgtgttcatcggtccggagttcaaatcctttgccccggtgctgctcctgcgcgtccaccagatgcccgctgttgagctgcgttttgccgtattccgtggcgagtttgacatgctcctccccgcgcttatcctccatccgcagcttgttgttcgccggagtgcgcagcacgttgcgggtgtggttgtcgcgggtcacggggtcggggtgttccgagtcgtgcagcgcatacgcgatgtacggcaggtcgatgtcgccgttgctgtacgcaatcgccacttcggtcccgtcggtcagtggcgtatgccagccgtacgtttctccggcatacggtttcgccatccgcagccacaggtatgcgaagccctgttgcgcatcgttccggtcaaagtccatcctgacgcggtag

SEQ ID NO: 167042 - DNA, 1710 bp, Enterobacter cloacae
atgaacaacgccgaacaacagttcctgaacgagctggataacaaattctggaaagccgccgacaagctacgcgccaacatggatgccgccaactacaagcacgtggtgctggggcttatcttcctcaagtatgtgtccgatgccttcgaggcgcgtcagcaggagctaatcaccttgttccgcgatgtcggcaacccggacaacatctatgccatgtcgcgcgacggttacgactctgatgaagagtacgcacaggcgattgtggatgaactggaggtggaagattactacaccgaaaagaacatcttctgggtgccgaaagccgcgcgctgggacacgctgaaaaacaaagccatgttgccgaccggcaccgtgctgtgggtggatgaaaccaccggcaaggatgtgacgctgcgctctgtgtcctggctggtggataacgcgctcgatgaaatcgaaaaaaccaacccgaagctgaaaggtattctgaaccgtatcagccagtatcaattgggcaacgaagtgttgaccgggctgattaatactttctctgacgccaacttcagcaacccggaatataacggcaagaagctcaacttaaagagcaaagatattctcggtcacgtgtacgaatatttcctcggccagttcgcgctggctgaaggtaagcagggcggccagtattacacgccaaaaagtatcgtcaccctgattgttgaaatgctgcaaccgtataacgggcgcgtgtatgacccggcgatgggttccggcgggttctttgtttccagcgaccgttttatcgaagagcacgcgggcgagaagcagtacaacgccgccgagcagaagcgcaatatctctgtttacggccaggagtcgaacccgaccacctggaagctggcggcaatgaatatggcgatccggggtatcgactttaacttcggcagcaaaaacgccgacaccctgctggacgaccagcacccggatctgcgagctgacttcgtgatagcgaacccgccgttcaacatgaaggagtggtggaacgccaagctggaaaacgacgtgcgctggaaatacggcacaccgccgcagggcaacgccaactttgcgtggatgcagcacatgatccatcaccttgcgccaaaaggttcgatggcgctgctgctggcgaacggttcgatgagctccaacaccaacaacgaaggcgaaatccgccgtaacctgatcaaagccgatttggtcgagtgcatggtggcgctaccgggccagctctttaccaacacccaaatcccggcctgtatctggttcctgaccaaagacaaatccagcggcaacggcaaagcgcaccgcaaaggcgaagtgctgtttatcgacgcccgcaagattggctttatgaaagaccgcgtgctgcgtgactttactcgtgaagatatcgccagaattgccgacaccttccacaaatggcaggcagataaagagtacgaagacgaagccggattctgcttctctgcaacgctggaagatattcagaaaaacgactttgtgttgacccctgggcgctatgttggtgctaccgagcaagacgaagatgatgaaccctttgccgagaaaatggcacgattgacgacgcaactgaaagatcagttggaagagagcgcgaacctagaagcacagattaaggcgaatctgggggggctgggttatgagttttga

SEQ ID NO: 167043 - DNA, 177 bp, Enterobacter cloacae
atgagtaaagaaaattataccgcgctggattatatcaatgatgctattgatgcaattaatagtcgattagagaaacatcctacatttctttatatgttatggagaagaatcagtaagattatattaaatctattctcattggtgttgaaaaatataaaagtaaattacacacattga

SEQ ID NO: 167044 - DNA, 1143 bp, Enterobacter cloacae
atgccctgggatgagagagataccatgtcattacgttctgagtttgttctgttcgcctcgcaggacggggcgaacatccgtgctctttgccgtctttacggcatatctcccgccaccggctacaagtggcttcaccgctgggctctggaaggggtttccggtcttcacgatctgccccgcacgcctcatcattcccccaaccgctcgccagacgacatcctttacctgctgcgcatggcccatgaccggcatgaacgctggggcgcgcgcaagataaagcgctggctcgaagaccagggacaccgcatgcccgccttcagcaccgtccataacctcatggcccgccacggcctgctgccgggaacagtatcgggcattccggccacaggccggtttgaacatgacgcgccgaaccggctctggcagatggactttaagggccactttccctttggcggcggccgctgccatccgcttaccctgctggacgaccactcccgtttctccctgtgcctggcaccctgtaccgatgaacgacgcgagaccgtgcagcagcaactggtcagcgtgtttgagcgctacggtctgccggacaggatgacaatggacaacggtgcgccgtggggcgacacgaccggtgtctggaccgggctggagctgtggctgatgcgccagggtatccgggtaggccactcccggccataccatccgcagacgcagggcaagctggagcgttttcaccgcagcctgaaggcggaagtgctgcaggggaagtggttcgcggacagcggtgaactgcaacgcgccttcgagcactggcggaccgtctataaccttgagcggccgcacgaggctctggatatggcggtgccggcctcccggtatcagccgtctgcacgacagtacagtggcatcatggtgccaccggaatacgacgagggggtaatggtgaggaaggtcgacatcgtcgggaaactgagcataaaaggcatcagtctgaaggcgggtaaggcgttcaggggagaacgggtcgggctgaaggaaacgcaggaggatggatgttatgaagtgtggtggtacagcacaaaggtaggggtgatcgacctgaagaaaaagtcgatcaccatgggtaaaggatgttaa

SEQ ID NO: 167045 - DNA, 258 bp, Enterobacter cloacae
atggtgcatctcaaaaataatccgatgcgccagatagaatttttggtgaagaacaaccctgacataacccttaccatcgcgatttttaacttcatcgcctgcttttacaggccctctatggctatgcttccaaaagagttttccatcccgatattcgaaataatcactccaattcatatctacctcacagatactgaaggccagtgtattccgttggccggtctagccgcttacgggccgcgttttgcttgtcgctga

SEQ ID NO: 167046 - DNA, 579 bp, Enterobacter cloacae
atgtctgatgaactgtcgtggaagcgctggacgcctgacgacctctcccctcccagcgcagagttcacccctgccgttgtgtcgtccgacgagggcgacgccggggcgggcgaacccgagctgagtgaagaggaacagcgcgcccagttgctggcccagatgcaaatgcaggcgcacgaacagggcttcaatgcagggatgaacgaaggccgtcagaccgggcacgcacagggttatcaggaagggctggcgaaaggtttagagcagggcatcgagcaggcgcgccagcagcagacgccggtagtggataacgccgcgctgattaagcagatccaagggctgctccagcaggagccgctgttcagcggcaaaccgcagctgcgcgttcatcctgatgatttgcagcgcgtggaagagagcctcggcgcgacgctgagcctgcacggctggcggctgcgcggcgatccgtcacttcatcatggaggctgtaaggtctcggcggatgagggcgatctggatgccagcgtcgcgacccgctggcaggaactgtgccgcctggcggcaccgggagtcgtctga

SEQ ID NO: 167047 - DNA, 1035 bp, Enterobacter cloacae
atggatgatggtttgaaggagtcggtaactctggctctcaaagagaggctgtccaacccgttatggggttatatattactatcatggatagggttcaactggcagaacatcgcaaagttgtttatgagcaagaaaacagtagaagagcgaataaccgacattatatctcaggattggttttatgttcattttcttgttgcacctttaatactgggcgttttcctggctattatatcaccctatttgaaacaatggctttccgcagcccataaacgcgcagataaaaaacaacgagaagacctgaaacaaaaaatcatagataaatatgatgatgatattgctatagccgaaaagaaagttgaggcaaataaagcccaagagcttgctgaggaaaaggagcatacaaaggtcattcaggagcaagaaaaacagaaaagagaagttctcgacaccaaaacaattgaagaaaacctcaagcaattggaaaagagaaaatacgaaattgaatccgcaataaaaaaattagaagagcaaggggaaaatagaaggcatgagattgaatcctcgataaaaaatctagaagagcagcgagagagtgtacagaaagagactgacttctggaggaatagagtatttgaggtcataaaattagttaatggcttcaataatgtttcagacagccgctcactgaacagtatcaaagatgagctttccagcctattcagtgatgaagagttagagattgctggctatgtcgtagagtaccaggaagagcgaaataaaatcctcatggaaaccatatcaaatgccttatcccttgttaaggacatccgtgagtcgtacaaccaagaacttgattatggcgttaccacgaatatcagcagacacaaagaaatggatttgcttatcaatgagctttcatcgacactgaaaattatcaacaaaaatgtttatatgaataactcaaagaaaaacaagaatataattaacaatatcaaaaacagggctgtaatttcagggacaacagccggatga

SEQ ID NO: 167048 - DNA, 957 bp, Enterobacter cloacae
atgtttattatggcgatcagcgcctggtatttactgcgcggacgggagcgcgatgtcgcattacgctcgtttgccatcggttccgtcttcggtactctggcgattattggcacgctgcaactcggagacagttctgcgtatgaagtcgcgcaagtacaaccggtaaaactggcggcgatggaaggggagtggcaaacggaacctgcacctgcaccgttccatgtggttgcctggccggaacaggatcaagagcgtaacgcctttgccatcaaaattcccgcgctgctagggatcctcgccactcactcattagataaacccgtgccgggtctgaagaatttgatggctgaaacctacccacgcttgcaacgcggacgtatggtctggctgttaatgcaggaaatatcgcaaggcaatcgtgagccgcatgtgttgcaggcattccgggaactggaaggtgacctgggctacggcatgttgctctcccgctatgcgccggatatgaatcatgtcacagccgcacagtaccaggcggcgatgcgtggtgcaatacctcaggttgcgccggtattctggagtttccgcatcatggtgggctgtggctccctgctgctactggtgatgctgattgcgcttgtccagacgctgcgtggcaaaatcgaccagcatcgctgggtgctgaaaatggcgctctggagtttgccgttgccgtggattgcgattgaagccgggtggtttatgaccgagtttggtcgtcagccgtgggcgatacaggacatcttaccgacatactccgcgcactccgccttaaccacaggacaactggctttctcactgatcatgatcgtagggctttacaccctgttcttaatcgccgaagtctacctgatgcagaaatatgcccgtctggggccgagcgcgatgcagagtgaacaaccgacgcagcaacaggggtaa

SEQ ID NO: 167049 - DNA, 1899 bp, Enterobacter cloacae
atgagtgaaaataaactgtttgataattatgagattatagaaagaaatctactaaaaacagagtcagataaaaacatccctgaaataaatcttgcccttaaggatggagagagttacatcattaaatattggcctagaaataccttaagtgatgaacaagtccttgaaagtatttggcaacatgaactacgacaactccaaagattaaaaggatatcctggcgtaggagattatattgtaaatcccgtcgaatcaaaaaaaacaaatgacggatattatctagttttaaactccgatggcagagttcctacatcatatttactaaataaaaagactctatccctccccggaaagagccattggcttacacgattaaaagacccaacaataagaataaggttttggaaaaacatcagtagagttacgagtgctattggtttacttcatgctcagggattactacatcgacatttggatgaaaatgcaattcttacatacaactatgaatctgatgattataatgactttcaactaacgggatttgaatggtcgattcggatgccaacacttacaacggcgaagatcgaacattctggtgaacaagggaaaatatcaacattcgctacagattgggttgacttaggagtattaatatctaagttccttaaaatagaaataaacaagattaaggatcttcactttcccgccgaatactttataactaacaatcaattagcaatcagtgaagtagcaataattcgcagtctcttaggtattcaaccaattcagcaaaatgctatcaaagaacttttaggagaaaaggaaatcctccaattcatagagaggataaccaatgagcttactgattattataaaagaaccaaaactatacacggcattgctaattttgtaaaagatgatttatctgagactcctgtattgtttgtaaataattatgaaaacgattattacgatgtaattttaaaaggtaaagagcttttctatgtgctgacaccatttcaaccagaccatggaacgaatgataaaacgtggaaaataggttactcaaaacatgcttatttagagcttccgaataaatttttcagcaaagaaaactacatagaattaaatagcaacaatattttttgttatactcatcatgaagcaaaaaatttccttctaaacagtaatgactctttaaatctaatgtcttgggatattatattcaaagaaataggaaaaacttacaacaagaaaaatgaagaacatcttaaattattagagggattaactgctgtacatattactaatatcgcctatgctaaggcagaaattttccctgtagaaatactcagtgaagaaagtgactcagaaaatattggctcatggatttttaaattcatatcaaggcttgatgaggcaactgatgagttgtcaaaatctcttagcatagaatccccatcagttaggcttgaaaaaataataaacagtagcgaaaataatgacaagttatcttggagtcttgttaataataaagattttagtagagttgatgatgaaatccttttagagttttatggctttgaaaccgataataaaagtcaagatatttacagtttcacctctaaaaaaccacttcccgattggcgagatctttatattgttccagattctctagaaggtacattgcgtcaaataacacgacatgcaaatacattagacatgcttgaaaatcatgtagaattgatgaatgtaattacttcacctaacacacaccttacagtaagcaatgaagaaatcgttgcagaagatataatggattcattagatgaatctaaacagaaagttttttcaaaagttttatcaactttaccaatgaaccttgtaaaactcacttag

SEQ ID NO: 167050 - DNA, 303 bp, Enterobacter cloacae
gtggtcttggggctcaattggatccttggagcatgcatcggccatcttgggatcatgggcgcgattttttctgtgcttgccaccctttggaattatgtctacaacattggctttgataaagcgatgttggcttggcggggctcagtgctcaaaaccttaccgctgcgtctgctgcatgcggtgatctttgaagccggtctgctggttgcgaccatcccgtttattatgtggtggctgtcgatgagcttttggcaagcactcagtatggatatcgggctagggaaggtgcgaacaagtccctga

SEQ ID NO: 167051 - DNA, 720 bp, Enterobacter cloacae
atgttgaaacctcgctacatgcaaatagccgatttactcactgagcagattaaagatggaaccctgacaccaggcgcgatgatgccaactgaggccgagctacaagccacctatgacgtcagccgagtcacgatacgtaaggcgatgaaggtgttggttgataacgatctgctctaccgcgtcagaggtagtggcagttacgtaaaagcccctaaagcacagcacaacgcctttcaactgatgggatttatcgaagaagtctcagcacaaggcaaaacgccaagctcaaaggtgatcgcatttgaaacgtcaccttgcagccacaccattgccagtaaattaaacgtggaggaagggacgttgatttatgaaatccaacgtcttcgtttgattgatggcgagccagaaatccttgagtgcacctacctgccggtggctatgtttaccgatctcagtatcgaagtgatgcaaacatcgaaatacgattatatcgagcgacataaggggatgcagatcgcgaaaagtcgccaatgtgtctggccagatagcacctccacctcactcgccgcgctcctcaacacccgtgaaaattcgcccatattaagggtcgaatcagtcagtgagcttgtcgatgggacaccgtttgaatatacagtgaactacttccgcttatatcagtacagctttgaattcatcgctcaccgccaaacaccacaatga

SEQ ID NO: 167052 - DNA, 1329 bp, Enterobacter cloacae
atgatgaaaccacaaaagctcactatcgtcgggggtggaagcacctatacactggggatgatcaatagcttgattgctgaaaaagaggcatttccgctcagcaaaatcaccttctatgatattgatgaacaaagacaagcctcgaatgccaaagcgacggagatcttgctgcgcgaggcttatcctgaggtcgaagagtttgtttataccacggataaagaaacggcattctcagatgcagatttcttctttattcagatccgcactggtggccttgccatgcgggagcttgatgagcagatcccattgttttacggttgtgtgggacaagaaacgtgcggcgcgggtggcatggcgtatgggctacgctcgataggtgacatgattactctcgtgaatgacattcgtcacttcgccccggatgcctggattttaaactatacaaacccagcagccattgtggctgaagccttgcagcgcgaatttcctcatgacaaccgcattctaaacatctgcgatatgcctgccgccattatggtgagttatgcacaattactcggttgcgagatctgggatttggtgccggaatactttggactgaaccactttgggtggtttaccaaggtacgaaaccgagaaggggtcgaccttaccgctgagcttaaacgcatcattttggaagaggggatcagtgctgttgacccagaaattgctgatgacccttcatggcaggcaacgtttaaaaacatgcagaccatgctgaaagacaatcctgagtacttacccaatacttatctgcagtactacttgtatccggaaaaaatggtagaaaaagaagatattgctaacacgcgtgcgcgccaagtaatcaatggacgagaaaagcgagtgtttagcctgaatgaacgcatcattgccgcgggcactaccgctaatgaacatcttcatgcagacatccatgggcgctatatggtgcgtgtagcggcctccttggcctataaccgtggcgagacgtatctggttatcgtaccgaatgatggcgcgatcccaaatattcagaatgatgccatggtggaagtgccggccgcgttaaccaatgacggcccgaaacgctttgcggtcggaaccatccctacgttccaaaaagcactgatcgaaggccaactcggctacgaaaagctggtcgtggatgcatggtttagcggggatcgacaaacactggtcaatgcgctcacgctcaaccgaaccgttgtggatgtgccaaaagcgcaacaaatcgtcgatgagcttttacgtgttaacggcgactatctacctcaatttcattaa

SEQ ID NO: 167053 - DNA, 1557 bp, Enterobacter cloacae
atgaaagatattatccagcgctttggcgcagcaatgtttgtccctgtgctcctctttcctgcagccggtatgttattaggcttatcggtgatgctactcaaccaagatctctttccttgggcagtggaaggtagtgcatgggtaaaagtgtcaactatccttctccaagcctcgttggcggtgtttaaaaatatggccttggtgtttgcggtagggttaccgatagcactagcaaaatctgcatccgggcgcgcagtgcttgcaacactggtgtcatacatcacctttaattatgtgattggtggcattttacagttctggggacctgagcttggggtgaactatgtggagggtgagcgtgggcttactgatgtgggcggtatacttactttggatactaacctattgggcgccatcgtaattgctagcctctccgtttgggttcacaaccgtttcttcgacaaaaaactgccaaactgggcggcagtgtttggtggcacacctttggtggttattgtgagttttccgatcatagtactcatggcgatcatcacctgttttacttggccaagtattcagcacggcattaataatctacaaacctttttagtcggtgcgggttcattcggggtgtggatgttcactttccttgagcggattatgatcccaacggggctgcatcactttgtctatggccccgtattctatggacctgtagcggtggatggcggcacagtggctcattggattcaaaatatccaaaactttgccagcaatccagcccccttaaccgagcaattcccacaaggtggcttgatgttgactgggatggggaaagtctttggttgtacgggtattgctatggcgctttacgcaaccgcgaagccagaaaacaagaaaatggtgctcggcttggtgcttggtgcggcattgacggccattcttactgggatcaccgagcctattgagtttaccttcctgtttatcgcaccggcattatttgcgctccacgcggtattggcggcaaccatggcaaccattgcctattggtttggtgtctcaggtaacttccagactgggcttatcgactttatttttcaaaattggctaccgctaggcagcttgcatggcgacacatatattgtgcaagtgctcatcggcctgagtttcaccgctatctactttgtggtgttccgcgcgctgattgtgaaatttgatatccccacgcccggccggggcagcgcagaggcgaagctttataccaaagccgactataagggggcacaacaaaacgattcatcgagcggtgtgattgatggcgggcaagcgagtgcgtttattgaaggactgggtggcaaagacaacatagcattgctcaccaattgtgccacgcggttacgtatcaaggtacatgagccagaaaaagtagcggaaacgcaatattttcaagagcatggtgcagtaaacatggtacgtaatggtgatagctttcaaattattgtcggcttaaccgtaccgcaggttcgcgaagaaatgacgcaattgatacgggcatag

SEQ ID NO: 167054 - DNA, 183 bp, Enterobacter cloacae
atgaaagccagcatccgggccagggtggagcacccgtttcgcatcatcaagcggcagttcggcttcgtgaaagccagatacaaggggctgctgaaaaacgataaccaactggcgatgttattcaccctggccaacctgtttcgggtggaccaaatgatacgtcagtgggagagatctcagtaa

SEQ ID NO: 167055 - DNA, 273 bp, Enterobacter cloacae
atggccagcgttaacattcattgtcctcgttgtcagtctgcacaggtctaccgccatggtcagaaccctaaaggccatgacagatttcgctgccgtgactgccaccgcgtttttcagctcacttacacttatgaggcccgtaagccgggcattaaagagctgatcactgaaatggccttcaatggcgccggggttcgcgataccgccaggacactgaaaattggcattaacaccgtcatccggactttaaaaaactcacgccaaagcgaataa

SEQ ID NO: 167056 - DNA, 240 bp, Enterobacter cloacae
atgtttgtggaactggtttatgacaagcgaaacgtacaggggctggagggagccagggaaatcatcctgaccgagctgacaaaacgcgtgcaccggatttttcctgatgccagcgtgacggttaagccaatgcaagcgaacggcctgaacagcgacgccagcaaaagcgaccgtgaaaagctcaaccgcatgctcgaggagatgttcgaagagtcggatatgtggttgatacaagagtaa

SEQ ID NO: 167057 - DNA, 1071 bp, Enterobacter cloacae
atgggacagcctgccgccagagcgaccatagatgtcagcgcacattcggggccaatacagtcgggaagcccggacgtcatcatcggtggttttcccgccgctcgaaagggtgatacgttatcctgctcgacgcacggcagcggtattattgtggggggctccggtactgtcttcgttaacggtatgccacttgcacgtcaaggagacaagacgaagtgtgatgttagcggctcaccggcacctgccataccgaaagcagcagcacctcaatattgggggggcacgctggcgaaaaatgccggcgaagatgggatgatgcacggcgaacattttgatgctcgtgttctgggtgcgtacgccagcctcgaagataaaaacctcaacggtgattttgataccgcttcagctggttttgcgttggcagatattacaattgggaatatgaaaagtaaggatctgctacgggcagaaatgcgtaataaactcgccgtcgccaatgcgacggggtctctgtatggtggcggcaacgatatttatggcttgaatgcgaatgccgctgcgacaggtgaacaatacggtggttcggttgctgcgggtaaagaaggaacgttgtatggtggagtatcaggggatgtaactattggtacagcagaagctaaagccgtattagaagtttataccggcaatgatgggaagtatggtttgactgctgacgccggtgcggaagcgaaaggagtgaaaggcgaagtttcgggtaaccttgatattctgggcatcgtttccggagaagcaaaaatcgacggtagctttgggtctgctggtctcgcgggaggtggaagcgctttctgggacactaaagattattccgttaacgtcagggtgactggtggggctgcagggcttgtagggcttaagggtgatgcaagtctgaaagtggcatttaagcctatactggatttctttgactatttgtatggcgaagaggatgagccagccgtcacctctgttctgacagaaagcggggatgggacaattattaccgggtgtgttactgttttgataggcgattaa

SEQ ID NO: 167058 - DNA, 447 bp, Enterobacter cloacae
atgaaatgggctggcttaacgatttttattttaatcactttgatctatatctggaatggaaaagatctgtatacaaaagaagaatggcgtggctttggaataaaattcatttcagtactgattggtgcatttgtattggtcattgttttggttggcttttctaagttcatcccgttgcttaccagagaaactgcacggtcattatcagtaataataccagcttcctttatggcagtgcttctgtcgaagttttttgtcgtgatgttgaataatattttcgatattattatgcgattccacaagcgctataacactgcagcaaactatacaaaattattatcactatctggtaagtatggggcaaaattacgcctggtagtaaagtgtctagcctcgttaggctgtatcttaatgttctatggtatctggtttggcagcactgtttga

SEQ ID NO: 167059 - DNA, 177 bp, Enterobacter cloacae; identical to SEQ ID NO: 167043

SEQ ID NO: 167060 - DNA, 1209 bp, Enterobacter cloacae
atgaagggtatgcagaagatcaaaaggggtaagagcttcgctggtgtcgttcaatatgcattgaaaccgggagcacatcataaaagtgatcccatcatcattggcgggaacatgttaggtgattcagcccttgaactgatcgctgaattcgatagcaccaagcatcttcgccaggatgtcgcaaaatcagtttggcacaactcgcttcgcttacccaacggtgaatcactaacgaatgaacagtggtctagtatcgcagatgactatatgaggagaatgggattcagtgatacccatctccgttgctatgtcttacatgacgacgatggccagcacatacacattatcgcaagtcgcatagatctcaatggtgggaagctttacttgggtaggaacgaaaacctcatcagcacacagatcatcagtaaactcgaagtcgcttatggcctgacagtgaccaaaacggcatctcccccctcgcaagcacaaccaaagcggaagagagtgtcccgtaatgagaaaatgctatcggaacgaaccggggtgctttcaccaagagaagctctgcagcagatacttgataaaagtttatctgataagccggaccttctaactttcacaaaacgactggaagaagcagaagtaacttggacagcgaatgtcgcaagcacaggcaaaatgaacggcttctcattctcctaccgcgatatagctttcaaagcttcgcaattgggtaaaagttacagttgggcaaatcttattaacaggctcaactacaacccagatcatctagaagctcttcgaatcgacataccttcaaaggaagtttctcaagctcccatgccaatacctgttcctgttcctgctcctgctcctgctcctgctcctgctcctgctcctgctcctgctcctgctcctgcaacaattttggaaaccagggagcaaaaggaaagtatcagtgaaaaaattactgaactcgaacttcgactcagaaaagacagacgaaacgagatcgttgagaagattctccaaaagaatgcggttaaccagcaaaagcatctcaggcttatcggctggcttccatttcttagaaggcttgcagagcttctccgaagctatggtaagagcattcttcacaagcccctccctggattctcaaatctctatggaacccgacctttacataaagataggaaaattcatttataa

SEQ ID NO: 167061 - DNA, 426 bp, Enterobacter cloacae
atggacaaaaacaatttcaattcagtaatgacactggaagaacagcttatcgtcatcgtggacaagtatatctctaagcgatatcagccacatgataaaagtttctcctatcatttatacttagtgttcgttggctatcatttaaagtatttctacccaaaacagctatacactcattctaatcgcaacatagacaacattatgacaatgtttagttctgtatacaaatgccttacaagtaatctgttgcgacagttaaataacaaagaagctgttcttagagagctaaactcccttgttaattacattgataataaccagaaccaggcagaagatatttataatacttttaaagcacaatatgaaatgaaagtaattgagggagagttaacccatgaagttcgcgtaagagccgtcaggttatag

SEQ ID NO: 167062 - DNA, 150 bp, Enterobacter cloacae
atggataataatcctgctgagagatttatcaatcaagtccagaagatgagctttatgattttcagcgccggatattatttgaaattcgttttcgccaatcaagtgttcttcaaaatgattttcataagactctgtgctaaaaatacttag

SEQ ID NO: 167063 - DNA, 243 bp, Enterobacter cloacae
atggtggtcatgccaaaacccatcaggcccagcggagccggattagccaacttagtgttgcccataagtcctcaaaaaatcatcattaatatggtgaaatggttaaacccgcgccagttctccctgacggggcgcggcatcataatgggcggcatcgacgccgtctatgatctcaccggggtgaaattaaaaaattttttatccttcccccttgatggatgccgttgtgaccccatcttgtaa

SEQ ID NO: 167064 - DNA, 357 bp, Enterobacter cloacae
gtgccgcgcgaactgagcgcgccgttccagaccattggctatgcggcgctgatctatggcttctggccccagctttctcgcctgtggatcgtcagtgcggtggcctgcgttgggcggattgcgttaagcaattacatcctgcaaacgctgatatgcaccacgcttttctaccgattcggcctgtttatgaaattcgatcgcctgacgctgctggcgtttgttattccggtctggattgttaacgtggtgttttcaattgtctggctgcgttttttccgtcagggcccgctggaatgggcatggcgacagttaaccgctcgtgcttcgggcgtgtcattgcgtaatacatccagataa

SEQ ID NO: 167065 - DNA, 411 bp, Enterobacter cloacae
atgagcaacatcgacaaacaggctgtgcgtattcctgagcgaaataaacataactggggcaacgcggtaatgcgcgattgcgacttctgccagcaatgggctctaactgttcggcagtccgacggcgggtgtatatgcgccagttgctgcgattcagaatatacaactgcactttccagcgctcttgtggtggcgctggatgagctggaagccgcagagcgcagaaacgccgaattgacagaagcgctgaagcagacagtttcaggatacaaatcctgcctgcatacggggcatgagcgcattcttgaccttggcggtgactgtgacgcaccggaagtgatgattgcaggaaacactgatattcagcaggcggagaagttgctctccgccgcagccggtaaaggagagtaa

SEQ ID NO: 167066 - DNA, 288 bp, Enterobacter cloacae
atgtcagttgaactcgaagataaacgccgtagtgggcaacgcattcccggcctcggactcgctaatgggacatggtttgcagtgctggatattccaggcatggaaaagcttgtcaaccagcagcataccaatgacccgcttgatgtgacgccagccaaagcgaaaaagatggcagatattgtcgaggcatggacaccaccggatagttggtctggctgcgaccaagaaaaaatgaagagttatatcgtcgaatttctccgcagttgcaacggttttaggagctactaa

SEQ ID NO: 167067 - DNA, 348 bp, Enterobacter cloacae
atgccgcttaatatcatgcgtaatgttgtgaggcattcaagaataggcataagcgtccctgaaactatgaatggcaatgtaactgataatacagtagaaaacgctgacctgggcttagaggtcagaagttcccagcaagaaattttacaactcctaaaggaaggattcccaggggaaaagcttacagaactgctgttgcatatcagtacaaacccgcaggaatcatttgatgaacgggttgattacgcaaaaaaatcgggattggtagaatggctccagccaggaacaacagtcgtggaatttgtaactgctttgatttcactcgccagctcgtttggtggatcttga

SEQ ID NO: 167068 - DNA, 285 bp, Enterobacter cloacae
atgcaggcgccggctgatgcagtgaatgtctcagcattacaggacatcaccgtcatcagtggtcagggaagcgtgaaagttaatgccagccaggaactggttttaagctgtgggggcgcttatataaagcttagcggcgggaatattgaactgggatgcctgggcaatattttgctgaaagcggccaatgttaatcagacaggtcccgccagtttagatacaccacctgtgactttcccgaaagggtacagcgaaggatttatcacaacgtcttcagaaagttga

SEQ ID NO: 167069 - DNA, 294 bp, Enterobacter cloacae
atgaaacccactctctcacgcgaactggcgctcgacgcgctgatgatggcggtctggcgccgaaaaccagacagcgaggttatcgtacatagcgatcagggcagccagtacggcagtgacgactggcagcgcttctaccgggccaataacctggcgccgagcatgagccggcgtggcaactgctgggataatgcggtggccgaatcgttcttcagttcgctgaaaaaagaacggatcagaaaacgcatatataaaaccagggatctggcccgggcggatcttcgattacattga

SEQ ID NO: 167070 - DNA, 837 bp, Enterobacter cloacae; identical to SEQ ID NO: 16864

SEQ ID NO: 167071 - DNA, 399 bp, Enterobacter cloacae; identical to SEQ ID NO: 16863

SEQ ID NO: 167072 - DNA, 1110 bp, Enterobacter cloacae; identical to SEQ ID NO: 113667

SEQ ID NO: 167073 - DNA, 276 bp, Enterobacter cloacae; identical to SEQ ID NO: 16862

SEQ ID NO: 167074 - DNA, 984 bp, Enterobacter cloacae
gtgtttaaatctttattaatcaacaaaacagatggacgctatagtgcgcaacttgctgaaatcgctgaaagtgaactaccgcagggggatgtggaggtcaatgttgactattcatccatcaactacaaagacgcactggccattacgggccggggcccaatcgtccgacgctttcccatggtgcccggcattgattttaccggtacagtgtccgccagttcacatcccgaatatcaggccggagataaggttctcctgaccggctggggtgttggggaaaaacactggggcggactatccgaaaaagcacgggtaaatggagactggctgacgccgctcccggctggcgctaacggcaaacacgtaatggcaatcggaacagctgggtttaccgcgatgctgtgcgtagacgcacttctgaatcatggtattaagcctgaagatggtccggtacttgttaccggtgccagcggcggcgtcgggagcattgcggccatgatccttgcatcaatggggtaccgcgttacggcgtctactggacgcccggaagaggctgcctggctctataaaacggtcggtgtggacgagattattaaccgttccgagctctcctgtcccggaaaaccgttacagaaagaacgctgggctgccgccattgatacagtcggtagccatacgctctgcaatgtatgcgccggggtgcgttatggcagtattgttgcagcctgcggcatggcacaggggatggaactaatggggaatgtggctccgtttatcctgcgtggcgtcacgctgaaagggattgacagtgtcatgttcgcgaaggaaaaaagagcggcgatctggcagcaggcggtacagtatttaccggagtccagactggatagcctgaccaccgtttatccgctgagtgatgccatcaatgtggccgaaaaacttctgagtggcggaattcgtggccgggcagtaattcagtgtagctaa

SEQ ID NO: 167075 - DNA, 657 bp, Enterobacter cloacae; identical to SEQ ID NO: 119515

SEQ ID NO: 167076 - DNA, 297 bp, Enterobacter cloacae
atgaataatcagttcccgataaaaacgctgaaccagctcagacctgtgctaatcgggtttcgcaaaatcaagggcttcacgcaaaaagatgtgtctgagaggcttgccgtaacgcagcaaacctatgcccgcctggaagcaaaccctgctagcgccagtattgatcgtctgtacaaggtattcagtattctgggcgtagaaataacgctgtcatctatttccccttcacccttcatttcccacacagagatgaggggggcatttgacagcactcccgccagacgggagaaatggtga

SEQ ID NO: 167077 - DNA, 3276 bp, Enterobacter cloacae
atgactctacgattgcagacggaatcacccgctgaccaggatatgtttagaggcagcagtcatgaaaaagttgcagagaatgtggctcagatcatcaggacacctgatgtcaatattattggtctggaaggtgagctgggttcaggtaagtcaacaatattgaagttcctgcagaaaaagcttaaagatgattttacgttcattaactttgatgcagaacgttaccatcatggctcaactaaaaaagcgcttatcgatgtcatccaccacggggtcagcctacaatgtccgggctcccgggatgtgttggataagtataaaaatctggctctgggtaacatcgttgaatacgacaagagggtcagcagcaggctaagctggttgaccgtcgtttttattttactgtcattgctttccgtgcagatgcttcgttatgtgctaacagaccttaatcaatattttactaacaaggagtcattattagggtggcttttttatgttgaggtggccgcgtttctttctcctgccattatggtcgcaggactggcatgcctgcagaacatggaatggtacagaaagaaagggtattcgagtattggtgatttgttcaaacgcaacagtactgacaggattgaagagacttggctagttaataaggaggtcggagctattgagctggctgaagctctgcagggatttacctccaaagaggtcatttcccatggagatcgcttcatccttatcattgataatctggaccgaatcagtgcagacaaagtgaaagagctctggagtgatatggagcttattgccggagccactcatgaacacttcaggatagtggtgccctattcggcaagacaggtttcagcctcactttctgtggcgggtttcagcgggcgtgagtttattgcaaagcggattcctgtaagttttcaggttcctcctcttatttcggcaggatggcaggaagcgttaaggcagtactggaaagaaacagtaaatgaggatgcagggatagcgtgccgggaagcaacggtgttgcttgagcgctggaaaccctctgagtatcctcgtatcacaccgcgattaatgaagaagtttgttaatgatattcatattctgaaccttaccgttcctgcaacagaagatcatcgccatattcttattgctctctacttactggtggtcagatacggggagcgagatattaaagtattacttcgcgatcccaaagctagtcagaccgaacccggtattgctccggatgattttgacgagatgctctcgctaacttatcaacaaatatcccgaatttttaataacgatacagaaagatggagcgaatttctgatgagcatccactatcagtccacggtggagcttgccaggagcgagttgcttgatacgcctcttaaagacgcgattggtgctataaatatcccacggcttgaagaactgacggccttgtggggtttcgctgaagcatggcagcgagtggcaccacatattcagatgcgagactggctggtttcttatagccggatggatgagaagtgtcaggctctcgccgaaccgcaactcaaagtcgcagtgcaaatgctgaatcagagttatgctgtttcactcagagaaaagaatgatgaaggtttcgtattgagtctgcagaaactgatggctgacgggcggataagcctagagcctttcgtcgaaaggcaaatatcgtttattgtgagtaaacttgatgaaattcaggattcagaaaaattggaggctgaatccacgcagacgttgctgcaggaagctgattcatactctgttctggccggtgaatcactactgaataaaatggagaattttgtagatggcgtattttatgtggaataccttgtcaataatgaagagaccttgtcaaacctgaaaattggcacactagatatcggaaatcacggtcgggaggagatgttacgctatggagctgagcaacctcagatagacctttttaatccgggaattatccggcatatcaatattgcatcgaaggcggtacagaacgtaattggaaagaatgatggtacaggtggggctcaggttagctctgcaataatgacgcttaaaaatcgtcaggttgttgaggacgttatccatttcagaaaaattgttctgagcccggactggaataataatgttttaaatcaatattatcttaataatacggcgacgaggaatctcttccctgcggaatttgctgcacaggctgttgctcacatggtgctccatggtaactatgccggtatcgagtcgtacagtgaacatattggtgaggaacggtttgacctggctttggctgcatatcttcgttatctacgtactgccgagagtatctttatagcacttaaggataaaaatgttctgccgtacatcaaaaatgctgttggcaggattgttgatttaggtcttctggtgaatatacctgtcctgagctttgttaaaggtcagtatgacgtcatcaaagaagctacaaatgcaacctctcttttaatatttgtgcgagagcgtcaaaaagcactgtcagagaaaataattgagtctgatgtgaatgctatgggtccagtatttctccatgacgtatatcagtcaggtgagcagtttgatattttgaagaaaaagctgaacgccctggcatgtggagtatttagttcttctgaaaggcttattgagtgttttacggttcttcctgtgaacatgcgctttatccttgaacaaatgcaacttcaggggcagcatatccggatggaaggtagtgtgggtatctttgcatcatggttccgtgatgcagagccagacgttgtcacaaatgccgagaacattcatttcctgtggtcttgcctcgacgatacccagagagagactgtacttgatgagttgcacgatgtcttacttgagagacatattcgtattgacagccgtattgcgattattacccgttttcataatgagttgtcgtttattgaacctgagaaggccgttgaacgcagggctattgcggcgctgtttagcgcttctgttgataatgtattattgtctcaatggcttgaccgtcagacgttttcattttcatcatggtctccggaggacgcccgtacggcaacgagttgtataatgaataactcggagatttttcctctcatctgcaggaattcacagtatattaaaaacagaatgttaccagagaaagcggacgttacagaagatagtgatacgtttccggactga

SEQ ID NO: 167078 - DNA, 330 bp, Enterobacter cloacae; identical to SEQ ID NO: 119089

SEQ ID NO: 167079 - DNA, 639 bp, Enterobacter cloacae; identical to SEQ ID NO: 121762

SEQ ID NO: 167080 - DNA, 222 bp, Enterobacter cloacae
atggatgcgcaaggcgagatcgctgtgctcgtacatgccgcgaccataaaccggatcgaaaccgccaaccttctcgatagcgctgcggtggtaatacagcatcacgccgcgctgcccggtgtaagccacatgctgatcgtcgcggtaaagctccgaaagatcattcagtttgttcgagccagccagatcgagaaactggtaagccaagtgtggctcgggtga

SEQ ID NO: 167081 - DNA, 258 bp, Enterobacter cloacae
atggcgaagcagctgcacgccggaaggtcctaccgcggccggtttcgaaccatcgtcgataactaccaccagcgcgcccgcgggcagatgtttcatgtgctgctcaatggcatgataaaaaacgtcactgcggttatgggttgtgactgctatgcctattcgcctgagacaagagtttacgggtacaaaatgaagaccgtcgatagtaacgtgcattgcttatctcacatatactgtattgtatattcattaacttaa

SEQ ID NO: 167082 - DNA, 270 bp, Enterobacter cloacae
atgggatttgagacgattattggcattgtcgcggcagtcatcgctgccatcgccggcgcttttggcctgggccatattcgcggcaccagcaaagcggaatcgaaagccgaccagcagcgcaccgaagataacgcagctgcaatggtcacagcagcagaacgccgggtagaagcaacgaaagaggccagcgatgtacagcagactgttaaccatatgcctggcgacgatgttgatcgcgagctgcgggacaactggacccgtaagggttga

SEQ ID NO: 167083 - DNA, 231 bp, Enterobacter cloacae
atgtacagcagactgttaatcacatgcctgatgacgatgttgatcgcgagctgcgcgcaaattggacccgcaagggttgaggtagtggacactgcttgcgattgggttaaacccatttacggaacggaacacgactgggatgttctggatcgccagacgaagaaagacatcctgtcgcataacaaagcgtggcaggcgaactgccagaaagaaatcagatcctcgcaatag

SEQ ID NO: 167084 - DNA, 222 bp, Enterobacter cloacae
atggatgcgcagggcgaggtcgctgtgttcgtacatgccgcgaccgtaaacgggatcgaaaccaccaaccttctcgatagcgctacggtggtaatacagcatcacgccgcgctgcccggtgtatgcgatgtgcttatcatcccggtacaggaccgccatatccttcagcttattcgtccctgccagatcgagaaactggtaagccaggtgtggctcgggtga

SEQ ID NO: 167085 - DNA, 999 bp, Enterobacter cloacae
atgccgtatagagtccatactgcgaaaaaagggaataacttcgtaccaacagttgataatgatatccagccatttggtttcccgtctggtagcacgtacagcgttggtatggagcggttgagtggaaacacgtatcttaatggtttaactggctggggcgtggtttccccagctactgaaaatttaaccatacgatattttgtctggtgtgaaacttctgatatatcaatggttatttttgaaccgtataatccaacatatgttgcagcaggtcgcgctaactccatctctatccgacaacaagataaccgtaatgcagcattcttttcgggtaatatcgcgagtaatggcgtctcatcgtttacgaacaaactaaccactcgaactggaatccttaaaaaaggactgaatcagattgagattatttacgatggtacaccgtcaaaagtataccctcctgctctgttattcagaggagaactgaacgaatcatgttctcagagcgcctctgtattcctggctgcaaatgcgataaagggtgtttacgggcaggtaagagataaagcagatctcttattagcatatggtgcagaaacagcaaatgatgaagcgcctgataagtatggtgccactaaatcatcaaatgttcagaatgttgtcctgtcagctttgcctgttgattgtggtgttgttttttactacaaacccacgtcacaaagtggagttgttgccaagagagtggcgactggcattgagatctcgacgatgcttttcggcgcacttactgttgtcggcacattgacttgcgatgtgacaggcgaggtcatgctcacagctggcctagcaggttcagtacctacaataacagttaaacccactactggcggcactgttcaacaggctgtttctggatactctggtggtaagatcgctttaataaacaaaggaaccacaagccagacagtttctgttaaaaataccgctcagtacattgtataa

SEQ ID NO: 167086 - DNA, 222 bp, Enterobacter cloacae; identical to SEQ ID NO: 167084

SEQ ID NO: 167087 - DNA, 234 bp, Enterobacter cloacae
atgtacagcagactgttaaccatatgcctgatgacgatgttgatcgcgagctgcgcacaaactggaaccgtaagggttgaggtagtggacacggcatgcgactgggttaaacccatctacggcacagcgcacgactgggatgtgctggaccgccagacgaagcgcgacatcctggcgcataacaaagcgtggcaggctatctgtcataatccaaaggaagtgaggtccaagtga

SEQ ID NO: 167088 - DNA, 447 bp, Enterobacter cloacae
gtgccagtcctcataggagggtgtggtagcgtcaaacactgggttacattgaatctggccaaagatctggggcttccctggtgcgtatttctggactccgatattgggggagaccctgcacaggttctgtccatccagaagcgtaaaaaagaagtagaggaggccggtaaggtatttttcgctacgcgcaaacgtgagatagaaaactatctgtgcccggatcttatcgaggaaattactggtgtagccgtcacgtttacggacacctgtgacgctaaaaaaataatcggccgggctgtgggaatgaaacccgataatgtactagataaattctggcctcagatgacatcagaaagaatcatctcaagatcaacctatcatgacggaacgcaggagagaagcgagctggttgagatcctgagcgacattgtatccatgacgagataa

SEQ ID NO: 167089 - DNA, 492 bp, Enterobacter cloacae
gtggtgccgccgttcgccaggttagcctgcacgctgcccacgtcgtccagcgccgcgtcgatggtcggcttcaccggcgcatcggtatcgatggtcacggtccagctgctgctggctgactcattacccatcggatccttcgccgtggcggtgaaggtgtgctcgccgcggcccagatccacgctcggcgtgaagctccaggtgccgtccgcgcccgcggtggtggtgcccagcacgttgctgccgtccatgatggttacggtgctgcccgccttcgccgtgccgctgatttgcggacgggtgtcgtcggtgaccgcgttctgggacaggctgccggtcacgctgccggcgtcgtcggtcacgccggtgatttccaccttgcccgggaccacgtcaacggtgatgaccacgtgcgacccttccggcccggtgttgcctgacggatcggtcacggtggtggtcaggtcgtgctcgccgttagagagcgcctga

SEQ ID NO: 167090 - DNA, 288 bp, Enterobacter cloacae
atggatgcggtctactggcttaccagcttctgcacagcgcgcatagcagcgacgccgacggtggccttcaacaacccacactccaccttcatcacgggcgataacctccagcgggggaacggggcctccgttcatcagatagttgaagaggtcatcatctgcctggcgggtacgctcatcatcttcacgtttgttgaaaccttcccgcacatggatttggtcaaggctgataaacatcccggtatcggtacgtttgatggtgccgtcacgtgtcatttgcttgaatga

SEQ ID NO: 167091 - DNA, 429 bp, Enterobacter cloacae
atggcggcggcgggcctgctgtctctcgggctgttgctgggtccgcggatcgcgatggcctggatgctggtacagcaggaaaatcgggttcagcaggagatcgttcaggtttatcagcaccattttcccagcatgcgccagcagaccaatatcaaataccactttggtcaaaacatgaaaaagcagcacaaaggggtattcctgcagctggatgatcttgagcaagccaggcaggccgtacccgcacttgagatctccctgcttgagtacgatgcgcaacaaaatgcgctgaccctgagcgtcagtgcgcaaagccaggccgcgctgcagtcgtttgtggagaaaacaggggagcgttttgatttcaccctacagcctgtttctaccactgcaccttataccgccatgatcgcagggaaatataaatga

SEQ ID NO: 167092 - DNA, 861 bp, Enterobacter cloacae
atgagaatccccgaccggggttcgacaacgggcgacagccagttggacagactgcgcgcgcagcgaacaggctgcccgcagggcgagcgaagcgagtcaatcccccccctcaccgccatattcaagatgagagcgcgtacgaaagtacgggcttttttcttttatattccccggacaggggggatgagaatccccgaccggggttcgacaacgggcgacagccagttggacagactgcgcgcgcagcgaacaggctgcccgcagggcgagcgaagcgagtcaatcccccccctcaccgccatattcaagatgagagcgcgtacgaaagtacgggcttttttcttttatattccccggacaggggggatgagaatccccgaccggggttcgacaacgggcgacagccagttggacagactgcgcgcgcagcgaacaggctgcccgcagggcgagcgaagcgagtcaatcccccccctcaccgccatattcaagatgagagcgcgtacgaaagtacgggcttttttcttttatattccccggacaggggggatgagaatccccgaccggggttcgacaacgggcgacagccagttggacagactgcgcgcgcagcgaacaggctgcccgcagggcgagcgaagcgagtcaatcccccccctcaccgccatattcaagatgagagcgcgtacgaaagtacgggcttttttcttttatattccccggacaggggggatgagaatccccgaccggggttcgacaacgggcgacagccagttggacagactgagcgcgcagcgaacaggctgcccgcagggcgagcaaagcgagtcaatccccccctcaccgacatatttaagatga

SEQ ID NO: 167093 - DNA, 171 bp, Enterobacter cloacae
atgttgggtgacttcttcagccaggaggggaccccgctcaaccttttcgatgagaacgcgccgtatgctggcagcgaaaagttgattgaggtgctcgaacacctgaatgctaaagagggaaaggcacgctttattttgcaggacagggcatacagcagtattggcagatga

SEQ ID NO: 167094 - DNA, 288 bp, Enterobacter cloacae
atgttgggaatgcaaattatgaatccaccatacatttatagtccggtgcaactggctaattatatgaaactggtccgtcaaaaaaacagctggacccagatcgaactggcaaaaaggattggtattaaacaggctactatctctaattttgaaaacaatcctgacaaaactaccctgaccactttttttaagattttacagtcgcttggtttgatgatggcgctctatgaaagcacagaagcaacgacggggccggagaaaaataaccaacagaggctggactggtaa

SEQ ID NO: 167095 - DNA, 1314 bp, Enterobacter cloacae
atgtcaaagcttgtgacatggatgaataatgaacgtgttggcgagcttacgaagcaaccgaacggagctcatacctttaaatatgaccgtggctggatgtttagccatcatgcacgccctttatcgctctcgctgcctctgcagtttggcaacatcacatctgacgcggtgttcaatttctttgataacctgctgcctgacagcccagtcgtgagggagcgtgtcgttaaacgctaccatgcaaaatccaagcaaccatttgatttactttcagaaataggccgtgacagtgttggtgcagtaacgttgctgccagtcgatgaagatatcagcataccgggaatgacgtgggaaccgcttaccgagaaaaagcttgaagctgtactgtccgcttataaatctgatatcccgttgggcatgattaacgaagagaatgatttccgcatttccgtcgcgggtgttcaggaaaaaacagcgctactcaaaatgggtgatgagtggtgtatccccagggctgcaacgcccacgacacatattatcaaacttccaataggcgaaattaaacagccaaatgccacgcttgatttacgtgacagcgtagataacgaatacttttgtctttcactggcaaagacactgggttttaacgttcctgatgcggaaataataagagcaggtggcgttcgtgcactggcagtagaacgctttgacagacgatggaatactgaccgctcaatattatttaggctgcctcaggaggatatgtgccaggcattcggcctgccatcagccctgaaatacgagtctgatggtggcccagggattacacggatcatgatgtttttgctgggttccagtgaagccctgacggatcgttatcagtttatgaaattccaggttttccagtggttacttggggcgacagatgggcacgctaaaaatttttccgtctttattcagccacacgggagttaccgcttaacacctttttacgacattatttccgcgttcccggtactgggtggtgcagggatccatatcagcgatttgaagctggcaatgggcctgaatgcatcaaaggggcgtaaaaatgccatcgacaagatatatcctcgccacttcctttctactgcgaaagtcgtaaaatttcccgaagagcaaatgtataaaatcatgcaagagcttgctgaacaggtgccccaggctcttgagcgtgttattgaaaaattacctattgatttttcaaagaaagtgaatacatccatcgctacaaatgtgctcagattacacgcgagattgtctgggagtttgtga

SEQ ID NO: 167096 - DNA, 762 bp, Enterobacter cloacae
atgaaaattaaccttagtgacgatactttaaaagtaagagacatttatgaacaatgggcagacttacgcaattccgaagccaattcaatatatgaggaactttactcatctattttcatgacccatgtacatgaaagaaactacctacaattagccactcaacttcgtcaatttgaatctattgatgttatccaaaaatgcttaatgggtgagcgaatccagaaagaccagtttatattggtcaccgggcttttcatcaactacattgcatcagctatagccttacgcgatagtacgcgcaacatgcaaaaaaaaggaaaactcttcccttttgagttaaaaaaccaggccgaatctaaattacagaatgaaattatttccgtcagtagcattaaactagtagaggacattagaaatattatcacgcaccagtcactaattgttcctgtattatccttcatctctaatgctggagaacattcttcaggctattcttacaaaacaaaagacttactcaacaacaaaagactttcagagaaatcaagggaatatttgttagggattagccacggtaatttatatttacgtccacttattgatatttatcataactcaacggcaagttaccaacactggctcataaatgaagccttaaaaaaacataaaaatgatcaccccacctattggcaagctcgtaataatgtatcttttgaatggggaggagatttagaaccatcatttcctttgccactcttcgagtga

SEQ ID NO: 167097 - DNA, 1617 bp, Enterobacter cloacae
ttgacattcaattttcaaattcccggttcagagggaccattacccatagcaattgatcctggctcatctattgtcttcgttggggctaacggttccggaaaaacacgcttggctgtttttatcgaagatgccgcaggccttaacgctcaccgtatttcggctcaccgggccctcaatctcaatccggctgtaccgaaaatccgtggtgccgaggcactcagaatgctcagaattggatgggataatgagaacgcaacaattgccaaccgtgcgagttttagatggcctaactcaaagcctgcggtgggaatgctcaatgattacgacagtttgatccaggcactcttcgcagatcagtccgtgaagacattagatacacatgttagatgcagggcgggcacccttacggaagtgatcccaacgaagttcgaaatacttgcagacatctggcagcgcctacttcctcaccggcaattagtaattacaggcgatgatattaacgtatctgctatcgaaggttctgaaacctatcccgcttcagacatgagtgatggagagcgcgcaatcttttatctcatagctcaagccttagttgctgctgataattctcttcttatcatcgacgagccggaactgcacgttcacccatctataatttctagtctgtgggatgaaatcgaggcgtcgcgaaaggattgcgcatttatattcatcactcatgacttgcacttcgccacagctcgatcagcccgaaaatacgtaattaagtcgtatgccccgacgccatcatgggtaatagaaagcgtgccagaggacaccggcttcagcgaagaagtcacaacactaatcctcggcagccgccgcccaattttattcgtggagggggctggaacaagtcttgatttagcgatttatcggtgctgctatccagactggactgtaattccaaggggctcatgtgagcacgtcgtacatgcagtagttactatgcgtgcgaacgcacaactcactcgcgtaacctgtgcgggaattgttgacgccgatgactacacgatggacgagatccagcatctgaatagtttaggcgtctttccattgccggtatctgagattgaaaatcttatcctcctgccagaagtcagccgtgctatcgctcagactgaaggctacgcaggtgctgagctcgaacagaaattgtcgaatcttcagatcgcaatatttaacagcttgagttctcaaacggccattgatgacgtggtcgctaggtattgtcgccgacgaatagatcgggtgttgaagaaggtcgatctttccgattccaaaaccataagcgaaataatttcagagtacgataaccaaacctctgctttggacatcaacggtatttcagcagccgcgaatcaaaagatcctatgtgctttggagaataaggatttgcctaccttattaaccatttatgacaacaaagggttacttgcccttgctgctcagcacttgaagcagacaagattgacagcctttgaggcatggcttactcgaatacttcgagatgaggcaaatgcccgcgacttatgtgcaacactcagaagatttctaccgcctgtacaggctagttaa

SEQ ID NO: 167098 - DNA, 534 bp, Enterobacter cloacae
atgacacgcacacaatcagaacgcctgactctacgaccggttacaacatcagacgttgatgacttatttaggatttatggcgatcctgccactaacacttttaacccggctggcccttatccgaatccaactcatgcaaagacagtcttggcccgctgggttagccactggaatgaaaatgctttcgggaactgggcaatctctttgcatgaagctccagaaaaagtgattggatttggtgggctgagtattagcacttacgccggtattaccatcaacaatcttgggtatcgttttgctaccgaagcatggggtaaagggctggcaactgagttttcacgctatgccgttcgttatggattcgaaaaacttcagcttgaagccatctcgggtgtcgtcaggggaaatcatcttgcatcacaaaaagtcctgacgaaagcaggattaaagtatgtcagagagatcagcgacatacataatgccccccccagtttgctgtttactctcacccttgatgagtggcgccgtaaatga

SEQ ID NO: 167099 - DNA, 636 bp, Enterobacter cloacae
atggacattaaatcatttagctttttaattttgcttagcgccccactcgcaactatcgcagccaatacagaagaaatcagccaaaaacttgatgatggttatcgctacgcatgtaacgccacccaaacaggcgacgcggctagcgcgtcctataaacttgaaaattatagaacgctattcactggcacttctgctgtaacaggcttcagccagattatgcacagtgagatagacggtattgtgtctggtttttttaaaaagggaatgatccaagggaacactagcaccgctgcatgtgaaactccgcaagacttgctggcaacaaccacacgagaagtatacatccggcaggtaaaattaactctggcatctaattttgatgacgttcgctttagccaatacgcaaatcaggcttacccaatatttgattcgatacttgtcggaaaaattagcgaagaagaagccagtagttcaataaataagattgctaataatgccatcattaacaatgaagatgctggtgccgtcagtaatgcaaccaatgccatgaaggccgtcgcaaaagttctcgtatccatcagaaacgataaggatcttgaacaattcttttcggactatatgaagaatcacaagtag

SEQ ID NO: 167100 - DNA, 333 bp, Enterobacter cloacae
ttgagaaccgtagagatactgcaatacaccttacgcaaaggcagcagtgccacttttcatgccatcatgcaggaaatcagcgttcccctgcaccagcgccacgggatagatgtcgtgtcgtttggtaactcgctacatgaccgcgattgctactacctgattcgcgcctttgacagtgctgaaagcatggctgcggttctcgatgctttttacgcaagcgatgactggctcagcggcccacgcgaagagattattcgcagtatcgaaaccagcatgaaaacagtgataagtctgccgcaggaaagcgtggaagggctgcgggtgcaatcgtag

SEQ ID NO: 167101 - DNA, 2295 bp, Enterobacter cloacae
atggtgcaaagcattgacttacttagagactacggaattttcagaaattacatcaagactgatgcaaaagattttggaaggcttaatttaatatacggctggaatggaagcggaaaatcaacattatcatcgctttttgagcagatagaaaaccgtcagaacactagataccctaattcaaccttttctataaaaaccttcgaacaaggaacgataacaaaagataacatttccgcaaataatttaaatctgaaagtattcaatcaaagcttcataaacaaaaacattgactggaataattcagtaaaaagtattttattgatagctcaggaaaaaattgaagagaagaaaaaattagaggaattgagagcatcttttgataaaaaaacaaaagagtatgtaagacgaaaaatagcgaatgacaaacttacagaagaacttcaaaagttcctaacggatgcagctaagagaactaaaaccagcttgcaagtcattgataccagtgactcaagatttttaagttataacagaacaaaacttgaaaacttcatcacgtcaaatgttgatctaataaaaaaagcagattcaatcctagatataaatgaagtagcaaggttaactaaagcagcaaatcccacacaaaaaccggcaattacaaccaaaactccgagcgtagactcttctctacttaaaaaagcacaagataggttaaatgaactatttaaacaatcagtaacaaacaaagttattgagagcttaaaaaacaatcaagatatacaatcttgggtttttagtggattgaatttaaatctaggtagcgatagctgtcatttttgcggaaacaagatttcacaagaacgaatcgatgaattaaacgcacattttaatgatgaatacagaaaattttcagaaactctagacaaagctaaaacatggttaacaagccaattcattgtgttagcaagcaacagtgatattgatatttatgacgaacataaagatcttctaaaagaaaagtcatcactccttaaagatgaggctgaaaaaataaacagttacatcaatgaatgggagaaaacattagatagaaaaataactaaccctttcaacattgatctctttgccgttgagatacctaactccttatttattaacttcaatcaaatcgcaaccgaaattaataaaataatagaaatgcataataaaaaatgcaaagacttcaaagaagaaactcacaaggtaaaatcaaaacttgagtcacactatgcagcatcggaggtaaatagcttcgattatttcaggaaaatatcaaatcgcgatgcagaaacaaaaaacttgcaaacaaataataatgacctaaaagaaataaaagcagaaataaaatccattgaagattcgttatcaaatgaaaccatagcagcagatattttcaataagcatctacacggttttcttggtcgttcagaattatctctccaatttaataaagaaaaaaatggatacgaaatactcagagataaccaaattgggcatgcacctaatcttagcgagggtgaaaaaactgccatagccttgatttactttataacaaaactaacagagaatgataataaaatctccgacagcatcattgttttcgatgatcccgtttcgagttttgattcaaaccatctatttcattcatattcatttataaaaacgtattgtaatgatgcaaagcaactttttttactaactcataactttacgtttttcaaattggcacgcgactggttcaatacaaacaataaaaacagaaaaaggaaagaaaaagttgaaaacgcatttttctataccattgaacccagtgctgttacgcctcgctcatcagcaatatgtaatgctgacccgagtttaattgattacaactcagaatatcattatatctttgatactttgtataagcataaagaacatcctcgactaactcgtgagcaggcattctttacagcaaatctatctcgtaaattgttagaatcatttttaaacttcaaatacccaaaacatagatcagatttatcacaactaatggatgttgctgcaaaaaattgtattgcctttgatagcaataaaaaagaaaaggtttatcgcttcattaacaaatattcccatagtgctgttatcgaaatgaatgaagatattgctgaaaatttaataggtgaaggcacaaacataatcggagatatctttttatggatagaagaaattgacaaggttcattatgatgaaatggtaagtgtttgtcagaaaaactga

SEQ ID NO: 167102 - DNA, 1260 bp, Enterobacter cloacae
atggcgctgactgacgcgaaaatccgggcggccaaaccggacaataagccttacaaactgaccgacagcgggaacatgtttttgctcgtccatcctaatggctccagatactggcgattgcggtatcggcacctcggcaaagagaaaactctcgcgctgggcctgtatcccgatgtgtccttatctgaagcccgtgaaaagcgtgacgaagccagaaagctcattgccggaggtatagacccctgtgaacagaaacgcatacaaaaagcagtcccggcctttgagcaaacatttgaagccgttgcgcgccggtggcactccgctaacagacagtggtctgagtcccacagtgagaaaacgctccgaagccttgaaactcatgtgtttcccttcatcggctcccgcgatattaccctgctgagaactccagacctcctgctcccggtcaaagcagccgaagctaaagaaatatatgaaatagccgcccgccttcagcaacgtatcaccgcaattatgcgctatgccgcccagtccggtattatcagctacaacccggcaggtgatatggccggtgcactaacaacagtgaaacgccagcatcgcccagccctcgccttaaatcgtatttcagagcttcttgaacgactggatatctacagaggacaacccctcacccggctggccaccagactcaccctgcttatctttattcgctccagtgaactccgttttgccagatggtctgagatagacttcaggaaagccatgtggactatccctccggaacgaaaacctattgacggggttaagtactcgcatcgtggggctaaaatgcgtacggaacatctggtgccgctctctactcaggcgctgaatatactgcagcagatccacaccatcagcggagaacatgagctgattttcaccggcgatcacaacccatggaaacccatgagtgagaatacggtaaataacgcattgcgcctgatgggctacgatacaaaagtcgatgtctgtggtcacggcttcagggcaatggcatgcagttcactgattgaatcgggactgtggtcgaaggatgcagtggaacgccagatgagccatcaggaacgtaatggtgtacgtgcagcttacattcataaagctgagtttctggacgaacgcaggctgatgctgcaatggtgggctgatttcctggatgccaataagaatgaaaccatttcaccctttgattatgcaaaaatgaatgcaccatcataa

SEQ ID NO: 167103 - DNA, 492 bp, Enterobacter cloacae
atgccagatatcactcgtgaggaggtagaaaaactgctttcttacaatccggaaactggtgagtttagatggaagatcaaatggggaaatcagtctgccggtaatttagcaggaaatactgacagacttggttatctcaccatccaagtgcacaggaagcttattaaggcccaccgaatagcatttcttctcatgactggaagttggccgaaaagttacatcgaccacataaacagaaatcctcgagacaacagattctgcaatttacgcgaagtaaccccactccaaaacaccatgaatcgttccgtcgcatcaaacaacacttccggtgtcgcaggagtttcttatgaggagagaagaggaaagtggcgagctcacatcaaggtgaacggaaaaatgaaaagccttggatatttcaagcaaaaagaagatgcgatagcggccagaaaaaaaggtgaagaaactcacttcggcgaattttcagcacgataa

SEQ ID NO: 167104 - DNA, 129 bp, Enterobacter cloacae
atggtaaaccagcagcagatcagagaggcccagcgactcgcgtcgttcgcggtactccatcgcaatgctccggcgtgggaagaagcaaagcgtctttacgccgtcgccatcgggaggactcttcactga

SEQ ID NO: 167105 - DNA, 579 bp, Enterobacter cloacae
atgatggacagcttaaagcaacgcatcgttgattacgtggcctctaaccagcctgttaagcgcgctgacctcatcgtggtgattggcatcagtggtaagggactggaccgtgaaatcgctgcactgcgtggcatgggtatgattttcagcatggctggcttcggctacttcaccagtgaagctgactaccaggaatggcgaaaaggtgctggtgctctccacctgaagaaccgggcgttgaatggcgcactcagcagtgcagcagcacgaagagtgagcgatgagagttatcaggcgcggatcgtgtccgtgctgagtgatggcagcaaactgggagcaactcaaattgctgaggccatgggtgccagttaccggagcatctccagcgttatttcggtgatggtcaactccggtgagctgaagtttgaaggccagaaaggccaccgcgtttattcgctggcgcagacaaaaaagaaagcaggccgccgtgctgagtcggtgaacgtgatctgccaggagtgccgaaacagtccggcgatgagaagggtattgatggtttgggggagggtaggggtatga

SEQ ID NO: 167106 - DNA, 405 bp, Enterobacter cloacae
atgagcagtaaatacgaagatctgattaaaaacgccaggattaatgccgactgtggtgagcgcatgtcaccggaagaagttacaactttgcttaacgtggtcgaaaccacattcgcggcgctggctgcggagaatgcgagtctggataacttcattgcggctagctgttttgtttatgctggggagcttggctactggcctgccattgaccactctccagagataccagcgactaatcagttgagcgtggccgagtcccagtttttaacggatgtaatgactgctgctgggcttctgtcttgcggaaaacgagataaacaattagcgcaaagactggctgatttttgtgtttcaaaaagagacgcctctagtcctgcccagcttcgcaaaggagtgcagtcatga

SEQ ID NO: 167107 - DNA, 243 bp, Enterobacter cloacae
atgagcagtgaatttctgatttatgaaaaccgtatcggtagcaagctttatctgactaaattggacgatgaaaacaaccctcttagcggaattggattccagggcagtagcgatggaacagtaccgctagcagcaggaagctgcccaaccagggaagatgccgtgaaggttattgcctatctgcgcgaggcgattggcgatgggtctgaagattatcagattgaagagagggccgcccaatga

SEQ ID NO: 167108 - DNA, 243 bp, Enterobacter cloacae
atgcgtggaatatttttagacagtaaaccgtgtagtgaagaaaatagcagatcgaagcatctagtacagttcgaagatggatcttacagcgttttgtatagttcaaacgacataatattcaaaaaaggtgaaaaatttaacaatgatggcggacactggaaatctgatgattttggtagttttcagatagtagcggcccccaaaatgtcagaagaagatgcaaatagagagtttgaaagatag

SEQ ID NO: 167109 - DNA, 249 bp, Enterobacter cloacae
atgtggtctagccaagacatagacttttacaccattggaaagaagttctttgatgaaagcaacctgcatatcaaaggctttagaagtaacgtcattccagtctttatcgaataccctgaattctttatttctgtcatcgtattgaccccagaaatcagagatgattacaattttttgttttttagcaaattcagccctgcgattattgtaatcaacaatttgctgggcaagttcgttagatatttttga

SEQ ID NO: 167110 - DNA, 1329 bp, Enterobacter cloacae
  misc_feature (1251)..(1260): n is a, c, g, or t
atgtcattgaaatatagagcagatattgatggtttaagagctattgctgtgcttttggttgtcttcttccatgcgaaatttcccattagtggaggcttcgtaggtgttgatgtgttttttgtaatttcgggatttttgataacgtcgattatcaacaaggagatcattaaccatgatttcacattttcagggttttacctgcgaaggataaaacgaattatacctgcatttgttttcatggctgccattgtaacagtttactgtttttactatctcatgccggatgatctgacaagttatgcgaagagtcttgtatatgcgatggcgggaattagtaacttttactttctggaaaacacaaactattttgagagcaccacatacgagcctctgctgcacacatggtcattagctgtagaagagcagttctacgttgtgttccctttcatcttgttggcgattaacaaactaagacattcaaaggtatatgttgctttctttgcgttgctatatgtattagctattgcattgtctcattactacgcagtgaatcacaaagatgctgcatactacatgctaccattccggttttttgagttaatgacaggggctttggttgcgatattctataccaaagctgtagagtataaatatagccgaaatatcacttcagttctcggtgcgttgcttatctttggaagcgcattattaatagatgacaaatcaacattccctggtttaacagcacttcctgtttgtgtaggcgctgcgttaattatattgtcaaatggtggtgcattcaataggttcctaactattaggcctgtagtgtatattgggaagatttcctattcactctatctctggcattggcctgtaataatcctcatggaatatcgtggtatggatatgaatgtcgccaacgcctggatggcgattgccatttcatttgccatgtcagtaattagtttgcatcttgtcgaaaaccctttgcgacgagcaacgttgagattccgctctgctttctctgcggtatacggcatccctctggtcgcgttcgcatcgcttacatatgccacagtaaataactcagggtatcctgacaggattaaagacatgtcaccggagttgctcaatgagaacagcccaaacgttgtgcgcgctaagtgcatcggaccgatgaaagttggcaactttgatgagtgtaatcttggtgtggtgaaaagtgagcatgacggagtaatgattggnnnnnnnnnngtgactcctttggtaatgcctatgcaggatttattgatgttcttgcaaaggatgcagggctgtcgataa

SEQ ID NO: 167111 - DNA, 312 bp, Enterobacter cloacae
atgaaagtcatcatcgtggaagatgaaattctggctcaacaggagctgagctggcttatcaaaacgcacagccagatggagattgtgggtacctttgaggatggtctggacgtgctcaagttcttgcagcataaccgggtcgacgctatttttctggatatcaacattccatcactggacggtgtattactggcgcaaaatattaatcagtttgctcataagccttttattgttttcgtcaccgcctggaaagagcacgccgtagaagccttcgaacttgaagcgtttgactatattctgaagccttactag

SEQ ID NO: 167112 - DNA, 516 bp, Enterobacter cloacae
atggtactgactcacagcgagctctgcgtgctggcctgtaaattccttcagaacaacggcttcaaagttgcttttcatgatcgctttgttgccgctgtgtctacgggcgaacagcctgatgcgctggggttcagaaatctggcctcatgcctgatagaggtgaagtgctcacgtgctgacttccttgccgaccgtaaaaagccatttcgcagaatgccaagcgaaggcatgggggactggcgattctttatggctgagcctgggtttattgaggtgcatgaactccctcccggctgggggttgcttcatgtaaaaaatggcagggtctataaggttcatggatggccaggcaatgccatgtggtgcaataagtcatccaagccattcgtagccaataagcaggcagaatgcgattacatgtacagcgcacttcgacgcatgcaggtgcgtggccatcttgaccaggtatatgacggccttccaagtttccctcctccggaggtggccaatgcctaa

SEQ ID NO: 167113 - DNA, 438 bp, Enterobacter cloacae
atgagtactattaccagagaattcaccaaagagcagttgatcgcgcgtatagagacgcaaaaagaaaccgcatggcaacaccctgaatgcagtatcgcgcttatggatttacgcctggctgaaatcgcgctggcatcgctcgaagtggagcctgtggcgtggcgctatcgccatcataacgggctcgcgccgagcaactggagatatgttgatatagaaatagaatgcaatatggcgccaaactatcaacgtcagccactttacatcgcctcgccagcaccggtagtgccggacaagagaagtccccgagatatggaaatgttactcgatgaaacgggtgtagaagtatctgaccaggatctagagcttgtccttacgctgatgtctacgacctggaacgaatgccgcgccgccatgcttcagggaggtaaatcatga

SEQ ID NO: 167114 - DNA, 342 bp, Enterobacter cloacae
atggaacctggccgcctccggcatcgtgtccggattgaagtcaaaacagacgaccgtgacaatttcggccagccgattggctggaaaagtctgggcgttgtctctgcggatattcgctctgttaccggacgggacttcatcagcggcaacgccgaacgttcgaacgtcaccacgaaaattttcatgcgatatcgggatgatattcgagccacggttactcgcctgattgaggtaactaagaagggagaaggccgcgttttcactgtgactgcaccgttacctacgcgcgacagacgcaatattgaagtcctgtgtatggaggatttcacccgtgttccctga

SEQ ID NO: 167115 - DNA, 378 bp, Enterobacter cloacae
gtgttccctgaacttaaaagcgaagtcgaaaaacttcttggcgtgaatgtttatccgttgataggcccgcaaacagagggcgaatttgtgacgctgcagctgataagcgacccacggcttgtcattggcaccatacgcacgaaacttgtggcggctcgttatcaactgagctttatctcttctctttacagtcgaactgaagagatggacaagactctatgggcggtctgggaaaatgttattcacggccatattgggggatatcccattcaatatgttgagcggcagggaatgagtgaaagtttcgaacctgatgacggtggtaaatatcgccgtacccgggattacatattttactgcccggaggatgcttcatga

SEQ ID NO: 167116 - DNA, 156 bp, Enterobacter cloacae
atgattatcctgtacaaaatcaacatggcgtcctaccgcctcgttaaacattttttggcgaaagctttcataaaagaaccctcgctcgtcgccaaagactgttggttcaaagatctttacatcagggatagatgtttcaattactttcacgcttaa

SEQ ID NO: 167117 - DNA, 489 bp, Enterobacter cloacae
atgttactcaccgatctccttcatggtaatacgcagattgacggtatcgcctaccagaccaatattctggcgctgaatgcggcggtggaagccgcgcgtgccggtgagcagggtcgcgggtttgccgtggtggccacagaagtccgtaacctcgccttgcgttcctccagctccgcgaaggagatccgcgagctgattaacgaggccgtgagcggcgtacaggacggcagtcgcctggtgcaggatgccggagagacgatgaatgcgctggtgacgtccgtgggtgaggtctccaccctgatggaagaggtcaagaccgccagccgtgaacagcgtgcgggtatcgaacaggtcaacgtcgcggtttgccagctcgaaggggcgacccagcagaatacgacgctggtagcggaactgtcgtcggcggcgaaagcgatggaagagcagtccatggagctggaaagcgtggtgaagcggtttaacgtttaa

SEQ ID NO: 167118 - DNA, 888 bp, Enterobacter cloacae
atgattggaactgatgaagtactttctcgcttagttcattcaggtaagcttgctgagtttctcgcaaatgttgatccaatgaattttgaagaatttagtcagggagttattttatcgcttagaagtgcagtgcaatcgattgaaaaaaatgcagataagtattacaacttaactgaagagcaacttagcacgacaatttctttattgttagaacgttcaggatataacactaaaaatgaaccctctaatagaggtcatattgatatatatgttgaaaaaaaccattttagttggttaattgaagcaaagattggttatgataatcaaaaaatatttgagggattgctccagcttgcttctaggtatttaacagaccaaagttcagcatgtttgcttttatatttccgtcaggctgatatcaaggcaacgttccaaaattggcaagattttttgcagaaaaaggaatgggtaacatatgcgacaaacaacaatatacttgataaatgtacgcgtgcgttcgattccacaacggtaactaaagattcttattgcttcggctatagttttctttcaaatatcaaaacaacatctggtgatactgttaatatctatcacgtaggtgcaaatatccattttcatccatttgatagcagtggccgagatggtgttcaattaagaaagaatcaagcgaaaatatattttgagcatatatatcaaactcgacaatctggagttcctttggatgaggctaaaatatatcaggaattaaataattattttgattttgataagtcatctaataattctggaggtcaagataaatctaaaggaagaaaggcgaaagcgcctggaaaaaaaacacctaaggcggtaaaaaaagccaagtaa

SEQ ID NO: 167119 - DNA, 477 bp, Enterobacter cloacae
atgacaattaagaagataactgagaacagccttactcagcttttaaacagtgtatgcttggcccgtgataacgcagaacgcgatgataaccgtattgatcactcgttcttttattcgctcgctatggcactggaagagcttcaagagttcaggaaagcagccagcaagccagttggttggactgacgagcaggagctgcgaagcgtcgataaagacggatgcggatatctttttaaagccaaccctgtttctccacactcagacccacgccgcgtcattatggtttatgccaccccgccagcaccggtagtggctgatctgtgcgctgcaattgaagctctgttggatatgcaggttcgtatggttaaacaaactaatatcggtgcatctttctttgatgactcaacaatatccgcaatgaactatgccccgatacaggctaaacaagccctcgaattagccaaaccatacaagtga

SEQ ID NO: 167120 - DNA, 240 bp, Enterobacter cloacae
atgagtaacttgttacttctcaaatgcaccaaagacaccgaaggttggtggactgagggtgaaacttatccagctcgtgtagtttcaggtggttttgttctgcttggtgatgatgatgaattgaatagcgaggggtggagtgccgcaccgatggaacaaagtgaagatggaacagtgatttatcagattggcggcgttgatggtgaggttttattcaaggaaacatcaccatcgctatag

SEQ ID NO: 167121 - DNA, 282 bp, Enterobacter cloacae
atgacactggaacgacttaaacagttattgcaagccatagagagcgaagcatatgacgaagaagttattcataaatcggttagctcagatgaattaaaagatctcgtcaaactcgctctatcggctcttatcattgagcaactagatatgagcgatgcggattgcttctctgtagaacgtctgcatgaaattatttatggcagcaaattacgcgagcaggaagcaaagctactcgcaagattcatgaacgatataaagcagcgtataggcggtgcagcatga

SEQ ID NO: 167122 - DNA, 216 bp, Enterobacter cloacae
atggtaaacaaaaaacagccaaacctttctctgggtgaattatacaaacttcgcgaagcatatcggcatttccagtccatgaattcttttgttcgggcaatcaacgagcttattgatattcgtgaggcagagaaaaaaaaactcaaagcgcagtcaaaaaacatatctcagccaaaaataacacggaggcaaccaaatgacactggaacgacttaa

SEQ ID NO: 167123 - DNA, 288 bp, Enterobacter cloacae
atgaacaaggtagagaaagaacgtttagtcaattatcgccgctggctctatcaggcagaactgaacgagacaaagctgatcgcttataactgccctaaatgccttgagaagttacaaaccactgaagcaccggaaggtgaaacgtgggacacgttttccaattgtcctttttgtggttcgttactttttaaggttacgcaagggggcactgtaaaaattgatttaattcttaatattggaaaaacaaataatggtaaacaaaaaacagccaaacctttctctgggtga

SEQ ID NO: 167124 - DNA, 783 bp, Enterobacter cloacae
atgaaacttgaatctgcattgaaacattttagcccgcaaggtctgcaaatcagtgataacgtaaacagcacctcgcctgaacggttaactggaacagatgttatggcggccttaggtacaacatgcagcagagttaggttcggacttgctgcgttttttgggaaagcgggggtgagcgagaaagatgaacgttctgcaattaaggcgcttactcgttacgccatggaaatagcaccaaagaacgttcgaaaagcttctggtagcgagtttggttggtgcatgaaaataatggctgattatgcttttgcagaatactcacgttcagcttctacttgtgttgtttgtagcaactgcagcggcagtggtatcacatctcaatgtgaggaagtgataaaacatccaggtattgttaatgctgacggcgttgaaatcattccaccaaaaatcaaatatgaacgtgtcgaaagaccctgttcgatatgcaaaggaaaaggaaaaattcaggctcgttgtcgttgtggggggaaaggggagattctcgatagggctgcatccgaagataatgggaaaccgatttttaagcaatgtgggaggtgcagtgggagaggattttcaagtgtctcttcggcaactattcaccgggtaattattaagcgtttaccagaattgcatcaatcttcgtggtcccgcaactggaagccattttatgaacacctggttgacgtatgtaaaaatgaagagcgcagggcagctgttgagttcgaaaggattacaaagctatga

SEQ ID NO: 167125 - DNA, 924 bp, Enterobacter cloacae
atgatttttatccgcacagcaaccggtagtgagcgaatcgaacaatggagcgagataactagcagagctgcatttaaggctcagatctcaaagtcagaacacaaactttcggaaattattggttactacagattcaaagataaaatccattgtggcctcaagggatgcaaccaaccccatcagatgggatatgttgttagaaccgatgatggtattgaaacaaacattggaaacatctgtggcgctgatgaatttggcgttcagtttaaggaattaactgagcaatttgaccagttcatgaagcttgaaaacaataaaatgattgtttccgaagctaagcaaaagtgtgatggatggtcagattttttggaatcattcagaaagagcaagccatcaatagatttttgcgtatcgaacattgataagattcaaaattcgaatcatgcaggtcgcctagccgccaccgaaatccgcttgcttgcaaaaagtcaaagtggtgaggtgacgcttagcgaggttgaaacagaaaaatgggcaagggcaattttatttgccactaacaaacacatgcgtgagtctggtgaagccacaactgaatacctcatgggtaaggtttcgttcacgcatgtactgttgcctgaaaataatctccgagaccgctttgtggacatttctgaggatatcaaactcatccgtcagatagagctatcgtcagcgtccagtccggcaataaaagatgttgccctacgtgcaggttcggtagatgaacgaattaagcaattgaaagtgctacatcatgatgcgagtaaatttttaaccaagaaaaatctctcaccaataagctcaaaactaaaacattcttcaactgcacctcaaggtgagtttgtccattttgagtcattcctgcgatctttaggcagataa

SEQ ID NO: 167126 - DNA, 1668 bp, Enterobacter cloacae
atgacagacgcttgcaacgatttcttttgcttagttaatctagatcccaacggacctaaaatatttggcttttctgagtttttagctggcctagctcttatggtattagcttggactattgctgatacccgttatcgctttagaatcaaaactgcaccgattccacttgagaaaataactttttgggttgtttttattgtcggatgcttcactattttaacagacctttggagggctaatggtcttcctgtcataaaaggtaatttaattagccccgctggatggcaagcgttattggcaggcagcttttttattacttttcttggatgggtttggtttgcttttataaaaccatcacaatacggaaagctaacaagtaagagatatatagcgacagtatatcagtgcattttacgaggatcaaaaactgagctagctatcattgcggatgagttggctagatcgtctaaaagattaattttttacgccactgatttcaaaagtgatgtttcagaagaacatctatctaatctacctgatgtcgaagctattgctaatgatatgctttccctgatatcagataaaagattttgtaaagcggtaatagaatcttcacagaatctagctttgacattgtttacagaggtcgaaaaatctaataagtacggtgttgttctaggtatattttccaaaaatatacttaccgaagctatcaagtgtgaagattcatttttatatcatgaatctgatttctacgaatctgggtttttaggttcctaccgaccgctgagtagggctatgttcggtaaccctatgatggttgaaaaacttgaggccacttttgatgttggttgggattttgaaaaaacatggaccacaaaagaattaaaggcatatgttagagcttttttagtctttgttaaaggctatattaatgacggtgttccacgtcactcatttgtaatgaatagaaccttagggaacattgcacaaaaatctaacgaattacatatggtgaatggtgtccccaataactgggattccgaaccggttcaaaagcttggtgttgttgtaagtttttttaaagaaattgttaaagagttaaataagaaggaaaaagcttacaattatattttacgcataaaagataaaaacccttaccctcatcatagcatttacgatacattggctaaaaacatgtatgaagtaattcataatgcttcatatgtaaacaatccttggtgggattgttggtctattcatcataatacgatcctcgagtctttttttggtatttacgaaactcctggcgtggctagtaaaattgttcagcataagttgcggcgtgaaatatatgatgaaataaaaaggatggaaactttccctaactttcaaggggcaagggttctaggtttttgtttgtttgcaatggggtttaaggcgagcagggagcgttctggtaaaagtgtgtatgctttgcataaggcccttcttaactgggttaagattaatttcaaagtattacatgagcggaattctaaagtaagctctgcatgtttgttcaccactataacttatgacgtggaaaccaattcgcttgttagggtccatgaagcaaggggacttagtgataaagatcaatacgaatattttgtcttagacgactaa

SEQ ID NO: 167127 - DNA, 744 bp, Enterobacter cloacae
atgtcgctgtatagaaacagtaaggctaaataccaggctgatcgctcagagagagaagcggacagagcagaagaagcagcgaacagagcggaatctgggttgccggttgcagatgtcatttgggatcagcttggtgtatcaggtaatgcccgtaaagcatttactaaaaatcctctggaagcggctgattttaatgctgcacctgcgccgaaaaaagcgccagtaaacctgaatactttattcacgcctggtacatattaccctgggtttttcggctctatttcggatggataccctgagaattttatgtatgcatctgtccgtgttgttgatgccgggtataacaccattattcagatcatcgagagtgctgatggcgcggtttatacgcgagaagggaaaacagatgacgatggaaaaacatactcatttagcgaatggacgggtgggcattcctcgcctgtcgatgtaaaccaagggtatagagttggttcagtaattatggctgcaatcgtcaacaatggcggcgcgtcgttacaatatggacaaaccattagcggggcaggattacgggcatcaagcgtaagcttgcctttctggagcggaggtaacggagttatttattcaggggcaacgttatcaggaacatggcggcatctaggacatgcaaacagtagtggcgctgatgatggtccggtgggcggtagttcctatccggtgtcattattcatccgaatcttgtaa

SEQ ID NO: 167128 - DNA, 402 bp, Enterobacter cloacae
atggaaattttagatgtacgcaatatggtttataccgaaactggagcgattgactgtgaggttttggtcggtgagcattggttgccgttctgtgcttcagaagatgacagcatggcctacggggccacgctctatcatcaagcgatagatggcaaatggggcgaggtgcagccctatgaaccggccgagaaagccttcaatgagccagccagggccgtgacaactaaagcagagctgatgtcgaacgccgaagcggtgattgcgccccttgccagggctgtgaagtacgacatagccacagacgctgagaaagccgctctggaagcctgggagcgttacaccgtgctgttgagtcgtgttgacgttgataaccctgtgtggcccgatacaccagaatattga

SEQ ID NO: 167129 - DNA, 831 bp, Enterobacter cloacae
gtgatttatcattacaccgatcttaatgccacaaaatcaatcttagaaaactcaaaactttggttaactgattataattttttgaatgacaaacaagagtttaatcatggctttaatattttaatagaatgtcttgaagaatttgatgatttccctgatgaatgttctgaaaatttcatccatcgatttagagaagcggttaaatttatcaaacaagataacttctctatgcttgaaaagaataaaatatttgttacatctttcagcatggcaccagactctttaaaccaatggagaagttatgggatgttttctgttgaattcaatgaaacattcttcccggaactacaggaaaaagaagacttatattatttggattgccattatattttagattaccatgaaactaaagaacacgccgaaatattaataaaagagaaaatcctacctgttttgttacaattatcagatcgtcaatatatgatgctgatggacctagagctttcctatcttattgatatatatgcactttcattcaaggacggagcatttgttgatgagcaggaaatgcgtttagtggttagctgtgcacctgatgaagatagcattcagtttagagcgaaaggcaatatattaattccatatcttgaactggaattatcaccgctttcgatcaattcagtaactatagggccaattgacaaccaatcattatcagcttcatcattaaatatgcttgcttcaaagataagtaggcgcatacaaatgaacattgacaatgaatatttcttgaccattgaaacatcggacattccatttagaagtttataa

SEQ ID NO: 167130 - DNA, 804 bp, Enterobacter cloacae
atggaagtgtacgaccttaggagccagaggcttcatcctaaagaatttgaaaagattgtctctcctgtctatgcaagaggcgatgtagggcgtgagtttgttgtggtgcgaggtgcgtcaaatccctttcacacaatcgatggtctaacgttacgacatcgcttcgaatttaaccctaacgcgggttttgatcctttatatgcgcaaaatctaaacaaggttgagcgattaattgattcgggggaagttgttctgatcgaccagcgtcaacgaacaaaagtaaactatccttttttcatttctgaatcaggagaattattttgtgtcgatgaggctatatataatcctgcttttataaattacatcatagaacgttaccgtagtaacgttgccctgtttggaaaaccttccccaacacgggatgcgtttactcccaccactgaccactatgggccgggttactggaagacagttgataatgattatcatggaacgaaaaacgtcctaattatggcgataaatcggctgacaagcatgggagatgaggggcgggttttcggttcggatggtaaagattacatgaatacgtcacgtgacaaaattcaacagtggacagctttacctgcaactctggatggcgagtctcgcgccttcatatctgcaaagtctgtgattaggcgatacggagaagaacgctcaatttatcagaagtatcaggaaagcgacgatgcttgggcggtcagtggtaaatcatggcagtggatacctggagtcagagaagaggattatgaatttaaaaagtaa

SEQ ID NO: 167131 - DNA, 441 bp, Enterobacter cloacae
atgaatttaaaaagtaaattatggtttttctggggaagtatggatgttctcgccatcttgctttactccatatactcatttcggaaagacagaattccgtttatttcagatattgtagcctttagtggcttgtcaaataccgtatccggaggagggtatggtgttctggtaacgctgttctttactttagatatgctccttttattttctctatttatatcatcatggctcttctttaaaagaaaaatttattctgtcaaatttgcgcttattcaggaagtctttcgtcttatttctttccgttgttcaatttcgttatttccactgttagtaagtctgtttggagtatcaagtatctggatgaatataggcttatttttagtatctgaggctataaaaatttacactctcatatttgtaatgaggaaaatcaaagcttaa

SEQ ID NO: 167132 - DNA, 576 bp, Enterobacter cloacae
atgagtaagaaaattctgagtattgtctgttcggttctggtgttctgcagtttagacagttatgcagctacggctcaaatcaataaagaagctggaaattcatcacataaacttttagcaaaccccgatttttctgtacaaataaataaacagtctgtcgcattgggcgaaagatggacgagtgacgttgcacgtaaagttgagttgccagttgaaggccagtttgtcggagaggttccttttgacggaactaattataaattctttcagcatcaaaagtctggattagaaatattcagttccaatctttggtgggataaagccgagcgaagtgttgatgattatattgtgtcgcaaattacgctaacggctgcggatggcaacacagctcgcgggatccatattggttcaacaattcatgaacttgataaagcttatggtggtggcaaggtcgaaaatgattccgaggagcagtgggtttcctacgaattgggtaagaaattactctcatttgagatgaaaggcggcaaggttataaaaataacaatgaattatgataatggtacttcagagtaa

SEQ ID NO: 167133 - DNA, 603 bp, Enterobacter cloacae
gtggctgacgcacacacctgccagattcagggccttctccgcgtcactgttaccggcatacacgaagcgctccgtgacacgggcaacgttgccggtgacctgctccgtaatgctcaccggacgtcccggcagttctgcgtcctcatactgccaggtgcgggtcacggcctcccggcagtccggagcagcgtcctccggggtacggacattgctgacggcgatgagcgggcgtccggcggcgtcgttcaggtgcaggaaaagcccgttatccgcaccctgcgtgcgcaggacgcgcccggtcaggtcggtctggtagctgaagttcgccagtccggcgtcgtgcaggcgcgggtcagcactctgcgtcagaaagccgcgggcgttatactgatggcgggtaatgcgttcactggtcacgtccggggagccgggatggcggtggtacgcgatgtcgcgcacggtcaggccacggttatcgaggactgtgaccgtcggggtcttgctgtaaagcgaggtgcacatggtattctcctgtttatgttgtgcagcctttcaggctgcaaagaaaatcatacagcaaccaggaaaatcaggcgctattag

SEQ ID NO: 167134 - DNA, 276 bp, Enterobacter cloacae
gtgaatgttccgcagctgaaagtctttgttcatgaatgcatccggcaggatatcgtacgttacggtaatcagtaccctcagttctgcgatgaccccgttgcggagctgagaatggggctggatgcattgagggaccagccggtacacgaagaacgtttcaggcagtttgttgaccccatggtatatggtgacaaaccggtcacatgggaggacgcttacaccagcttcaggcaaacggcgctggccgtcctggatgcgcccgcggaagagggctga

SEQ ID NO: 167135 - DNA, 243 bp, Enterobacter cloacae
atgaagcttactcaaaatgctgtaattggtagcagtgggaagggtaaaccaggcaagattgtcattggtgataatttctttttgggatcgaatagttgcgttatcggtgacgatttgaaaattggcgataacgttattattggcgcaatgagttttgtgaataaggacctgccagataactgtcgagttattacgaagaaaacagcagagattgttatcttacatgcatatgagcaagcgtag

SEQ ID NO: 167136 - DNA, 225 bp, Enterobacter cloacae
atgcaggcggggggggcgcttatagctggaggtgttatccagatgctttctccacaggctgctggactgtccagcaaacaatctgcggataatcaggccagttacgctttcggcggcgtaactaacactgcggcgcagggttatccggtcccgttgctttatggccgccggcgaatcggcggagcaattatttcagctggtatttatgttgaggatcagcaatga

SEQ ID NO: 167137 - DNA, 387 bp, Enterobacter cloacae
atgggattcccatcaccagctactgactatgttgaagaccggctctctcttgataagcatttaatcacccatccaagcgcaacgtattacatgacagcaggaaatacttattggcatgccgggattcagcaaggtgctttgttgattgtggaccgctcagcgaacctttgcgatggttcagtggtggtttgcaggctggcaggggagtttcatattcgtcgctatcgcttacatccgtaccggcattttgagagcctggcgggggatgggaaacgtgagaaaatcaatccagagtttgccggtgatgacgacggaatttttggagttgtcactcatgctgtaaacgatctgcgcacgcaggagtttgatgataacccggtcatgtga

SEQ ID NO: 167138 - DNA, 240 bp, Enterobacter cloacae
atgccacgtctatacgaaattgaaggtgcttttcgcgctgctatacagattgaaccaagtggccggaggaccgtcacaactcagaaatttgtttgtgaactggagaaggttaactggaactggtcactgaaggaggctaacacatggatcgagtgctacgtgacgacgtttaaagatgtcactgatcacgaaggagaagaccggaccttccagctattcaacccgaacggagggctttga

SEQ ID NO: 167139 - DNA, 144 bp, Enterobacter cloacae
atggaactttcaaaggaagaggctgagctaatagctggttttattggagaacactggaaggaattttctgatagtgttgaagatgttataagcacttgcgcactgcatcgtctggctgaaaagcttggccttgaatcggcctaa

SEQ ID NO: 167140 - DNA, 519 bp, Enterobacter cloacae
ttggataaattcaccaatccaacaatttacagatatgagcacgtggaaattaatggagtgatgcgcactggactgtattttcatgacattcacgggcgagattggtacgaaactcttcgctactggaaaggcgctatctctcttgatgatgacgggattgtgattgcttacgaggctgatgtgtcatttatgggtatgcaggaagggcgcgacgtttatgaagttgatcctgcggatgtgccaggcaatgtgttgggtaattttaagtattccgatggcacttttatcgatatacgtccaagcgatgcagctgttgcggaacaaaagaaaagtgacttaatggcatcagcggaacgagctattgcccctcttcaggatgccgttgatttatctatggctactgaggcggaaacggtcagcttatctgagtggaagaaataccgggtactacttaatcgtgtcgataccagtgatgttcaggacatcgaatggccagctccaccagagccacttgattga

SEQ ID NO: 167141 - DNA, 1710 bp, Enterobacter cloacae
atgatactgggtttcggtaacaacgttgtgtcttctctggcatctgacattacggccagccagactactttttcggtaattccgggggatggtcctttatttgcctctctcctgacatctgatttcagcaacaaatccaccacattaaaaaactacgccaaaatcactctgacggactccggcgaaacagcgtttgaggtctgccatctgacggcggtcagtggtgacacgctgacggttattcgtgggcaggaaggaacggcggcaaagggctgggcgctgaaagatgtggtcgcaaacttcgccacccgcggttcggaaaatgcctttccccagatcgcgcatatccagagcgggttttatacatcgggtacagctggcggtaccgcgaacgcgctcaccctggaactgccaactacctttttcctcaacgggtcggctgattgggttctgaaaactccgattgtggtgtatccatctcagaacaataccggtgctgcgacactgcagctgacaatgggcgggcgggttctcggcacgttcccgttatacaagggtaacaaagccgcgctggttgcgaatgacattctcaaggatgtcgcattggtgtgcctactggataacactaagacgtttttcaacgttgcgaaccctggggctatttatgccgggcttgggacagcggcatttaaggatgtaactacatcccgctacgacacgtcttccgggcgtgttttacaggtcggggattatggcctgggatcaacagttgggctatcgcttctatcctcaatatttaacatcacgtgcacggctaaatacgcagcacttggcgccggagcaggtagctcagccactgaaggaatgccggcaaactctgggaataccaggttctcagttgatgtcgacagcatttattcaaaccaatactgggtaacgctacgcagttcaaatcaatcttatgtggggatgatcaacaccagtgcgaagaccgcaacctggtctcaactctatagtacggcgttcaaaccaacggcgggggatgtaggggcgcttccgttgtcaggtggcactatggcaccagcagggcaaattagcgtatcacaagttggaaaaggaatgtgggtcagccagaacaatgtcggcgcaccagtatttcagaacattgatgctgcagccacgtctgaatactggccgatcttcaaacaacattacaaacaaggaaattctacctggtctgcgggaatgctgattaatgaaggtgattttcatctgcattttctcaactcagtaggtgatactgcaaattttaggtgggttaaagacggtcaatttataccaggtaactacgcgaactttgatgcacgttatcaagcaaaaggcaattacaccccagcagggcaggcttacaccaaagcagaaagcgacggcaaatatcaattaaaaggcaattacgcgttagtaggcgcgtcctatacgaaggctgagtctgatacgcgctatggggttgttaacggtatccgccgtggtggtcaacagctcaggaacccgactgatacctggtttggcaactgggaatcacctgcaggttgcgttgttactggtattacgatggaaaacaggagtgatggccgaaagctcggcgtttattttcgtcaaatgcaatatctgaataagcaaacgaacgtatgggttaacgtaggagattaa

SEQ ID NO: 167142 - DNA, 624 bp, Enterobacter cloacae
atggaagcaccagtcaataaaattattccttcatatccctttattcagtatcgcgatgacccaaatatcgttgctttttttgatgcttacaacgaaatggcgcaggagtatctggacgaaatcagcgccctgagcatgccttactggccttctccggctctgtcggggaagttactggattgggtagtggaaggcatctacggggaaaccaggcctttgcttcaggtttctcaggacgccatagcgaagggggcctacaacaccatcgattacaacacgatcccttatgccggattgaagaactatataccaggcgcaacgacatacgttgttgacgattatttcaaacgcatactgacatggaacttctataaaggcgatggtgtgcagttcaacatcgactggctaaaacgccgtatcgcacgtttcttacgtggtccaaatggcatcgatccgccggtgacagatacctttgatatctctgtcgtgccggacaacggagttttcactattttgctcccgaactcgaatgacccagtggggcaatttctcaaagatgcgatagagcagagaattgtaaaactaccgttcatgtacagcttctcggtcgatttttctaattaa

SEQ ID NO: 167143 - DNA, 1233 bp, Enterobacter cloacae
atgtctgatctacccataatcatgactgaagcaggtgcacaacccacgccgccaaaaacattgctggctaatcttatcagtagagtttcgcaaaaagtaccaggttacacagctaacctaccggcagggttgatcaccgacctcgcgagtacggctacaggcgctattgcgctcatcgaccaggcccgagttgatctcataaattctgtgacgccatacggtgccaatattcctttgctgaggcagctcggcaccacctatggcgtccagcagggggagggtacgaacacatcggtttacatcactttctccggccccccgggattcggtataccgaaaggatttaccatcggtgatgggaacaaccaatacgccgtggttcgtgacactgttatcccggcgagtggtcaaaccgaacctgtctacagcctggcaacgtctccgggttcatgggcggtaccggaaggtacggtaacccagataatcacatcggttccaaagggctacacggtgacgtgcacaaacctcactgccgggttgccagggcttgctgaacaatcctgggcatcatatcgcggccaggtgatgcaatcaggcatgaaagccgtgcaggggacgccagattacttccggacggtattaggggaggtggaaggcgtacagacgagcctgctttccttccgtcaatcctcattgggtaaatgggtggcaatcgttggcggtggtgatccctatgaagtggcctatgccatttataaggcggtgccagatatctctgttctgacgaacgatgtaagtaacccatctggcggggcggaagtcgagaaaaaaacgattcagattgacgtataccctgactcatatctggttccgttcgttgtgccaacgtctcaaaccgctgccgtcttcatcacctggaatacagcatcaacgaactatatcgatccggccggaatttccatggccgtgcagcagccggttgctgactacatcaatgccattgctaccggagagccaataaaccttctccagattcaggagatttttctcgaagctgtgcaggggcttgtgcctccatcgctggtatcgatgatcgatattcaggtcggaattaacgggacaattgtaccgcctgaagcgaactcaaaactcttatacggagatacctacggctacttcaccacgaccgcgggacaaattcaggtggaaaaatatggaagcaccagtcaataa

SEQ ID NO: 167144 - DNA, 495 bp, Enterobacter cloacae
atgagaaaattattacttgcttcaatgtgtttttttgctttatcacatacagcgttagcaaaaacggaatggtatgcagagtcgatgcccaatggcctgtcaacgctaacaggcgtatttaataaaaatggtatgggattgatgtttggatgtactgaaaatttcttttcagcaggtgctattgttttaaatgtaaataaaaaaggaaatgcacctggacctactaagatacacgtaaccacattggataatgaaagtgcgagttttattgccgaccttgtgccctccgctgaaagcaattacacattcatgtcatctaatgcattagcctctgttactacattccatttactagacacagcaaaaaataaacccattcagattgaaatgacaaacgataagctctccctcagcaataagtggctggtagacacgaagggatccagtgatgctattaaaaaatttaaggagacctgtccattaattaattattaa

SEQ ID NO: 167145 - DNA, 351 bp, Enterobacter cloacae
atgatgagaacatggggacgcgttacagacgcgaacggcaataaaacatgggtggcagttgaaacggatgcgaacggagattcttcatacgtgtggctgaccacgctgatccagacgttaaagcttggcctcggcgaatcgccattttactcgcagtacggtatcccggctcagcagtcaatcgtccagcaggtttacccagattattacgtcaacatgacgcaacagcagtttgcaggatatttcgcgtcactggcgatttcgaaagttgatggggctgaaaaccccacctatacaatagacgtggtattccgcaatggcgtcagctttcagaaaaatgttgctgtttaa

SEQ ID NO: 167146 - DNA, 720 bp, Enterobacter cloacae
atgagcaacggacaaaaatttccatttctgaaagccctcaacaacgccattcatacggctaatgaagaccgggccgcgatagaaggacggtcgctgccctgtcatgtggtcggcgttgacgggcagatcgtcacggtacagttcgacatgctgcctgacggcacacagtaccctcaggtgacgatcccgatagcaacgttcgaatacatacgctacccggttcaaatcggcgacaaaggggttacagtagcagctgacgtatcgctgagaggcatttctggactcggtaccggcatcgcaagccgtgcgctaacactctctctggtgccgttattttttgtaccgctctcgaataacggctggacgaaagaggatcctgacaaaatcgtgctgtacgggcccgacggggcgatcctgaaaactgccgatggtgccagcagtatcacggttgagccgggaaaaataaccgaaaaggctgatgccatttatctcacggcgaaaaacatctacctgggcggtggcaccattcatcttaatggcccgattgtccaggacgctggcgagatgtctgatacctcagcacaatttattggcccgatgaatgtcacgaacgacgttgttgccggtggcgtaagcctgatgaaccatcctcataatgtgaaaaatgttcagggcgggggtagcacgattgaatctgaaaaacctacggcggggtcatga

SEQ ID NO: 167147 - DNA, 1005 bp, Enterobacter cloacae
atgaaatattatcgcctggaaattactgacaaggatgggaacactcccctcgatgcggccggaaacccaatcggtccgtttgacagctcactcacgcccggcgctggccttcacattgaatttgatgctctcatcaccggatatgacgtcgtgagcagcgggacacagatagcgctatacggggtgccggtaaccatgctgagggagagtgctcagttggccgggtgccagatcgaactgactgcaggatttaccgccgggctgccgctggccaaccctgtccaggctgggtcaatactcagcggccagatctacaatccctttgcaaactggctgggcacgcatcagtcactcaattttattgttaaccccagcccattgcttaatgaccaggggcaggctaccagcatcacacttgatggtaaaaagggcgagaaattaagtgacgtgctaacgagggcgctttccatagcatatcccggcttcacgcttgagataacgataagcgatctgcttgtgttggcagaagatggagtgggcgtgtacaaccgtcttacgcagttagcagcgacgatacgcagtcagtcgttctcaataataaatcgggacgattacaccggggtgcagatggtcatgcaaaaccggacaatcagggtcttcgacaacacaacagaggacattggcggtattgagatacttcctcaggaattgatagggcagccgacatggattggcccagtcagtgtgtcggttaagtgtccgatgcgtgctgacctgcgctgcggcgataaggtggtattgccgcaagatattatttccggtccgggggaactgttagctgtcaattctggtcgctcttactcgtcgcttagaacgctggtcaacttttccggtaaattcctgatcacttcggtcaggcatgttggcgactatctcaatcctgataattccaattcttgggtaaccatttacgaggccgtcgcgctggcgaaaaatacatcatga

SEQ ID NO: 167148 - DNA, 267 bp, Enterobacter cloacae
atgacaaccacgattgcctttaatccagacgggaaaacgccattttcgtttcaggcgaccgtcggcggcgcaaagttattcgcgaccgtgccttacaacctttacgctaacaggtattacgtcagactcaccgacgggcaggggcggattgtctcctacgtgccgctgatagaatcacctgacgggttcgatattaatctggcgttgccgttctctccgggatcacttgtctatcgcgccagcagcaaccagtttgaggcgacctga

SEQ ID NO: 167149 - DNA, 669 bp, Enterobacter cloacae
atggcattaaattattttggtcaggcgttcaaactggcctttgaaatttcccccattttgcttgtcgatggcattgccgcttccataccgggcggcgcgataccgatcgctgtattgactgaaggggtgagcattgttgacgggcttctgcatggtgaaatttcgggccagtcggcggcgttctcaccaatggccggtacgacgcttattcagcaggatgtagggagcctgaatttcttcaatatggtgacggcggccaactctgtggttaaccgatctaaccgggtaatcatgcagatgattcggccggcatcaacgaaaggtggagggtatgctgcgaaaagcatcacgtttaccgcgctgaagctggcccttgataagcataatcagagcggtggttactacgtggtaatgacaccagcgtttatctatacgggctgcctattgcgaacgatgatcgacgtgtctggtttctcagagcagaacaaacaggtgcagcatacctggcagctggaattcgagcagccgctgctgtcgatatctcaggttgatgcagccctcgggaacctgatgagcaaatttgagtccggtatgccgccaacaactccctcttcaacactgtcctggagcggcaacggagacctaatacccgcaattccaaaattctag

SEQ ID NO: 167150 - DNA, 1935 bp, Enterobacter cloacae
atggctggtgatcagttacccgtcctgactctcgatatcgatgagtccaaaattgcggcgctgaatgaaatttcggagaaattcaaagcggccttttcaataggcccaggcggattcccggtaccacagacagtgcctacaacttccactcctgattttcctgtgatccctccagccgaaccagggactgggagagactccagtaaaaagggtgaggacaatgagtttgataaattccttaaaaacctgaacaaggatgcgaaggcaaccctcaagaccttcgggctgattaataaaaccctcggcgcaaccacatcgacactgaaggggttgtttaccactactgtcagctggggagcacgcctcgccgcgattggagggggcgggttattcggctatggatttttggcccaccgcgcgaccgagcagtacaaatctgctcaggggcttggcgttacgacgggagaaatgcaggctgcaaacaatgtgtatggcagccgcttttcaaatactggcaacatcctgcaggcgctggctgcggcacaaaacgatccgaccaatccgcagtatgccggactgatgagcctcggtataaatcctcatgatggtgctgcggcaaacctgccaaaactgctggagggcgtatccaccctccttaaacagtacaaagataccggggtgtctcagactgtgctgaaggggtatggcctggacggcgtgattgacgttgcgaccgcgaatcaggtgctggcaaacagcgacaggttgccacagctgaataaacagttcgcggatcagtctcagcggctggatcgtgatttaggcagtggtacacagcaaagctatcaggatttgtctgccaattttttaaataatgccagtcgcatcggcaatacgttcctgaagacgctggcacgactcaatggccccataagccgtatctctgacaatctgaccgccagtattgaaaaattcctcaatggccgaaacgggcaggcacttttcgacacgcttgccaacggcctggagaagctcggtaactggctgggtagcgatgattttcagcgggatctggacagtttttctaaggcagtgaagcgcatcgcgcaggccataggttctgctatcgactggctcgccggttacggcattaaagcacccacatcagttgatgaagcccggagtcaaagcagctttgacgttactcgttccaaggaggaacttgccaaaaaagggttgacagaaaagcaggcgattgaagagaacgcctccggcactggtttccttaaagcagtgggaaacactgtcgttgggcttctatctggtggcaatgtcaccatagatgagattcaggaacggtggaaatatggtggatggaatggccgaaaggaggagttggttaaaagtgtcacagcgaagaatgacgaagccggtctacctcgaggattactgcccgctgtagccaataccgagtcgtcatggaacccgaaagcattcaattcgacttccggcgccgcgggtcttttccagttcatccctgatacagcgagtcgttacggcctgaacgcacaggaacgatacgacccggaaaaatctgccagtgcagccgcgcaatatttccaggataaccttaaaagatacggcggtgatatcgccaaatctctggctcagtacaacggcggaaacgctgcagtaacttctgacggtaacctcagcctgaaaaaagaaaccgtggattatttgcttaaaattctgcctcaggtacagggtggactggagcagcatccggggatcaggcagaagctggaaactgccagcagtacactggcccagggcgggaaaaatgaccgggcgacgatcgacctacagatcgctcaggtacctggttctgatatttccgcgcaggtgaaggggatctacgttacaccgaggtaa

SEQ ID NO: 167151 - DNA, 618 bp, Enterobacter cloacae
atgaaaatcgctagaaatatgaaccttattattcctgtcgaaaccgaaatcgggacggcctatatccatgctgccccgatctcaaaggaggtatacagggagcatttcttcatactcagtaaaactttttctgccattttttcagaaggtctcggcgttgtggctggccctcgggtcgcctacctcatgcttgaacacatctgcaaaaaggatggcatctgggacgggaatgcaggtgtgcgtaacacgctggtaaacgagattatccgcctttctaacctggtttatccggttgacgggaaaggatgggataccaagcccctggaggtcgcgctggaacgtgaaatcgttgagctcgacgaagttcttggcgaactcgttttttttacatgtgtctcgtcgataaacaaacccgcacaggcacaggggctgatgaaagaagtcaatggaatgtggaacagtcaaacctcatccttgagtcttacggactggatgcgttcattgccgacatcgaagccagtcgccagttctggcgagacggagagcacgttatcagcagcatcctcgactacacagcagccgcaggattctctgaaatctggctcgataccgggttaa

SEQ ID NO: 167152 - DNA, 441 bp, Enterobacter cloacae
gtgccaaatccaatgatcaatccgggcgtattaaaccgcgtccgtgccagcgtgaagttcaacgactatcctgggctgaacgtgtcggcatcgtatcttgcaaaggaaggggtggaattatcattccagggcaatatgactgactttctgccagccatgaccggggcggtccagtctccacagccatacatgattatgcaggcaagggttcaccttctccgcagccaggcgctttcgaaacagtacaaggcacaatgggagcttaatgctgctatcgggaatgcaaaggtgtatagcgacagcaccgtgtttggtgatttcgatctgatgaacacggctatcaccagcgtccaggacatgaccttcgcgggtggtgatcccggtgtggccatcaccatcacagggacttattacatcaactcggaaatgtgggacatctga

SEQ ID NO: 167153 - DNA, 1329 bp, Enterobacter cloacae
atgagcttcaacatcgtaacagttaacgtctcgcagacgattggcgcaattccgtcaaatttgcagcagatgtccgccgtgctttcgttcggggcaacgcttcaggaacccggcaaaccagttctgttaacgcagccttcagatatcaccgatctggtgaattatcccattagctcgctgacagcagaggctcagtcgtttggtaccgattttactctggttctgccggcagatgtttctcttacacgtgacccgggtagcgagctggagatcactatccagaattgctcgccaaaagcatggaacggcaagtatctggcaacagtcatcgatagcaatacgctgacctggacgctcacagattcttcccttgatggttctccaacgacattagggcagttttcgatcacagggagtgatgcgcttgtcactgcagtcgaggggttctttgcgcagggaagttctgtcggaacatacctcctggaactgggataccaatccgatctgccaaaagatgaagtagcagcgcttaaaacgtacatgcaggagcctcttaaacggttctatgcctatctggtaccggagacctggaaggctgacccagactttatcaccctggcgaagctttatacctccaacgagtcgatgcagtatttcttcacgctcgaagacacgccggatgataccaactacgtgacaccatacgctggcatcaaatccattattgcgatggcggacgacacctacccggtcacgaacgcggctgcagcagccatgtggaatttcgtttctccgtcaccatcggagatcaacaaagtgcccccgatggcattccgcttcctgcaggcggtaaacgcaaacgcagcgaaggccagcatcctgaccacgatggtgaagcagaacattaactatgtggacaccggagcggagggcggaatctccaacacgatgctggtgaaaggtgtcaccagtgacggtaatgacatgacctactggtacagcgtggactgggtacagatcaacgtcgatatgatgctggcaaatgcagtcatcaacggcagcaataacccaatcaaccctctgtattacaaccaggacggtattgatcgcctgcagcaggtagcacaaggcgtcttcaacactggtgtttcttatggtctggtcaacgggcaaaccccggttaatgcggtaccgttcaaaacctacgtcaaaaacaacccgaacgactacggtattggccgttatgcgggtttgtctgccacatataccccgatgcgcgggttcgtggaaattatcttcaacatcaatgtgaccatgcagctttcctaa

SEQ ID NO: 167154 - DNA, 945 bp, Enterobacter cloacae
atgccgagtcttgatgaaattgccgcgaataccggcacacaactttccagcgttctccagtcagcagtcgaaaccatttcttccggacaggaaatcacctttcgcctctatgtgcgtcaggtactcccgctcgacggttttgtgtactggattaacgctgaaattataacccctgacgagcttgaacggttggggattgctaacccactcacaacgacgataaagggcagcctacacaggcaggttgtcactgagcaatcggcaacatcttcccgcgacgttaataacatcatcttcacgccaattgcgaaggctgacgatttcaatattgaagacccaaacgccatttatcttggggaatacgaagggacgcagtttgccttttcccggatggagagccggtacacgcaatcgggcattttccattaccgcggtatggcaatccttccgaccatgcgatcgcagatcatcgacagcccggatgacatcagtgacgaacagatcatatctaacagcactcccatctggcttgcgcttaagcagttcgccacggtttacccgtccttcctggttccctcaaacctgaagccgccatacatcgccgccgacgttcgaaatacggtaccgctgcagatggccgccgctgtgcgaagcggtacacgttaccagcttgcgcgggattctgtgcgggtcacgctctacggtttcagcaaccagatggcgctggaattcgttgactacgtggtgaacaaggcgctcgaagacgaggagtttggcatcaccaacgtgccgatcgtcagcgatgtgaaatcgaatcaggtggaaataaacgcgctggcgaaaaagaaaatcgtggattttgacgtgaattactaccaggccacgacgcgggacatatcgcatcagcttatcaaagaagtcatctttaactatgaggtcagataa

SEQ ID NO: 167155 - DNA, 429 bp, Enterobacter cloacae
atgaaagtttgcctgggcgtcatcgatattccttacgactacggagacagctcggcaaccacttacgaagtcgctgaagacctgcaggagcgctacaagcttttcacccatttctgggaccttcaccagaaggaaattattccagaagtgggtgaggcgctggcctgggcgatagtcaaccacatccagtacggtgcgcctatgccgggcggcgagctgctgggtgaaaccatgaaggcgttcaacgttttcctcgaaggggaggaaatggcagggttgtccattgatggtgtgcctacgcaggctgcgcttgaggggaaaaactctcgtctgaaaattgagcgcggagaacgccggccgtcgttcatcgatggcggccttttcaaatcctcttttgtcgcatggataggtaacgatgccgagtcttga

SEQ ID NO: 167156 - DNA, 453 bp, Enterobacter cloacae
atggccatacgcccgacgctcgacggttatatccgtttcgttcgtggcgtgatgggcgttcctgataccgctatttctgacgatgatccgacgctggagtgttgttttcagtcagcgcttgagttgataccgaaacagctggggctggaatgtctgcccattatctacacgaacactgtgtataacgctggcggctctctgctgctgcgctatgccatcgatacaccacccagcacttacttcgctgatctgcgaaaaaatcttggcttgaataatgccgtctacggtctcgtaaactcggctgcggatcagggtacatctggttccatgacaatcagtgatgctctcagcaatctctccctcgctgacctgatgctgatgcaggatccgtatggccgggccgcagttgcggtgctgatggaaatgggttctctctgggggtacacgccatga

SEQ ID NO: 167157 - DNA, 471 bp, Enterobacter cloacae
atgaaattgtatatcgctaactgctccagccagccgcatcttttcaattacaaattaccagaaaagaatcaaccatttggtgcgacgattcgtgcaggtgctcagcacatgatcgataacacctctgaagtcatcaaccacattatcaaacagcatgaaccatatgggttccagcgctgcgacaaagtggacaagaatttttcaggtatttgctattccatcgataaaccagtcacggtggggcgtattgaggaaaaccacgaacagaaagtggaaaacctcgatgacatgtcacagcaaattctcgaagccaatgcggtttcactgaataacgcggttgataacgtagttatccagaacggcgaaaaaccgaaagatgacggcgtacaggttgagatcgttggtgaggccgttaaccctgatcaggctaatccaccgaaactgtctaaaaccgtgaaggtgcaaaagtaa

SEQ ID NO: 167158 - DNA, 1029 bp, Enterobacter cloacae
atgagcgcattcgcacctgcgattaccacggtatcgccttccatgatgcttccggaaattgtcatgcaatacagcatggcttccggtgcattcgacattctctctggcggggcacctgccgtaaaaatcggctcaaatgacctcgtcgtttaccaacgcttcctgcgtgctcgtactcaggcgcacgtcggacagtctctgcccggccagctgccatcttccagcatcgttccaagctatgaccagatgatgacctatcgtatttcgacacgttctcagtacagctatctcgatacagaggcagcgagcgcatggggatacgcgttgaatagtgggttacagctggcgaaccgccagggacacgcccagacgctccgtaacatgctgctgtacggtgtgaaggcatccaacaacgaaggtatcactaactcaccgaacgcggtgactgtgaacctcggtagcgatagccagggtaacgattcctacaccacatgggattccggtgagatgtcgaaattcatcctcagcaccattgcggatcagaagactcgcatgctgctgctgggccagaccctcaccaccgttgtgctgtgcccgcagcgcttcatgaaagccctcgaatggactggtatcgtggaactgaccagctaccagcgtcctgggggcggtactcagacggttggcggactcgttaaaacaatcgcgggagatgcgagcggtgacgacgttattttttgtcaggacgacacactgatcggcaagggtgcgggcggtaccgatcttatcgttatcacaaacccggaaattgtcgtgccggaagcacgccaggacatcaacaccaacattttcgctaccctgatgccaaaccagcaggctgtgaacgtgatgtttaccgacgtcgctgcgcctacagaaatcccgtctccaatgccggatggcggtattaccacgctttataccgagcgagcgacaccgggctggaacttccgtcctgaaggcgtgacgctgctttctgcgaaatattcgtaa

SEQ ID NO: 167159 - DNA, 612 bp, Enterobacter cloacae
atggctaatatctctttcgacccgtttaaaactatgggctcaccgacaggcatgttcaacgtcgagtcgcgtggtcttgtccagggtgatgcgcaggatgatccagcgattcgtctgcaactttcttcgggcacctggtctggagcagatgccgtatgggctggtgtaggtgcaatggaatgcatcgctaccgatgcagccaacatcgccggctcaaatatgaaacctgctactgccgcagtatgcaacgcgttcatcgtatctaatcaggcgtaccacggcattatcacagcagggaataacgttcccctgtatgtcggtaacggctcggtgcattactaccgtgttggctcaggtgcgcgtattcctctgccggttagcgctgctgtggctgctctggcgacaggcgacgacgcggttggcgcggatggtttcgtttgggacctgacgaacaacgtcatcgacgtttactccagcgcgacgtctggcaatccgaaactggatatcaaactgctgatggtttcccagaaagggaacctgacagtgaagaaaaacaccgatggtacggttgtctgggaagatgacaaaccgtgcggcctgttcttgatttaa

SEQ ID NO: 167160 - DNA, 1326 bp, Enterobacter cloacae
gtgaatttaacagagcttgaattagcccagcgcatacgggatggcacagcaccgtcgcccatgaagttttcgaacatgtggctggtgaacctgcgcattacgggtaccggactggcgtaccgttccgggcttaaagaacacgtctggcgtgatccgaaactctaccttaacgatgagtttttgcagcggtgtaacggcctgcctgtcattgccaatcacccggacgatgcggttcttaccgaacaggactttaccgaacgtatcgttggctcggtcatgttgccgtacatccgcggggatgaagtctgggctgtatgtcgtatctacatacgcgacatcgtggagcaaatcgcaaagggtaccgtttcaaccagcccaacagtcgtattcaacaaagcatcaggcaatgtggaggtgatggacggagacaccaattttcttatcgaaggtgtgccgtaccttgttgatcacattgccctggtaacagaggaccacggctctttgggagtgtgggacaaagacaagatccccgcaggggtcgaggtttccaatcaaacaggtgacatagatatggatgagaaattgctcgaaagcatcgttgcgcgagtcgtaggcgatgcattaggcggcgtaaataaggggtttgagacgatctctgcacgaatggactcactggagcaggggtataaagcccgcgccgacgcagatgatgaagcgaaacgccaggctgatgaaaaggccaaagctgacgctgatgaaaaagccaaagccgatgctgcagaggaagagcagcgaaaagcggatgaggctgaagcccagaaaaaagccgatgagcaacgcaaggcggatgaagaggaggaaaagcgtaaggctgacgaagcgcaagcgaaggctgatgaggaagagaaagagcgtaacgacgaagcaatgagcgaagcgcaggcgaaagccgactccgcttatacctcgttaggtaaacgcgcccccgaaccgttctctggtgaaaaaccgctggatttccgcaaacgcgctctgatggccatgcagaaacactcccctcaacacgcggacgttaacatccgcgcgatagctgactctgcaacgttgtccgttcttgaggatgcaatttacggggcagcccgtaaaaacatcaccgaagagatgaacaccacccagggccagcttcacaaacgtgtacgcagtgatgaagcaggtcgtcgtatcactgaatatgccggtgatccaaatgtctggctggcggcattcaaaaccccgccgcgccgcgttgctaaattccacactcaaggaagcatgaataatggctaa

SEQ ID NO: 167161 - DNA, 831 bp, Enterobacter cloacae
atgacagcaatcagccgggcggggaagaagaggaggagtaaaagcctctatgaggtgctgaccgacgcgattaactactacgtcaaaaatggctgggattctgagaaatcattgctcgattggtcccgaaagcttcgcgtagccgccacaagggaagcgcccgacgcggatgtcgcccgtaagcacctcaccgccatttacagccgcctcgttgttgacggtggcgcactcaaagaccagccgcctgacggtcctacgaaagtcaccctcgataagctgaaaccgcagttccgcgaagaactcaataagcgaattttttccagcgccaatttgatccagttgaaccgcgagcaggcgattgaacgcacggtacagcgctttcaggggtgggtgacttctattccgcctgacggcgttagcgaaatcgacaagaacgcgcagaaacaggcgatgcgaaagtctgtttccgatctcgacttcatcagtcgcagggtggcaatcgaccagggccacaaactcgccagcaacgtgaagtacctgctctcggtacagagcggggcaatcgccttcaggtggcattcgaactggaggcggcccggttacgactaccgggttgaccataaagaccgcgacacactgatttacctgctgcgcgattcatgggcagtggaacaggggctgatcaaaccagtgcacggtttttacgacgaaatcaccgcggccggcgaagaagttttctgcagctgccaggtattcccgatttatgcgcctcaaaaactgcccatcgaatttttaacggagaagggaaaacgtgaatttaacagagcttga

SEQ ID NO: 167162 - DNA, 1425 bp, Enterobacter cloacae
atggcagagattcagattgacgcggctctcagctctgcgctggcgaagatactggagtctgacgaaattcagcccggtaccgacgttggctatgaggtctgtaagctgctctggcagttccacccgctcggcggaaaactcgttgaaaaacccatctcgatggcgatgtgtaagccacggcaatatagcgttgatacggacccggatgaacgtgttgttcgccgctttcaggaggtttgggagcggatggagttgaacgaaaaaatcaaaaatttcttcttcatctccagatgttacggggccgcggctatcggtgtgggaacgacgtccgccccctgcaaggatccgctaccgacgttcgggcttaccgaagaagaagtctatgtaaacgtgtgggatccactaaatgcttcaggctcgatggttactgaccagaaccccaatagccggtatttccagaaggctaactcggttctgaaaatcagcgggaaaaactggcattcatcccgcacgctgaaggttttcaacggcacaccaatctatctggagtaccagaattcggcgtttggttttaccgggcgtagcgttttccagcgtgttctgtattcgatgaaatcttacatcgggacgatggttgccaatgatctggttagccagaaagcgggcgtgttggtcgccaaggttcagcagaacggctcggtgatgagcggcattatggctgccgcaaccgggaaaaaacgcgattttgtaaaagagtccaggaacaaaggcgttatcagcatcgggcaaggcgacgatattgaatctcttaatctgcaaaatatcgataaagcacttaccacatctcgggacagcatcatctctgatatcgcttccggaagtgacgtccctgcaatcctcatcaaagaagaggcgttttccaagggctggagcgatggggcggaagactcgaaggcaataagccagtacatcgacggcgtgcgccagcttattgaacctgtcatggactactttgagcgtctggttcagtacatcgcctggagcgaggatttttacaactccatcaagaacgactacccggacatcatcacagaggattaccagacaacgttcttcatgtggcgccgcgagtttacagccaaatggcaggaactcgtcgaagagtcaccggataaacgccgtgaagccgacagtaaggtgattcatcaggctagggagctattcacagcgttgaccaccaatatcgacccagaaaaccgggcaattatcgccgattggctatcaagcgtagtcaacgccactcagacctatggcgatgtccctctcatcatcgataccgaagcgctggcgaactacgttccgccaccaccccaggagccactgaatgacagcaatcagccgggcggggaagaagaggaggagtaa

SEQ ID NO: 167163 - DNA, 1323 bp, Enterobacter cloacae
atggcggagatattctgtaaaaagcttcacaccgctcagtcgcgcgtctggaccgaaggaagccagcaccagtacaacgtcgttcgatgcggccgccgctggggtaagactgccatcctgggcaatatcgccatttcctacgctacatcgtcattcaaggaaacgggcggcgaacggctacagggcggcagggtcggcatcttcaccgctgagtaccgccagcagcaggaaattttcgattatctggaagaagcactgctgccgctgatcaaaagcaaatcgcgcagtgacggtcgaatcatcctgaagaacaagggacgcatcgacttctgggtgacgaacaacaacccgctggccgggcgcggtcgtgaatacgacgtggtgctgatcgacgaagcggcgtttaccaaatcgccggaaatgctggaagaaatctggccgaagtcgattaagccaaccctgcttacccgtcgcggtcgcgcgtgggtgttttccacgcctaacggcaacgacgataagaacttcttctatgcggtctgcaacgacaaatcgcttggctttcacgagcaccatgcgccgacatcgagcaacccatacgttccgcctgatgagctggagaaagaacgacaggcgaatgacccacgcgtgttccaacaggagtttctggcggaattcgtggactggtccaaagacgcgctactggatatcgacaagtggctggaggatggcaagccggtagctatgccgaccacctgcgacacgatattcgctgtgatggacacggcccttaaaggcggtaccgagaacgatggcacaggtatcgtctacttcgcttatgagcagacttactcagagccgcggttgaccatcatcgactatgactgcacccagattcaggcatcgctgctaccggaatacatgcctggcgtatatgacaatctggatcgtctggcgaagatttgccgcccgcgcttgggtagccagggcgtgttcatggaagacgccgctttcggcgctgtgctaaaccagaaagccccgactgaagggtggcagatgcagcccatcaaatcgacgctgacagggaaggggaaagacgaacgcggcgtgctggcatccggccaccactatctgggcaagtgcaaaattactcgcgaagctcacgaaaaaacggtgacgcttaaacaggtcaccgccaaccacctcatgaaacaagtcgccgggttccacctggcggatcccaaagcgcacaaacgcgcagacgaccttttcgattgctacacgtatggcctgatcatcgcgttcgggaactacgaagcactatag

SEQ ID NO: 167164 - DNA, 1140 bp, Enterobacter cloacae
atgagtaaaccggattgggggtcactacagcaacagtacatcgctgcgcactcccgaaccggaatatccccggcggactggtgtgaagcgcagggactgaaatacgccacagcccggcgatacatcaagaagccccccaaaaacgcgcaaaaaaatctgcgcaattctgcgcaaaaaactgcgcaaaaagatgctgcgcaaactgcgcagaaacgggcaaaaaaaaccgttgaaaaaaatcctgaaaaaattgctccgataactgagcctgaaattcaggaagaaatcttcgaccccgatgaattcggtatctcggaacagcagggcgtattcgctcaacacgtcgcgatgggtaaaaagctcatcgatgcttaccgcctggccgggtacaaatcagaggggaatgcagccagcgccggggcgagccagctattaagaaatattaaggtttctcgtgccattcgttggctgcgcgataagcgtcaaaaacgtctcgctctgaccgaggcggaaatcattcaccagctctcttctatcgcctcgatggacccgaacgaactcactcaataccgccgcgttaactgccgctactgctggggtgaagaccacgaataccagtggaacgacatggacgagtacgagcgtgcctgtgacctggcgatgaaagaagagaagtcaccgccttcttttggtggagttggctttgttggttctgctgtccctaacccggattgcccatgctgtttcggcgaagggatagggcagcaattttttgctgactccacgatgctcgatggtccggcccgttggggttacctcggcgttgaagagaccatgaacggtctgaagatgaagatcgccagccctgaggcagcccgtaaagagttgctcgcttacctcaaagcgaccaaagggaaactgcctgcaggtggtgcaggagctgcaggagctgcaggcggcgaatatgaagatgattatgaccgcgaatggaagcggctgcgtaacgagaagattcaggccgagatcgaacgcatacgcaccggggataaagagagcagcctgattgttgttcacaacgcgctgcaggttcccggcgctgtacagcccacgcaggaggatatcgacgagggcgatgaataa

SEQ ID NO: 167165 - DNA, 267 bp, Enterobacter cloacae
atgagtcagcggatccagtacgacaaagcgaaggctgaagcactggcggcatgccggatgacagcccagcaaattgccgacgttctggacatcgactttgacgtgatgaagcaggacaaggaccagctcgatgagttttacgttgccatccgaaaaggacgcgcacgcggtgaagctgaactcagaacggcgctcttcaaactcgcccgggaaggtgacgcgtttgcgctgcgcgaactgctgaaggtggagaagaaccaggaataa

SEQ ID NO: 167166 - DNA, 705 bp, Enterobacter cloacae
atgccaattgaaaccgccatccggcgcgtcgcgctggccgaactgatgctgctggaaaagaacgctcattacatggacccggatgaattcgcccggctggtggcgaacatcaaagccgacggcgtgctgaccagcctgcctgtcgtgtatcgcggtaccgtgttgtccggcaaccaccgcacccaggcagccattaaagccgggctggtggagtcagacgtgatcgagattgtgagcgaactaaccgccgacgagcagctggctatccagctcagccacaactcgattaaagggaaggatgacagcaatatcctccgggagctgtacgactcgatcaacagcctcgacctcaagctttactctggcctgaccgacgatgatttcaaaatcaccgacgttgaggtgcagacactctcattcgttcagcccgtttatgaagacctggtgatcgccttcctcccggaagagaaagccctgtttatcgaggcgctggaaaaagtagggaaaaaggcaaaagaccgcctgattgtggccggacgcaccagcgatttcgacctggttttcaaagccgtcattaacgcaaagagcaagctgaacatcatcaacactgccgaagccctgaagactatcgcggaactcgcgcttcagaagctggaggacattcctgatgagtcagcggatccagtacgacaaagcgaaggctga

SEQ ID NO: 167167 - DNA, 1278 bp, Enterobacter cloacae
atgtttataggctcgattccgaagaaattgatcacccagatcctgggtaatatccagctgaaacctcgtatctttataggctgctccgggtcgttccgtacagagcacgccattaaaaacctgatgcccgaccgggctgtgtacgggaatgatgtttcgctgctgtcctgtgccgtcggcaacctgctgaccgggcagaaactcgacgtggagttttctggccgcctcgaaccgctgaaccagctgcgcggcgacgcggtggcaaacacatcagccatttgccttgccatcacactggcccggttcaaggggaacaaccagtacagccaggcacactttgcgcacatcatgcgtaacctgcctgactatcatcgtattgagcgggagaagctgcagcgctataccgacgggttcacgattgacgggttccacgccggagacttccaccaccagattgacgccgcgcgggagcatgacggcaccgttatcatgttcgcgccgacctacaagggtgggtacgaaaatatctataaattcgtcaacgccagcgttacctgggcagctcctgcatacggcgtctgggatccggaaggaaccgaagcgctcattcaacggctcatggatgagaagcaaaattttgccatcgtttctgaccgccgcatggaaaacatcgaacctcggatcatgtttgctggcagcaataagccgatttacatgtatgccaatgatgcccggtcatcacttcgccgcgaagagaagaaatcgcagccatttcggtaccggctggtggacgtcgacgccatcaacgaagacagcagggtggagattgccttgctcaacgctcagcagttgaacttcctgaaaaacatctacctggcgaaaggcatcaaccacaaagcggggatgatgaatttcgcggtgctggtggacggcatgctggcgggcgctttcattttctcgatggcgcagtacggcgacaagatccacaacatctacatgctcagtgatttctcaacgtcgcggcaccggaagctgtcgaagcttattcccatgctggcaacgagccgggacgtcattgcccacgtaaaccgacagtacctcatcgacattcaggaggtgtacaccaccgcgttcaccaccaagccaatatcgatgaagtatcgggggatttacaaactggcgaagcgcggggaaggattcctgaattattcgtctgcagttcgccagctgtcgccgcaggaaatttttcaagaatggtaccgaaaatatgccaattga

SEQ ID NO: 167168 - DNA, 366 bp, Enterobacter cloacae
atgaaaacgtcctgtttttctctctatcgcggcgaaggccgaatcagcattgcccgctacgcgccgcgcaataccccggcgggatatcacacgtttaaaaagctggcgccgggggaatggtttaactcggtttcagtttcccgctatatcgaactctatgagaacgagatactggcgaagctgaatccggaacagacgtggaacgaattgcacctgctggctggctgtgagcctgtgctgctgtgctgggagccgccgggagagttttgccatcggcagcttgttgcgcggtggttcaggaaggagctggggattgctgttgaagagtacaatccccacgccacaccgcagctggacatgttctaa

SEQ ID NO: 167169 - DNA, 402 bp, Enterobacter cloacae
atgtggcagacaatttacaactggccgtgggcgactatctggtcggcgatatctgcgatattcacagcggcggctgttggtgttgcagcttgggcaattttccgctggaaaaagcaggatgagttaagagtaaagcttgattttaaaaaatccgtcacacagtacgcatacgcgcttactcacacatcaaaagttcagaaggacgagctacgaagtctttacggcaaatgtaccttcgattggatggcgtgtgaggggctcctaaaatcaaataaagtagtatttgataactggaaaggtctcgtagggaaacacctggactatatggacggagagcctgttgccaaagagttgatgctccactgcaccgcgattatggatgcgaaattcgtgttcaactaa

SEQ ID NO: 167170 - DNA, 618 bp, Enterobacter cloacae
atgaaacgtttttctaaggaaattaagagcggtctggtatggctgccggaactcgggatggggcgttacccggtaccaaaggatcgtccctacgatgctgattatttttcccggtaccaggatctggccgacacggacctcgggcgcgaactgacggcggcgcgtattcgtctggtggcccgacactataccggcccggtcctcgacgtagggattggcgcagggcaatttgtcacggcccggccggaaacgaagggttacgacgtcaatccggcaggggttgagtggctgaaagagcgcggggcctgggcgaacctgtaccgggatcgttatccggccctgacgttctgggatagcctggagcacatcgaccgaccggacatcgccgtcgcgcgagcggaaaaatgggtattcgtctcggtacctatcttttctggtgcagagcacattatccggtcccgtcacttccgccgggatgagcacatctggtactggacccacgacgggctggtggcctggttcggtgagcaaggtttcgagctgatggaacacaaccgtttggagacggtgttggggcgcgagggtatcggcagttatgcgtttgccagggtagaatag

SEQ ID NO: 167171 - DNA, 909 bp, Enterobacter cloacae
atgcctgaaaagttatatttcgacgggatgcacggcatcggcgacaacatcaatcagcgttgttttatcaaagcgctggcgaaaaaaggtcatgaaatttggctgaaaacaccgttaccggaaatttacgccggaattcctaacctccacttcgtacatgcggattcgccgcttcgaacgcagcgcaagagtgaacgtctttcgacgtttcgatttgtgcccgaaccgccaggcctccctcgtcgtcgcattttttacggaaatggtgatctgcagtctgggggcatctttaacgcgatggaacagcagttcggtaccgcacctgcacaaatggatctcccccggtatgtgccgggcgatgttcgtacacccggcggcaaacccatcgcagtcattcgccccacaacagagcgcagagaatggcataacgccagccgcggccccctcaatcagtacatcgatgatgttgctcgtcgtctcgcaattcgtggcttccatgtgatcagcgtggcagacctgcaggagggggaagagtggataccggacggtgagccgttcgctcaccagaaattccaccacggagaactaactatctggcaaatgctggcgctggtggagagtgccgacatcgtgctgaccgggccctgcgtcatcatgcatgcggcgctggcctaccagcgaccgatgatttgcctcgctggtggcaatggcggcaacaaccaccacctgaaggttaccgacccgcgctgtatggatttatcccgcgctttattcgtctacccggaaaattactgccgctgtcaggaaatgatccacgactgcgacaaaacgatcaccggcctcccagaaaaagtggagggatttatcagcacggtataccagcaggcacgcaggcggaacgcagcatga

SEQ ID NO: 167172 - DNA, 546 bp, Enterobacter cloacae
atgaataaaacctttatctgcatagccagcggcccgtcgctgacggcgaacgactgcgcactggcctccggctccggttacccggtcattgcggttaactccagctggagggcggtgccagactgccaacacatctacgccgccgactttacctggtgggatcattaccacgactcgctggaaaccagcgccgaactttggagccaaagcaaacgggcccacgcccggttcggcgtgaagcttttcagcccgtcggacaacggcgcgtttaactccgggcagcgtgccatccagctcgccgcccatctcggcgctgagagagtgattcttctcggctacgactgcaccctggcgaacggtgcacactggcatggccgccacccggcgacaatgcacaatccggtaccgcgcgaagtagggcgctggcataccgacttttcttctctcgctggcattctgccgggcgtggagattatcaacgcgtcacgcgaaaccgcgctgacctgcttcactcgcttaccactcgaggcggtacttaatgcctga

SEQ ID NO: 167173 - DNA, 294 bp, Enterobacter cloacae
atggaactaaatcaacttgcccaacccaagccaattcttgatgaagttacacttgcatcaatccgcccaggctctctggtaaaaattcagatcactgatggtataagcgataaattcaatgaaaccatcatcatgagagttaaaaatcgtgatgaacacgtacttgaatgtgaatttgtagagcgtcagctaagggaccggtttgctgataaaagccatcaatacaaaaccccgtttcagttagacacggttttatttatcaaagaggccgtgtttgctgttgagaatgaataa

SEQ ID NO: 167174 - DNA, 519 bp, Enterobacter cloacae
atgctccttttcgtccaaaaatactggaagccactggcgatcactttgctggtggcttttttgttatggcgggcatatgacgcggggcatgaatcggcggattctgcctggaagcagcaatggctgctgcgggaccttgctgattccaccgcaattttacaccgagaggttgccgagcgagccaaagaacagcgccgccagcaggtagcagacgaggagcggaaacgtgcagaagatgaactggcaaaagtgcaggctgacgctgatgctgctgagcgggctggcgatgggctgcagcgacagctcgccacgctacgcaggcagctcgcaagaagtgaaaccggccgcctttccgcaattgcagctgcaggcgcggcaaaagccgagaccaccagagtgcttgccgagctgcttagtgaagctgacgatctggcgggaaaattcgcaaaagaggctgatgagcgttatgtcgccggcagcacctgcgaacgaacctacgacagagtgaccaaaaaataa

SEQ ID NO: 167175 - DNA, 489 bp, Enterobacter cloacae
atgaaaatcagcgataacctccaggcattccttgatgctctggcatggtctgaaggtacttcgaccagtccggccacgaagtgcaacggctatgatgtgattgttaccggaatcgacgggaaaccagagattttcaccgacttttcagaccacccattcaataaagggcgaccatccaaaaaaatcaacagcagggggctgacatcaaacgcctcagggcgatatcagttcatgctgaaggattgggcgcattacaaagcgcagcttgggttaccggatttcggccccgagtctcaggacaaatgggcgattcagctgctcaaagagcgcaaggcgctgccggatattgaggcgggtaacatcgaatcagcagtcaataaatgccggaatatctgggcatctctcccgggtgccgggtatggccagcgcgagcacagcatggatgacttgattgcccggtacaaggccgctggcggtacggtggcctga

SEQ ID NO: 167176 - DNA, 303 bp, Enterobacter cloacae
atggtaacgctaaatgaattcctcctgatcttgaatgctgtctcatgcggtgtgacagccacctgcctggggacatttcagcgacgaggggccaggcacaattacttcggcgctctgctggctctaattctgatcgtctcatgcggctccatcgcgatactcatcgcgtgcggtgcctacgtagaagccaacccattcgaaaccatcatcaacgttgtgctctgtatttccgttgtccgggcgcgggggaatgtgatgcgtatttttaagccacaaagggaattcaatgaaaatcagcgataa

SEQ ID NO: 167177 - DNA, 399 bp, Enterobacter cloacae
gtgggtgaacctgtatctgcggtcacggccacgacggtgacccttacaagcgttacgttcgccagcctgctggccgatacgcctgcaggggtttatgtcggggcattttctggcgcggttgtgtatgtactgtcttcaacggatatgagccggttcgcacaggtggggtatttcgtttcttcgtttctgcttggcgttgtaggggccgacttcacaacagcaatcatcaacgaattaatatccgggtggttgccagccgacgtgactgttggcaactggctcggggcaactgtcacagctgctgcgggggtcagtatcctcattagcctgagaaagatagacccgaaagcgctcataagccggctgcttactgggggtaatgatggtaacgctaaatga

SEQ ID NO: 167178 - DNA, 351 bp, Enterobacter cloacae
atggacgaaaaagaaatcagacgacgccgcttgaaggagtggtttgccgacggcaaataccccgacaaagacgcaagctacatatcccaggtcattaatggtaaatccattggtgagaaagccgcacgcaggctggagcgcgactatggcatgccagataaatttttggacaaaccattcgatgttccagaggtaagctcggtggagttgacggccaggcagcagcgagtcattgatttgcttgacgcattgcctgatgaagaggttgatgattttatcaccaaattgcaggagcgtaaggcattctatgaccgtcgcctaaaagattaccttactaaaaataagctttga

SEQ ID NO: 167179 - DNA, 261 bp, Enterobacter cloacae
atgcagttacaacactatgtcgcctctcttgatcgtggtggagtctccaagctggcagttcagcttggcgtaaccgtctcgtttctatcgcaaatgtcctcaggttatgcgcgcattccaccatcgcgagctttggcaatcgaggaagcaacaaatggcctcgtcacccggcgcgagctattgcctaacgactggcaccgctactggcttgaagaagaactagagcttaccgcgcaaaaaaggtcgggggttgaacaatga

SEQ ID NO: 167180 - DNA, 483 bp, Enterobacter cloacae
atgaaaatcaacctcgctttgctacgttcggcacttcatgagtggtccagagggattacccaatttaccgccacccaacgaattactaaggcttactttgagcttgggttatcaaacccttccgagttgcatcagatcgagttcttagacggcacggttgatcatgatgcctggcgtaacaacaaccaaaacattttccatcgctggcgtaaatgtcaaacagcaattcagcgagagaaatttgaagctctttcacctgcgatacttcacgcaatggatcctgaaatccgtgcaatggttacagctggtaacagtatcgaatttctcacatctcgcctgcttaaagagcatgccgacgttgttaacgctgcgctgctaaacgccccattgcacgacttcgaaagagagtgcgacgagttggataaagccctaactgatattcgcctggcctatcgcgccaagcagcagagacatgaccactga

SEQ ID NO: 167181 - DNA, 708 bp, Enterobacter cloacae
atggcccgtattcgaacgattaagcctgagttctggctcaacgaggagctttcgttgatcactgaatcggcgtgcctgctggcaatcgggctgatgaattattctgacgatgaaggttttttcaatgccaatccattgcttatcaaagcggctgttttccctatacgtgaaacgtcccgtagcattccggtactgctacaggagctgtccaactgcgggtttattgagttgtttaccgaacaaaattcgaccagcccagggaagctctatggaaggatcaaaaacttcactaaacatcaggtggtgaacaaagcaaaatctagcaaaattaaatgcttagagttagtaccgtacaactacggtactaacacagtatcgataccacctggaaaggaagggaaaggaaaggatcagggaaaggaagagagagagcatagcgcgcgcgatcagcctgtggataactctgatgcatctgaacaaaagcgattccgtatgttttcagggtggcagccgtcccctggtctttctgaaagagctctggaatgggggatcaacctccatatgacagccccttataccagtgctcagctgtgccagttttgcagttactggatgtgtgacgacgtgatgaagtaccaccttcagtgggaaatgaccttcgccaaaagcttagagcatcaggcgattaagaaactgaacgagacatga

SEQ ID NO: 167182 - DNA, 1635 bp, Enterobacter cloacae
atgaccaacgaagtatttaactcgggggaatttttcgcccctgccccaaatgacctggtggacaatctgatgggccggtatcaccttgaacgtcaaaaaatagagtccctggcagcgattctgaacgacaaagatgctcatgtagcggtagaccatttcctgagtggaaatcagcgggacgagcgctacagaagtttacgaaacgtcaacgagctgttcgccagagatggcgcgatcgcacacctgaacgcgcactactggcaacaggcgctcctgctcaccgatgtgctggacgtaatgcccgctaagcgccgtgaagagtggaacgacagcattcggcagatggacacccctgaattcgaggaagaaagcgtacgcgcgacgattatggacatgctgaattcccgcgcgaaattctttggcgagcgcgtggatggaatttttcgggctctttcaggtgatcacatcacaaacaggccagaaggtttcagcaagcgaatgatactgtcaggcgtttatgacccgtgggggatgacgaattaccgcatggtcaattacgtgcaagatcttcgacaagtaattgcgaaatttatgggaagacctgaaccctcctacgagttgaccaacaaagccctcaaagccgctcgcgattatccaggtgagtggatgcctattgacggcggggaaatgcgcgtccgggcatatctcaaggggaccgcgcatttcgaagtgcatccggaaattgcatggcggctgaactgcatccttgcgagcctgtatccggccgcaatcccccctgctttccgtgaaaagccgaagaaaaaaattaaagattttgtgctaatggacagcgtgttacctgtcccggtactccaggatctttgcagcctggaaatcgatgagtatcgccccatccagcggcacaaatgggaagacccgatagagccaaaaacccgcaacccgtttaaccgaatatttcgtggctatggctctacttctgatcgcttcgttagaaaggaatccgagcggatcctcgcgtcggttggtggcgttcgcttcagttcaggcaattgggcatggtgggaatttgaatacgatcctactcgcgttttggctgaaattattgcgtcaggttgtgtacctgatgacaaaagccatcagttctaccctacccctcccgaactggcggagctatgcgtaaagctggcttgcatcgagccaaaccatacatgtcttgaaccaagcgccgggcacggcggcatcgctcagtttatgccggtagatcaaacaatttgcgtagaaatttcccccttaaaatgtcaagttcttgatagtaagggctttcgtgtttatgaggctgattttttgaaatgggcagcgaatggtggatgttttgaccggatagtgatgaacccaccatttagcgatggccgcgccctgctccacctccaggcagccgctactctgactaaaacgggttcaaaaatcgtggccgtactacctgcagggatgcgtaacgaagatgttttaccggatgaatggaactgcacatggtcagaaccacgttctggggagttcgctgggaccagcgtatcagtaacaattctgaccgcagaacggcaatggaggaagtga

SEQ ID NO: 167183 - DNA, 645 bp, Enterobacter cloacae
atgagactgaaatacgccatcacaatcggcgatccaaaatcagcgcagattgttgctatacaagcccgttcgacaggcgaaagtcatctgaaccgcgaagatatcgttacctccttggggttgactcaagcacgctcccgggcaggactttctttaatttatgcgaaatatacaaaagacagattttccgcggaaagtgctcttgttgaactgcagcgctatgcggcatcgatcacagataagtattttccgtcaaaaaaaccagaagggttttgtgctgcagtttcggttatgtctatccttgctttggaggaatattgtcgaacagcagataccccaggggcaaagtgccgctgtggtggaaaaggcgaggtacgagatctcaaaagttcgcgaatgaaaggccgcccaattcaaataccctgcccccgctgccacggaacagggctgaaacctctaacgcgcagccggtgccatcacgcgattttcaagcattgctcagtttcacaatctactttctctaggtactggaaccctttctatgacgacctgctcaactggtgtctacggcaagaatcgaacgcagaggccagctataactggataaccagcctcaatccgccaaccctagaatcaagcgggtaa

SEQ ID NO: 167184 - DNA, 246 bp, Enterobacter cloacae
atggggttacctatgaaattattaagattttttttccgtaaagtcttagataccaaggtgcagcagtcggaagcagtccccaacatcagcgaagaagaatttgcagagttgatcaaaaaccctgcaaggatttcctcccgcatggtcaggaaagtagttttaaatggtctcctgcgacttgagaaagaggggtatgcccctttttcagatggtgatgacaccaacaacaaaacaaccaaaaggtaa

SEQ ID NO: 167185 - DNA, 279 bp, Enterobacter cloacae
atgaaaattctcatcctggatgcgcagtccgaagtggtcgaaatcatcaatgagccagaccagacttccgcagttatggcagcacaggctgctgtcctcgaagcagctctcattggcaaaaaattcactgcagtgaacgaagacggcgaaagcgcacttgctgcagagtttgacgcccttctgcctgccggaccagcagtaacccctgaagtgaaatttctcggatatcagaccgatgtgcttggcgacaagctgcctaccttttccggcgctttctaa

SEQ ID NO: 167186 - DNA, 462 bp, Enterobacter cloacae
atgtgcttggcgacaagctgcctaccttttccggcgctttctaaccagaaccaccgacagagacatgaccaaatgaccagtcaaaaggtacagaacatgagaaagcctgaaatcgtagcgagaacttctgaggggttgcctgtcgtgttggccggggattactgcgtacgcatccttgcgctggagatctcatccctgtgcggcgttactcgtcaaatgaacggaacaacggggcatatgactgcgccccaccctctccatgggtgtgacgaagaacttttttctcaaaatctgcaagcttctgcgcagcgtcacgggcatggaaatttaagagctgcagattcagctcatgagttagtgaatacgtcccatgcttcttgcaggaataaacaattatttcggaattatcattcgcccgcagaacctgaacgcctgcatcagcgaggcatattgggcacatag

SEQ ID NO: 167187 - DNA, 282 bp, Enterobacter cloacae
atgaccactgaaaaaattagttttgagatttacgcaaccgaggcaattgttaagccggataattacaacaagctacgtgttgaagttgacggtgtggaaattagcgacttgcttgaagcgattggagaaaacgggtcaattattgattctatgggcggcgaagcaattgctgatcatttttcaactgaaggacgcctgtttgaatttctgggtaatttcgacggtggcgagttagccgattatctggaaaccaaaggctggaaaattcaggagggagaatga

SEQ ID NO: 167188 - DNA, 123 bp, Enterobacter cloacae
atgattcacatcgacggttgcagggtaccagttggcgtgcaagctgttcgcctctctccattctgggctgcggttcgccgcctgtgctacgtactggcgcaaaaaggagacccgacgttatga

SEQ ID NO: 167189 - DNA, 165 bp, Enterobacter cloacae
atgaaaatcaagtgcgcctatcacctctgcaaaaaagaagtcgaagaagaggaagcagtgaaggaggagttattcttccggcaaggtgggaataataagcgggagtggcgggattactgctccagattatgcgctgaacgcgaccagatggcgcatgagctttaa

SEQ ID NO: 167190 - DNA, 159 bp, Enterobacter cloacae
atgccatttctggcactcatttttacaacatcggaaaacaccaactatttgatgctttcagatgtcgcaatgaataacaggtctccgaaagttcgtgaccgtgagggtgtcggtctcttctcgctgttattattgcccctttcgggaaacgctatttaa

SEQ ID NO: 167191 - DNA, 348 bp, Enterobacter cloacae
atgattaacatgcaaaaaattgacgtttatgtatatccggttgaaaaaaaccaccctcatattgacgcaattgaaataaatgaagaggtagttggttacctcgccgaaaatcgcgactggaataaagataaaaagccagtttctgtagtaactgcagatggcaaacatattggcgatttttgctgtaacgatcatgccgtcgttcatattgcaacgaaagtgacaggtatcgatttcgatgaagttcatgtttcgcgtaatcgcgagaaacgctttatcaatgacccgttcgatctgctaatcgccctggcaatgctcgctgaccagaaaggaaaaaggccgcactaa

SEQ ID NO: 167192 - DNA, 2997 bp, Enterobacter cloacae
atgagtgaagcaaaaccgtattttattcatcagaaagccaaaaagcagagcggcgaaccgcacgctgttttctgggaaaccgcgaaaactgagtcccgcgccctgcgagacgctgagaacgcgctcgaggatgctgaaaaagacccggccaactatttcaaggcggtcgtgacgaacttccccgtcgtgaacgagctgccgccggaaggcgagattagtttcaccttctgtgacttttaccagctcgcggatgacggtatgacctggcagcaaatccccggcgttaccctgcccgctcacccgggcgagaaggttgtggatggtaccgacaccaccatcgttgacggcgtagatacctcaactggtgagatcgtcgatgagcaggctctgaatgaagctggcaccattcctgaaagcaacccggacctgaagatcgacgaaggcgacgacgaagaaacgcattatccaatcattcagatgtcgttccgtaagcagctgctgtcacagcttacgtctgacgcgcaccgctaccacctcacgcagggtgagtatcaggaaatcgcccgactggaaatggacaccgataacggatatgtccagaacctgcttttggcagccgccagcgtagaaaaaatccagcagttggacattccgtatttgtggaaatacaccaaagcggtacgtgacgttttcgatatggaaaaacgtcacgaacttgcactggtactgaagttcacgcaggtgtgggctggtacatcacaccttgatcgtggcctcctggttaaagaatgggtgaaaggaaatcgtgtgagcgagatcaaccgtaccccgtcaggcgcgaacgctggcggtggtattaagtctgaccgactcaccccgttgacgaaaaccagccgtgattacgaaattgctttgggtctgcttgctcgcgaatttgagttcgatatttatgccccgtcactagaagttgacgcgaatgcaaacgccatcatgaacctcaactggtctggggaaggtgatgttctcgatgagtatcttgccacctgcaaaatgttcgacgacattcccggtggtatggactactcccgcgcctgcaacgttgcaactgtcaaaaccacaccaaagggactctggagagatcacgacaaacaccgcgagcatctcaaccgcgtcatgaccgaaaccgatcatgcgcaccctgacgaacttatcgttgatatcgcctgtggtcgttcttcttcccctatgcctatggcagataccaacgatgcgcaacagccatccgatgaagaaattgatcgccagcttgccgccgggcgtggcgaatttgttccgggcatcagcgaccctgatgatccaaagtgggtaaaaactgcctcaaatgaaggcgaaaaaacggaagtggagaccaccaataatgtgcaagtacaaacgtctgacagtgatgaagaacaggctggtgctgcgctgcaaccgggcgaaagcatactgcagccaggcgaaggcgctaactgcgcttgcgtggagacttccgtaaacaatgccgaaattctggctgcagctgcgccgcatctggcggaccagaatctgaccgatgtaaaccagaatgccgattctgtcagccaaaacagcgaatctgttaaccagatcgagccagaaatggccgaaaccacaccagaagcgccgaagaacgaaccagaacagcaatggcctacccgtttcgaaccaggccgctatgagaacgtgccgaacgaggtttaccactcggccaacggcaccagcagcaccatgctgaaagacgtcttgatcagcccgatgtattaccatggccgccacattgctggcacgatccctcgcgagcaaaacgatgcgatgctgcgcggtaccatcatccacagctacgtgctcgaacctgaaaaatttgaagatgaattcgcggtgcctgctgagatgcctggacatgtggtttccaccaccgccgatctggttgccatcatcaaggagtacaacgccagcctgcctgcattgatgacacctgacgaactgaaggcatggatcgaagagtacaacgccaccctcaccccgccactatcggtgtctgcaggtgccgaggaaacggcaagcctctacatgtcgcttccagaagaattccagcgtatccctgctgacggcaaacaaacagctgcagcgcagaaagcctgcatcaaagagtacaacgcaagcctgccaccacttttaaaagtgagcggcacacgtgagcaactgcttgagcaaattgccactgtcgatcctgagttcgccgaatcagaacgcgccaaatttgtgccgtacaacatcagcgggacgaaagaccagttgactgaagttgtgcgcatcatccgcccggacgttgttacggcggaagactggcaccaacagcaggaagatgccagccagggtaagacgatgatcgcccttgacatgtacgaacaggccaaacgcatcagcgcggcgctgcaggcgcatccgagcgcgagccgtctgctgaatcacccggcccgccagtccgaggtgagttatttcggtttcgacgaagataccggccttgaagtccgagttcgcccggacctggaaattcagctgccgcacgcacgtattggcggtgacctgaaaaccacgagcctgggttacgtgaaaaaggacgagctgaaagccaggctgcaccgggaaatcaccagccgcggctaccacctgagcgccgcgatgtactgcgacacagccaaccttgaccaatttttctggatttttgtgaatcgcgacgaggggtaccactggatcgccatcgttgaagcctcaccggacctgcttgatctcggccgcaaagaatatcgcctcgcgctacgtaccatcaacgcgtgcatggaaaccaacaactggccgggccctatcgaagaagactacaccgacgaacttaacgactttgacctgcgccgcctcgaagcgctgggcgcgatgtaa

SEQ ID NO: 167193 - DNA, 1089 bp, Enterobacter cloacae
atgaacgaaattattcagcaagacaaccagaattctaacgtagcaatcttcagccctcagtcgctgatgtcgctccagagctttgcacaagccatgtcgtccggtgtagccacccttccggctcatttgcagggtaacccatcggactgtatggcaatagctatgcaggctattcaatggaatatgaatccatatgcggttgctcagaaaactttcgttgttggtggtgtgctcggttacgaagcccagctggtaaacgcagtaattagtacccgtggtccacttataggccgtattgaatatgactggttcggtccctgggacaagataattggcaaattccagataaaggtaagcgataaggataaaagtaagggcaaggaatatcgcgtacctggctggcgtttagctgatgaagaaggtattggcatcaaagtctgggccaccctgcgtggagaaaataaaccccgcgaactgacgctgttactggcacaagcacgtacccgtaactccactctctgggctgacgacccacggcaacaattggcttatctcgctgttaaacgctgggcacgtctttattgcccagaagtcatcctcggtgtctacacccccgacgagcttgaagaacgtcaggaaaaagagattaatccaatgcctgcagccgggcacgttgatatccgcacgatggatgaaagcccggtaaatgaacctcaggacacagtgcaaaaatattacgaacagcgtgacgtatgggctgatgacttccggcagcgaattgaggacgcccaaagcactgaagtgacaactgagcttcgccaggaggttgagacgaagaaggaatatgccggtatcgacctttataccgagctgaagggcaaagttgtccagcgccaccaccgcctgaacgcggtagcacgcatcgagaagatgatcaacgaccttccacaaccggaccaaccggaagcatcggcgaaattcatcgccgtagagaacgctatcaacgcggtgaaaatacacctgggtgatttgtacgacgggtactgcgtaaccatggcagatatgaaaccggaatacatcggcgcataa

SEQ ID NO: 167194 - DNA, 435 bp, Enterobacter cloacae
atgagcatgaaaaataacactcaccagaaaattgccagctacatcagcgcgaaccctgattcatcaaacgctgaaatctgcgaggcgcttttcatggatcccagcggtgtttacccgcacctgaatgcgctgtttagcgcgggaatactcacccgtcgccgcgactgcaggaagtatcgctactcagtcgctccgggcatgtatatcgaatctgatacaaaccggatccccacgaaaaagcctgtactgcgtgctgaggagatcgagtcgcttgcgaacgagttgatcgagcgcgggctacaccgccgggccgccaccgtcctaaccgaagccatcggcctggttaaaacagaacgcgaagttcagcgggtttcacgtcttcgcactcaatgcctgatcactgccaaacgccagtaccaaggagcagaagcatga

SEQ ID NO: 167195 - DNA, 453 bp, Enterobacter cloacae
atgaaaaaaacagtgaaagtttccgatctgaccgggagcgctctggactttgccgtcgaccgcgcggtgaacggtgcgaagtacagcgagcagctatcagtcatccgcacctcaggtgatgccttccggccctcctccagctggcgcgtgtgcggcccgctaatggagaagtatcaggtattcatcgaaccacctcacgacgtccacaagctcaactaccgggaggacggcaaaccgaagggctgctgggaaaccttcgaatcctggcacgcgaccgtcagcatgagagtagctgagaagccgccagtgtttgaaattttctcgtccggcggcccataccgaggcgagggtgataccccgcagctggcaatctgccgcgccatcgcctctatgggcggcgacgagatcgacattccgtttgaactgctgaaaagcaaaggagacgcaaagtga

SEQ ID NO: 167196 - DNA, 204 bp, Enterobacter cloacae
atggctaaatcacctatgaagtatatggtccgagcatggaacaaagagctaaaaaaacctgaatggggcatgggttcacggaaacatcgtaaagcctgcgccagagattttgctggtgccagcatcgaaagtgagccatccattcccgaccaagatgaggctgactacatccttgctgaagaattgacttattggaacgactga

SEQ ID NO: 167197 - DNA, 192 bp, Enterobacter cloacae
atgaccaaatacaaaattaccgccaccgtgaccaaaccggggaataccccaactgactggacccggttcactgataaaaaaatgacaaaagaagaatgcgaaaaattcctctctgtcagcaaagaggccggcgtcgctcatgaagcgaaagtggtgctgaaaaatttcaaatgcgtaagggctcgtgcgtaa

SEQ ID NO: 167198 - DNA, 258 bp, Enterobacter cloacae
atggatgcttcattgaattacgccattcagcgcattgtcgagctggaatccatgctgctgccggaagtgccagaaaccgtgtggcccgccgaggtagaggttgtcttttcccaaagcggcgacgttgatctgctaccagctcatcaccagcgccgcctgaagcatcacatcaaccgcatgtggctggacaaggtcccagccccctctatcctcaccgccgcgcgttcactgcgcgaagccatggagaaatacgcgtga

SEQ ID NO: 167199 - DNA, 2073 bp, Enterobacter cloacae
gtgaacgaaattatcgttgataactttgccgggggcggcggagccagcaccgggatcgaaatggctattggtcgaagcgtggatattgccatcaaccacgatctgaacgcggtcgcgatgcacacgaccaatcaccccaatacccttcactactgtgaatcggtgtttgacgttaagcccagagtggcaacggctgggcgcaaagtcggccttgcatggttctctcccgactgccgccatttttccaaggcaaagggagcgaagcccgtcgagaaagagatccgcggcctcgcctggattgttctgcgctgggcgctggatgttcgtccgcgcgttggtatgctggagaacgtttcagaattccagacgtggggcccgctgctggcagccgagatgcgcccggatccagagcgagtaggcgaaaccttccaggcgttcgtcggcatgctgacaactggcattgaagccgatcacccggcgctggctgagtgttgcgaatttctgaaaatttccacggacagcgagcaggcgcggcagctcgttaacggcctgggctatgtggtcaattaccgggagctgcgtgcctgtgactatgggactcccaccatccgtaaacggttcttcatggtcatgcgctgcgatggccgcccgatcacctggcctgatataactcacggtgaccccgcatcggaggcggtaaaatctggcatcctgaaaccgtggcgctcagcagcagagtgcatcgactggtcgatcccctgcccgtcaatttttggccggaaaaagccgctggcggtgaacaccatgcgtcgaattgcccgcggcatccagcgctacgtaaaaggcacaaaaaaaccgttcatcgttaagtgcaaccacacgggcgcaggctacgacgtgtttcgcgggcaggatattaaggatccactgcagaccatcacgaaaaaacatggctacgccgtcgtcgttccgcatctgacaaagttccgcaccggagccaccgggcagccagttacgtcccctgctccaaccataacggcgggaacgtccatccggccaggcgggaacgggcacgcgctcggcattgcgactgcagttatgaccccgttcattgccgggaatggtggcagcgaatatcaggcgaagccgcggccaatgaccaaaccatcccacacaatcctgaagcaatcgcgagcctgtgtagtagctccagtgatcacccgacaattcggaaacagcaccgggcaccgcgccgatgcgccgctgggcacgatcactgccggaggcggcggcaaaagccagatcaccgctgcaacgcttattcaggtcggttatggggagcgccccgggcagtcaccgcgcgttccgggtctagggaaacctctcggtaccgtcgtggccggcggaggaaagcacgcggttgtcgcggcgcacttgatcaagcattacggcggtaattaccagggggcaggtattgggctgaatgaaccagcacactctgtaacgactgtcgatcatcacgcattaataaccgcgcagctgatggtcaacaacacagggcattcaggcggccctctcaacgatccatcgcatacagttacaaccgggaatcaccacgcgcttgtgacctcgcatctggtcaaactgcgcggcacctgccgcgacggacagcgcaccgatgtgcctgcgccaacagtaaccgctggcgggctgcacctgggcaacgtcgaaacaatgctggcgaccgatgataccgattatccgcatgcagctgcagttcgtgatttcctgcgcgaattcctgggtgaagaagcaaccgaattcgttgatgtggacggtgtgatttaccggatcgtcgatatcggcatgcgcatgctgcagccacatgagctgtacctgtgccagggtttcccgaaatggtacatcatcgaccgggactacctcggcaaccgctacccgaaagacaagcaggtggcccgctgcggaaacgctgtaccacctcagttcgccgaggcgctggtgcgtgcgaacctgccggagatgtgcgttgaacgtcaggatcaggcggcatga

SEQ ID NO: 167200 - DNA, 417 bp, Enterobacter cloacae
atgaaaaaagacacctgtatgttctgcggcgcggcggcaacccttctctgtgacggtctgatcggctgggatgctgatgaggacgaaaacgggatgatgcaaaaatgcaggggaatgttcacctgtgacgcacctatgtgccgcagctgcgcgacgtggcatggcaatctgttttttgagggtaaggcacggggaatggacacaaaggacctgtgccctatctgccagaaactgcacgatatcagacaacccatacgggttgcagaacaccgaaaggacagcgctctgcctgaaccctgcctgacaaaagaggaagctgcgcggatacgcgcggctcattgggcgggattttctaacgaatacacgaaaagtgtgaaagtgattgagggaggtgggcagcaaacctttgatttctga

SEQ ID NO: 167201 - DNA, 216 bp, Enterobacter cloacae
atgaccacgattattttcaatgaagaatgggtagttgaggccaggctgaccgagaaaactggccttacagaagggcagataaaaagttatcgattaaatctttgggccgaaggtgtacatttcaaacggctcactgcgaaaggtgaaaccgataacagcaatggtttgctttggtacaactatcctaagattaatgaactggtgagggatgcgtaa

SEQ ID NO: 167202 - DNA, 1281 bp, Enterobacter cloacae
atggattttccgacaggagttgaattgcataatgggaaaatcaggatctccttcacctatcgcggcattcgctgccgcgaagttcttaagggatggagcgtaacacagggtaaccttcgtaaagctggtaatcttcgggcggtgatcgttagcgaaattcacctcggacaattcgactatgcttcaaggtttcccgaatcaaaagcgctggctaaattttcaagcacaaaacgcatcacaacctttaaagaattaacggacattttcaaagaaacaaaagcactcgaagtttctgcgtcttcaatgaactcgttatgttcgtccattaatacgttattacgtgttgtcggcgggaacacctatattgcagatattcagcatgtggacattctgaactaccgcaaaattttgcttaccggggaggtcatcaatccggggaagccgtatctcaataaaacggggcgggcaccttcgacagtaaaccttcttatgagcttgctttcggaaatgctgaaattagccaggcggagcaaattcattacccatgatccatacaaaggaatagctcacctcaaggtgtcaaagaaacgtcctgatccattgggtgtagatgagtatcagcaactcatatctgctatgccggaaaagcaccggctgatatggatagtcgccgttcataccgggttacggcacggcgaattgtgtgccctttcatggagcgatgtggatctggtgaagggagaaatccatgtgtccagaaacctcacggataaaggtctctttgttccgcctaagactgacgctggcattcgtacagtgacactgcttcagccagctcttgatgccctaaaagagcaatatgcgataacaggacatctcgaaaaaagggagatctgcttccatcatcgcgaacacggcatgacggaacgccaggatcttcgtttcgtgtttgttccgcaaaatgcgaggaaaaagggacacttttcaaaatcggccatttcttacggctggcgccggggcatggagaaatccggtatccgcgagcgccatccctatcagtcacgacacacctacgcgtgctggacgctggcggccggcgctaacccttctttcatcgcgagtcagatgggccacgagaacgccaagatggtttatgaggtttattcgagatggatcagcgataacgacaatgatcaggtgaacatgctgaacgcaagaatgccgacgtctttgcccccagattgccccaaaggtaggtttatgctgaaaaaagttgtatag

SEQ ID NO: 167203 - DNA, 435 bp, Enterobacter cloacae
atggaaagcactgtcgcatcgctggttatactgcgcaatattgaagaagtctgggaaattattgaaaagtttcacgctctgtcagcatggcatcctgccgtagtcagcagtgagttcgaagagggttgcacagaagatgtggtaggagccgttcgccgcgtaacccttggaaacggagccacgggaaccgaaaaattaatccgtaaagacagcaaagcatatctgctgacctattcctttgaaacagcacctctgcctgttgaaaattatctctccaccattcagctgctgccaacctgcactccgggacacacgcatgttgtctggtcagcctcttttaactgcaaaccggacttatgcagcgagatgcgcagggtgctggaaaatgatgtttatctggctggaattaaagccttgcagaccacgtcggtctga

SEQ ID NO: 167204 - DNA, 744 bp, Enterobacter cloacae
atgaatcatctgcagaacaaaaccgctgtaattactggtgcgtcatcgggcattggcgccgcgaccgcgctggaacttgcacgtcatggtgtgaatatcgtagccgcagcactggatcagaccggtctcgataagctggtaaaggatattgagtcagccggtggccatgcttccggtctggtgacggatgtgactcgtcttgaagatacacaggcgctggtaaaacatgctaccgataccttcggtaccgttgatatactgattaacaacgccgggctgatgctcttttcagcctggagcgacatcgcgtgggacgactggaacaagatggtcgatgtcaacatcaagggctatctgaacgccattgcgtccgtactcccggttatgctcagcaaaagtgacggccagatcctgaacatggcttctgtggcaggccaccaggttgacgccggcgcgggtgtgtacagttcgaccaaattctttgttcacgccatgacagaatcaatgcgtaaagacctgggcgtgaataaaggcatccgggtcaataccatcagtcctggcgtaattaacacaggatgggctgataaagtgagcgatccggaagggcgtaaggtggcgcaggagctgacaaaaattgctatcagcccgcaggatgtggcaaatgcggtggtctatgcactcaaccagcccagaaacgtgaccgttaacgatctcatcgtgtcccctactaagcagaactggtaa

SEQ ID NO: 167205 - DNA, 1104 bp, Enterobacter cloacae
atgactgacaacagtaaccgtaccgatctcttttcccctgtgactatggggaaacttcagctggctaatcgtatcgttatggcgcctgtcacccgtagccgctatggtgaagatggtgtaccaaatgagttacatgcaacatactacgctcagcgcgccagcgctggcctgattatttcagaagcgacaaatatctcagctcagggccgcgggtatgcggcaacgccgggtatctggagtgaagagcaggtcgcaggctggaaaaaggtcaccgatgccgttcacgcagaaggcggtaaaatcgtctgtcagctctggcatgtaggccgtttttcaagcgttgaactgcagcccaacggcgagcgtcctgtcgccccctccgcaatcaaggccgaaggccagacctataccgtcaatggcttcgtaccggtatcgacgccacgcgcgctcgaaaccgacgaaatcccgggcattattgagcagtataagcgtgccgcagaaaacgccctgcgcgcaggttttgacggcgtggaagtgcactctgcaaacagctatctgctcgatcagttcctgcgcgactcaaccaatcatcgtaccgacgcctacggcggctctgtagaaaaccgcgcgcgcctgacgctggaagtcactgaagcgatcgtcaacatctggggcaatgaccgcgtaggcatccgcctgtcaccggtaactcctgacgcaggcaacacgccgccggacagcaacgtgatggcgatgtatggctatctcatccagcaacttaaccgttttaatctggcatacctgcacttcgttgagggtgccactgcaacgtcgcgtgacgtgcctgccgacgtggatatggatgcgctgagcgcgcagttcagcggtccgttcatcggtaacaacaactatgacctcgaaatggcgatcagccgccgtaatgcagggatcatcgatgccgttgcctttggccgcctgtttatttccaatccggatctggttaagcgtctgcgttatggcgccgagctgaccatcgcgcctaaggaagcctactacggtggcggcgcgaaaggttacaccgactggccggaagcgaattactga

SEQ ID NO: 167206 - DNA, 582 bp, Enterobacter cloacae
atgaaaaaacaaacggctaacgtgcgtcagcacatcattgatgttgcccgaacgcttatcacccataaaggttatagcgccgtcggccttgctgagattgtcaaagccgctggcattcctaaaggatccttctattactacttccagtccaaggaagagtttgctgaagctttgctggaacattacttcactcattatctcgctcaggttgaagagcagttgtgcggcagccaacccgcaagagagcggctgctgcgctactttacgttttggaaggccacacagggagcagatctgccggaaagcaagtgccttgtcgtcaaactcggggcagaagtctgcgaccagtacgacaaaatgcgaagcgtcctggcaaacggaacccatgagattatccttaggatcacggcgtgcatacaacaggggcaggaggatggctccctgccatcaggtgtggattcagaggctcttgcagaagagctttaccagctgtggctgggcgcatccctgatggcaaaaattcatacgcctgaacaggcgttcgacaaagcaatgagtgcaacaaagcggctgctcgcgtag

SEQ ID NO: 167207 - DNA, 642 bp, Enterobacter cloacae
atgcccgacatgaagacgaaaaacgcaggtgccactggcgagaagccaaaaggccggccgcgcagctttgatcgtgacttggccctgctcagggcgctggacattttctggcgtaaagggtttgagcccgcatcggtagccgagctttgcgctgcgatggaaatcaatccgcccagcctttattccgccttcggtaacaaggcaaaacttttcctggaggccgtgagctattacgagagggtctactggaaggcaacctgggagcggcttgaagaagagccagatatcacgcgggcgattgataagttcttcagcgaagcggctgatattctgctttcgccttccgcaccttgtggctgcatggtggtccttgcggccatcaacgtctctcaggagtctgctgacgttgtggaggcggtaagcatactcaggcaggaaggaaaagacctgtttgaaaagcgactgtgcagggctgtacatgaagagcagttacctgcagataccggcaccgccgcgctggccaccgcgctgaatacgcttctggaggggatgtcgatcgaggcgaaagatggcgccacactggaaagcctcagagcaaccggccagtatgcgtcgcgtctgctgccttgcagaaaacagtga

SEQ ID NO: 167208 - DNA, 651 bp, Enterobacter cloacae
atgtcagaactcgcgttctccttcagccattatctgcagtcctccggagaggcaggggttgtgttgtatttcgttatttttgtcacagccacgctgatgtttttcccggcttctctgctgaccgcgctttccgggtggctgttcggcgctatcggaggaaccgtgctggctctgctggcgggcaccacctccgctctggtcgcgttttgcctcagtaaaagtcagttatttccggtcgcatcgcgcgctgcgggccggaaccgctatctgaaaaccctgatttcactgtcgcataacaatgccctcctgctgatcctgttgctacgcctgagctcggtcctgccgttcacggcgctaaattacgtgcttggggtcagcggtgtatcgctacgaaagtacaccgcagcgacggtgtttggcctgatccccggcacgtatgtgtatgccgctgccgggagtgttatttctgacgtccaggtgcttctgcacggcggtttcagcgccggggatattttacagcgagcggatgtgttaaccggcatggcagttgctgtggcgagtctgatgctactgtttgtcataaaaaagattttcaaccgcatagcgggcatccgtgcggatacccgtaacaacacaatcggagacagatga

SEQ ID NO: 167209 - DNA, 384 bp, Enterobacter cloacae
atgaccgacttaacttatgtacaggaatataacgccatcgtggaagtcctcagcaaatataacgaaggcggaaagcaggcaaagagtgaggtaatgaagcccgctttcagcgaccaggccacgatttttggtgttgacgctgaagcaaatctcacgggcggtccgatccagggcctcttcgacaccatcgataccgcgttccggccttcaccggaggctaaggccgccattgtatacgtcgacatcgtgggcaccgcggcaagcgcgcgtatcgataccgacgatatttcaggcttccgttttacggactttttcaacctgctgaaggtcaacgggcgctggatcgtagtgagcaaaatttaccatacccacgccgcttcctga

SEQ ID NO: 167210 - DNA, 387 bp, Enterobacter cloacae; identical to SEQ ID NO: 109213

SEQ ID NO: 167211 - DNA, 660 bp, Enterobacter cloacae
atgagtacggtgtttattatcggcggcgcaggcaaggtgggccggcgcctggccagaattcttacggagaaagggcacgctgttcatgcgctgcaccgtcagccggagcaggcgcagttgattcgtctgcagggagcaaagcccgtcagcgggagcctgacggagctggatgccgcggctctggcgaccatgatgagaggctgcgatgtggtggtcttctcggccggtgccggcggcaaaggtggcccggaaatgacgaacgccattgacggagaagggcttaagacggccgcagaggcggccgcgatggccggcatttcccgcttcctgctggtttcggcctttccggaggcttcaagaaatgaatccacctcggcgtcgtttgaaaactatatgcgcgtgaaaaagcaggcagaagtcgtgctggccgcaagctcgctggactgggtcattctgcgacccggcctgttgctggatgacaaaggttcaggatatgtccgcgccgggctggccataccttacggggaggtcgcccgggataacgtggcggccacgctggctgaaattatcgctcagccccgcgtcagccgcgtcatcattgagctgaccgacggtgaggtgccggtacgaaaggcggttcagcagatggcggaacgctga

SEQ ID NO: 167212 - DNA, 681 bp, Enterobacter cloacae
atggactggtccgctgattcagaaccggatatgcggctactgctgctcggtgcaacggggctcgtgggcagtcatgtcctgcaacaggcgatgtccagcccgcacatcggtaccgttattgcgccgacgcgaaaacctctcgcatggtgcgccacaggccatacccggcttattaatcccctgatcgactttgatgcccccgacgctgacgctctggagtggcgcgttgacgcggttatctgtgcgctcggcaccacaattgccagagccggcagccgggaggcattccggcgggttgattatgactatcctctgatgtttgcccggctggcacgtaatggcggcgcctcagcgttcgcgctgacctcggcgaccggcgcaaatgccggctcccgattcttttataaccgggtgaagggggagcttgaacaggcgctgaggcatgaaaatttcccctcactgacgctggtccgtcccggcgttattgccggcgatcgggctgaatcccgcccgggtgaaacggtgctgaagcaggcgctcaggctcttatcgccggttctgccacgcagctggcagctcagcccggctgaagacatagcccgccatctcctcagagctgtgaccacacccaggtcgggcattcatattgtttctgcgggtgaaataaattctgcaagataa

SEQ ID NO: 167213 - DNA, 441 bp, Enterobacter cloacae
atgtcagtagtgaactttaatgccgtggttaacgcccatgcggaccgcgtatggcagacgctcagccagttcggacgcatcagcgactggcatcctgctatctgcagcagcgaaatcgaagataatcagcccgacggtcgcccgggctgccggcgccgactggtacttgaaaacggcgatgtcctgcgcgaagagctcctcatgctggatgcaggtaagcgggccttctcatatcgctttattgaagccccgctggccgtagatggttatgtggcaacagtcagcctcattcctctgagcgatagcgacgaaacggtcattgcctggcaggcgagttttgaagcccggtcccgcaacgaggtgcaagcgatggaggcgagcgttctggagctgatagcgtcaggccaccgcagtcttgctgcctaccttgaaaacctgtaa

SEQ ID NO: 167214 - DNA, 609 bp, Enterobacter cloacae
atgcttgactacattgtgcccgtagagccagcaaaggcctacaggctgataaatcatggaccggcaacgctggtctctgcgcgctataacggaacggacaacgtcatggctgcgtcatgggtctgcgccctggattacgaaccggcgcgactgaccgtcgtgctggacaagaccgcattcacccgcgggttgattgaaaaaagccgttcctttgttattcaggtcccggtggcaggccaggcctcactcgtgcactacctcggttcacattcactgtcctgcgaagcggataaactcgctcagtccggggtgtcgctgtttgaactgcccggcgcggatgtgccaatggtgtcaggatgtgccgcgtggctgtattgcgaactcatccctgaagcacatacccagcaggcctatgatttattcatcggagaaataaaagcggcctgggctgacagtcgcgcttttaaggacggacactggcaatttgaacggggagcggcggactggcgaagtctgcactatatcgcgggcggccacttttacactaccggcgatccgctggacgtgccggacgcgccgctgcaaacgcccggagagccgcaaggctga

SEQ ID NO: 167215 - DNA, 870 bp, Enterobacter cloacae
atgatccgtgaactgaaaacgtttctgatggtggcaaaggaagggacctttgcggcggctggcaataaaattggtctgacgcaggcggccgtcagcgcccaaatgcagaggctggaggccgacttaaacttcccgttgtttgaccggtcggggagaaacgcacgtctgaaccagaaagggctacaactgatctctcaggcacaggaactcctctcgatgtatgacgggctgggtgagcgactgaatttggctacccccggtaggaccatcacgataggcgcaattgcctcaatacagcgtacgctgctgccggatgcgctgacggcgttttgcagacacagcgccggctgccgtatccgcgttataccgggcctgtcgatggaactgattaaccttgtggacgccggtgaaatagatatggccgcggtgctgaaacctccgtttgcgctgccgacagggctgcagtggagtgcgctggcacatgaaccttttcacctcatcgtgccgaaaaatgtggcaggaaacgatattgccactctgctgagcgaccagccttttatccgctacgatcgttcgtccttcggtggacgccaggttgatcgctttcttcgcgaaatgaatctctcggtcaacgaaatctgcgaggtggacgagctggaggccatcctcaagctcgtcagtaatggcatgggggttgctctgctgccccggacggccaactggcggcgctggccggcctccgtcagggccatcggtctgaatgagaaggttttttaccgggacgtcgggcttattcaccgcccgcttgaaaaccttgacgataacgtcaggcggatctccgagcagattatcctgcaggcggggcggtaa

SEQ ID NO: 167216 - DNA, 426 bp, Enterobacter cloacae
atgagcctttcccccttccatctggcgattcctgtctatgatctgaaagcaacacgtcgtttttacggcgagaccttcggcctgagtgaaggccgttcgagcgaacagtgggttgactttgacttttacggtcatcaactggtcattcacgaacatcctaaaaccgcatcgcaggagagcgtgcattccaactccgtcgacggtcacgacgtacccgtcccgcactttggcatcatcctgaagtgggaggaatgggaggcacttgcagaacgcctcagatcatttaacaccaaatttgtcatcgaaccttacatccgctttaagggacaggtcggagaacaggccaccatgtttttattcgatccctgtggcaacgcgcttgaattcaaagcgttcaaggatatgagtcagcttttcgcaaaatga

SEQ ID NO: 167217 - DNA, 1260 bp, Enterobacter cloacae
atgaaaaaaataacactggtctggcagatagttattggacttgtacttggaataattgtgggatggtattttaatacgcaccctgagtatcagcagtgggtcagccacgaaatccttaaaccgctgggcgatattttcatcaaaatgatgaaaatggtcgtggtgcctattgtcttctgttgcatgattctgggcataaccggaagcggtgacaacaagtcgttcggacgaatgggcgcgaaagcgctcggttacttctttatcgtcacggggctggccaccatctttggactggtgctggctaaccttatttccccaggcgaaggcaccagtattcagggaatggcgcacggcgacggacacatgaaaatggagccggcgcggggcgcactgattattcttcagaatatcgttcctgataacctgtttgttgcgctctccgagggcaaactgctgtcagttttgttctttgccgtgctgtttggcctggcgcttaatggccttcccagggataaaacagccccgatcctcagcgttctccaaagcgtatcagatggcatgttcagggtggtgtccattgtcatggcctacgcgccggttggcgtcttcggcatgattggtgccaccgtgtccacttttggtttcgcttcccttctgccgctgcttaagcttgtaggcaccgtttatctgggtctggttttattcgccctgatcgtgctgggcggtatctgcgcgctgatcggggaaaacgtctttaagctgataaaacattttcgtcaggaactggtgctggcattctcaagcgccgcttctgcagcggttatgccacagctgatgtacaagcttgaacgctatggcgtaccgggtcggatcgtcagctttgtggtgcccgtgggatatgcttttaatcttgacggcgcgtcgatatttctcggtgtggcgaccatatttgtggcccagctttacggcattgacctgacgctgatgcaacagatcattttagttgtcacaatggtgctaacgtcgaaaggagcagccggtgtgccggggtttgccattctgattctctcagccactctggcgtctgcgggattaccgcttgacgccgttgccttgatagccgggatattccgtattattgacagtggaacaacaaccctcaacgtcctgggaaatgtagttgctccattggtcattaaccggtgggaaaaagaaccacgagcctttgaaggctctcagccggacctgaataaacgctga

SEQ ID NO: 167218 - DNA, 1533 bp, Enterobacter cloacae
atgcgcaatgcaattcttcccatcgccgtagccgtggcaatgtttatcctgggggtattcattcttaatacacaggtctggtacaccactcgcgcagacggtcttgctggggcaaggtatgtatcaaacaatatgacagtgattctgaatgaagcccgccttgctaaccggacggcgatgggtattgccgaaaaaggctgtggcccggaagagcaatatcagcttggtactttagcagcactcctcccccatctcagaactatcattatagtcaggaggggagcagtctggtgttcatccctaccgggaaatcgcgtactactggttaacattaacgcattgccgaattcccaactgttacttgtgccttccagcagtacagttgacggtcttcctgttcttctcgttcagaccaaatacgctgacagccgtatcatagtcacagtaagcgatagtcatatcagggatgcgctggatatcccattaaaaggcctaggatacgccctaagggtagggaataacgtaataggtatgtccggtgatgtcactaaggtaaacgaaacgcaacatctttctgcacacgttagggactcagaatatcccttcagtattgattacaactacgttgcgtttttcagcatgcagaacctgcagaatatgatcagtcaggctggggggatactgctgtttttactgctgatgtcctgtctcgccgcctacatccttaataaatatcttactaaaactactctccctgaagaagcgcttggtcgggccatttccaagggggatatcgtccctttttatcagcctatcgtaaatggcaaagatggcacacttcgtggtgttgaagtgttggccagatggaagaatccgaacggagggtatatttctcctgcttcatttattcctctggcggaaaaatcagggttgatagtaccgttaacgcaaagccttatggcccaagtagtgtctaatttgaacgccgttgccagtaaaataccagaaggattccatgttgggattaactacaacccttctcatatcgcagcgcccacatttgtggaagagtgtttgaaatataagaattgtttcagtcggcacgatttgaaacttgtcattgaggtaaccgagcgtgagcccctgaatatcgatgaaaaacttgctcaaaccctgaatgaactgcatgcaaaaggtttttccattgcacttgatgattttggaaccggctactcagggctctcctacctacaggatctcaatattgattacatcaaaattgatcaaacttttgtaagtcgggttaatgagcatgaggactcgactctcatactggattctgtccttgaccttgcgcgaaaactttcaataagcattgttgcagaaggtgtagaaacgcaagagcagcttgactatctaatcaggaacaatatcttatttatgcagggatattatttctttaagccagttcctttttctgaattaataatgattttgttatctaaacctaaagtgagagtgaaggttgaatga

SEQ ID NO: 167219 - DNA, 843 bp, Enterobacter cloacae
atgacgacttcgaaagtttggtttattactggcgcagggcgcggaattggcagcgatctcgccaccgctgccctggaagcaggccattacgtcgtcgctacggccagagatgccgccaccgtgactgctgaggttggggaacatgaaaggctattgcctcttgccatggatgttaccgaccctggtgcaatcgatggggcggtaaaagctgcgatgaatcgcttcggtcgcatagatgtactgatcaacaatgcaggaaggttttacaccggatttttcgaaacgatgtctccggagcaagtccgcaatcagatggaggtcagtttcttcggcacgctgaatgttacccgtgcaatattgccggtgatgcgacgccagcgtcagggacatatagtcactgtcagcgcaatgctgggcgtggtgggtggcccattcgtctcgatctttgccgcgtcaaaatttgcgctggagggctggatggagtcgatagcccctgaaatcgccccctttggcatcacgactacgatcgtagagccgggggctttccgcaccaaacctggcaaagatcgcctccggacggtttttcctgagattacgattgaagattatgcagaagaaaccgagaaacgctctgcaagcgttatggcgttctatgggaacgaaccggggcatcgcatcaagctggcatccgcttttgtcactgtggtggacatggaacagccgcccaaacgctgggtggcagggaaagatgcggtcgagggtatcgttgccaaaggtaaacaacttattgttgatgccacggcattccctgaattatcaatcacgctagggcatgacgactga

SEQ ID NO: 167220 - DNA, 753 bp, Enterobacter cloacae
atgaaaataggcattcttggtgtcggcatgattggtaaaaccctcgttcagaaactcagtgctgccggacacgatgtgaaggcggcgaattctcgcgggcctgagagcattgatccggatgtctttgccaggggcggtcggggcgtgaccagcgctgaggcagtaaaagatgttgatgtggtgattgtctccgttaatccacggagtttcggtcaaatcgccccgcttatcaaatcgcttccacccgaaacggttgtgatcgatacctttaattattatcccgcccgtgaaggggacggcaaaattgaagccctggaatccggtcaggttgaaagcgtctgggcgtcggaagtgcttggccgtccgctggtgaaagcgtggaacactatcatcttccagtcatttgcaacccggggtgtacctgccggaacgcccggacgcattgcacttcctgtcgcaggaaataatgaacatgaccgccgcgtggcaatggcgcttgtggaagacaccggctttgatgcctttgatgccggagtgcttgcagactcgtggcgacagcagcccggagctcccgcttactgcaccaatctgacgctcgaggaactgcccggcgcactcgctgcggctgagaaagagcgactgcccaagcggcgggatatcgtgtggcaggccatcgctgaacggacaggtaatgaaatgacctccattaccgaggactatatcatccgtcttcagcgcgcagtgtttatgtaa

SEQ ID NO: 167221 - DNA, 435 bp, Enterobacter cloacae
ttgccaaaaaataatatccctgttctcggaatggaactttcctttgccctgtacagtgcagcaggcaggatggtccgcatgcacaaaccattgcttgagcctctggaattgacgtttccccagtatctggtgttactggagctgtacgctggtacaccccgtaacgttggagatctagggaatagtctgggcatggatacaggaactatcactcccctgcttaaacgcatggaaaaatcagggctgttaacccgtacacgcgatccactggacgaacgccgtatccttgttggattgacagacaaagcggaaagtattcgtgaggaagtgtgggcggtatctggaaagattaaagccagatgccagcttgacgaagccggactcctcgcgctgagagatacattgcgtgaattcgcacatccggcagaggattaa

SEQ ID NO: 167222 - DNA, 876 bp, Enterobacter cloacae
atgtgtgataataaaactgatagttacgccagacgctttaaacaggtctttgattatattgaccaccatctcgatgacgctttattactggaaaaactgagtgaagtggctcacttctcgccatttcatttccatcgtcagttttgtagttattgtgggatgccacctggccgttacatccagatgatgcgcttaaaacgcgcatcttatcgactggcttttaatccgttcgagaaaatcactgatatcgcgtacgacgccggtttccagcattctgaatcatttagccgtgctttcagacaaatgttcggtctatcaccgacgcaattccgccagcagcccccctgggtggattggcataagcgcatatccgaaccttacaaagccaggagacaaaccatgcaaagccaggtcaggatcattactttccccgcgacgtcagtcgcaatgctgacacattatggacaaccggagcgaataaacgaaacggcggctcgctttattgaatggcgaaaaaccacgggtttttcaccggttgccagtagccagacatacggtattgcaccacacgatccaaccttaacgccgccggatgaatttgagttccatatttgcggaaccgtcacgtcacccattattgaagacaatcgcttcggggtgataaatagtgacattccggctggtcgctgtgcggtgttacgtcatcagggatcgcatgatgcgttaaccgggttggctaagtctctgtatcgtgactggttgccagagagcggagaggaacttcgcgacttcccgcttttctttcattaccacaactttgtgcatgaggtagcagaacatgaattactcacggatatctatttgccgttaaaatga

SEQ ID NO: 167223 - DNA, 513 bp, Enterobacter cloacae
atgcaaaccacattaggtgaaagctcacctctttttccctacacactttttcgacttccgtttttttcaaccatcagaccgtattcctccgatatcagattcttagggatcattgaggtagctcactgttgtatctgtcagctggtgctctgtgacgtcccgtacttcgttccgtgttttgaacagattaaaaaccaggatgtctatccgatacagtacccggatgatacattgagccgggatatacagatcgattcctatcacctgcatctcatgatgaaaaccatctaccagattgaagatccggaagcgtctgtcgtagacaaacgcatcctgcataaagtcgttagttcagaactgattcagcaattccggttttatcaacagagtcggattacgcaccggcagacctcgctttactttacgatgaaaatttggtttcagcaggcaataaatccggtgtacaagcttaagattcaagcagcagccctatcttcggagtccctgaaatag

SEQ ID NO: 167224 - DNA, 1248 bp, Enterobacter cloacae
atgaattacttctggattacgcaaagcccatggtcacaaaaaaaagaacttgagaatggttggatcagcgcaaggcccgcaaaaaaatacaaccattatagagaaatggttaaaaccattaagaaaggcgacctcatttttttctgtagccgtggggtaataaattatgtaggatttgcgctcgcttcgtctatgtcagaaactgacaaaacaggtgagatctggaaggtgaagattaaatcttctcagttggaaatgccaatagagattagtaatcacagtgaatacctattagaaaaaagagcagagaagtattcgccaatcacttatttaggcaccgcacatcaaggctattgctcagtgattagcaaggtaattgcatggtatttactttcaagggcaggagtatattataaaaataacagtataattgaattagaaaaatccataggatacagagatacgaaatcggtaagccatagagtttcaaacttaaatgctttgatgtcttctctaactagagagaacattttagacacactagataagtttggtgagttgatatattctgattataaataccaaaactctacaacctatgacctggaatatgatggagttagatatccacctaaagtcatttttggtatttcagctattgcattgattaatagacctttgtttgctgatgagtttagcggaggagtcaattcaccttgttttcatatattagaagcacttggttttaatatcgttaaaaagaataaatctagtgatggcaatgaatttgaagatattgattttctaatcaatgatattgaaatgattgaaaatgacgattcactctcggtaacagaacgcgaacagcttatagccgcacgtaaaggtcaaggaaagtacagaaaagaattaattaaactatatgggaaatgcatcgttactggtattccgtatgaatttatgcttagagcaagccatatcaagccctggagagtatcaaataataaagaacgtcttgacccttttaatggttttttattatcttcaaatgtggatattttatttgataaaggtttcttgagctttgaaaatagtggtgagttaattttatgcgaggagttaaaaaatgaattcacgcttcgtcttttggggatcgacttatgcaaaaaagtgatgatacccctaggcactttccaatatctagattggcatcgtaaaaatatttttggacgatacaaaggaaaataa

SEQ ID NO: 167225 - DNA, 1053 bp, Enterobacter cloacae
atgaaaaatgagatgcttaatgcctttgatgcacttgtgcctcattgcgaggtaagtgccgctttatgtgatgctgcctcaaaaggtttccttgatatacctttagatttgcactctatttgtacccgcattggtctacctcaagctagagctgccgatattgagcgttcgctgattgctgggcaagcatacggggtgttcaaacaatcaacgccccttacatgggtgataaatgactacaatcttgcgtctagtctagctcctttattactaggtgttcgtttgtacctctcacgtgcgaagcatatttatgctgctcgacaacaggtgattgtgcaagttcacgatgaattaccgatactggctgctgagcaaccccgtaaattaatggaattgcatgctgagattgaacgagtatcattagaacaaatgattgataagtatcgtgatatgctcagtaaaaatctttcagagaacgcttggcagaaattttttgatcaaaatatatttattttgaccatgttgttttgcggaccagtacaccttgtttgcagccaatttcacgcacagccaagtggaattacaggaaaaggtgcacaaataggcgactacctgtttcgtggtatgggacaggcattggctatcgtcgagatcaaaaaaccagataccccgctgattcaaaagagagagtatcgcagtggtggtggtgttcatgctcctgattcagagttaagtggtgctgtaagccaggtattataccaacgccactcacttcaatctgcttggagcattcatcgtgaaaatggtgagctttcaaatacaagacctgacaatacccgttgtgtcatcattgctggtacacttcctattgagacaaaaatactacgctcattcgaaacattcaggtgtgctcatacaaatgttgagataattacctttgatgagcttctacataaacttgaactattactcaacattcttaccccaaaggatgttctagagcctaggcggaaaaaaattagaaaactaaatgcggcacaaaataacaattaa

SEQ ID NO: 167226 - DNA, 2220 bp, Enterobacter cloacae
atgtcaaaacataggggaatgctagcgaatgatgatgaaagcaaaacactacacgctcccacaatggcacgttcaagaggacaattggggtcagcctatgctcctggagcattctttacttttgaaggcggattaggagcatgtatttccattccagatttatccgccacagaagatgatgcgcccatccaaccagaaacgaagtcacaaattgttctgagattgcaggagatttggcagagttggttcgctcgtgcatatgagattggaactggagagcgtgacatcgatcctcgtctttgcctggatgagtctcttctcaaggggagtgtcgtagttccactagggggagatagcctgtcatttttaagtcccctaagaatggggtattctccagcaccgctgacttttgtttgtaacaaatgcaggcttttcaggagctttgagtcagttcaccagttagcggagagtatgggggagctgcgcaaggctcgttgtacagctgctgaggctaaaggtggatgcgaatggcgacaagtcgacgttatattcgtgcattggtccggtgagtggatgcctgtgactccaggcagatgggagtgggatgaacgtaataatgccataaggctgtatggtgaagagtgtaaagtatgtggtgggcaagatttcaaactcaacacagattcaccacgcatcggccagtggcatttttattgtgctaacccaaaatgtgggcataaaggaagcagttcatggcggcaaaatgaccgcttcacaacggaggtcttcaggaatcaacctagtatacctgttgccagacgccgtatggagccaatttcgtatcgtgcatcgtcagcgtattatgctcaatccgaacaattcgtactgtttcctgagtctgaacatcatctaatcacaatgttagaaccacaacacgagactgaacttgctacctttatcggtacacagttccgatttggggggggtaaactttcaactgaagaaatgaaatcgactctattagctgctggtgaagatagtgaatggatatcgtatgaaaattggatgaaagtaagagagctagaaaaagataatcccactatgttgaagattgcagatgatgaaattaataaactgattactagatggactacaagcacacctccacttctgcggccaaatgccgatcttccatcggctgtaaaagagcgacttagacaacgtagtgaatataccagtcgttttgacccttttatccttgcggttgaacatgaagctttgaatcgaggcaaactttctgcccccggcgatgctgggcgggcgaagtttgtacgttttaaccatctggataaagatcttgcgccaaaaaatgtaaaagttaaggctatacaggaatctgagactaagcgtctaatgagtaaactcggaatcgctgatatgggattaattcgggagttcgatctgtgccgatttacgcatggttacacccgtgtttcggcaactcccgttctcaacaggcataatcaagatatgcccgtacgtttgaaattattcgaaccgttacgtaatggtaaacgtcccatttatgttgtgacacaagcaaatgaggcattgtacgttcgtcttgatccagtagttgtttataagtggctccagtctatcggtgtgttagatcttcctgaatgggatgaaagtaattccattaaattaggagggaagattctagaggtaacgcaaccttttggtcgttatttttctctcttaaaagaagatcaagcatcaacttatcgctatatttatacacttctgcatacctacgcacatacactcatgaaaaacgtagcagagttatctggcttagatttagggtctatgggggagtatatatttccgctagattttgcattcgtggtatatcgaaacggtaccactatggatcttggtaatttatcctctttgtggcgtaatgaaaataacagattccttgcacgattgcttgagaactcgacacatcgttgcaattctggacgactatgtgatagcacggggggagcatgtcctgactgtattatgattccagagacgtcttgccttgctcagaatcagttactgtctcgtgcagtgctaaaaggagggcatccacctcgtgaggatgcaactcataaggggcaacgtatcaaaggtttccttgaaatagtgaatgatattgatgaaaaatga

SEQ ID NO: 167227 - DNA, 2019 bp, Enterobacter cloacae
atgcgtgcgtggcgaaaattatcaaactgcccattttgtggtagtgaaactgcattgagattgtttgttgctcacggttatcagactttgggccacgtttgtactgatattcgttgtgatttcaatggtggagattggaagccgttgccattttatatcgtcgatgaagatatctatgatttagcaccatcagtcttattaggtacagttgataaattagctcttattggtcattcaaaaaaaaccattcggcgtatctatgctatgtttggggctgctccttgggttaatccccataatggacgattgcatgttccgaccaataatgatctagccgcagggccagcagcaaaaggcatggagggagtatttcctgcttacagaaatggtaggcatatttttcacgatccgtttccaagcttgattattcaagatgaagctcacttgcttgatgagtcgctagggacttttgcaggcttgtttgaatctacccttgatgcagtttttgaatatcttggtggctcccttaaagatcttgtggctgtgtacgaccaggggcgtcggcgtcgttctaaggttattgcagcttcagccaccgtatcctctccagaaaggcagctagaacatctctatcaacgttcaattccagcagtgcagtttccagaacctggaccatctctgtatgagtctttctatgcaaaacctgcattggcagaagaagagctccgaaaaaagcatcccgacattgagatcgcaagtcgacaggcacgtatatatacggcttttatgactaacggtaagccacacacatcaactagtgtcgcggtgctatcagggtttcatttaactattagtcggctatttgacaaccttacctgtggtgctgagctgcaattccaaattgctcgtcagatgttagctggacatgtatcaaagggatcacttcaaaaactgcataaacaggtattatccgaggctaatgcttctgaattagctacgcttatcgacttgcaccgcattgcgctgacctatgtcactaataagaagggtggtgatcaaattatggcagcagaaactgaggagacgcgcaaacgacatattaacgaaggtattgagcttgggggactggacactcgtcttattaccggctcggtggagcaaggtgagattcaaagcgtggtggatactgcacaacggcgtgtcgccccaggagaaccactacctccgttaagagaacagctacgttccgttatcgcgacttcagctatctcacatggtgtcgacgtagatgagtttaactcaatgttctttgccggaatgccttccgacattgccgagtatatccaggcttcctctcgagttgggcgtacacatataggttttattgtccttgtcccgacgccacaacgtcgcagggataggcacatcgtgcatatattcgatatttttcatcgatttcttgaacgaatggtgcaacccgctgctattgatcgttgggctgaacgtgctatcgatcgcgtatatcctagcctattccaggcatatttgttgggtgttcgccctagtagtgaattaattcagctgcctgaaggggagaaagccagaactcctgattacagttttattccaaatatacgcaaagagtttacttctcgaggtgattcatttattgatgaaataaacaaatttgtagagttagccgtggggttgaacggtgcctttgtacctgaaggtgaggagtactatcgtgatcgcattaatcaaaggactcgtaatctcattgtaaacgcttggagtagtccgatgtgggggaatggtaatctcgatgcgtacttcaatggtcaaacagatcccatgattaagccaatgacgtcgctacgcgatgttgatcaaacaggcatcatccaggcatcattcctagatgtaaatggcaaaaagcaatcaattgatgagatacagttagtgatggattttcttcgtcatggtgtggctggcaatgatggttcggataatgcatag

SEQ ID NO: 167228 - DNA, 558 bp, Enterobacter cloacae
atgatttgctccaccaacattgaacgcatcgtcaccggacgtaataccgcgctggtgcagattgaaacgccgatacaacaacttgacaatatctctgccctgacaagtagtgtcggcggaggtaaatcgaatgaaaggggagtacggcaataccgttacgactgctggttgatggaaaaaccagaaacagcgatagaagccatcacccgaaacatcgatcgcagcatctggaaagacctgatgaataagtcgggaatgctggcgctcatggacgctcaggcgcgtgaccagtggtacaacagtctggaaatggacgatattccggctatcagcgaagagaatattctcgacatattcgagcagctgcaccttagtaaaggtgacgtatttgaacgtagggcgataaatgtgtttaaaggtctgagccgggactacaaaagtaacatcccgtgtaagtttgggacaaagatcatcatgacaggactggtcaaatacgacagatgttgtcaaacaggatatgcgaaacttcagtttttcgggtttaccgaactatcgtag

SEQ ID NO: 167229 - DNA, 204 bp, Enterobacter cloacae
atgccggaattaaccaccgaagaggctctcaacattctgattacctggctgcaggacaacatcgattgtggcaacgagattatcttcaacaacgacgaagacaacaccgattcagcaaagttattgccccgagttgaacaggcattacagagcgttcgcgatctccaccatcttcagcttctgcaacaggccagtacagattaa

SEQ ID NO: 167230 - DNA, 399 bp, Enterobacter cloacae
atgaaattatccctgaccgtggaagccgatgctattaacgtactggccgtcaacatgggccggatcgctgttgatattgatggcatcaaacttgctgaactgattgatgtggtctgtgataacggttattcgcttcgcgttgctgataagcccggaaagctggttgttgaagatccgttcccacccgcagcccgcctgaacggtattcagtgtagcactgcacgtatcacggaggaagacaatgctctgctgtttgccctttcacaccagtatgaagactttggcgagtctgaatggatttcgtacaccggttcgggttatctgctccacctgggcgcgtggtcgtttccggtcttacgcctcaagcgcctcggggtgtacaatcctgccgtcgcctag

SEQ ID NO: 167231 - DNA, 381 bp, Enterobacter cloacae
atgcaaaccttatccaccatcccgacgcggaaggcaccgccacacccgacgcccgttgaagtctggcagcaacttcttacgtatcttctggaaaggcattacggcctttcgcttcacgacactcagtttggtgatgacaatgtgattcagcagcatattgacgccgggatttcactggcagatgcactcaattttctcgttgaaaaatctgaactggtacggattgatcgcaccggtttctccattcagcatcagtccacttttatcggggtgattgatattcttcgggccagacgggcaacaggtttgatgcaacgcaacgggcataaaaagatcaccattctcatcgcgggtaatgcatttcaggaacaacattcatga

SEQ ID NO: 167232 - DNA, 174 bp, Enterobacter cloacae
gtgctgctcaaacagctggaattaatgctggtttccagtgagctgactccacgccatcagcactgcgttacgctgtatgtaaaagggctgacctgcgatgccgatacactgggcagttgtggttatctttatatcgcgatttacccgacggaaggcatcagcatcctccgctaa

SEQ ID NO: 167233 - DNA, 318 bp, Enterobacter cloacae
atggataaagtcatcttgatcaccggtgcatccagcggtatcggagagggtattgcacgagagcttggcaatgcaggcgcgaagatattacttggggcacgcaggaaagatcgtattgaagctatcgctgcagaaatccgcagtacaggcgggcatgctgaagcctgcgagctggatgtcacaaatcgccagtcgatgtctgatttcgtgcaggcggcattgactacgtgggggcgtattgatgttctgatcaacaacgcgggaataatgcccctttctccgctggcagcgggtaaatatgatgtaccattgatgtga

SEQ ID NO: 167234 - DNA, 168 bp, Enterobacter cloacae
atgcggcgtccagtgattgctcaatggcgcaggcctgtggccctggatattgttatccgagactttaccggaatgcttataagtacaggcatcgggggcacgttgtttgtgacagcgtttaggggtaaggggaacacatccggcaagcacagcggtaatacacactga

SEQ ID NO: 167235 - DNA, 459 bp, Enterobacter cloacae
gtgaaaataacaaatcgactgaaaaagaagttattagtcctagatggcaatggcaatggcaatggcaatggcaatggcaatggcaatggcaatggcaatgacaatgacaatgatttcatagagtatggaaaggaactagcatgccctgaatgcgaaggtgtaataatatattccatagtaaattcatatggttttgactcgctcaccgaagaggtaaaatgctttcttgttaagaaagtgagaggtgtgaagtatcttagtgaagctaataaatatagctatgatgaaagccaattgtatgtttcgaaaaacacatgtcaaaactgtttaaaagacttttcaactgtctttacgtataaagaagttcagccagcccggtaccgtgtatatcttgtggggttttttgaaggtgacttgaaacagatcaaatattgtaattttagatttacctatgattga

SEQ ID NO: 167236 - DNA, 1863 bp, Enterobacter cloacae
  misc_feature (47)..(56): n is a, c, g, or t
ttggaaggcacaacttgctcgtttttgccttatgctggaagaggttnnnnnnnnnnggtgatagtcgttgcggatgaaccacatgtcgcttaccaactaaaagataaactttgggaattaaattataaacgcgagaaagcgaatcagtggcatacacctcacgagtacattatttcaggggttccgagcacaataagtggtgatggcttgggcatggatgatacttatgaacccgagcatcctacatcacgtgaatttatcatccatatagtagacgctgatattgcgaaagtcgcagataaactcctacatattgctagcaatataccgggtggaaaaaagataggtaaacctctcattgaggcatcttcattcctttgtcgtctagccgcattaccctgtggtattcgacatatgtcagagtatctatctggttctgaaatatctgataggacgcgtactacctttgactggcttcattatttaggtgctgttaatgagcttgatcgtaatattggggttggagataaacgaccacttcttaatgattgtttggcgcgaggaactgagttatttggtaaatactatgaggctactccttttgctcgtaaactggctgatcttgtctcaactatttcaatgcgtaagaaaaatagaatagccatagtatttacaaatatattatatcgacggttggctgagcgttttcttgctgaatatgatgattatcctgaaggagtcacttataaatccttttatgaacgtataagtttattttcagcagatcatctagaggaaaacctaaatggcctaaaggggaccacactgatatttgcagggttaaatgaaaattgcttacgtttagtcctgacggatgatcgaattcctcatcattcagtaatcctcttgactcaacaagctggcaagtttcttcgtgctacactcaaacctattatagagcgaatgcctgagtttaaatcttataaacccagaatggagtctatcttacgacagttacatgaccttcccggagatgcttcggttctttctactggcagttatacgttgcccacttttcgtgtcgaattgtcatcagatgtgccgattaacgaccaagaaattactcctggttcttgggctatccagctcgataacggagagagacaatatcgtcatgaaacatctgaagtatatgtatatgagcctacttcaacatatgcatcggatgcgggatttagagtatgccaagttcgttcgcttgaggccggagacaaagtttttatcatgtcggtcgaaatgcgtgagatggttgaacaagttttatcaaacgcaggggtatcaatcaactctgacaagaccttcgaatcagcgctgagaagttatcacgaacagatacaaaagcgtcttaatctgcgcttcgggcagatcaaacacacagataagattcgtaccattcgagaagaaatacttgtgcttgctcctcaattgaaaagttatttgccaagtttacaggctatgcgtcattggattgatcttgatcattcgtccgaaacacctttcgatcagcttcgtccacaagctccgatgcgtgaagacgtttttaaagcgtttgcacaagtgcttggatttacatcactggagattgcttaccagtggcagcgggttatcatacctatacgcaacactcgcaggcttgatggccgccatgtatctgatatatatgcatacatgcttttacaaccagaatcagctatgtgtaacgcaaatattaaacgacaaactttggctagattgtttaatcaggcgcgcgcgaatgtagccactattgagcgtgtttaccctcttaaggaatttcagaaatga

SEQ ID NO: 167237 - DNA, 978 bp, Enterobacter cloacae
  misc_feature (964)..(973): n is a, c, g, or t
atggcctcagcaaagcaacgtactgatccatgggatgctttaagacgcaggcgcgaggaattagcaaagcgctcagctcatatgcgcggaattacacataaacccaaaaaaccttgcattaagccccttccagagcccttaccagctgctgaacctctatcttcaccagaccctgtcattcctcgtactcatgatgcactgctcccacttttcagagatgacttgccccaaccgagcaccccatcaagagctttagtgaggctggctgatctatatttacatgcagcacaacatcgcacacgacatattgcattagtatggccagcctctcttaaaacgctaactgttatacacgctctagcctctcttgttcgctggcaacatggtgataaacaaggcatccgcggattactatttccagtaaaaaccaatgtgttcaattgtcttaaccacattcattttgatcgaacaagcattgttcatatagccaaagagttagctgaggccactacaaatccccgtgtcacccgttccatgccagacaaggatgcttttttcttttctcttaatgatcataacctgcctcttatttctgaaaagcaggtcaacccgacgattggtgagttgttaccgctgtttctggcaacgcctaattttaagagttggacatcctgccattcacgtctacttgcactcattcgaaagaaacttttaaagcgagctcacgctaatgctttaaagcagtcaaactgttccatcctaggagatccccagactgcacctgatgctctttttgcactggatggacgcatgacaaagatagaacttcgtaaagcttgtgaggctttagctaagtgtggccctcctgaggttgtgatggtgcatgtttctcgttcccttcgtttcgaggctccagattggaaggcacaacttgctcgtttttgccttatgctggaagaggttnnnnnnnnnnggtga

SEQ ID NO: 167238 - DNA, 1551 bp, Enterobacter cloacae
gtgtgtgcatttgttaactttgtgaaggagcaagagctgcttgaatctacttattggttctcctctgcttatgcccaacttttggaaaaagattaccgtaagcggttagcgatgttttttactcccccggcgttgacaagacgcttacttgacgatttatcagcgaatggtgtggattttgctgatagtagtttctgtgatcctgcctgcggtggcggagcgtttttagcaccaattgcaatgcgtatgaaagaagagcttttccgtaaaggcgcaaactcctatgaaataatcgatcacattaataataaattattaggatttgataaagatataacactatgcgccttgtcaagacacttcttactgatggcattgtatgaagagattgtttccacaggaattcatcccaactttcaaatttaccatggtgattcacttttaaaaggcatggatttcatggagaaatttgatgtggtagtttgtaatccaccgttccgaaaaatgtcaaaaacagaatacaataaatacatcgaaaacttttctgatgtcattgaagcacagccaaatttgtattcgcttttttttgctctatgtattaatttattaaagaaaaaaggtatttgtgcattaatcaccccaactagctttctatcaggacaatatttttctaagcttcgcagatacttattaagccaaactaggatacttcgcattggaatagtaaatgatcgtctcggggtatttattgatgtatctcaagaaacaactttgactttagcatgccgtgaaaactctggatttactccatctaatgagactaaagtatctgtagtttcacgtgatggtaattacgttgacgtaggtgcgtgtgttctacctgcttgtggcgctgcgtggccaattcctcgaactgaaagcgacgttacgttgctgaaaaatgctaataagtcatcggtgtccttggctgattatggatatgctgctcgtataggggctttcgtttggaaccgtgatacacgtacaacttacgcgtcatcggaaagtgcctctaaagaatatagcgatgcaattgtccctttactttggtcaagtgatattacgcaggatggtaggctgctgtttactggagctctaaagacaaacaacgaacattgttttgttaacatgggaaaaaaagatcatccctcaatcgtaaaaaatttttgtgttatattacagcgtgtaacttccaatagccaatcgagacggctcattgcagccgctgttccaaaagaactttttgagacctttagtggtttcgttggcgaaaatcatacggttattcttgaacagattgtcatcgagccagagttagcgccaagccagttcgctgaattgttaaggacaccaatagtagacagatacttccgttgtatctcaggtgcaacaaatgtatcgattttcgagctgaaccaattgcgtctacctgaaccagccagactcaagtattatctttcacaggggaacaatatggctgattcggcccgtaaagctttggaagaaatgtga

SEQ ID NO: 167239 - DNA, 198 bp, Enterobacter cloacae
atgtttggctggggcgcgcattttcgtgcagacgtgtactcaagtcatttcaaacttagcagggaagatgacaatggccgaatacggggggcaaacaggtcgctgcaaaacttcaactccccgcttgctggttcagccatgcggataatccctgcttcgtgtttacaccaggttcgcttctggcatacctctccctga

SEQ ID NO: 167240 - DNA, 345 bp, Enterobacter cloacae
atgtatggaattaatgactctcagggtgtgcgaggcgctacgtttgatgaatacatggagtacatggaaaagttcattagacgcttcattgactggggaatgggagttgttgtctgtatcccggcgtccggaggtcagggttcgggagaccctaagtggattcagtgggggcgcaggcttcgcaacctttcagaggtgtacgggtgggcgactttcgacacgcaagaagtcttcatgaactcccatcatgcggcagttcaatctgacgctgttcacttcaactcccttggttacgcaatacttgatgagaagttaggttcgattgacctgctccccgttgattaa

SEQ ID NO: 167241 - DNA, 1116 bp, Enterobacter cloacae
atgaaaaagtatatatatggtttcataatattttccgttgcgattctctcgattgcgccagcagtcaacatgaagcatgaacttgatacaggaaagatggttgtagacacctccaagaaaaaaataattgagtgggtagatttcagttctttctataaaatggacttcgctatacctgtcctatcttataccctctacaaggctggcatttcgctgtaccctaatgatacagtcgttgggaaggatggttggctatttatgggtgataagtacaacaagacgctatccgaaaacagaaatctcaagccgttatcagaaagtgagatcacgaaaatgatcagcgcgcggcatgcctgggatgcttatgtgaaagcacatggcggcattggttacgtcctcacgatggcgcctgataagcactctgtgtatagcgaagaggcacctgaatgggtagtaaaaagtggcggaagcaggaatataaaatatcttcttgaccattcgaaaaatgatagaacattcatcaaccttggtgaaaatttcagctcgctaaaaaataatagtgattttatttattataaaacagactcacattggaaccagaatggtgcatggcatgcatatcaaaatctggctgtagagttaggtaaaacccttcctaatgtgaaatggctgtccgatgatgacataacgtttaataaaacacctagaccaggtggtgatttaagcaattttcttcgcctacagtacacaatctcagatgttcagtatctttataatgtaaaacctgagcatgcggctccaaaggatggaaatgataaaaatgagttggcctacctatataagtcatcatcattgaatgcaaatgatttttattacaataagaatgctctcaatgacatgaaagtattgtggttaactgattcttttggtggtggtatgaagcaatatatgcatgcgacattctctacaattaacgagcaacactatttaacactgatgtcagacaaaaagaaatttcaaaaaatcatcgatgatttttcccctgacatggttattgtcacggcagtagaaagacaaatactgatacaatcggttttcaaatcaacgcctgattga

SEQ ID NO: 167242 - DNA, 1482 bp, Enterobacter cloacae
atgcttttcagttctccggtgttcatattcttatttctacccatatcattttttgtatactttttcctcaataaaatcagaatagtttatgcagggaaagtatggcttgtagcttgcagtctgttcttctatggatattgggacgttagctatctacctttacttctgggatcaatactatttaacttcacgctcggttgggcagtctcacctcatacaaaaggtcttagattgccagccactagaaaagcgcttttaacttttgcgatcatagtcaacctttcattacttggttactacaaatacactaatttctttattgaaaacttcaacgacttaactggttatgaactgacattcagaaacattattctgccgcttggcatcagcttctataccttcacgcagacagcatttttagttgatagttatcgaggtagcgcaaaagagtacgacttcgttaactatgccctgtttgtcacattcttcccacatctgatcgccggtcctatccttcaccataaggagatgatgacgcagttccagtcaaagtggacatgtgcagtgcggtacagaaacatatttatgggcctttttattttctgcattggcctatttaaaaaggttgttattgctgacaatttcgccgtgttcgcaaatgaaggctttgcccccggcgcactgcatgatttcttcagttcatgggcaacaagcctttcatatacattccagctgtacttcgacttcagcggatactgcgatatggcgattggtgcagcattgcttttcaatatatggcttccgcttaacttcaattcaccgtataagtctctggaaattcaggacttctggcgcagatggcatattactctaggacgttatttgcgtgattatgtatatattccgctcggtgggaaccggtgttctagcgcaagaatttacttcaacctcttcgctacattcgttcttggaggcctttggcatggtgccagctggatgttcatcatctggggtgcaatgcatggtggtgcgctagttattcatagatggtggaaacagcgcggatttgagatgccaactgtaatggcgtggtttattacatttatgtttgtcaatgtggcatgggtattcttccgcgcccattcaattgatgacgccttgagaatacttgctggaatgcttgatttaaagtcaataaactccctaactatgtctgatgtaccaaccaatatgatcgcatggggaggttcgttccttgataacttcacaggaaaactacctgcaggaatagttgcaaacttactttgttacatccttatcatcattggcttcattatcacgcctttcaaaaacgcttatgaaatgacaatttccaaaggaaatcatggaataaaaacagtttggatggtcgttctctttacctgcgcagtctacacaacgattaaatcaactaacacagtatttctttacttcaacttctga

SEQ ID NO: 167243 - DNA, 219 bp, Enterobacter cloacae
atgagacaggttccttttgaagtcctgatgcacgctgaaaatgccctttctgaaagcgaaggagcctatgaggttctcagcatgtggctagacagtattcctgaaggcgaggagttccacggtgaagcgtgcaaggtaagcgcaatcatgtcgctgctgcataaatctatcggcgagctggtgaaagcgcgggaggcttacagtgaaaaacgcgcctaa

SEQ ID NO: 167244 - DNA, 345 bp, Enterobacter cloacae
atggaaattttaggcaaccataacgacaagtttcacggcatcaaatttctgcatagtgcaattgaagaaatgaatgagaaagctgaagtaactctgaccgactatctggctcttagggcttttgttctggctgagcgaagagaaactcaggactacattgatgcaatggatgaaacgtatgctgatttgcccgatgatctgcgttcttacattgagcttcttaatgacgttgccgcacagctatcaaatccatcacgctcaaatgggaatttaaaatcaattatttacgatgcgagaatatcaagcggaaacgccatgtctcactggttcagtgttgatagatag

SEQ ID NO: 167245 - DNA, 846 bp, Enterobacter cloacae
atgcgtactaatgatgatttacagataatccgaaagcatctggatggtgaatttgaacagcgcctgttagacgctgcgatcaataaccttttggatgaaaataatcagcttcggttcagcaattatgcctatgcacttagagagctattcttacacgttctaaaacgcatggcacctgatgaaaatgttcaactatgcgagtggtttcctggtttgaatgaaagagagcaggttgcaagaaaagactcttacaaatatatcattcatggtgggttaagtgatgaatatgtcagggatgtacttgatgtaaatattgccggagtaattccgggattgcgtgatgcgttctactcattaaataaatttactcacataagcgaaaagatttttccaattaatgatgacgatggcctaaaaatggtgggagaggttgaaggttgcatcggagctcttttcaccaagcttgatgagtgtcataaggagataattaataagctttatgaagctgtgagtgaggccgcgatacatagttcgataactgaaactgtaacatcaattgatattttatcgacacacagctcggttgatgaagtgtatgttgatgatgtgaaaatagtagaaataaatgactctgaagtaattttctctgttagtggctctgtaggtgtcgggttgcaatggggatctaattccgatttgcgaaatgacataggtgctgtaggtagagaaacattcccatttacctgcgaggtgagaagtccagtgtatgcccctgaacgtttagagtgtgatgaaggggcattccatgcagatacttcaagttggtgggaaggatattacgactaa

SEQ ID NO: 167246 - DNA, 1749 bp, Enterobacter cloacae
gtggccgactggcagggcgcggacgcctcagcctggaacaacctccttgccggagagcgtgagggacagaccaccctgaccgttgtggatgcgaccggggcgatgctgtccaccacggatgcagaaggtaaccggcagcgggtcgcgtatgacgtggctggtatgctgtcaggcagctggctgacggtgaaggacggtacggagcgggttatcgtggcttccctgacgtactcggccgccggacggaagctgcgcgaggtgcacggcaatggcgtggtgaccacgtacacctatgaggcagagacgcagcgcctgaccgggattaagacggaacgtccggccggacacgcctcaggtgcgaaggtgctgcaggacctgcgctatgagtatgacccgacgggtaatgttctgaaaatcagtaacgatgcggaagagacccgcttctggcgcaaccagaaagtggtgccggaaaacacgtacacctatgacagcctgtaccagctggtcagcgccaccgggcgcgagatggcgggtgccggtcagcagggctgcagctcaccgaccaccactgttccccttcccacagacggctcagcgttcacaagttatacccgcagctatacctatgatgaaggcggcaacctgacccaaattcgccacagcgcccccgcgacaggcaacacttacaccacaaatatcaccataagcgaccgcagcaaccggggcgtgctgagcagcctgacggcaaacccggccgaggtggacgcactgttcacggccggtggtcagcagaaacagctgcagccggggcagagtctggtctggacgccgcgcaatgagctgctgaaggtgacgccaatggtgcgtgatggcgctgaagatgacagggaaagctatcgctatggcgcaaacggtcagcgcatcctgaaagtcagcatgcagaacgcgggcaacagcgtgcagacgcagcgggtgctgtacctgccgggactggagctgcgcagcacacagaacggcaacagggaaacggaaaacctgcaggtgattacggtgggcgaggcgggtcgggcgcaggtgcgggtgctgcactgggagagcggcaaaccggacggtatcggtaacgaccagataagatacagctacgataacctgaccggcagcagtggccttgaactggagcagaatggtctgattatcagcacggaggtgtactacccttacggcggcacggcggtctgtacggcgcgcagccaggccgaagtgaagtataaaacggtgcgctattcgggcaaggagcgggacgcaacggggctgtactactacggctggcggtactatcaggcgtgggcgggacggtggctgagcgcggacccggcaggcacggtggacggacagaacctgttcaggatggtcaggaataatccggtgtcttattatgaccatcttggtttaatgcaccgcactcataatgagccaagcaaaagataccaaactacccgagaagatgaattgtcagagatagcaaaagccttccgtgaagctaaaacaaataatgaaaaaataagtgcgtcgaataaggctatatcattttacaccaccaattcaaacttaatcaatattcctattcgtaagcacgctcaggaaaaatcccgtcttcctgaagttatttccacaattaaagatagtatcgactttggtatttcttcatctgttgattatggaaaaaaacattgctctggagaaaagtga

SEQ ID NO: 167247 - DNA, 360 bp, Enterobacter cloacae
atgcacaacacaacaaatgcagcaaatcatgagagcgcagagccctggtggggtctgcagcccagtatcacaccgtgttttggcgcacgcctggtgcaggagggcaaccggctgcactatctcgccgaccgcgccagtatcaccgggcagttcagcaacgcggatttacgtcgtctcgacaaggcgtttccggtgctgctcaaacagctggaattaatgctgctttccggtgaactcagtccccgccatcagcactgcgtcacgctgtatgtaaaagggctgacctgcaatgccgatacacagggcagttgtggttacctttatatcgcgatttatcccactcccgcttcgacgtcataa

SEQ ID NO: 167248 - DNA, 480 bp, Enterobacter cloacae
atggaacaacaattacctttgtttgccaccgtaccaccaccatccgcacagcagactatccgtgaagccttaaccctgctggcgtgccagctacgcgagcctggagcgtcatttacctccatccatgccgtgcgtgactggcttcgcctgcagcttgccacactggaaagagaagcactttcggttctgtggctcgacaaccagcatcgcctgatagcccacgacacgctgttcctcggaacaatcaacaccatcactatacacccgcgtgaggttgtcaaagccggtctgaagcataacgcagcggctgccatactgtcccataaccacccgtcgggagaggctgagcccagtcatgccgacaggctgattaccggacgtctgaagcagatacttgaactggttgacattcgcctgctggaccacctggtggtcggcgggatggatatcgtttcgttttcggaacgtggctggctgtaa

SEQ ID NO: 167249 - DNA, 483 bp, Enterobacter cloacae
atgaacaacgctcttaacctcaccggcacggtgacggaatcactcacatcaccacaaactgatgcagactgcattgtgtgcacaccagtgcccgatgagcagcgcatcggcttctggccgcagtactttggtgccatcccgcagtggataaccctcgagccacatatcttcgcctggatggaccgcttctgcgtggattacagcggcggtatctggaattttaatacgctgagcaacggcggtgcgtttatggcgccgcagccgggtgaagacgacgatgaaaaatggacgctgttcaatcccatgaacggtaacggcgccgagatgagcgcagaggctgccggggttgcggtctgcctcatcgcttacagtcatcatgcctgccgtacggaatgcgatgacatgaccgtgcactattaccggttgcgggactatgcgctggcgcattctgaatgcagcgccattatgcacatcatcgactga

SEQ ID NO: 167250 - DNA, 156 bp, Enterobacter cloacae
atgaaattagccagccgctctggtgcggtcagccttgtccgccgggaccgccctttaacccgtgatgagctggcacattttgtgcccggcgtcttcagtgacgagaagcatgcatcccgcagcaacaggtataccggtatcggaacatacgcctga

SEQ ID NO: 167251 - DNA, 627 bp, Enterobacter cloacae
atgagaaccgtcataactgtcaccagatttctgattatcgtcgccgtactctggacccaggcgggccggacggcagcatacgacccgaaaccggtcagccagacaggcgtgatggcagaaaacatacaggtcacgcacgaccccatcatgcaaggggtggatgattttatcattactgccacgagggggaaggaatcgcagcggtttattctgacctgcaacggaccggaaaagcgcctgaatgttctttactggctgaaggacatcaccggtggtaaggcgtcaggcgcaacgggtatgaccatccagtattacccggagggagagcatcagatgaaggcgcatgctgagcatctggtcacattgttcgacagtcaggtctccccggacctgacccgcgccgcgtcgcaaatgctggagcataaaacgggaagcgttgtttttcatttctatgaaaatgacggcgtatccactcacgggccgctggcgtggagctggcaataccctgtccgtactctggccccggcgctcgccggcgcgctggtatcagccggagccggccactgcagtctgacccagggcaacacgcagattgccccgctcagacggctcgccgatcatcagtaa

SEQ ID NO: 167252 - DNA, 552 bp, Enterobacter cloacae
atgaaatcatacccgtttgtacgccccgacctgtttgcctggtgcctggcggttgtccttccgctcctctggattgtgctgttcctgaattttcccaagcccttcgcactgaccatttatatggttgttgccctggtctgggtgttgctggaccggtcaaacctgatgaaacagggcattacgcccccttcctttctctggttctggttcccggtggtgtatctccgtcagcgtgaccagatgcagggtaaaccctggcggctgatgcaggtctggctgctgtgtacggcactgtcattcacagggatatatctgctgaacaaacagtccgggacggcaaaactggcgcagaatgcctgcaatgcagtgacaaaaatcctccgggatgaggggtttgacgaacgctgtatccgcgtgacagagatgcgtgaagaagtgagcggtcgtttctggcaggcacgggtgctgcttaataccggcgaaagtgagcccgtgaccattgaggtcaggggacagaatatgtatgtcgtcctgcctgaaacaggagaatga

SEQ ID NO: 167253 - DNA, 882 bp, Enterobacter cloacae
atgaactatgaatccccggcacaaacgcccctgacacaactcctgtccgggctgcctgctgaggtggccggtataatcagccataaactcagcagtattattaattatgaacctgttatcgggctgatgggaaaaacaggggcgggtaaatccagtctctgtaatatcctgtttcgtacgcccccggcgaaagtggatgccgccaggggatgtacacgtcaaatacagcgttatcaggtttgccatgacaaccgtattctttatctggtggactttcccggtatcggggaaacaccggaactcaaccaggtgtactgtcgtctttatcaggaaagcgcgtccgggctggatctggttgtatgggtacttaaagctgacgaccgtgcatggaaggatgacctccgttgttatcacgaactgctcagcaccggggcaaaaccagagaactttctgttcgtcctgtctcaggccgacaaaatagagccctgccgtgaatgggatctgctcagccatcacccttcaccacaacaggccatacacctcagcacccgtgccgaacttgcggccacactttttgccgctgtccatccggtcattgccgtttcagccgcagaacgctacaacctggcgcgctgggcagaagcactgctgagggcattaccggcgcaaagcagcagcaccgtaacccgtcaccttcatcctgccttacgtactgagtctgctgagcagtttgcacgggaacactttgtcagcgtcgcgggtgatatctttgatgacgctacggccgtgatacaccgttccgggaaactcatccgtcattttcagcacctgcgccggcagtttctgtccattatccgtgctgtctggcgctttctgttctga

SEQ ID NO: 167254 - DNA, 975 bp, Enterobacter cloacae
gtgacggacaacacccgactgaacatcagaacaaaagacatgcgtgcatgtcgtttttactttcactatatacatgcaaatatccccgaaagcagagcccatgtctttgacggtaataacccggatgtcatccggtcatgccggattattaatgatgctctggaggcttactttccgacatatcaggatcggctgatatttatccggcgaatggaactggctctcagcacaacgatcctcgcagagagaaacttttcatggctggaaaacaacacccgggcaacattctggttatggggaagagtgtgtctggatccggaatgtaaccagagcatcagtcaggtgctgaataacatggcttatttttcatggtataaagaatcaggactgaccttatccccgacgagtcatcatgaacgcctggcggcacttattgcttttgtggatcacttgtgcatcaggactaataatgcccctgcggtgcgaagctggctgacacagagtcttgatgtctggcgaaaatatgccattcgacttatccgctttaaatggctcacgcctgacgatgcggataactgtgtgtgggcataccactccctggtaaaatatcagcaggatttcatttctgagtctgataaccctctttgccccgtgatactcccctcccctgttaacgcggaagaggcatttcatacctgttatgccctgctggatttatgggaaataaacaacaaaacacagcaggaaaccataaggaaactgaacaaagcgttttatcagaaaaccttccgcaaaaaacaggccgcccgtaaaggcagggatacgctcagtgaagagcatgccggcaaacttgcatttctggtagattattaccggtcggacaatacgtccgtccttgaaatgttgatagacgatcgttacaggggactggaaacgcgtataaacgtcagacaatcttttcatcgacggccctga

SEQ ID NO: 167255 - DNA, 630 bp, Enterobacter cloacae
atgagtattaataccgccagctatggcatgttaaagtccgtctatgtaaaacgtatccagaacacccttgataaagcccttcaggaataccccagaatactggtactgagagtcgatctgcgtttacctgatactgatactactgcctgcaatacggattcatctctaattacacggttttttgcatccctgaaatcacagcttattgcagacttactgaaaaagcataatgagggaaaacgtattcatcccagccggatacgttatatctgggcacgtgaattcaatcagtccggtaaaaagcattatcatattacgttgctgctgaacagggaagcatacgctttccccgggtcttatacagcaaagggcgggaagtactctcataatctggccctgatgattatgaaggcctgggtgagggcgactggactgtatacagcggaaaaccctgagcaatattatgccctgtcagagtttccgaaaaattgctattaccatctgagcaggaacagcgaaaactttacggcgcagcataccgatgttacgaacagggtcaattatctggccaagacgtacagcaaggataataccgacgggcagcgtaactttggctgcagtcagtactga

SEQ ID NO: 167256 - DNA, 294 bp, Enterobacter cloacae
atgacggagtaccagagtaacgataaatcaatcctggtgctcctgtctttcattcccttaagacagagagaaatcgtcatgacaaaagcacatacaaaatcagacctgctgaatgaccaactggtggatatggcattcattacagccttttccgggtgcagtgataagtggttttacaaactgattcaggagggggtgtttccgaaacccatcaagatggggcgcagttcacgctggctcagaagcgaggtggaggtctgggtgcaggcgcgtatcgcacagtcgcgcagctga

SEQ ID NO: 167257 - DNA, 1569 bp, Enterobacter cloacae
atgaaaagatccccggcgtatcatccgcccctgctgctggctttttttctgctggtcatgagcgcaggtaccgcgctttgctacctgaagataaggcagtccctggatgaagatattgaagcccggcttaagcaggccatcaccagcctggatattacgcttggtcacgccagactggccgccgggcatgcacaagaatatctgggccaggactgcagccgggacgtcctgaccggggtacgcactctcgtcgccacccttccggacgtcagaacagtaaacctggccaggcataatacgatttactgcacctccgtttttggtggcaaaacgttcagccttaacatgacggactatcctgacggctcgcttaatctgatgggcggtaaccgggtaactccatcacggtcactgctcgtatatacccggcaggaccagcgcaataacagcgtactcatcgggattgatggctactacatatataacgttctcagggtgctggatgggggcgctcacctgtacctgaaggtgggagagcgttacatggacagtcatggacaggtttccgcgacaccggaaatcagcatccccgtgaagcgctcgtcacggcagttcgggtatagcgtgctcgccgatcgcgccgcactcagcggggtatccgccagtatccattacgggcgggatatgtttattgccgttctggtggtgtccttactgctgaccgtgttattcaggcattatctggcctcccgcagcaccctggagtttatgctccggcaggcaattaaacacaaacagctgcaacccttcattcagcctattgtggccggagaagaaggccggatagtggggggagaagttctggttcgctgggagcatccggaacttggctttattcccccggacaaatttatcgccgtcgcggagcacacgggcctcatcggacacataacagacgtgtgcttcagcgacgtgatgcggcagttgcatcaaacagaatctatcctgcctgaaggtttgtttatctgctttaacgtcagtgccgcgactttccaggatgatcagatagtcagtctgtgcacccgcttcctttcccgagtgaaagggatgaacgcccgtgtggtactcgaaattacggaacggggagctgttgaaaataccccgcagacgaagaccgtgaccagaaagcttaagcagctaggggtgcttttttctctcgatgattttggcaccggacatgcaaactacagctacctgcagcagttcatgccggaatttctcaaggtggataaagtctttacctcggatgccggaacgaacgaagcgtccaggcaggtggtgaaaaacatggtcagtctggcgcgtaaatttaactgcaccattattgccgaaggcgtggagaacagggggcaattacaggttctgaaagcgctggggatagacaggtttcagggatattatttttcccgggccgtatcagtggcggactatatccgtttatgtgctgtggcagtggaaaaagttgaggctgaaaggatgagcgaacgggaccgtgcgcggaagaaatga

SEQ ID NO: 167258 - DNA, 1626 bp, Enterobacter cloacae
atgctgaaaagtcgcaatactggcggcgttgagattttccgtgccagtgcacagtatgagaaggcggtttataaaagagtaaaagaaggggttttccgcgctttcagccccggcatttacacagataaggcagtcattatccgcgttgttaacctgatgtataaacagtactatgacatccttgatgaatatctccccaggattcagcccagggatttcgttgcctttctggtatcggaatacgaacgctacggaaaagtctctgatgctcataaattcggtaaactctccggcgcggaggaggttttctggtcatccggtccaatatatgccaggcgggcgataaaacatcttctggagttactgtgtcgttcgcgcatggacacacgtcacaccgcccgtacgcaggaacgtcaggaagaagccatatccatggtctttatcgcggctgaagaattagtcagcctttatatgagaagtgacggctacaggtatgtcctggatgaggtgacattaacattagatcctggacaatacacctatttccatgtcgcgcaggacagcagtaatacatttgatcagcgagaggctgtccgtgaccttgcagaatatgtcccctcgccggtgttccttcaggacgttacggcacacggtgaagtattaaatacgagctttactgaaatatcggggctcacctatacggatacgttaggcacacttcagtggattatcaacacatacagtgacagtgcccgtccggaagccgtggggggatttgaatgggaagaagccatcagtgccctcactcaggcgacagggatatccgtcttacaggctgaacggatccttgaggggttcagcctgagtgcggaaaacatgacggaccgtgaactttttcgcccgaaacaggaataccgtgcctacaggagaggcttcttcagggatacatacaacggcgttaactgggtattcttctcgcgccgtatggcttcagaatgcctgacgatgctcgtgacggatgtcccgttcagaaaattaccgccggagtggcgctccccgggcgtgagtaaagcccttgatgttttgtcccttaaagccgggcgctggttcgaaaaagtcgtggtccggaatcttgaggcagcaggcataacgggctcaccttccgttaaggccctgagcctgaataaagggcattcgctgaagatcccggctgacatcggtgaaattgatttcctcggtttccacgaagaaaaaaagctgttagtgataatcgaagccaagcaggtcgggtttgccacagagcccaggatgtaccttgatgatttatccaagttcaccgggggctccggtaactacagtgcccggtttataaaaaaatatcactggatcctggataacattgaaagcgtggaaaaacacttctctcacaaattcggtctgaccaccagactcgatgttgcgggctatgcgatgattaccctgtatcccactatcgcagcaacaaaaattgaagaattcacgtgtatatcgttgagtgagtttatgaagaaatgtcatgcctcccgcacctggccattcagcaaaacacaaattaacagtccccaggactgccaggatccgctgtga

SEQ ID NO: 167259 - DNA, 1476 bp, Enterobacter cloacae
atggcccaggtcattaataccaacgcactgagtctgatggctcagaacaatctgaacaaatcccagtctcagctgggtacggcaattcagcgcctctcatccggcatgcgtattaacagcgcaaaagatgatgcagcgggtctggccatttctaaccgcttcacctcttctatccgcggtatgactcaggcagcacgtaacgccaacgacggtatttcgcttgctcagaccaccgaaggtgcgctggaggaagtgaccgaaaacatgcagcgtatccgtgaactgaccgtacaggcgaaaaacggcaccaactctgaaagcgacctggagtccattaaaaaagaaatcggcacccgcctggaagaaattagccgcgttgccgaaaccaccaattttaacggcgtaaaagtctttgatggctcgaaagaaaaaatcaccatccagattggcgataaagatggcgataccattgatatcacgctgaacaagctggatatgcagactctgggtctcgataaattcatggacgaatttgcaacaattggtattccgggggccaaatcacaatatgattcagcggcaacgcctgcagccgccggcactgataccggtattaataccggtgccacgggtaactggaaagttgacgcgggtgatgctgcgctgcttcagacggcgattggtgctgcggcaccgactgacgttgaagtttataccctcgatggcgaagcttttgcctacgacaaaacagcagataagttatttaaactggatacggctgcaatgaccttcgtggacgatggttcaggcacgactgctaaaattcagacagtgactgccgcgaacgtcgtggaagtcaccgagcctgcggacaaggacatgctgctgaatggtccgaataccctgacgaacccggaactcctcaaggctggcggaaaaattaacggcgctggcggagctgagtttgacctggaccaggctaaactggacagcatctcgaaccagctgtttggtggcgatgcggcaaccagcaagatgcagattttctctgtgagtggcggtgcagcgaatacctattacgctatcgatgatgccggtgccgtgaaaaccttccagctggataacacgactggcgatgtggacgcagccagtgttgctgatgcccgctatgccgaagcagcctttattaaagatgccgcggggaatggtctgctggccagactggacggtgcgcttactgagattgccaatttccgtgccgatctgggcgcggtccagaaccgtttcagctccattattgcaaacctgaacaccaatatcatcaacacctccgaggcgcgctcgcgcattcaggacgcagacttctctgtagaagtctctgccatgagccgtgctaacattcttcagcaggcaggtgtgtctgtactggctcaggccaaccaggtgccgcagaacgtcctgtccctgctgcgttaa

SEQ ID NO: 167260 - DNA, 177 bp, Enterobacter cloacae
atggcagactttctggattacagtctgttaattgtgttcagtccgtacttcaacggcgacgtatttaagaacacgcggaacatgtctgtgtttcaggttcatttaccaggctcacccggtacgttctggtcctggccacataaaaaaacgctgaatatcgacaggcaacttttttaa

SEQ ID NO: 167261 - DNA, 1077 bp, Enterobacter cloacae
atgcgacccgtttctgccatggccaggaaaatcgttcagcaactttcaccctaccggccattcattcataatgaccggtctgaacacatgattgttctgaccaataatgaaaatccttatggtggagagttcagtacatacccggatacgggtaaatctggccttgaagcgtttgcagcatcttacctgaatctgctgacctgtattgaaggccttcatgatactggccatccggccctgaccccggaaaatatcatcctcacaagtggttctgctgttgccctggaacaaatcttcaaggcgtattttgagccgggtaaggacgtggtgacattaacccctccattttttggtatattttcccggttagcacaaatatacaacattcagattaattcagtgccactgtctggccctgagtataaccgtctggatgttaatgccatatgtaacagcggaacaaaaggggtgattttatgcgatccgaataacccgaccggaaacaggatctgtcccggtgatattgcggcgctccttgagcggtatcaggggctggttgtgatcgatgaggcatacgtggaatacagtcaccacagctctgctttaaaacacctgtcatcacacccgaatgtgcttgtccttcggacattttcaaaggccatgggtatggctggtctgaggatcggtgcggttatcggtgacagttcgttcatcgaacctttgcgccgcgtgcagttaccttttgcgctgtcttccattgccgttgaacgggcccgtcatctgattgaacaacccgatacgattattgcaggcatcagacgctttcagcatgagcgtgaccggctctacagcatactgagaacggtaccagccatagaagcagtatgggggaatgatgccgggtttttaaccattcaggttaaacatattgagcgattttcagatgcgtttcatcgctatcatatacacgctgtatttaaccctgaggggatggagaattatattcgtatctcgccgggaacacccggacaaaatgattatctggttcaggctatatcctctgcttctgattattaa

SEQ ID NO: 167262 - DNA, 1128 bp, Enterobacter cloacae
atgaaacatcatgatgtcagtttgccggatgcagaattaaccgaagtgtcggttatcgggcgcaatcatatcagcgccatcacctcagtgacggtggatggccagttgcatcgactcggggaacaccgggattttcgccgtcacgccattctgaaacactttttgcccgaggaggggcgccattcttttagctgggtgcaactgcgtgatggtgagatcctggacaatcacgaacacccgactaaatcaatgattcttgtttgccgcggttcggcacagctaaccggtgattctgaacaaatgttgacggagggcgatatcatatgcgtccctcccgggaagaaacatggtttccataccgtgcccgggcaggtgtttcacggattgtctgtccagtttgagggcgagggactttacgaaaatgaacactcaccacgggttaaattttcagcagcattaaacgacccgtatgcggaactggacatgatgaatgcatcgcttctgaagaggcactcgcgcaactcactcttcagactctttgacacagatactctccgtaaagatgacgtgaggcgtcagcggttcctggaaagtttatacgtgtggtcgcgttactttcagaaaatgttgttcatgcgtcaggctgtctgtgctgatgagagtctgcttcccctgtattcaggccatttacgggatgagttcggtcatgatgagttgctcaaaacccagaacaacctgaccggcggcgcttatgatccggttctcgaagcggcatccctctggtttattaataagatgtttagcggaaatgaagcagagaaaatagttatcattcatatggttatagagtccagtggtcatttatttggtgaggcaaccaaagcgttgtttgcacgggcctcctctgagggtgattcctacttcgaagttcatgctgaggcggatgaagatcacagtactatcggacggccctatcttcagcaacttgcccctgacgcgtttcccgggttaatggaaacctgcagccaggcatgggagcagatggacctcgtacatgagcgcattgctgccatgacactggcagacacgccattatccaggcagatggcaaatcagctgactgattaa

SEQ ID NO: 167263 - DNA, 1764 bp, Enterobacter cloacae
atgcacaaaaaatcgtttgagggtctgaccggagccatgcggtattgcctgtggccggagcgtaacaatcatcctgccttcgagtcagccttactgcaggttctcagggattattttagctggcacgaagctcatcgacatcataaagagtcaggtcatcctgtcgatgcaggtatgctggacagattccatgtactgctgagtacattgtcgggcagacttaaaagcgactccataccctggccggctcccggctatctggctcacatgaacagcgatataccgttgccggccagcctggcatacttcgccgcgcagctttataacccgaataacgttacacccgaagcatcacccgttacaacagaactggagtatgaactgagtgatgatttttgccgtctgtttggcatggatacccgcaagggatgggcacatcttacttcgggggggcatgctgccaattacgaagcaatatggatggcacggaacctgaaatatcttcccctggcgttagccgcacggtcagatgcgccggccccgctgaagacaatggctcccggtacgctcatcaatctggcacccgcccggattatccggatagttgaggacgtgacatctgacgggatgttaaatgcgttgctggctcaggccgacacgctgcgtaaacggtcaggtactccaggccgcctgtatgttgcagaaggcaggcattactcctgggataaatgtgcggatttgctgaatattgagctccatacggtaccgcttgacagtgcatttcggctggacgttgcatatttacgcgacaggctttttgacgatctccggcatggtcgccccatagtggctgttgtggcaactgcaggcagtacaggtgaggggagcgttgatgatattaacgcgatcctgaaattaaagcaggagtgtcaacggcgctttaacggctcattttttctgcacgtggatgcagcgtatggcggatattatcgtagtttgcttgtatctcctgatggaaatgaaagtaaaaatgcctcctcagaatcatgtctgctgaaagatgacgtcgcgacatccttacataaactttctgctgtcgatacgatcaccgtggatccccataaatgtggctacgtcccctatccggccggatgcctggtgatcagcgatcgacgatattcacaggccgtggccagaaagagtaagtactttaatccgtcgcaggaggggctcatggatttcggcacccatactctggagggggctcgccccggcgcagctgtcgcggctgtatggatgatgcatcgtttgttgggtctgcataaaaatggctatggtactttactgagtgaaaatttatgggcggcacggaaactggaagaggcaattgagcatgctcctgttttttgtgcttacggtgctcagtatcgttttcgtagcctgttctccccggatttagggatcatcaattttgcagcacttccccgcaatggcatcgttgacgccagtattatcaatgcattgacccggaggttaatacaacgtccacctccggaacataccgcacggggtgaaccctggatatcctctaatcaggttgcttttcatcggctcgcttctggtcagtctgatttcagtggttcggtgagtgtggtgcgctgctgtctgatgacacctctgccggtaaaccaccagagtgatttctggcggacgctgttgctccgccttcagcagagaatactcaatttccattctcaggattaa

SEQ ID NO: 167264 - DNA, 855 bp, Enterobacter cloacae
atgcataacattaatattcaggaataccccaccggatttcccttttcccgttacgcttgctgcatgccggaatatttaacacatgagtcagcctggcttgagcatgccccttttgcattctggctgatacaggagcatcaaccgtcccgtatcgtcgagttagggacctatgccggatattcgtacttcacattttgccaggcagcacactgtttacagattgacgttcagtgctttgctgtcgatacgtggcagggggataaacatgccgggttttatccggaaaaaatttacaaccgtgtgcgaacatacaacgacgagaaatattcaggcttttcaaaattaattaaatctgattttgacagtgctgtacatcgtttcagcgattcctcgatagatttgcttcacattgatggtagtcacacctatcacgatgtcaggaatgattttatcaactggctgcccaaaatgtcttcacgcggcatcatcctgttccacgacacacaggtgcgcaaacatgattttggagtatacaagctctgggaagaacttcgccaccagtaccctcattttgaattcactcacggatttggactgggagttctggcggtgggcaacaatatcagtgagtctttgatcacgatgctgagtgcagaaagcgagagtgatacatcacgtgccacaaggtatatatacgcctcacttgggaggcgtatttcagaaaaagtctacaacaatcttgatgatgaagcactccgggcattatctgaaagcctgggaatgaagtattctgacctggctgattcacttcgtgaaatttcacccaaagctgcctctgcacttttaaacatgtga

SEQ ID NO: 167265 - DNA, 777 bp, Enterobacter cloacae
atgagcgaaagaaatagtgattattattacttcaggaaaagtgttgtcttaattaccggggggacaagtggcattggattggctgctgtggagacgttttcgcgttcaggtgccacggtgattttcactggacggcgccgggaagaaggtgaagccgtggtgagccgtctgaagaaagaaacagcagacgtttactttatgcagtcagacatatcctgcgaagctgaactgaaaaacgtatttgattttattagcgacaatttcggcaagcttgatatcgttatcaataatgcagggattgaactggaatgtggtgttcagaatatcagttatgaagactacagaaatatatttgacatcaacgtctggggtgtgctcgccacaatgaaatatgccacacggatgatggagtcccggaaggaaggggtgataatcaatatcagtagcattgccggtcatgtgggcattcccggattcggaatatacagtgcgacaaaacatgctgttgagggtatcacaaaaactgcagcgttagagtttgccagaaaggggatccgaattaacagcattgctccggcgtttatcaacacgccaatggtccggcgttataccggcgacagcaacgacaagaatacatggctggcatcactgcatccaatggggcgtattggtcatccggatgaagtcgtgaacagtatcctgtttttatgttcatcaggcgcaagctttattaccggtgagtctttacgagtggatggcgggtggacagcacagtaa

SEQ ID NO: 167266 - DNA, 1257 bp, Enterobacter cloacae
atgaatacatatccggaagatacgcaacaacgcaacgcccactcgctcctctctccgcatttcaggcagtccccttatcacgtctattccagcctcagggcacataacccggttttctggagcgaagaaattcaggcctggttgatcacccggtatgatgacgtggtgtcttgcctgcgtgatgaaaggatatcggcaaaccgcataattccccggataaaacaattcccttcagcctttcaggctgaatttgcccctctcctgaacgtactttccatgtggccactcatgcttgatcgcccggagcatacccgcctgcggacactgataaacaaggccatggtacccggtgtgatcacctctttcatcccgcagattgaaaaacaggccggagagcttctggatgctgcattgcccggtgatacaattgatattattcagtctctcgcactgcccttcccgctgaacgtggtgtcagggatcattggggtcagggaagaagacaggccgcaactgaaagcctttgctgtggatatcgttaatttttttggatgccctccggcagaatatatcgaacgtgcacgtacagcgatgcgtgcagtcaaagacacatccgccatccttcggacaataatagcgcaacggagaattaagccggaacaggacctgatatcttccctgatcagggctgaagaaaatggcgatatcctgagtgaggacgaaataattgccacctgtctgatgatggtgtttgccggttttgagacaacgacaaacctcataggaaatggtctgcttctgttgcttcagcatccggaacaactgcaaaaattacgggaaaccccagcactgatgcctgcagcgatccgtgaaatgctccgcttcgaaagtcccgtgcagcgcttgtccagaatggcggtggaagattttacgcttcacggtagccagatccggaaaggtgatcttatctttttaattgccgcttcagcgaatcgtgatgaaaacaaattctctcatccggacgttttcgatataacccgtgatggaagaaatcacctggcatttggtcattccattcatttatgtccgggaaataatcttgctcagctggaggctcagatattatttgacgcgctgctgaaaagagccccctatatcacgctgacagatcccgtgccagagtggcagaaaaatctttctgtacgctctcttgtcagccttcctgttaaactgaatcagcgcggagagcggtcatga

SEQ ID NO: 167267 - DNA, 450 bp, Enterobacter cloacae
atgaaacaaacagtaatgtaccccggcatattgcgtaattccggatggaagcttctgagttataccacccgttctgccggttcagagatcctcacatccccgtgtggtgctgagccaacggggttacttatgtatggtgaaagcaatatgagcgtcatgatctgcaagtgccatttgaatggtgtcagcgggcatatttccaccgttccggcgtgcgacaggactccgggaactgattatatcttctactcaggcagttacagttatgatgagaataccggtattatctcgcacacacccgaaaccagctgtatatctgactgggttaataccacccagcaacgatatgtctctcttaccgggaatattctggaattacggactgtaacgccattgctccttaacgggcaggagcagcatgcttcattaatatgggaacgtgtgttttaa

SEQ ID NO: 167268 - DNA, 1332 bp, Enterobacter cloacae
atgaatatactcatcgcagcctcaccactgacgggtcatgtcaacccgctgatatcactgacccgtttattaaccggcagcggaaataaggtaaaagcggtctgtgcctctacattcagggaaggattcattgatgccggcgcagaattctatccttttccctgcagtattgaccgggattttaatgatctttacagtgcgtttcccgaacgagagggatatccggtcggacctgaaagattatgctatgattttaaacgtgttttcctggatcagatcgaagaacagtatattacgcttattaacgcacttgagcattttcaggccgatgtcattatctgtgacagcttttatatgggcacgttacctgtgttgttatcaggcaacgctgatttccctccagtaatacatcatggtatcactattcttcctcttccccgggaggatggcgccccctttggccccggtttacctcctgccagtaatgaggaggagagaaagcgttattcacagatcggagaaagtgtgtcagaattattttcgttgccgctacaggaatatcttaatcgtattctcagaaagatgaattgtcctgtcctggatattcccctgcttgatgcaatggtgacattgcccgcgctgtatttacagccttccgtgagttcatttgaatataatctttttgatctcccgtcctctgtcaggtttacaggattgctgccattgagtacatccgaagagctgccggaaggactgaaggagcgcctgcgccaggctgataaagtggtgcttgttacacaaggtacgttagcaaaccttgattttgagcagcttattgttcctgctatcagggcgttatcgggtcacgaaaatactcttgttattgtcacgacgggacatcgaccgccagacgaactccctcatccgttgccagaaaatgtctatgctgcaccttttgtgtgttatgcaaggcttatgcctgaagtcagtctggttataacaaacggtggatatggaacagtgtcacaggctctggttcatggtgttccactggtggttgctggtatgactgaagaaaaagcagaaatcggggcgcgtgtggcatggagtggggtgggtatcaacctggccacaagtaatccgaccgccccggcaattgaggaagcggcaataacggttctgggcagcccttcgtatacgcgacaaagcaaaaaaatagcttctgaatttgctgcaattaatacccctgatgtcataaccggtctcattgaagagctgatgaccagaaaatttaaggatatatcgcctgtcgtgttgaacataaatatgtaa

SEQ ID NO: 167269 - DNA, 396 bp, Enterobacter cloacae
atgaaaataaccattccagcgctgctgctgagcgttctctcattcgcagtctatgccagtgctggcggcacatgctgcccgttcagtgacgaaaatctgaaggaaaacatacaacccctcgacaattcccttgataaagtactctccctgaaaggggtatcctatacatggagatataaaaacaaggatgatataggtcttattgcgcaggatgtggcgaatgtttatcccgaactggtgaccgagaaaaatggctataagcaggttgattatgtcaaactcattgcccctcttattgaagctgttcgcgaacagcagagacaaattgaattactgggtaagcactctgcccaacacgccttcacatctgagtgcagacagaagaccgtaccttaa

SEQ ID NO: 167270 - DNA, 237 bp, Enterobacter cloacae
atgatttgtgctatcaaaaaggcaaaaggaaaggaatatttccatacatctaaaaattccatcactgattcgattgaaaagccattctcaaataaaacggttaacagcgatataataccggacatgaaaaaggacattatccctgcaaatattattgaaaagtattttctgtttaactttttaagttcaggcatgaatatttctcatctctgctatgggatgtgtatgtctttctga

SEQ ID NO: 167271 - DNA, 606 bp, Enterobacter cloacae
atgatttttctgtgtgaacaggggctgattatgaaagataacgtaagcattgaaattaaacgggcaatgccggcagactatcccggcattctggcattacaatatgccaaccggccagaacagctgagcgaagcagacaggcagcagggttttatcgtttctgactttacaacagaatccctcgacacaataaataaggcgctcggcattctggtcgcaacggcaggggatgatattgctggttttgtgtgtatggtaccgacagaccccctgccagcacatcctgtcatacaggccatgtttaaaacctttccgcagcaggttttcaggggggagactctggactcaatgaaagtatttatatatggcccggtgtgcatcaataagaaatggcgcggcaggggcattctgaaacagctctttgaaggtgttcaggcttttgcaggctcagattatgatgctggcgtagcgtttatcaatgatgcgaaccagcactcgctttcagcccatgtgcagggactgaaaatgacaccgttaacgccctttgactgtgacggacaccgtttccagttagttgcattttccaccgaaagcatggtggaatga

SEQ ID NO: 167272 - DNA, 297 bp, Enterobacter cloacae
atgcagctctacattatatccctgaaatacaaggtttcactggccagggtcgaagaggttttctcagcgcatatcgcttatactgagcggcttcatgccgaaggaaaagtgatcatttctggtcgcagagaaccgcggacaggcggcgtgctggtcgcggcgaactgcacgtcagaggaaattaaagaaattgtggcaaacgatccctaccatataaataatattgcggactttgagattatcgatttcattcctacccgactctgggataagcgtctaaatgatttttctgtgtga

SEQ ID NO: 167273 - DNA, 576 bp, Enterobacter cloacae
atgattaaaattgcaattgtttatcattcaggctacggccataccagaaaactcgctgaggcggtgcatgaaggcgcttcacggtcagaagataccgacgtcagtctcgtggtcgttgattcagaaggaaatattgcagacgacgcctggtctgtgcttgataatgctgacgggattatttttggttcgccaacttatatggcatcggtttcctggcagtttaaaaaattcctggatgcaacatcgaagcgctggtattcccaggtatggaaagaaaaaattgcggcagggtttactaattctgcatccatgaatggtgacaaaggtatgaccatgaattttcttatcgcgtttgccatgcagcatggtatggcatggaccgggaccggcctgatgccttcggccagtaaaagtgcgcaacgtaacgatgtgaattatcttggaagctcctctggtttatttgcacaaagtccttctgacgcatctcctgatgaagctccgctacccggcgaccttgaaacagcaaggttgttcggtaaacacgtggccgatgttactcaaaaattcaggtgttaa

SEQ ID NO: 167274 - DNA, 738 bp, Enterobacter cloacae
atgaacttaacaggaaaagtagcgttagtgacaggcggaagccgtggtataggagctgcggtatgccgcgcattagctgctgagggggccactgttgcactgacgtatacaaactctgaagataaagcagaagctgtggcggcacagctcagggaaatgggttgtaaggtgacagcaatccaggcggatgcggggatcccggagcaagtgaccgcagcggttaatgaaacctacgccacattcggccgacttgatatcctcgtaaataacgccgggaactttgtcacaggcaagctgggtgaactgacagtagacgattttgaacgctcaatggcagttaatgttcgcggtgtgtttgttgcgataaaccaggctgcgcagtacctgccggacggtggacggattatcaacattggcagcagcttagcgtcttatgtcgggcgcccgggcataagtctgtacacgaccagtaaagctgccctggtcggtcttactaaaggtgccgcacgggatttcggagagcgccgcattaccgtcaaccttgtgcagcctggtccgattaataccgatatgaacccgcaggacagtgaacgtgcagcagcctctcttgcgaaaatggcgctcccggcctatggccagcctgttgacgtggcagcgtgcgttgtatttctggccggcgagggggggcgatacattaccggcacctccctgaatgttgacgggggtatcaacgcctag

SEQ ID NO: 167275 - DNA, 1563 bp, Enterobacter cloacae
atgctcagaaacatcagggtggttaactgcctgatcgcactaatgatggttttttttgtcctgcaggtaagtacagtcggggtgtttttagccgcactggatcatgacagaaagcatttccatcagattcaggaactcaatcaacagcgtaccgaattaacgaaagtgtggaccagtctgctgcgggctcgtctgcagtctaatctggcccatatcgtaaacgtttacatgaatgaacacaatacggcatccccgctaagcgggccatccctggaacacgtaacaagtgcgagaaaacaactagaaacagcagccctggcatggtctgcctacgaaaaaatgcctcaccatgaccataaacgcttcgaaaatattaaatcaggctatctcgcttattctgccagtctggctgagcttatcgacttcatcgaaagggggaatatcgatgcagcatttgcacagcccacgcagaaaatccagtacagttttgaagacgcctttaataatattattttaaatatagaggaaattaatcagacagctgtaactgacagtgaaaattcttatgcgcagctgattcgatggatggccatcatgctgtccatgctgctggtgattatcctcattgcatggactggtatccgcttaaaattactgacaccactggataagctcatttgcagtatcagacgcatatcaaccggcgatctgagacaccctgtagaaggtgaaggccataacgaaatgggtgagctggcctgttcgctgcgcagcatgcaggcagaactcgcccgaacggtaggaacgatacgggacagtacaaaagctatactggtgggagccggggacatcagttcaggtaacagcgacctctcctcacgtacggaacaacaggcggcctcacttgagcaaactgctgcgagtatggaagaactgaccgaaaccgttaagctgaatgcgcagaacgccctgcgtggaagtgagctggccatgaatgcttcagaaacggcccagcgcagtggcaggatggtgacccgcgtggtcaatatcatcagcgatattgccggcagtgcggaaaaaataggggacattacccgcatgataaacggtattgcctttcagaccaatattcttgccctcaatgcagctgtggaggctgcccgggcgggtgaacagggacgaggattcgccgtggtcgcgagtgaagtacgctcactcgcacagcgtagcgcggacgcagcaaaagaaatcaatgtgttgattgcggaatctgtgggcagggtgaactccggatccagactggcgtcagaggcaggacaaacgatggaagaactggttgtctccgtcgcacaggttgctgcattcatgaacgagattgcgactgcgtccgaagcgcagagcctgggtattgagcaggtgaggattgccgtagcggaaatggaccaggtgacgcaaaaaaatgcggccctggtgggggagtccgctgcgtccgctgccgggctcgaaaaattggccacaaacctgaacggggctgtttcggcatttcagctggtgcagaagtaa

SEQ ID NO: 167276 - DNA, 348 bp, Enterobacter cloacae
gtgatctctttacccgcaggaagcaaaatctggctggttgccggggttaccgatatgcggtgtggcttccatgggctggcatcaaaggtacagaataccctcaacgcagatccgttcagtgggcacctgttcatcttccgtggaaaaagcggtgtgctgctcaaggtgctgtgggccgatcgtgacgggttgtgtctgtttaccaaacgccttgagcgcgggcggttcgcctggccggtctcccgtgatggccgggtatacctcaccccggctcagctatccatgctccttgagggtatcgactggcgccacccaaaacgcacggaacaaccaggactgcgaatataa

SEQ ID NO: 167277 - DNA, 873 bp, Enterobacter cloacae
atgaaaaaaaagcaaaaacattattttgatattgccgaactatcccggcaggttaatgtggaaaaaccttatttcgcttttcagcaactctggacggataatggtgcgcttgttggcacattttctcctgagcagccccttgtacatgagtccggtcccgttaccgccggtgaactgggaaggcatatggctattctgggaagctgtactgccgttgccctgcacgagggggcgactggttattaccttgcaaccagcgcgcattttatacgcaggcagcatcatgccgcagtgccccatgaaaaatactatgccagcgcccgggttctggagctggataaacgttccctgaaagtgtcagcacaggtctggaaccgtgagccggttgccgaagtgatatgcgactatgtcatcctttcccctgcggtatttaagcgtaacttccggcattatgctgctgagagcccgccggcgcatttatattcgccttatactcaaccggtgcctgtgcacagcctgacgtttcagcctgacaggctggatgcgtgtgccggtcccctgaccccggaccagtgtgccggccatttttcggggtacccgtgctggcctctcgccattatttcacagacagcacttcaggtcaccggcgagttgctcataaaaaagtacggtgccggaacacgtttctgcgtgcaggaggcgaagttgtctgcagaaaaactactcggggcagggagcatgctgacattcagaatacaaatcacaccggtacccgaaaatgccgggctgctgcagggcaccatacgtgtttaccacgatgatgagcaggttgcgcatatggagagccggctggcattactcccggcaggatag

SEQ ID NO: 167278 - DNA, 7089 bp, Enterobacter cloacae
atggccagaatacaaagcacccgcctgaatgaaatcgcctcgcttgccggtgagagctcactggcatctgctgcattaatcgcacccgcagagctaatgcgccgactggatggaaaggtcacgcctcacgatgcgttacaggttatggatgcagcccgcaacaagagggatgagcttcttctgcttgaaaaaagtattctgacccacgcatcccctgtgctgccttccgctgtgcgtctggggctgcgtcatccggatgtgtcccttcaggaatatgaggaatggttcggcgggcgggcaagtcgctatacccgaccagactccgtctcatccatgttttcaccggcagcctacctgtgtgaattgtaccgggaagcccggaccctgtaccagagtgccagcgggtatcatattgaccgcagacgaccggacctgcagtcactcatcctgagtcaggaaaatatggagaccacgcttccggcactcgcattgtcaaatgaaattcttatggcacatgcacgtacggcagttcccggtgccagcaatgacagtgacgtactggaatatctttccgggtacctcttaacaggcagtacgccttaccaccatcaccacgcccggctgcggcaggtactccagacgacagaccctgatttcagccttttatcacagacgccggaagtgacaaagcacctgtcaggtgcctcactcacagggatggcatttaatattccgccggcactgtatcacctcctgacggaaaccatcccgaataatgacgtggaagcgatggagaaattccggacccgttttggtacggagattactccggagcaactggtcaatccgtatggattgcgtcgctggtacgggcttacggatgaagaggtctcagagtttctcgctttagtcgtgggcgataatacggtaacagcatccactgcgcttaagctcaataaatatattcgtctctaccgggcgaccgccctttctccacgggtgcttgatgatgtgattcagagtgtcaacaccgcacaaatcacagagcagacgctgagtgtgttattccgtgctgacgtctacatgaaacattttgatgtcactcatgaagaagcgctgatgatggcaaaatgcaatatttcagtgcgaccacacggtactgaaccgtcgcaattcaacaggttatttaattccccgccgctgaatgaagagggttttacggcggacggtaccgcaacgcacctgacgccagataacggtgaacacgccttcattaaggccaccctgaaaagggcttaccggacggacgacagcgggttataccatctgaggatggtgctgagcgcgtccgcaccttcggctcgtctggacatgaacatgggcagcctgacagatatgtacacgctgagcctgtgggcacgagtgttgggattaacgccggttgagctgcgtcaggttgcgcaggtgtgtggcctgccggatagcatgtatggtaaggccccggaactgtggtatgccctctttgataaaattcaggctaccgtacagtggcttcggggcaacaacctgtctgtcggcgatttggtgctcctgacccggacgacgtacgataccctgccaacggctgaaattaccggtctgcgaggggtgcttcgtcaggtggtgaccgacaatacggcgacaggcgatcttgaggcccggattgcgcttctcgccccccatcttgctccgttactgatgttaccttccgcagaccaggccgcagatgtgctcacctgggctcatacggttaaacccggagggctggatgtcggggagttctggactgcggcaggctccgatgcagaagagcaattgagcgcgtcagttcagttctgctatggtctggcacagctggcactgatatatcatgccagcggcatatcaccggacgccttcagattatttattgtgaatccccggagactgcttccggaaacacctgcgtccctgccacgtaacctgagtacggtcgtggcgatgacgaatttcagccgctggctcggcgctcagggggagaaaggggcgacggtcatgagttcactggatgcaccagctgcgggtcaccttactgcggatatcctggccactgcaatgggggaagacccgacccttgtcacccgggcgctggtcatggcgcatgcacatcagcagacggagtcggttagcgtaataaacagctggaaagaaatagaagtggtgattcagtggctgaccctgagcagggcgtttgcggtcagtccggataaaatcgggcaactgatttccctggattatacgtcgggcaccgccgactgggctgagtgggtcgcgaccgcggatgccttttcagccggactcaaaacaaaccagatcgccactatggaagccggcctgttaccgggcctcagcgctgcgctgagtggctttgtcatcagggaagtgatgagcagcaccatccccaaaggcgatcgcgagagtttgtatcagtacctgcttctggataacctgaacggccccaaaattattacttcacggattgcggaagccatttccagcctgcagaccttcattcagcggacgctgagctcgccggaagaatctattggatttgaagaagcctcggttaccacgcagttctttgtcgactgggaaatgataaaccggcgctacagtacctgggccggtgccagaaagctggtttattatccggagaattacgttgacccgacggtacgtctgggacagacccggatgatggatgagatgctgcagacgctcgggcaggcgcaggtaaataccgacacggtcggagatgcatttaatcagtacctcagcgaatttgaggatgtggcaaatctgagggtggtgagtgcataccacgacaatctcagtataaatgaagggaaaagctggttcattggtgtgacgcagtcaacgccgccggaatattactggcgcagtgcggatgaagcacgccgcagtgaagagggtaagctcgcggctaatgcctggacggactggcggaagatcacctgtgccccccagccgtggcaggactgtatttgtccggtaatttataaatcccgcctatacctgtgctggctggagcgtcaggatgtgacgccgccagatccggatacgggcgcgcccgggaccagtaaggtctggcgtcacgaagtaagaatgtcctatctgcgctatgacgggaactggagtacgccaaaggttattgatgtcacccctcaggttagtgatttgtccctcagcaatgaggaagcgccgggcttatactgtaccagctaccagtcagaaacgaccatggctgtgctggtgtataaaaaacctgcagggcatgatgatacctcagtgaatagtatgaaaaagcatctcctgtatgtgtatgaagacatgacattcaaccatcagggaagtgccgcggcggacacgtttgtgacctacatgaaatatgagctgaatactaccgcgagtcaccgggtgccgaatgcctatgcgcagggatttcaaacagagcaggagttaaaaaatcctatacagtttaatcagttatttaccgtctccggcagtgtgagtgaggtagttattgaggccggggcaagcgaagaagatattaatatgcgtctgaagccagttatgaatattgctgatttcgataatgatagattgcgtatgttgtcgaggcatttatctgcaggtgtatggaatatatatgagggtatatcactatacagaactttaatactgtataaaaataatcaaatatatatgtttgttagcggaggggagagcttgatcccagttcttcaggcaaatagagattcggggtcaggggctaagattgatcttgtgccagtagaggtagttggtgagtcgaagatctattcaggtgatataccttggtctgatctacctaggtcatttctatttgattatcttaatgatttattgccaggggagtttagtttttcagcaggaatattcacgtcaccttcaatatcgactattggcattagtatctctgacaggagtggcacaaatagttacccggcagaaggctttgtccagaatccaccgacaacgttaacaggaacatatgtttttaacacgctggagttttcggtcacgaaggactggggagggaggaatgaacttctactgggtataagatttgaaaccggtgcgggctctgctgaatataccctgcgcctctatcgttctgcagtcgacccgcacaacgtgattattctgggggatacgccggaaaaagcccagtatatggagtcaggcccataccgtacgcgactcaataccctgtttgcccggcagctcgttgagcgggctgaggctggtattgataccatcctcagttatgagacccaggaaattcaggagccgcagcccgggcctggtttttacacaacgctcacgcttcccagatacaaccctgacattcacggggatgaaaactgggtgaagatttattacacgtacttttttgacgttggtgataagtttttgtgctggagcggaagagttaatccggactccaccacaacggtgaccttgtttgtaccctacccggaaagtggttggcaaccgggcaatactgcacacctccaggtttcctataaaaacatggaaaatacagcctacgagggcggaagtattatgtacacttacacgccggaagcaaacaccgtagacgttatccgacctggagcttacccacttgatgagaatatcgtcgcgggcgtcagtgccgggacaaaaacgactgagcctatggacttcagcggcgcaaatgccctctatttctgggagctcttctattacacgccaatgatggtcgcgcatcgtttccagcaggagcagcggtttgattacgctgaccagtggctgcgctatgtctggagcccttcaggctacgttgtcaggggaagtcatacatcccgcatgtggaacgtgcgtcccctggaggaggatactgcatggaatgacgcgccactgaaggcgatggatcctgatgcagtggctcagaacgacccgatgcactataaagtggccacgttcatgaatgccattgaccagctgattgcccggggagatgctgcctaccgccggctggagcgtgacacgctgacggaagcgaaagtgtggtacacccaggcccttaatttactgggcgagcgtccgtatatacgtgacaatgagggctgggtgtctccttcgctcgggaccgctgtttccgccagtagcgcggcagcgcatcttaccgccctgagcctgctcagtaacaccgatgaatctcatcccgtgccggacgggggaatggtccagctgaaggcagaattatccggggcgacaaccttccttccggaggctaacgacgtcatgctgggttactggcagtcactcagccttcgaatgtataacctccgcaacaatctgacgctggacggtcagccattgagtctgccgttatttgccactccaactgacccgaaagcactcctggcggcggcggtggctgctgctggcggcggtaacgcctctccccaggaagccctgcaaataccggcatggcgttttcagcctgtactggaaagcgcccgcagcctgaccagccagctcattcagtttggtaacacactacaggggattctggagcgccaggatgccgaggccctgaatatcctgcttcagacgcagggagcggtactgatggcggaaggtatacgtcagcaggaaaatacacaggccgaacttaattcggaaaaaactgtgctggcccggtcgctggcgtcagcccgcagccggtttgaaagttacagtaagttgtacgatgagaacattaatgtcatggagcgcattgccatggaggcaatgactttatcccagcaaaccgccgcaggggcaaaaggtcttcatatggcagcagcagcctcagggctcgcaccaaatatttttggactggcaaacggtggtatggagtatgagggaattgccaatgcggcgggtataggcattacaattgctgctgatgcgctggcaattgcagggtcgcgaatgtcacaggaagaacagttccgccgtcgtcgtcaggaatgggaaattcagcgaaacaatgccgaacacgaaatgaaacagattgaggcccagattgccacactggaaatcaggcgtgaatctgcttcgctccagaaggcttatctggaaacacagcagaagcaatccctggagcagttgaccttcctgcagggcaaatttaccagcactgcgctttacagctggttgcgcggccggctctctaccatttatttccagttctatgacctcacggtggcgcgctgtatgatggcagagcgcgtgtatacctgggaaactgaggatacccgcacattcattcgcggaggatggcagggcgcctgggcaggcctgacctgtggcgaggggctgatgttaaatctggcgcaaatggagcaggcgtggatgatctggcatcgccgaactatggaggtgacgcgaactgtttccctggcggattttttcaacagtgaagtgctgggggatgacaaatttaacttgcatgacgcggtggtaactttgcttcagggaggaagcgaagcaggaacggtgacgaatggtgtgggactggagggggagagtatcgttgtcagagctgcgctggatgacctgaaaattgaccaggactatcctggaggtttcggtgctgtccggcgcataaaacaaataagcgtgtcacttcctgctctcctggggccatatcaggatgtccgtgctgttctgaacctgactgcagcagctcttcctccggggtgtgacagtatggttatttcacgcggaatgaacgatagcggcatgttccagccggatatgaatgacatgcggtggctgccgtttgaaggtgctcgtgtcggtgagggagggctcgcactgaccttccctgatgcaaatgggagacaacaggaactgctcagtagtctcagcgatatcattcttcacattagttacaccatccgccatgtgtaa

SEQ ID NO: 167279 - DNA, 648 bp, Enterobacter cloacae
atgatgcagacgcaaccgggacaccagggtgaaatcaaagcgcccgggttcctctgtcatttttttgttatgaaacagcaggatttccttgcacagccttcgggtgcgaacctccagcccgtagcgccagtgagagaaggggtcggcacgcagggaccatgttcctcccgccacaggcacagaagggggttcgctctcttctggtgtggtgcgacgcccgtagtcgaactccatatagcactgccagtcgtatggccccgcctcgctggcggggatgaggaaatatctggccggcctggtatttgcccagtagaccatctggaggtaagcgttctgcgcataaggatgcccgtcgtctccattggcgtcgttttcaggtctccaggaccagacaatgtgctctccccggggggagaccgtttcttccagatgccattctgccgtgcgtccggggtcctggggatacccgatttttgccgacggagaatatccgtaaagcgacaggctgccgtcaggggagtgctgtacccagaagttacgttcctcatcatattctgtctcctctgcaagccaccattcatatgttacggcggggccggtatttttttcataccatgtcgttatctgatagctctggcggctacctga

SEQ ID NO: 167280 - DNA, 2814 bp, Enterobacter cloacae
gtgattattctgggggatacgccggaaaaagcccagtatatggagtcaggcccataccgtacgcgactcaataccctgtttgcccggcagctcgttgagcgggctgaggctggtattgataccatcctcagttatgagacccaggaaattcaggagccgcagcccgggcctggtttttacacaacgctcacgcttcccagatacaaccctgacattcacggggatgaaaactgggtgaagatttattacacgtacttttttgacgttggtgataagtttttgtgctggagcggaagagttaatccggactccaccacaacggtgaccttgtttgtaccctacccggaaagtggttggcaaccgggcaatactgcacacctccaggtttcctataaaaacatggaaaatacagcctacgagggcggaagtattatgtacacttacacgccggaagcaaacaccgtagacgttatccgacctggagcttacccacttgatgagaatatcgtcgcgggcgtcagtgccgggacaaaaacgactgagcctatggacttcagcggcgcaaatgccctctatttctgggagctcttctattacacgccaatgatggtcgcgcatcgtttccagcaggagcagcggtttgattacgctgaccagtggctgcgctatgtctggagcccttcaggctacgttgtcaggggaagtcatacatcccgcatgtggaacgtgcgtcccctggaggaggatactgcatggaatgacgcgccactgaaggcgatggatcctgatgcagtggctcagaacgacccgatgcactataaagtggccacgttcatgaatgccattgaccagctgattgcccggggagatgctgcctaccgccggctggagcgtgacacgctgacggaagcgaaagtgtggtacacccaggcccttaatttactgggcgagcgtccgtatatacgtgacaatgagggctgggtgtctccttcgctcgggaccgctgtttccgccagtagcgcggcagcgcatcttaccgccctgagcctgctcagtaacaccgatgaatctcatcccgtgccggacgggggaatggtccagctgaaggcagaattatccggggcgacaaccttccttccggaggctaacgacgtcatgctgggttactggcagtcactcagccttcgaatgtataacctccgcaacaatctgacgctggacggtcagccattgagtctgccgttatttgccactccaactgacccgaaagcactcctggcggcggcggtggctgctgctggcggcggtaacgcctctccccaggaagccctgcaaataccggcatggcgttttcagcctgtactggaaagcgcccgcagcctgaccagccagctcattcagtttggtaacacactacaggggattctggagcgccaggatgccgaggccctgaatatcctgcttcagacgcagggagcggtactgatggcggaaggtatacgtcagcaggaaaatacacaggccgaacttaattcggaaaaaactgtgctggcccggtcgctggcgtcagcccgcagccggtttgaaagttacagtaagttgtacgatgagaacattaatgtcatggagcgcattgccatggaggcaatgactttatcccagcaaaccgccgcaggggcaaaaggtcttcatatggcagcagcagcctcagggctcgcaccaaatatttttggactggcaaacggtggtatggagtatgagggaattgccaatgcggcgggtataggcattacaattgctgctgatgcgctggcaattgcagggtcgcgaatgtcacaggaagaacagttccgccgtcgtcgtcaggaatgggaaattcagcgaaacaatgccgaacacgaaatgaaacagattgaggcccagattgccacactggaaatcaggcgtgaatctgcttcgctccagaaggcttatctggaaacacagcagaagcaatccctggagcagttgaccttcctgcagggcaaatttaccagcactgcgctttacagctggttgcgcggccggctctctaccatttatttccagttctatgacctcacggtggcgcgctgtatgatggcagagcgcgtgtatacctgggaaactgaggatacccgcacattcattcgcggaggatggcagggcgcctgggcaggcctgacctgtggcgaggggctgatgttaaatctggcgcaaatggagcaggcgtggatgatctggcatcgccgaactatggaggtgacgcgaactgtttccctggcggattttttcaacagtgaagtgctgggggatgacaaatttaacttgcatgacgcggtggtaactttgcttcagggaggaagcgaagcaggaacggtgacgaatggtgtgggactggagggggagagtatcgttgtcagagctgcgctggatgacctgaaaattgaccaggactatcctggaggtttcggtgctgtccggcgcataaaacaaataagcgtgtcacttcctgctctcctggggccatatcaggatgtccgtgctgttctgaacctgactgcagcagctcttcctccggggtgtgacagtatggttatttcacgcggaatgaacgatagcggcatgttccagccggatatgaatgacatgcggtggctgccgtttgaaggtgctcgtgtcggtgagggagggctcgcactgaccttccctgatgcaaatgggagacaacaggaactgctcagtagtctcagcgatatcattcttcacattagttacaccatccgccatgtgtaa

SEQ ID NO: 167281 - DNA, 873 bp, Enterobacter cloacae; identical to SEQ ID NO: 167277

SEQ ID NO: 167282 - DNA, 975 bp, Enterobacter cloacae
gtgacggggctgtattattacggttaccggtactaccagccgtgggcggggcgctggctatccacagaccccgcgggcacggtggacgggctcaatctcttcaggttctgtaattgcagtcctgttacattgtacgacatagacgggagaatgtgggagccatctgaagactcccgattacagcccctggcggaccgactccaaaagcataatcttaatgtttttctgggaatactaggacttgatagagagaggaggccggtgcccaggcatcttgcggcatacattattagtgggcttaataatggcttccaggttgccagggaagctatagcccatctggaacatctggaactttttgatgagctggatttggtacagccagcattaaatttccctgctcatgaaatttctgatgaaactccatcggcatcttcaacagttagttcaggtatttttgacatgaccagcgaaacgttctttcctataggtatgaacatccaggaaaaaaacagaatagataagctccgcaggagtataattcaccaccgggatggcaattccattctgtcggtggtttatgatgatatttttcagaatagttattatcctgactcatggtattttgaattaaattgccgggatggcgagagagctgattattatgcgagtgatgtcgcatttcttcagtatgaagaagtctcaaaggccaataatttctatggaaaaatgccaggtaaaatcataagaaagaatgtcataaataagaataccaatgatgtgatggatgatgttgaaaactctcaattgccaatgaggcaaccattcctctggagtacacctaatggtaaaagcacaatgaggatcatggatttatacggaatggaggcatcaaaagtaacaagaaacaataaagattatgtcatcgatgttaagagaaaaatatcaaacccatggcgtccatggtctgtataa

SEQ ID NO: 167283 - DNA, 333 bp, Enterobacter cloacae
atgttacaaaattacccttcgatttatgttggtctggatgtgcataaagaatcattggctatcgcgatagccagtcctgagcgcggtggagaaatccgcttttatggtaacatcccaaatcaacagcaaagcattaattacttattttcaaacataaaaaagcaatactcatccattatggcttgttatgaagcgggtccctgtggatacaatatttatcaccagctaacagctatggacgttgaatgtattgttgtagcgccatcacggatcccaaaatcacccacagaccgcatcaaaaacgatcatcgtgacgcagttggtctggcatga

SEQ ID NO: 167284 - DNA, 834 bp, Enterobacter cloacae
atggacaatgtctttgccagagtcacaggagagcgtaagaagcactgttttaaaatgttgtcagactgcacgctgtatagtccggtcaccgtgacggcagcagggtgtgtcgcctataacgcggaccataaactggatgatgatgcctggttcattattgagcagttcagccggcaggcatactgccttccggtgctgaaaggccattttgattccaaggactacgatgacctgacaaaggcgcaattctcaaaaattgcatacattctcgcggtgcagggagacgatttctattttcagaaaatcaccccgtcattgtttattaaacgaaagaccattgcatttggtgaggcggcagtggtggaagaaggtaaggggcgactggtgattaatcagcagccggacgccgtctaccgtaaggcatccgatacgttattgttcagaagtctggcaacgattagcagcattttccggggcattgatatgctgtataaagaagcaacacaggaagaggtcgccgattttctgggggaatcattcattggtttatcggcagattattatgcggaaaaggtctcaaaaccaaaccgcaaacgcattgcacttgcgatgaatacgctggcaacgatgtcatcgggtgccagaaaggagatgctggattatataaacgactactgtgaggccaggctgacgttcgataaaacggcaggaacgtttgaaattacctgtgatgaagagctgaagtttctgctttacggtattgagcagcgtttttacaccacaccttttggtcaggagaagcgactggccaattcagtacagacactgtcctga

SEQ ID NO: 167285 - DNA, 564 bp, Enterobacter cloacae
atgatactcaacatcgtgttcaggttattactgacgttcaatgccacatctcttctgattatcatttttctggtacataagaaatacacgcttggctatttttttcagaatatcccggcgcttcagttatcagcaacacattcatacctgctttcatatggtctgtacctgatggtccctctgctgctgacgggcgggagtcttctgctcagcgccgggcttggcagggatgcattcagaagcggggatataacggctgtggagcatgccaataacagctttcttccgagttatctggggtacttttttgttgccctgagtataaacagctggagtacgctgttttttgtctacggtattttatttatcttcacttttctgtcgcaggcactgtatttcaatccactttttctggtctacggctatgagttttacaatgtcaggacccgcagcggggcttcggtttttcttatcagtcggtgtaaatataaaacgccggatgaaatcagtatcgcctctgcttcaagaattaataactacacgtttattgaaaggaaatgctaa

SEQ ID NO: 167286 - DNA, 294 bp, Enterobacter cloacae
atggaccaggacttttttgcccgggagtcagccagactgtccgaaagtgagctcactgaaaggctgcgggatatccaccagggccccggtttttcggatgagcggcatgcgggcatctaccgtcagattgaggcccggggagttgagtccctgagcgtcagacagcgccatgtgtttcataaagagatggtgcccctgaccgtcgaacgctgcagcgtccggggctgccctgatgccacaggagcggataaagccttttgcccggcgcatcaggagcgctacggcgacgactga

SEQ ID NO: 167287 - DNA, 2760 bp, Enterobacter cloacae
gtggggaaaagcgagaagcgactggttgccttcagcgacatccccggtgggggacagtcacacctggtcgaaatcaccgcctccacggtgacctgctggccgtcgctcggccgtggccgcctcggcaccccctatacccttgaaggctttagcgtgccaccagacaccttctcgccggacaggatctggctggcagacactgacggttccggcttcccggacattctgtatcttgagcaggggggggtccgggtgtttatcaaccagagcggcaacaccttccgggatgtgggccttatcccgccacccgaaggtctgacgccggatgacacctggcacctgcaggtggcagacatccagggacttggcacggtcagtctgctgctgaccgtgcctcatatgacgccccgcagctggcttctgagcctcaacacggagaaaccctggctgatgaaggaggtcagtaacaacatggggagcaggacgctgctggaataccgcagctccgcgcaggggtggctggatgagaaggccgccctgctggctgccgggcagcccgcggtcagccacctgcctttcccggtacacgccctgagccgggtcacgcagataagcgatataacgggcctcagcacgggcagcgagacgcgttacttcaggggcgtctgggatgcgcgcgagcgtgagttctgcggcttctgtcgcctgatacagaccgacacccatgacggcatcgacagcgacagcgggatgctctccccccctctcgagacgcgaacctggttcctgaccgggctggaggagcacgaccagaccacgccgggcagctttgagggggcggccggcttcccgctccgtaccgtatacctgacccggtgggatgaagacacacagacggacctgccgtatgaacccggcgccggggaaaaaattaaggtgtggctggccctccgtggcgtgccggtacgcaccgaggtctatggccgggatgattcggacagggcggacataccgttcagcatcacccatcagcgctggcaggtgcgggcgatacccgtcggtcatgaaggcataccgctcacgctggccacgccggtggagtcacttgccaccggctgcgaacgcatcccgtctgacccggtcatcacccagtcagttattctcgggcaggataaattcggcagcgtgctgaaaagtgtgaccatcagctatccgcgtcaggccgccgtggccgggagtgactacccggacacgctgccggaggggctgctggccgcctgccgggacccacagcaggatgatgcctggcttaccctgacgcgcagcaccgtgcacaatcttgaccggctggctggcgggaattacattcacgtcaccggcctgcccgacaccacccggactgacgtcctgaatcttacccgcgccgacattcccgctgacggcttctgcgtggaaaacctttccgccccggacagcgtgctgagcgccctggagaatgcaaccctcagcgcgtggagcaaaaccctgtggcgggggaatgacggtgaaacccttaccgacatccctgaccgggaagcgctggtcgcatataccgaaacggccatgctggatgccccctccctgagtgcgttcggtgaggcactgacaggggatgagctgacggagctactttcgcgcggcggctatcacgcacacacccttccggaagacgaaaagacggtctggaccggacgccataacttcaccacgtatcacgatgagtccggcttctggctgccccgcacggtgcgcgacagcgaactgaccggcgagaccacgctggcctttacgcaggactggctgaccatgcagagcgtgacggatgccgccggtctgaccaccacctttgaaaaatacgactggcgctttatgacccccaccgtggtgcatgatgcaaatgacaaccgtcactacgctgaactggatgcgctgggtcgcgtgacgcacacccgcttccggggaacggaattcagccccgaagcagaccgggtggtggaaaccgggtacagccttcaggcgtttaccccacctgcggatgtggaagccgccctgaaccttcgcaccgttcctgttgccactgcccacacgacggtagccgacagctggatgccgcttcagcggaatgcgcagggggagcccgtgccggaccagcgcaccggtgaactggtcctgcgacgctggctgaaggagaacgacctgcccccgcctgacctcagccaggagcgtgagccgccccatgttatcagcctgcagacggaccgttatgacagcgacacggcgcagcaggtccgcatcagcgtgacgcacagtgacggcaccgggcgtccgctacagacctcagttctgatgcctgaaggtgaggcctttatacgcacggctgaaggcggactggcgacggacggtgaggggaaagccgtcacggagagtgccgcggtacgctgggcggtgagcggcaggacggagtatgacaataaagggcagcccgtgcgcgtatggcagcctttttacctgaatgactggcgcccggtcagcgatgacaccgcccgggacgggatatatgcggatacgcatttttatgatgccgccggccgggtataccgcgtggtgacggcagccggttacgagcgccgcacgcagtactacccctggtttacggttgcagaagatgaaaatgacaccgcgcacgacgtgctggcccgacaccacaccggagagcaatga

SEQ ID NO: 167288 - DNA, 813 bp, Enterobacter cloacae
atgtattctaatcccatcagtgaactcaattcattcgattccatttcaagggagctatccagcggctattcaaaaaatgaaaaaagctttattcttaaatttgtttttggtgaaggtctgagtaccttagaaacaatgtccccggagaattattatgcatatgtaaaaggtattgcaggtgattctcttgccaaatttgaaatcagcgacgcccgactaaaggaaatttgcgagcaggaactccccggactattagatatccatgcaagaaacgaagatgtaacacattatgaatcattactctttgatagtgtttcaaatgaatacccggatcttagcgggagttcattgtcagaaaaggtcttccagaaacgggaatactgggatatcctccgacgggccaacttagcaaattgccgtgagtgctcgaatgcaattgccgggctgatatcaaaaaaccatcctgctataaaggtggcgaccgtctccacgggagtgtatgaccatcagtttgtattagccggtaatattctcccaaacagattcgacagtctggatgacctggaacccgatactgtcctgatagatccatggattggcaactatcaaattgcgaaggaggcttttgaacgtcctgatgcattgtctttagggtatgtctggcaggcattaaaatacgaaacaattttctttgatcctttaaatgacagttcaccggacatgccagaggaaaatagcaatcctgataatctacccatcctcaataagtcggtacgacacaatccagcctctgctggaaatatgaggtactga

SEQ ID NO: 167289 - DNA, 843 bp, Enterobacter cloacae
atgatgagttttagttctgaaaataataaaagaaatttcaaaagcaaagggggcggtcgacataaactgacccggcgaaatggtttacggtttatctctcagatgagatttttgcgtaccgtcggcctggcgacgctgttttttcccctggccgacgctctggtcgtgcaatccattgaattattctggtgggtgttgcttgtaatgtgggtatttctctggcctcagctcgcctggaagatagcctgtcgtgctgcagccccacgacattccgaactgaataatgttaaggctgatggtgtagttgcgggtttctggattggcattcttgagatgaaccctctgattgcattagcagtgatagttgtggctggcttgaattttttttgggccgggggtattagaatatttatctccggcatgcttttgttactcatttctgtattaataacctcagggctatttgctgtcagcatgaatttgatgagtatgcacacgaatttcttctgggtgatacctgccatcatgctttacccgtttgtgttttcgtgcgtgagttattatacggtgctggagctcattcgggataaacaaaaactgaaagaaaccagttcacgagatggcatgacgggtatttataaccgtgctcactgggacaggcttgtatatgatgagtttgaaacctgccgtcagtccgaagctcaggccattgtgatgctaattaatatcgatcatttcaaacaaataaacgacacctgggggcattgcgtattaccatcatgtagcacgtcatttaacattgatgaagatcggtttttctggatatcacagaaccgtttttaa

SEQ ID NO: 167290 - DNA, 276 bp, Enterobacter cloacae
atgaaaaagagaacatttaccccggagtttaaaaaggaagccgtggccctggtcaatgagcagggggataccatcgccaaagccgcagcgtcgctgggggtcagcgacagaacgctgaggggatgggttgttggcacccgtcagcagagtgaaagtgaactcaatgaggatgagcgagcagaacttaaacgcctgcgtaaagaaaacaaagagttacgccttgagaaggacattttaaagaaagcgagtgccttctttgcgaagcacatgtcgtga

SEQ ID NO: 167291 - DNA, 867 bp, Enterobacter cloacae
gtgagatacctgtttatccgcgatcttgccggagagttcggtgtcaggtggctttgccgggtgatgcgggtcagttcctcagcctggtatgcgtggcaaaaaagagctgtcgtcacctcccccgacgatgcctgtatccgggtcagactgaaagccctgtttgccgccagcagagaaagtgccggcagccggactctggttaaaaagcttcgtgaagaaggcgtcatagtcagccgctggcgggtgatgaaactcatgcaggaagaggggctggaatgccgtcagcgccgggcttataaagccacgacaaaacctcgtgcaggagcagaagttgcgcccaacctgttgaaccagaattttaccccgccaggacccgaccaggtgtgggtaagcgacgtgacctacctcaggaccggcgaaggctggctgtacctggccgcaataatggagctgtactccagacggatagtgggctggcacgcagacaaaacgatgacgacgtcactggtctgccaggcgctgatgaaggcatacaacctgcgcaatcccccacggggtctggtagttcatacagacaggggttcccagtataccagccatcgcttccagcggcagttgagtgactacggtctgaggagcagcatgggggacgttggcgcctgctgggataatgcggtaatggagcgcttctggggcagtctgaaacatgagtggttgttgctcgtggcgcaaccgacccgggctaatatgaaacaggatgtggcgacgtatatccgctactacaacgttgacagaaaccatagtgctaacggagaaggcccccccccggtacgctatgaacagatgacggataaaaaagtgtcctga

SEQ ID NO: 167292 - DNA, 939 bp, Enterobacter cloacae
atggatacggacgggcgggcacctgctcctccacccgttcccgaacgtcctgcagaatcgctgaggggcaggggcctgcctccgccagtacccacacgtccagcagcgacgttaagtcttggaagtcagccaccggttgtgcctgagcgcccactcagttcactgaggctgcagacccctgcctcaacggtggcggccgggtcttttacagcccgccagggcatttctgctgcccccgcagaaaaggtatctgcagctgttgctgatgagccgaaaccctttattttagatgagtacagccctccggatgcacagacccttgcaaaggcccccctgttcaaagacttatcgagcaggtatgacaccctgctggtccgcgtcaacgatcaactggttatacacaaaaatatgggttcaatgtttataacggaagaaaaagaaaaaaaccgccaggaagtggctgcccgcaacgaagtttttgcgtggaaattcagtaatgcacttaaactcaatctggttccagtaaccgcgctggccagtggtgctgacagagaggtggtttcacaatatattcccaaccagcctctaaggaattttaacaggcctgacaccagtatgcatgtttttgattttttaattaatgccagagacagaggaaacgaaggcggaaacgtacttatggaccttcagggtaattttaaggccatcgatcacgagtccatactggaacctgaattcacagctatcgctcctgaatgtgtaacccaggaaagtataaatttatttttccgtaaccctgaaacaaggcttgcattccagggaactgactggtcgtcattttttgatgaacatacacatccagggatggaacgcagagaacttgctcgagagcaatttttaggaagagtaaactggataaaaaatcgaatacataattaa

SEQ ID NO: 167293 - DNA, 132 bp, Enterobacter cloacae
atggaggctgtagctccgttttttcattttcagctaatgtgggtcgaagaaaatgaaatgcaggtcggtgcggataaatgcaggttcatttgcaggtattgtgggtttgggacccaggctggttgcagctaa

SEQ ID NO: 167294 - DNA, 336 bp, Enterobacter cloacae
atggatctgtgctatcaggggcatgcagacggaagatacagcaaactgctgacgaaactgaaccacagcgatctgctgcttctggatgactgggggctggagcctctgtcgtcagaacaacgcagcgatctactggaaatagtggatctgatgtaccagcgaggctcaatcatcgtcgtgagccagttgccggtggaaagctggtacaagatgatcggggactcaacgcatgctgatgctatcctggatcgcctggttcatgggagtatcaaggtcgaactgaaaggagaatcaatgcgaaaaatgcaaaccacgttgaccgaaggagatcagtga

SEQ ID NO: 167295 - DNA, 1338 bp, Enterobacter cloacae
gtgttgctcggacacacaacgtgctctgagttgtcgggaagtatcacagggacctttgccggaaatgcctgggatccgcggtatgtgcccggaggatcaagccagggctccggggtggcacccgctgcgcgtctggccgccgcggctatcggtgttgaaaccggagggtcaatcatcatccccgccgcggccaatggctgtagcgccatcaaaccgtcatcagggcttctttccgaacgcggtattatgcagaacagcccggggctggataccccgggccccatggcgcgctcgatccgggatgcatccctgttactgaatgtcatgacccggtttgacagagggaataacccttccccaccggggagtccgttgcccttacctgcctggccgctgacacctcagtcaggggataaaccattacagaacatacgcataggacttcctcagaaggactggatgtcggctggcaccggagccccccccgcgacaacgtatgacacggcctacctgagtgcatatcaccgtttcatcgggcaactgacgtcactgggtgctgaagtggtcgaatttgacggattagatctgttgagtccggaaaatgacccgtttacctacggccctgttattgaagagattgacggttatcctgttggcgccatacttgcctgtacggccacccgcacccttaacctcagaaaaatggaagcactggatgcgttcatttccacctgcgagggagaacagcgcgataaactcgaacaacactaccggctccttatcgatttatataaaaatcactacagcaaaatgcagttttccacgatagcgacgggcgagcgcagaaggcgacagctgagaacccattatcaaaaagccctggatgacaacaatatcgattttatgatggtactgccattaggggctcatatcccgcggcgtttcccggggccaggtaaacccggaccgtacaacttttctaacatgcgtaatcactacggggcacccaataaccttggatggccggtggtgacgtttcctgtcgggatcagcaccttttcccctgtcgatacgagtattgatgatgataccagactcccgattacggctgcattctgggggccccgttttagcgagcccctgctcattcaggccgcgattgacttccagagccattttccggaataccacaatgccgtcccgccagaccctgtctttggccctgacacccgacgtccggttcatcatccctgtgttgagcccgtgacgccggataacacgactgaccccgcaatgatggcggcgcgcgggttatcatcctggccaaaaaggtcgtga

SEQ ID NO: 167296 - DNA, 174 bp, Enterobacter cloacae
atggtccgtgaacgcatgccgcaggtggatgtctcccgtcagacggtcttcagtcaggcgcattccgccggcctgcgtgatgacgatgtccagctgcaggctccctgccagccgtcgctggcgggtctccgctccgcccgcgtacgtggtggtgtggatgtgagtgccgcctga

SEQ ID NO: 167297 - DNA, 780 bp, Enterobacter cloacae
atgcctggattctcaggaggggtgttttatcttacgtcaagtctgctatttaaaattcctaatgccttcggttcagagcggtacattaaggggcaagcattacaaaatcagaactccttacgcgccagtgaattcaataaacaagaaattgatttcattgaaaacttcatcaaagatgatttttatttggcacacgccacaaatgcaagcatcgaaagtgaaaatggagacataaatatctattcaaggaaaatgctgcaagataaaaaaattgttttcaacgagtcgaactccgcttttgaggatgttaatgggttaggtaacgatgattacgcgttcttctctctggagataggccctgctttgaaaaaacagaacagtcggtttggtaacaccgtttataaagttttagcatcaaatggcgcatttaaattcgcatcactatcactcgtcgatcagctaactctggaactcccagagccaaaaatacccggattatcatctgaagataatgttcaattagctggacgtccatacttaaaaagagaagaggtttttttcaatggtatggatgattcaattctatctctggcgaggcatatcgctctttccacaagagttctttctaagcagtcggatagagatgttatacttaatgagcgtaacccggacaaactggatcgcataacgacctatttattcaggccggaggtacgagctccaagaatggcgggggttaagaatggaggatatttcaagtaccgatttggaaatagataa

SEQ ID NO: 167298 - DNA, 843 bp, Enterobacter cloacae
atgatgaaggcatcttccccctcaaaagaattgcaagacaatattagggcttttcttgaaggaaaaaatataagcgagaaacgtatagggattatatggagtgcagccgctgaactgatgaaaacagccccatcagtcgcaggcccttcttcactggcttcaggcatggcagccctgaaattacaacattcaacgaccagcagcagaggtacactttcatcgaccagcagcaccagcagcagaggtgcactttcatcggccagtagcttcgacacagcaaaacaagatgaatataaagcacttttcgctacctgggcacatgattatcaaaaaatccagaaaggtgaaggatattttcatgcccacagcgttattactaaacttaaagatagtatggaccaaggggacaccggcaaaaatcgctggtcgaaaaacgggggggcggatgttatctctgaaataaaaaaactggatggatacaggtataatgagatagcaagaaagctggatgttgcaatcgatgcaaccagaaaaaaggaagtaagagtgctttatcgtggcattgataaagaggaggtgaacaagtgggctgctgtaccgaacggtgatttttatgcaccgggaaggtttacggcattttcaggtactgaggcggttgcaggaacgtttggtggcactggtattatagagcttgcagccggtgcccctggcggcgcccgcgtcgggttatggtattcaggcgtgcatgaaaacgaaatattattcggcacgaaatccgtcttccaggttaatgtagtcaataaaaaccgtattcaggtccgttattatggccagagaaagtaa

SEQ ID NO: 167299 - DNA, 933 bp, Enterobacter cloacae
gtgaaggggctgtattactacgggtaccggtactaccagccgtgggcggggcgctggttatccacagaccccgcgggcacggtggacgggctgaatctcttcaggatggtcagaaataatcccgtcaccctctatgataccgatggatgtgcacctggccagataaatattcatgatgaggctgcatcgcagggtgaaaccgtaatcggagcagggctgacggaaattgtaagaaaaaatcagccgtttgcagccagaatagctgcagcatataccattgcgaaaaattccattgggtttgcccgggagagggtagagcaaatgagagagacattttctgagcctgcaagtcgccaggttgccaatgaattatttaatgctccagttaataataacaatatgacagtagaaaacatggacaatgttttaagtaaaataaaaaagctggacgatttttttaacacgtactctaccgaaaacattgttggggtcacaagctctgatacagatgaagcaagacgaaacgcctgggttaatgttgatgatcctaaacagcatctttttatcaaagactccagtgactatgaaagcacgtcaggattcgtatgggatattattcatgagatatcgcacctggcaatcaaaactgatgacatgtggtatattcaacctccgttctccgatcctgatcattatgagaaaaatataaaactgagagtcttcggacaacacctcatgttaaaatccggtgaaaggcaaggtattctttggtacggccccggaattaatgatgtggataaagaccagtttatggataaccagagctatcgggttgatacgattatgaataatgcagatagtattgccttactaattgccaatatcaattaccgttatggaggtccctcatccataaataatttggcaaggtaa

SEQ ID NO: 167300 - DNA, 204 bp, Enterobacter cloacae
atggctgccctgctgaccggcacccgccatctcgcgcccggtggcgctgaccagctggtacaggctgtcataggtgtacgtgttttccggcaccactttctggttgcgccagaagcgggtctcttccgcgtcgttcgtgatgttcaggacattacccgtcgggtcatacgcatagcgcaggtcctgcagcactctcgctcctga

SEQ ID NO: 167301 - DNA, 204 bp, Enterobacter cloacae; identical to SEQ ID NO: 167300

SEQ ID NO: 167302 - DNA, 168 bp, Enterobacter cloacae
atgcctgatacgggccatgatccagcgttcaacaacctggacacccacttcggctttggctttatctttcggtttacgcggacgagctggtatgacagcaacattgtagtgttcaagcatctgctgataggttggattaacgtcaggatcatacttacatgcccgtga

SEQ ID NO: 167303 - DNA, 174 bp, Enterobacter cloacae
atgtttgtcgatctccacatggtaatcagcatggaccctgacttttttcaccagggtatagctgtaactggcctcagggagtggtttcagctcaggtttatcaagctgagtgaagagatcggcccgcgaacatcccagtttctgcattaccttgttattcagcctttccagtaa

SEQ ID NO: 167304 - DNA, 198 bp, Enterobacter cloacae
atgggtttcactgccaacgcgaccggcccactccagcagccgttctggtgtccaggtggcatgctggcgatgagcctccggcatatgctcttcacgggtactgtagccatagttacggttgcggggatgtgtcgctacttcctgcccctgattgaacagtctgaccagctcacccgagatccatgcttccagctgtaa

SEQ ID NO: 167305 - DNA, 336 bp, Enterobacter cloacae
atggatctgtgctatcaggggcatgcagacggaagatacagcaaactgctgacgaaactgaatcacagcgatctgctgcttctggatgactgggggctggagcctctgtcgtcagaacaacgcagcgatctactggaaatagtggatctgatgtaccagcgaggctcaatcatcgtcgtgagccagttgccggtggaaagctggtacaagatgatcggggactcaacgcatgctgatgctatcctggatcgcctggttcatgggagtatcaaggtcgaactgaaaggagaatcaatgcgaaaaatgcaaaccacgttgaccgaaggagatcagtga

SEQ ID NO: 167306 - DNA, 471 bp, Enterobacter cloacae
atgacactcgatgttttattcaatttaatgaaaaccttgtcaccagcgaaaaacaccgctgaggaaaatatacctgcgctaataaccttactttcctcagaaagcgatcgctcagaggcgctttcacctttcatccatcgactgcacctcctctctttcgcccaaagcaattcagctaacgccgaagagttgctctcagcccatttaccaaaagaggatgggatccttccgctgcttgactttgcggagtggccaaaggtgcgttacgccgcgtcaggcgaagatcaaacgcgtgaatctgaggagtatttccgtgacatgacctcggctgccaatctgttacgctctgcgctaatcgatgctgaacgcgcaaaagggacgcctgcgctttatattctggataaattgctcaacctgaacagcgccctgccggagagatataaaaagatggcgaatattccctacgcataa

SEQ ID NO: 167307 - DNA, 318 bp, Enterobacter cloacae
atgaaaaaaatcagatggcacaagtctcaaggggatacggtggtggtggtttcagcctcgcttgatttatacctcaaaccctggtgcgagcagaatggtctggaactcatatgcagtgaggtggcattttcaggtggaaaagcaaccggaaaatacaaaaagggtgattgcagcgcccgcttaaaaaaaacgaagataattgataattatgatttatcttcctacaacgtcatctatgcctatggcgatacgaaggaagatttagacatgctctcgcttgcctcgaaaaaattttatcagtggaaagaaatgtcctga

SEQ ID NO: 167308 - DNA, 540 bp, Enterobacter cloacae
atgaaattttctacgtatttcaattccgctgtagcgatagttattcttgcaggtctgtcgggcaccgcgttttcggcgcagggagaatggctgaaaccggaccggcttattaaggacaatagcctgccgcaggcacaattaaaggaaaatgaagctgttgcccgtgaatatgcctcgttctggaacaccggtaatgaaacgctggcccgtgatgccctggcggcaaattttgttgataaaacgcctccggaaggtcgtaagcagggtcccgaaggcgctattttagcctcccgggcgtttcgtaccgccgtgcctgatttgcgctgtgacgttgagcaaatgattatttcaggcaatcgcgtggtctcgcatttacattttcacggcaccttcaccgggacattcggcaagcagaaaggaaaggggcagaaaatagattttatcgccacggatatttatgaaatcgctgacggtaagattgtggctaactggcatattgaggacaacctgacgctgatgaaacagctgggcgccctttaa

SEQ ID NO: 167309 - DNA, 309 bp, Enterobacter cloacae
atggaaaaggacttaaagcctgaacaaatcgaaatcataaaccgtattgtctttgagcagatcgacaagatgcaggtcagagtagacgaaattcttgctgaaacggagaaaaccgcacatcaacagttgcaggatagtgggattgatatgacggagttttatccagctaataaggattttttgatgatgacccttgttcaacatttgatagatcaagtgcatggtggcgatatgggtctggcccaaaagataataaccatggaagcaaagcggctgaacgtcagcatacatgttgagcagattgaataa

SEQ ID NO: 167310 - DNA, 150 bp, Enterobacter cloacae
atgattgccgcctggccactctttaatcagcctagctatagtggaaaatggttatctgaaacaggagaaactatgctctgtgttgaaaaagacgatccgcgtgaggcccctgagtcaggggataaaaagcctcagcctgtaaaaaaataa

SEQ ID NO: 167311 - DNA, 390 bp, Enterobacter cloacae
atgcgtcttccaaaaccgctcaataacccagtgacgcattcaatgaccctcaatcgcttttgttacttgctcctgatatccgctgcgatcggcagccttttatcgtcgaatcctttggtcgtgtggtttctgctgatcaatgtgctgacgatggtcatatatggtgccgataaaatggcggcgcggaaggggatgcgcagggttccggaagcgacgttgctggtatttggcgtgaccggaggctggcctggcgccattgcggggcaacagctctttcgccataaaacgcaaaagcagcctttcaagacctattttttcatcagcattgtcgtcagcatcgccgtgatggcggcggtttaccatttatcggcttattctcccttatattaa

SEQ ID NO: 167312 - DNA, 753 bp, Enterobacter cloacae
gtggttgaggtgaaaaaatattataaaggaaatgttgattttattgcaggtgaagggattatcctcaatgaatttataggagaggtggccactcgacaaataaatatcatagatggtgattattatgcttcttcctctttgctagataaaaatgaaaaagttggattcctgctgtatgacggtaagaaaagcgaacttgacttaagtgacgccgaagaaatttcgaatgatgaatttgaaacaatctgggaaagatcaacggctttattgcaagaaaaaaagagaataaattacttatctggagatgctgtggaacctttgaaaaaatccacagttattgctcatattgtgaataataaagggaaatggggtaaaggttttgttctgtccctttcgaataaatatcctgctgcaaagaaacactatctcagtagcttcaaagaaaataacattccagaattagggatggttgattttgtcaagattgatgaacaagagcaaatatttattgctaatatgtatgcgcaggatggtataaagaaaagtatcaatgacaaaaatcaatatgtatgttattcatccttggctgtttgtcttgaaaaattatctgactttgctttggtgcaccgcctttcaatacaaatgccaaggataggggcaggcctcggtggaggtgattggaatgttatagagacattaatactaaaaactatatgctataagatgattgattgcaatgtaataactttataa

SEQ ID NO: 167313 - DNA, 492 bp, Enterobacter cloacae
atggttttggctcaggttatgccgcccgttctgacaaaaaaggatttttccgtcaaggtcaaagaacagactgtcggcctgggcgacagatggactcctgaaatcgcgcataaaattgaaatgccgatggaaggcagttttacaggtgaggtaccttttgacggaacctattataagttcttccaacatcaaagggctggattagaaatattcagttccaatctttggtgggataaagcggaaagaagcgttgatgattatatcgtgtctcaaattacgctgactgccgaagacttcgcaacgccgcgcggtgtccacgtgggttcaacgagagaggaactgaaccacgcatacggtaacggccaggtagacaatgattcgggggaacagtggattacctacgaattggctaaaaaaacgctctcgtttgagatgaaaggcggcaacgttgtaaaaataacaatgaattacgataatggttcttcagagtga

SEQ ID NO: 167314 - DNA, 414 bp, Enterobacter cloacae
atgttcatttccaggatgagcgcatcactcaaaacgttatccgctacgaatctgagtgatgctgcgttgccatttaagatgatgaaagataataaatatatcatcttctacaatgctgacgatttcccactcgcggatggaaccaatattaccgcaattggtttacgtttaagcaaagataacggtggcatggcgcctttactgaatttttcaccctcaggtcaatgtataacgcttgataccgttaaaaagcgctatccgcaactggtgttaactgactatcctcgtggccgctccgagaacgaagtgaccagctatacagcgccaaaagatgtgaatggacaaaaggtgagcttcagtttcaccgtgaaaaaacctgactgtctgggttcagtcgtcataagcgccgaataa

SEQ ID NO: 167315 - DNA, 1773 bp, Enterobacter cloacae
gtgctaagtgttgtgctgtatcacttcggtgttccttatgtatcaggtggttttataggagtcgatgtcttctttgtgatctctggttttctcatgactggaatcgttcttgaacgagtagatcacaaaggtgtgcttgatttttatattgcaagatttcagagaattgtgcctgctctggtatttgtcattctcgcgctaatgattctaggtttgttcattttaagcacaagtgaatatgaaatacttagtaaaaacgcaactgcatcattacttttttattcaaataaatattatgccactcactcaagctattttgactcatcgtcagaaagtaattttctccttcacacatggtctttgtctgtagagtggcaattctaccttctcttccccattattgtaattcttattaaaaaagtcaggcttccattaataccttcacttgtctttttatggataatatcatttgttgcaatggtcttactatcaaaacataaccaaacagatgtgttttattccttttctacacgcgcatgggagatgatatctggcggatttgtctatgcgtacggtgcgtcaaaagcacaagataaaaaaagaccagcgctagcctattttggaataacattaataataatttcaatattggctctaaacagcaaagacttgtggcctggcgcgtatacattattaccagtacttggagctgccatattcataatagctaacaatcaggaatcgagacttataagaaatagaacgctccagttcataggtaaaatatcatattcgtggtacctatggcattggcctgtaatagttttaatgcgatattataacgttagcttcaatatagttaatactttgctcggaatttccacatcattatgttttgcattaatatcattttaccttatagagactccatttaaaaatagaagtaaaatccgtgctaattttatctggagcttatccttagtaacagcatgcgtgtttgtgtctcttaaccatggtatgagctttagatttaatggtgaaatgaaagacatcgtgaattatcgattcaataacaaaaactggcgccctggcacctgcttccttaatcctgaccaggattacaagcaatttgaaaaatgtcctgacaaaatgaccagcaattcagttgttgtttggggcgactctcatgcagctcatctcatgccaggacttcatattaattttgagggcgttaattttacacaaagaacgtctagtctttgtggtccgctacttggcgcagaaaacagtcaaaggccattttgtaagaacataaacacgaatgttttgaacgaaataatcagcgccaaaccaagacttgtggttttgtcagcattttggtctcagtatccattcgaaaaatatttagctgacacgctaaaagtattacatgactcaggcattcgcactatcgtgattggtccattccctttctggcaggagcctctgccgaaggagattgagaaaaatggccttaatgcacaaagaacgcttcctgttgagcttctggagagtaagaaacatctttttgagaatgaaatgaagctcaaggaaattatcagtcaaagtggcaacgctaagtttatttccgcattaaatacattgtgcaaccatgccacgtgcaatgtgacagttggggattctcctgtaaagccaatgcaatgggataacgcacatctgacggactcgggctcagtgtggtttataaataaaatcaagaatgagctagattaa

SEQ ID NO: 167316 - DNA, 1059 bp, Enterobacter cloacae
ttgtttgttgctctttatcacttaaaaagcagtgcacctaacgattcgattttttacaatctgtttaaatttggctcttttggtgttgatctattttttatgatcagcggctttgtgatcgttattgccaccatgcgggatagcaaagctgatagttttttgataaagagactattcagaatttaccctccacttatcgcagctatcgtttttcagatatattttaacaataaagagatttcaatttcagaattcttttctgcaattttgccgcttcataatgactacacagctaaagcgcctgactttggatttagctttcttatagtagcctggtctattaccttcgaactggcattctattttgtcttcttgatctcgatgtctatatcacaccgctgtagaatactaatttgttcctttattattctttttatcgttatagggagtcagactttctttaatgacgatgtaaatttaatgcatgcttgggctgccccatcagttcccggagactatagctacctgaacttcctgcgggtctttggatgttcaataatgcttgaatttattgttggaatggtacttgcctatgcatacaccaacattcgtgtagagaacaatgtccgcaacaaaaaagtactagctctgtttgcagcactgtccgcaatgtacattattccaagttacctggggggatataacagagggatagggcttgcagggtacgggttgtggtcagtgctaatacttacgggatgtctgattgcagaaaaaatggaactagtgaggtggaacacaaaaatgatgttcattggtaccgtctcgtactctctttatctgttccatatccctgtacatgaacttataaagtcactgaatccgtcatcatttggtgaaataaaaaatgctgagataagagcagtatgcgtaatgctgtttgaattgagcgcttccgttttagttgcttacatttcatatgttctaatcgaaaaaccatctgtcaaggccgcaagagttattattaacggtcttgacagggttcaggctaaagcataa

SEQ ID NO: 167317 - DNA, 879 bp, Enterobacter cloacae
atgttccaggcatcgtcaagatgggcagttcccttctttttcctggtgtcaggttattttatgggcacggtgaagttgatagatatgtcagaaaagataaacaaattgtttagcattcttatatattcatccataatttatataccaatagtgtaccttcaaaattccagcgatgtgacaaaaatgatatatcagatattttcattttctacacttcgctctggaatgtatttccatttatggtttatcccttcacttatgcttggcattattacaacaaactacttcataaaaaacctatctacaaagaaggctttgtttatatcttttgtaattgttctcggatattggaactgtgatatagcccagtcttttggattgttaatgaacagaaatgagccgttctatttcttcagaacgctcataagcatacctcttgtgtatgcgggatacttgttagcattcaataagatatcgtttgaagcgaaacgtgggtatctatggttaatgctgtttgtttcattcttgctgactgtagtggaagtgcctgtggttaaacttctcccatatgaaagcatagcgaacagacaattcccactatttagcatagttactgcggtggttgttttattattgtgcttaagctataaaaccaaagaaacagctatggcaaaggctggaagagggtactcgcttggtatttatctgatacatcctttggttctttattttattgttcctgcatttaaattctatggcattgatagctctttcataaaccttatatcagcattcgtcatatcattatttatattgatttttcttaaaaattaccttcctgcagcctatagaaaaattagcgggattggggttagctaa

SEQ ID NO: 167318 - DNA, 981 bp, Enterobacter cloacae
atgacacaaaataacaataacctggttactcaaggtaatgacccggaacaaattgatttagtaggtcttgtgctgcagctgtggtctgcaaagtgggtgattggggcgtttatcgctgtttttatcgtattggctggtgtttacatcactgttgcaaaagaaaaatggatttcgtccgcaatcatcgctcaacctgatgctgcgcaaattgtgacctattcgaatgccttgagtattctttatggttcggcggctccatctatgacggagattcagaatcgagccatcagtcgcttcagttcgtctttcgctgctctttctcaagctcttgaaaaccaggatgtacctgaaaaactgactattgagccggtcgttaaagggcaagatgtaccattagcaattagttatgttagtgattctgcagaagccgcgcaaaagcagctggcacagtacattcagcaagtggatgagcaaaccgcaaaagaattaactctggatctcagggataacattaagcaacagatcactacgcttaatgactcactggaaaaccaggaaaaagtggctcaggagcagaaagatttgcgtatcaagcaaatcactgaggcgctgaaaaatgctgaggcagcgaagatcagcacgccgcagattcagcaaacccaggacgtgacgcaggaaaccatgttccttctgggaagtgaagcgcttaagtctatgatcgataacgaagcttctcgtccgctggtcttctccgttgcgtattatcagaccaagcaaaacttgctggatattgagaatctcaacgtaaacccggaagcaatccatgtgtatcgctacgtgatgaaaccggatctccctgtccgtcgtgatagcccgaaaaaagcgattgttctgattcttgccgtgctgctgggtggcataattggttcaggtttcgtactgggccgcaacgcattgcgcaactacaaaccaaaagcctga

SEQ ID NO: 167319 - DNA, 867 bp, Enterobacter cloacae
atgaaaggaattgttttagccggtgggtcaggcacgcgtctttatcccattacgcaaggtgtatctaaacaattgctcccaatttacgacaaaccgatgattttctatcccgtttctgtccttatgctggccggaattcgcgatattttaatcattaccaccccggaggatatgcctgcctttcagcgtttgatgaaagacggctcccagttcggcgtaaatttcacttatgcagtgcaaccctcgcccgatggcctggctcaggcatttatcatcggtgagaagtttgtggggaatgacccctgtgctttagttcttggcgacaatatcttctttggtcacggtttcagtaagaaactggaagatgcggccagtaaaacgaccggagctacggtgttcggttatcaggtgcaggatcctgagcgattcggtgtcgttgaatttgatgagcattacaaggccttgtctattgaagaaaaaccactgaagccaaagtctaactgggcggttacagggctttacttctacgataacaacgtactggatatggcaaaagaggtgaagccttcagcacggggtgaactggaaattacgaccctgaatcaaatgtatctgaagcgtggggagctggacgtacagcttctgggtcgtggatttgcctggcttgataccgggaaccacgacagcctgatagaggcttctcaatacatccacacgattgaaaagcggcagggaatgaaggtggcttgcctggaagagattgcgttccgtaaaaaatggttaactgcagaagagatctccgctcaggcagagaaactcaagaaaacggcttatggtcaatatctggcgatgttgattaaagaataa

SEQ ID NO: 167320 - DNA, 1101 bp, Enterobacter cloacae
atgctgtctgtctttgtcagaaatagtgaagggaatatgaaaatactcgtaacaggtggagcaggttttatcggatctgccgtcgttcgtcatattattaaccatacgcaggatacggtctgtgttgttgattgtttgacctatgcgggcaaccttgagtccctggcatccgttgaaatgagttcccgctattcattttcgcgtactgatatcacggatgctgctggtataaacgctctgttccgcgagttcaatccggatattgtcatgcatctggctgcagaaagccatgttgatcgttctattgatggtccggctgcgtttatccagaccaacgtgataggtacgttcacgttgcttgaagccgcacgccagcattattcaattcttgatgataagcaaaaatcgggatttcgattccaccatatttctaccgacgaagttttcggcgaccttcacgacaatgagggcttgttcaatgaagagagcgcgtatgcgccgagcagcccgtactccgcctctaaagcgggaagcgaccatttagcgcgagcgtggaaccggacttatggtctgcctgttatcatcacaaactgttccaataactatgggccatatcacttcccggaaaagttgatcccgctggtcattctaaacgccttagcgggaaagccgctgcccgtgtacggtaacggagaacaggtgcgtgactggttgtacgtagaggatcatgcccgagcattgtacaaagtggcgacggaaggaaaaaccggcgaaacgtactgtattggcggtcacaatgagcgtagaaacattgatgttgtcaaaactgtgtgttccattctcgatagcatcatagtgaacaaaccgggcaatattaaaagttttgccgacctgattacctttgtggaagaccgaccggggcacgatcttcgctatgcgattgatgccagtaagattgaacgcgaactcggatgggtgcctcaggaaactttcgaaagtggtatcgagaagacgatcaaatggtatctcgccaatgaaagatggtggcagcgtgtgcttgatggttcttatgccggtgaacgactcgggctgaataaataa

SEQ ID NO: 167321 - DNA, 648 bp, Enterobacter cloacae
atgcacaccacccacagcacgttcattctcgccggccacaccgtccaccacgtcaccttcgacccaaccaccttcaccgacaccgatctcctttggctcccccaccacgctgagctttcaaacgccgggcgcaaacgcaaagccgagcatcttgccggacgcatcgccgccgcgcatgccttacccgatcgcaccgttccaggcatcggccccagcggagaaccgctctggccggaaggggtttcgggaagcatcacccacagcgtcacgcaggcgatggcggttgtcgtccgtcatccagatgcgctggtgggtattgattgcgaagccattcttgcggagcgtgaagcccgtgaaatccaggacggcattattgatgcgcaggaggcgatgtacctgatgcgttcgggctacccttttgcgctggcattgacactcgcttttagcgccaaagagagtttgtttaaagccctcttcccgaagacgaatacttacatgggttttgagtgggcgagagtcacagaggtaacggaaaaaacaatcacgctggcgctttcgcgctcggctggacaatatcctgagggtaaacgcttcaccctcgtctggcagcataatgatgggaacgtgtggacgctgctaaaagcctga

SEQ ID NO: 167322 - DNA, 585 bp, Enterobacter cloacae
atggatgcgaatgagacaatggtgaatgagattgaaaaagcattaaaaaaactccttgctatatgtaataaatactcgctgcccgggagtttcaatacagtcaatgacttggataatacattctcgtccaacttacctcgttcaatagatgttgattacttatataaaaattataatcctgaaaagttaaaaattgaaacaggcttcacgccaattaaaattcactctgttagtgagctcttgaaggctcaaagtggttatgagcacttaccatataattatcttgttattggcgatgatttaggtggaggtaaacctataattgcggttatatatgaagggagttcctctgtttatgcaggttatgatgtgattgaaccgtttcagatagctagtaatctctctgggttcatatgttccctagctgagctcattgatttggtatatggtcactacgatatctttgatatagcagatgataatgatgaagtaaaagatgattttattgatgagttgcgggaaaggcttgtgccacttatcggcaatgaaaatttcaatgcgttttataattatttttatggataa

SEQ ID NO: 167323 - DNA, 510 bp, Enterobacter cloacae
atgaaaaaagagcgttattccttttggatcccactcatcgcgggcgggatagtactgatatcgggttttgtggtctggtctgtcaacgtttaccgcgtgacgtttcttactatccgcggggagcaggtccttgcctgtggagcgttgctgctggcccttgtgctgatggttaatttcatcagaaaggggagactgaaaggaaagcgccttgctgacgcggtaaaaatctacctcggcttcttcatttgcagcctgccggttgccacgtttgtggtctttacagcggcctggctactggatggggactattcggcctggagcaaaccttaccggtatgaatccagtacccgccacagctgctcgggtgcggcagtctacgagccggaattaaagaaggagatccgcatctgtaacccgcagggtgatttttatgccgataccaccctgtacgttgaaaagcggagtaacgcactggggatcgtggtgctttgggctatcacgcgctcctga

SEQ ID NO: 167324 - DNA, 1443 bp, Enterobacter cloacae
atgaattgtgagttaacaacattaggtcactacgttaaaattcaagggggttatgcttataaaagtcatgactttcttggtgagtccaataataaagtcctgaagataaaaaatattcgtgcaggttatgtaacttatgatgattgcgcatatatttcagatgagttagcatcgaagacaaaggcatggtcggtatctgaaggtgatgtcttaatttctatgacgggatctggtcctaatgcacctcaatcattagtggggcgcgttgctcgtgtctggaatggggatgcataccttaatcaaagggttggtcgaatcgttcttaaatctaattgctcaatccaccttgattttatatattattatctttcccaaaatagcactcaagaatattttgttgcaaactcgacaggtagtgcaaatcaggcaaatatcagtggaaaaactatcgaggatttgccttttccagttgtagattttgaaggtagttatagaatatcaaagatattattagatttagacaagaaaattctagttaactttaatatcaaccaaacactcgaacaaatggcgcaagccttgttcaaaagctggtttgtcgattttaaacctgtaaaagccaaaatggcagtgctggaggtgggcggttcgcaggaagatgcgacgtttgccgccatgacagcgatttccgggaaaaacgctgatgcactggcggtttttgagcgtgaacatcctgagcaatatgccgagttaaaagccacggcagaactgtttccgtctgcgttgcaggagagtgaactgggggcgattcctgagggatggcgaagtggtactgttactaatgtaacagataaggttttcagcggtggaacgccaacaacttctaaatctgagtattggaatggtgaatttaaatggttttcgtcaggtgaaacgagaaatagtattataacaaataccgaaaaaaccattactaaattaggagttgagcaatcctcaactaaagaatctgtgttgggtgatgtattgattgcgtctgctggacagggtcacactcgcgggcaaacatctcttaatatgattaatacatatattaaccaatcagtagtggcggttaggccaaaaaataaaatatttacttgctggttatatatgaatttgcgttcccgttatgaggagatgagagctatttctgactctcatagtagtcgtggcagtttaactacaaaacttgtatcaggaatgccggtaataataccaagtgaaaatattctacagaaatttgaaaagagtatttttcctttgtttgatagtgtcaaacatagacagagagaaatcgactcgctaacccaactccgggacacccttctccccaaactcctctcgggcgaaatcaccctgccggaagctgagcaggcggtaagcgaggcggaaaatgtataa

SEQ ID NO: 167325 - DNA, 591 bp, Enterobacter cloacae
atgaaactaaaacaaaggaaagttggcagcaaagatactgaaaaaaaagttcttattgtttgtgaaggtgcgcgaacagagccatcatactttaaaaaatttaaggtaaatactaagtgtgagattgtaggtgctggttgtaacactgttagtgttgttgaaaaggcattgcaaatgttctcaacagggaatttcaaagaggcttggtgcgtctttgatagagattcattcactaagaaaagagttaaggctgcgcttacgttagcgcggcaaaataacataaacatagcattttctaatgaatcgtttgagttgtggtatgtcttacattttgcatatttagatacaaaaattactcgtgcggattatgtaaaggcactgactggctatttgggtaaaccgtataaaaagaatgatgaagatatgtatcagatattacttgagaatcaacataaagctatagagcgatctaagcgtctttatggtgaaatggttcttccgggagcttgtgagtgcgactcttatccttatactactattcatacattagttgaaagattgaacaagttaggtcaagaaattggttcttaa

SEQ ID NO: 167326 - DNA, 1344 bp, Enterobacter cloacae
atgtttgttcagttttcttttaaaaattatttgtcatttaaagatgaggcaacgttatcgatgcttgccgcgaaaataaagtctaaagataaaaatttagataagcgctcagtctttaacgctttccctgatatcgaccttttaaaaacgggtgtgatatatggtgcaaacggaagtggtaaaagtaatgtcttttctgctttatcattcatgaagagaatggtaataaactcttcaaaagaatctcaagcggatgaagatataaatgttcttccattcaagttgaatccaagatatgaagatgaaccttcatcttttgaaatgatatttattattaacaataaactttatgaatatacgtttgctgctgttcgtaataaaatcacatcagaaacattatcagtaattgaaaaaaacaaagacgaagttattttgtttgaaaggagtgcaaaagaaataaatgtgcacaaacaattcaaggaaggtattggattagagaaaagaacaagaaaaaatgctttattcttatctgtttgtgctaactttgatggtgaagtatctaaatcggtaattagatggtttagaaaaattagagttattcaaggcatgagtgatataggctatcttccattcactgtaaagcttttggatgatgaaaataagcgtaagaaaattaaatctattatagatatgttcgatctagatatcgttaatatctctaagagccaagttgagcagacagagaaaaaagaaagtgagcttttggatgcgatttttacaactataaaaaaagattcaagatttaaaaatgtatcgttacctcagcataatccgttaggagtctcaactacccataaccgtttcaatgatgatggtgtttttgtagatacgattaattttgagttaggtgaaaacgaatctgaaggaacaaaaaagctcattgcattggccggtcccttaatggatacctttgacaactcatatatattatttatcgatgagtttgatgcaaggcttcaccctttgataactaagaaaattgttagaatgttcaatagcttagatatcaataagaataatgcgcaattggtagtcgcaacgcatgatacaaatcttttagataaagatgagttacgcagagatcagatatggtttgcggaaaaggactctttaggtggttcgcatctaaaacaacttgttgaatataaagttaggaatgatgcatcttatcgaaaagggtatttcgagggtgattttggcgccattccaatgttgggtgagccagatataatctttgaatcagatcgagattcagatccagattcagattcagattcagattaa

SEQ ID NO: 167327 - DNA, 321 bp, Enterobacter cloacae
atgggtattgaccaggtaattcgaaatttaattagtaggaacattgaccgtgtctgggtcaacgaggccgcgaatagctacggcaaagaaatggttcagttactggacgcgcagggaaatgagctggcatggcgctggttcaccgatggatatgccggatggcaggaccctctttcaacgatcggtaatcattcgtttctgccaactgatgcaagcgactacgacctttcacagggttttagtcatgcaatcataacgctcgggatggaggatcgtgcgaattattcaaaaatgcccccacgaccagactggtgtcgctaa

SEQ ID NO: 167328 - DNA, 546 bp, Enterobacter cloacae
atggatgttcaagactcatctgaacaaacggcatccctgagcacggtgtcggtctcgctcaagggcattccgaccgaccaaggcctcgcactgaaagaagtggcaaaggcgcgtgatattaaccagtccgcactgctgcgtgagatggtcagagccagcatgggtagtatcatccacgtcttctgtctcaagagcccgcttgtagcgtccctggatcaggatattgcccagtataacgctagccatcttctgccggcccggaactgtgctcccccggcaccgcagtttgaggcggcctaccgagatctgcttggtatcaggacggaagatgacctgacccgtattctgctgcgcaatgcacagtacctcggcatgcggtgcagccaggtgttgccgcggggccagcagttctacggtggcgctgcgctttactttgccctgttcagtgaagccgcaagccgtgatgaacagacgatcgaggccttctgggccagtatcggacgcttctggggagcctcgtatcgtcgacaggatttctatcagtaa

SEQ ID NO: 167329 - DNA, 273 bp, Enterobacter cloacae
atggatgcacttaagatctcgggtacaacattacacaaacggctcgaaaagttgcggaatgaagctgaatatgcagaacacatggatgccctgatggcgctcaaatggctgggtaatgccggcagtcacgaattggaccgggtgagcagcaaggacattgaagatgcataccagattattgagtccgtgcttgataaaatttatgtaggatctaaagagtcactggcagtgttgatcgcgcgcatgacccgtatgtttggtccccaacaatag

SEQ ID NO: 167330 - DNA, 1644 bp, Enterobacter cloacae
atggctaaggcctccgatattgttgtgcggtgcctggaaagcgaaggcgttgagtatgtgttcggcattcccggtgaggaaaacctcagcttgctggaatctcttcgtaagtcgcagatcaggctggtgctgacccgtcatgagcagtccgccggtttcatggcggccacctacggccgcctgaccggcagggcaggagtgagcttgtccactcttggccctggcgccaccaacttggctactgcgggcgcttacgcgtatctgggtggcatgccgatgcttatgatcaccggtcagaaaccgatcaaaaaatccaggcagagtcgctttcagattatcgacgtatgcggcatgatggcccccatcaccaaatacactcaccagtttgcttcggcagacaatatcccttcacgcatgcgtgaagcattccgcctggctgaagaagaaaaaccgggtgccgttcacctggagctgccggaggacattgcctccgagcagaccgacagcataccaatcccgcgcagcctcaaccgctggccactggctgaacattccgctattgacgcggccgtagcgaagctgcggaaggcccgcagcccaatcttggtgatcggtgcgggggccagccgcaaaatgcctgcaagggccctgaagaagctgatcgataaaaccggcatcccgttcgttaccacgcaactcggcaagggggtcgtggacgagcgtcacccgcgcttcgtggggaacgctgcactgtccaccggtgactttgtccaccgggccttcgaatctgctgacctgatcgtcaatgtcggtcatgacctgagcgagaaaccaccgtttctgatggttcgcggcagtaccgaagtcattcatatcgactaccggtccgccgaagccgatgccctgtattttccgcagctcgaagtgaccggtgatatcgctgatgctgtgtggaggatcggcgatggattgaacaacactgtacagtgggatttcacccgccttctggcgattcgggaggctaatgaggcgcagattgccgaaggcgcagatgatgaccgctatccggtgtacccacaacgtctggtggcggacattcgtcgtgcaatgccgtctgaaggcatcgtggcactggacaacggtatttataagatctggtttgcccgcaactacaaggcgcacaaaccgaatacagttctgctcgacaatgccctggcgaccatgggagctggcctgccgtcagcaatggccgcgcatctggtttatccggatcggccggtgattgccgtgtgtggcgatggcggcttcatgatgaacagccaggagcttgaaaccgccctgcggttaggcatgcacataaccgtcgtcatactgcgtgacgacggttatggcatgatccgctgcaagcaaaccagaatggggtacaccgaatttggtgtgggctacggcaacccggactttgtgaaatatgcagaagcgtacggcgccagtggttaccgtgttgaaagcgccggagccttgctccccctgctggaacgctgcattaagaccccaggcgttcacgtaatcgactgcccggtcgactacggcgagaacgatcggatccttaatgatgaattgcgcgcgaggtcgctggccgtctga

SEQ ID NO: 167331 - DNA, 2013 bp, Enterobacter cloacae
atgcagcagacacgcagtgtctttcatgacggtgaacgtgcagtacaggcacgtgccgaagtgccagaggaatggcttaagcaggtggaaggttttgtacgcaccgagatgcctctgcaacatcgcaacttctttgaaaatctccagatgctgattctgggactgctcgattcagacggccggccgtggtgcgttccggccctcgggtcaccaggttttctggtttcccccacaccggacacactagagatccaccggaaccccgttctttcacgtgaactcgacctggatctgtcccccggcgccagcgttggtgcgctcgggattgacctgttaagcagacgccgcaatcgagtgaatggccggatacagcatgcctcagcaggtgtaatgaccatcggggtcgatcagagcttcggaaactgtccgcagtatattcaggctcggcagctgcctcttggcaaggacgagccgggagctgtgagtcgccggcgcggcagcctgaccgatccggaagttcgtcggattattgaggccgctgacactttctttatcgcctcccgtgcggctggttcactggatggtgaaagcgccggtgtcgatgcctcgcaccggggcgggcgtccgggatttctcggtatcaacggggacggcacgctctcctttcccgatttctccggcaatcgctttttcaacacgctgggcaacatcgagagcgacggccgggtcggcctgttcgttccggattttgaaactggtgaggcagtggtgctcacggggcgcggttccgtcgactgggaccccgaccgtatcgggtcgtttgagggtgccgagcgcatcgtagacgtggtaccggaagaaatctggcatgccagtgccgtggtgccggttatcgggcccgaatccgagccgtggcccggacttgttgccacgggcacctggaacgatgcgcgtctgaccgcactcaaaacgggtggctacaggcgcttccgggtagcgtcgaagattaaagagagcgataacatcacctctttctaccttacacctgcagatggtggttcggttgaaatgcatcaggcgggacagttcctgccggtacggcttcgaagcaatggtgaggtaattcagcgtagttacacaatttcgcagggaccaaacgggcagaactatcgcctctcggtcaagcgggaagaatacggggtggcgtcccggctgctgcacgaccattgtgaagccggggacgtcatcgaggtagggtcacctgcgggcagcttcgtgctggatgacagtacccagccgatcgtcatgctttccgggggcgtgggtataacacccatgatggccatgcttgatgcgcagatactggcccttgaaaaaggggcatcccgtcgcatggtttacttcgttcatgcgacacagaacagcgccagtcaggcgtttcgtcgcgagctcagggccatggcccaaagatacgactggcttcgcctcttcacggcatacagtgctcccagcccggaggacaaactgggggatacacacgacactgaggtgcggctcagtgtggatgctctcagcaggctgctaccctttggcggctatcagttttacttgtgcgggccggaaagtttcatgcgatcgctttatgcgggattacgggaaattggcgtggccccttcacatatccaccatgagttcttcggtgccggcgaactcggtgaccccggggaggtattcccggctgcagtactccctgagagtgcacaaatcacttttacctcatcggaagtcaacgccgaatggacgagtcagagcgggactcttctggacgttgctgaggctgcgggtctcaggcccagctacaactgccgctcaggcaaatgtggctcgtgcgccgcccggctggtttccggaagcgtgcactatccacgccagccggcgatcgctcccgccgacggcgaggtgctggtttgctgtgctgttcctgcggaagggcacgtagaaatagaactgtga

SEQ ID NO: 167332 - DNA, 393 bp, Enterobacter cloacae
atgccattgactcatggtgtacaacatgttggtttagccgtatcaaatcttgaagagagcgcagcgttcttcactgatttactgggctggcaggaagtcaaacgacgcgacgattacccggccatcttcgtgaaagacggtgctgtgatgctcacactctggaaaacgcaaacagaagaacccattcagttcaatcgtaaaaacaatgtcggactccatcacctggctttgcaggtggagactaaagagggcctttaccagatccttgaagtgttgaaggcaaatcaggttgaaattgaatttgagcccaccctgctccgcgaggggccgtctatgcacatgatgtgctacgaaccgagcggcatacgggttgaattctattacccgggttaa

SEQ ID NO: 167333 - DNA, 576 bp, Enterobacter cloacae
atggaaatcaaaaatctttcttccccgcctctcttcctggccgataatctcgcgctggacttcatcaacagtgaatacgggacgggcgaaaaccggcatgattgcttcgatgacgcccggagcgttatcgattggctgcaaagggtggaccttgtgccgaaaggaactatggctccgcgtgggctactcgaggaggctcgccagctgcggggtgcagcccgcgcggtcgtgcatgctgccatgaagaccagtgaatcagacctgacggtgattaaccgaattctcgagacagggcgccctgaaacgcggctgaaatgggatcaggatacacaacgctatcgtgtggatgtttattcagatgctggcagcccggcagacctcctctggcccatagccgatgcgcttgtgaagctggtcacggatgaaaagttcaaatatgtgcggcagtgtgaagcccataactgcattttactctttcacgatctgagtaaatcccatcgccggcgctggtgcagcatggccacctgcggcaatcgcatgaaagtggccgcattccgaaacaggaaagcttcatag

SEQ ID NO: 167334 - DNA, 576 bp, Enterobacter cloacae
atgaacaagaagccaacggatacccgggaaaaaatcctcactaccgctgaacaactgatctatcagaacggcatccacgccatgggcatggaccttctggtgaagacctcaggcgtcgcaagaaagagtatttatcgccatttctcgaacaaggaggacgtggcatcggccgcgctgaatgggcgcgacgaacgctggatgcagtggttcagaaccgagtctgataaaggtgaaacgcctcaggatcgcattctcaacatgttcactgttctgaaaagctggttcgagtccgaaggcttccgtggctgcgcctttatcaacacagccggggaagtgggggatccggatgaccccgtgcgcctgatagcgaaagtgcataagcagaagctgctggattatgcgctcgagctcagtgggcaactgaacaccggacacgctgaggaactggccaggcagctgctgattctgatggagggggctatcaccgtaacatacgtgatgggcgaccgggatgccgctgacaacgcacgggacgttgcgaaagttttgctggaacgggtctcagccgggacctga

SEQ ID NO: 167335 - DNA, 477 bp, Enterobacter cloacae
atgactaatacacaagttcgtccgccgcttccgccatttacactggaaacggctatcgagaaagttcgcctggctgaagatggctggaacagtcgcgacgctgcaaaagtcgcactggcttactcactggacaccaaatggcgtaaccgtgcggagttcgcgaataatcgtgatgaagccgaagcgttcctcgcccgtaagtggaaaaaagagcacgagtaccgcctcattaaggaactgtgggcgtttaccgggaaccgcatcgccgtccgttacgcatacgagtggcatgatgactcgggtaactggttccgctcttacggcaatgaaaactgggaatttgaggccgatggcctgatgaagcgccgcttcgcgtgcatcaatgacatgcctatccaggaaagcgagcgcaagttcttctggccgctgggacgccgtcctgacgatcatccgggcctgtctgacctgggtctgtaa

SEQ ID NO: 167336 - DNA, 1008 bp, Enterobacter cloacae
atgaatatgaaatctgtgttgctgactgccgcaatggcagccatttccgccaacagctttgccgacgcgtctcagccggagcgtcacgtgcaggaatttctcaatgccctgaacggtgccggcggcaagcctattgaactgttgtctccgcaggacgcgcgtcaggtgctgatcagcgcccagaaaggtgcgaaactgcctgctgctgacgtcactgataaaacgatcaacgtcgatggtggctccatcaaacttcacattgtgaagcctcataacgcgcaggataccctgccagtctttatgttcttccacggcggcggctggatactgggcgattttgcgacgcacgaacgtcttgttcgtgacctggtgactgagtctggtgcagcggccgtttttgtcgactatacgccatcaccggaagcgcatttcccggttgcgattaatcaggcttatgcagcaacccgctgggttgctgagcacggtagcgaaattggcgttgacggcagtcgtctggcgctggtaggtaacagcgtcggcggtaacatggttgcagccgtagcgctccaggccaaacagcataaagcgccggcgatccgctacgaagtcatgctctggcctgtaactgacgcgaatttcaataccgggtcttataaccagtatgagaacgggtatttcctgtcgcgtaatatgatgaaatggttctgggatgcttacaccactaaagaaagcgatcgtaacaacatcctggcatcgccgctgcgcgccacgcctgaacaactgaaggggctgcctcctactctgattcagacagccgaacttgacgtgctgcgcgatgaaggtgaggcgtttggccgcaaacttgatgccgcaggtgtcgacgtgacggtgacacgctacaacgggttaattcatgactacggcctgctgaacgcgctgagcgacgtgcctgctgtgcggaccgcacttgctcaggccggcgatgagctcaaagaacacctgaaatag

SEQ ID NO: 167337 - DNA, 726 bp, Enterobacter cloacae
atgcaagtacattttattgtgcatgaagattttgaagcaccaggggcgtttgaaacctgggctatggctcgtggccacaaggtaaccttttcgcgcgtgtatgcgggtcaaaagcttcctggtgatgtacgggatatcgatctgctggtagtgatgggagggccacaggatccgtccgtcacccctgatgaatgtgcacattttgattcccttgccgaacaggcgcttattgcctctgcagttcttctgggtaaagccgtcatcggcgtctgcctgggcgcccagttgattggggaagccctgggggctccgtttgcccacagtccggaaaaagaaatcggtaagtttccggtatttatgaccgctgcgagcgagcacaacccgttgttttctcacttcggccatcagcttgacgtcgggcactggcataacgatatgccgggacttacgccgggggccgaaattatcgcctggagcgaaggctgcccgcgacagatagtggcttattctgatctggtctacgggtttcagtgccacatggaactcacgcggtccgttgttgaattactgattgcgcattccggcgatgacctgagccgggcggcagactatcggtttgtccagtcagcggaagagttaaggacccacgactacacaaaaatgaataatgtgttgttcacttttctcgacaagcttgagtcacgctaccgccggaccgggttatga

SEQ ID NO: 167338 - DNA, 768 bp, Enterobacter cloacae
atgccagtaagcatcgataaagcgccaagacacgatgaatcagcgggctgttcagccacggccatttcctaccggcgcggggaagaagatccccctcattatcacctggaaggacaacttttatacgccagcagtggcgttctgctggttgaggctgcaggcaggcgatgggttattccccctcagcgggcgctctggctcccaccgttgattgaacactcttacagacttctgtcgcatacggagctgcgcgcggtttacctcagtggcagcctgatttctgagtgcacacatttctcagagaataaccgggtacacgtgatcgacgtggtcccgctggtcaaggagttaatagctggcctgtttaacaatgattaccacacactgacgaagcgaaaaatggcgcttttacttctggaaatcatcggcgaagcgccctccgtacccgcagagctaccgatgccgcaggatgaccgattattacgtgcagcaggggagctgatgctcagccatcgctgggaaaccacgttatctgatatggctgacatagcaaacatgtcggaaaggtctttctcccgcctgtttttacgcgatacggggttcagcttccggacatggaaacagcgggcaagaatatacgcatcactggagcttctttccgaaaacgtatcagttaaacaggttgcctggcagcttggcttttcttcgcctgccgcattttcagccgcattccgtgcagttatgggggtaacacccggtgagttttga

SEQ ID NO: 167339 - DNA, 471 bp, Enterobacter cloacae
atgatccagacccaagttacccaggcagcacgtcaggcactcaccgaaaccatcattctggctaaggcccgcaaggacctatctttcgccgaaattgttgacgggaccggcttgtcggaagccttcgttaccgcagctttgcttggccagcatccgttacctgccgacgcagcggtcgttgtcggcaggaagctcgacctgaatgccgatgaagttaaactgctgcagtcggtgcccgtgcgcggcagctttgccgatggcatcccgaccgatccgacaatctaccgtttctacgagatgatgtcagtttacggtcccaccctcaaggcactggttcacgagaagttcggcgacggcataatcagcgccattaacttcaaactggacatcaaaaaagttgaagatccggacggtggacaccgtgccgtgatcaccctggacggcaagtacctgccaaccaagcctttctga

SEQ ID NO: 167340 - DNA, 660 bp, Enterobacter cloacae
atgaaagagattattgaaggttttctgaagttccagaaaaacgctttccccgagcgggtcaagctgttcaaaagcctggctaatcagcaaagcccgagagcattgttcatttcctgctctgacagccgtctggtgcccgaactggttacccagcgcgaacctggcgatttattcgtgatccgtaacgccggtaacattgtgccgtcttacggtccggaaccgggcggggtttcagcctcagtggagtatgcagtcgccgcgctccaggtgaatgacatcgtgatttgcggccactctgactgcggcgccatgaccgccgttgccacctgtaaatgtctcgaccatatgcccgccgtatcgagctggctgcgctatgccgactctgcccgtgtggtgaatgaagcccgacagcataccgatcagtcatccaaagtcgcggctatggtgcgcgaaaacgtcgtcgctcagctggctaatatccagacccatccgtccgttcgtctggcgcttgaagaaggccgggtggccctgcacggctggatctatgacattgagagcggtcgtattgatgcttttgatggcagaaccggtgctttcgtgtcccttgctgaaaatccagaagttaaagccgtttcctcacaatccaggcatgttgcctga

SEQ ID NO: 167341 - DNA, 888 bp, Enterobacter cloacae
atgctcgcacgtcacatacggtattttcaggctgttgctgaacatctcagtttcaccaaagctgcggctgcactgcacgtctctcagccagccctctcgcagctggtcaaacaactggaagaagagctcggcacccagttgtttgaccgatctggtcgtacaacatgtctgacggataccggacacgcttatcttcagtatgtacgccgtgcatctcaggagttgcgggaagccacgcgcgcgatccacgacgtgaacgatctcagtcgtggttcgcttcgcttagccgtgacgccaaccttcacaacgtatcttgtcgggccgctggtcgaggcattccaccttcgctacccggagatcaccctcaatgtacgggagatttcacaggaaagtatggaagagcttctccaggaaggagagctggacgtggggatagcattcggggatgttcactgcccggacatcgacgcgataccgttgctggacgaaacgcttgccctcgtggcaaacagcgggcacaggcttgcgaaggaaaaatctgtcgggctacaggctttgaacaacgagtcactggtattactcagcaaggaattcgcgacccgcgaacagattgacagctactgccgtagacacagtattcatccaaaggtgctgatggaagctaacgctctcggggcggtaatagaaattgtccgcaggacatctttgtccacgctcctgcccgccagaacggccctggcccaggataatctggtggcgatcgccctggaacccgagcgcctgacgcgcacagcggtcctgatgcgtcgaaaggacgcttatcagagctttgctgctcgagcatttactgaactggcagcagaaatatccgcccagctgaacgggtaa

SEQ ID NO: 167342 - DNA, 216 bp, Enterobacter cloacae
atgaaaattatcaaaactttgtcaatcgtcgccgtaaccactctttcactgatgtcagcctcagtatcagcgcagagcattaccgcgactgcgctgacgctcgacgaggctgaggctaagattgctgcgcaggctcagcaacagggtgctcaatacaccatcactgaagccagcagcaatgacgtcgtacacatgaccgctaagctgcacaaataa

SEQ ID NO: 167343 - DNA, 492 bp, Enterobacter cloacae
atgcaaatcaccccgcaataccttgccatcggtccgtcaggaaaatattacacgccatggaatgcaattcagcacccgaaaaccacctggctttgccctcattgttattgcgtgctgcagttgcacccggcaaaaaatgacatggacgcttatttcacacatgacctgatgagtctgacaccgtcaaaggctgagcgctgttcatatatcgatgaggacaggaaacgatatggtcgtctggtgtttctccgccacattgtggcaacgctaccagtctacagcactgtaggtcatgactggcactgtgtgctatgtgggaataattattacgggctgaagttctgtgaatactgtggctcagggatttacagcatcgaagatacagacacagcgctgcctgaatgccttaccggctcgcgttttgcactcacctggaaagacattccccaggatgaacctgaagtgcctgacagccctagcattctgtcgtaa

SEQ ID NO: 167344 - DNA, 642 bp, Enterobacter cloacae
atgaattcaacatacctacttaatgccagttacgcagagcgcacccgtcaggtctttgatgcggcaactgagcagtatccccggctggctgtattccgtgctgacttacgtttccctgttgaaggtacaggacgcagggatgagcgtgttatctcacgcttcatcgattcactgaaaacccatatggcatcactgtttagcgccaaacgacaggcaggcatcacctgtgaccaccccacttcactgcgttatatctggtgtcgtgaatacggaccgcaaagtggtaaccgccattatcatgttgtattgctgctcaacaaagatgccttccaccaattggggagctttgatcctcctgagagcgggaaattgccttccctggcgaacctgattcagaaggcctggtgcagtgctctgtcactcccctggccacagtacgcttcacggatccggtttccagatggtcagcccatctggattaatcagctgaaaaatagggagaagcccccggaatacttcagagcgcttgagtgggcatggtatctgagtaaggaggccagcaagcgatatggtgacggacgctcctttggttgcagccaagataatccctcgcttatcggcagtcgtcgcaagcctcgctaa

SEQ ID NO: 167345 - DNA, 234 bp, Enterobacter cloacae
atgccagcatcagcacccgtcaacctgctcagcgatcagatggtcgacatgaaattcatcacagccttcacaggtctcacagataaatggttctacaaactcatcaaagagaagaagtttccgaagccgataaagttaggtcgggcatcgcgctggtttaaaagcgaggtggaaaaatggctgaaagaacgcatcgaggaatcgcgtgaagaggagcagcccgaagaaaaataa

SEQ ID NO: 167346 - DNA, 1230 bp, Enterobacter cloacae
atgtcgaaaaataaaaaatggaataaaaaagcacaaaacagcagccacaatgatggtctggcgcaggcggtaaacagtgctcaaaaggcgcgggatatcacgtcctcgaacgtccatattccatccccggcagcgcccggggtcgaacgacccgaaccgaaaaagagacctgacaacaacgatattgatactcaatctgcgacggatgaagcgccacagattgatgacagcgcgattaataagtttgatctcagaaagctgagaatggcactggtgactctggcagaggcgggagtagatatgtctgatctcgtcttcattaaccccggcaacagttctcctgcgcgggaaagaaatcgctacctttttattcagcggccgtaccacaatcgcctggagttaatcacgctggtgaagcgctatgtcagacgcagccgtttcagggatgaaggaatgcaggcgtttaatcaggcagtgaaagataagtcggctttctatcttatcgaggagtcagccctgtcatggctggaagataaaaaggcagcctgttgggcgtggtgctatatcaagaatcaaagcaaaccgatccccttgcctcccgatacacgctggcaggcgaatgccagcgtgaatcaccccgcctttgtcagtcctgagcatatgcctgcggatattccgccattttacagcgacaccggtattcctgagcctgaaataagccctaaagggttgctggaagtggtcacggctttttttgaccactggcttgttgaacgccatatcaagcacggcgaagcggataaactccggcgtatgtggggagccctgaaccagcgggcggaaatgaaaaagtcgccttttgatttccttgatggcagcaacagtgacgccattgattggtgctggtcgtatgtaacaaacaaaatgttcggtataaactggtacagattcagtgcaacatccgacagcgatcgccgggcactcctggatagcctttaccaggtatgggaatgcccaccggacacccgaaaactctttgtgcatgaactccggcgagcctggagtcagcggaagttccgggctgaacaaaagcagcggaaattgttccaggcgtatatcgccccccggacaaaagagaaactcagccagcttgctaaagagcgggggatgaaaatgaatgaaatactggaacggctcatcgaagatgcctacagtctgatgaaaaagtag

SEQ ID NO: 167347 - DNA, 570 bp, Enterobacter cloacae
ttggccgttgaaggcacaaccatcaccgattcagcaactatgctggctgacagctaccggcagccaggcaaaagcccccgtgatgtggcggaatctctcgttatgtatgaatccctcaaagcatgtggctctggttttgcctgtggcctggcgggaagcgcgttattgccactgagcgtaaccgccgatgtctgctcttcactgttttttcagatgcgactatgcgcagcggttgccatcactggaggacattgcacaaatgacccacgggtacgactgctctgctggggtgcggttgctggagatatctgcgcggatgccatcagtggtattgccactagactgttgaatcaagcaatgacattaccagaggctgaagctgcactgcttaccagcatgcgcgatggactacgcgtcagttatggcggtctttcactgaaagaaagtctgttggtctctttgttgggcggggctgtaagtggcacggccgcctggctggtcacccgcctgacagggcaactggcaatccgtctgtttcttcctccaccagcaccgccctgcgcagcataa

SEQ ID NO: 167348 - DNA, 1728 bp, Enterobacter cloacae
gtgaaactatcaaagcaacagagagatattattgatgcgccgttaggaccaattgctgtgactgcctgcgccggaagcggtaaaacggagacagccattcgacgcctgattgcggtaagagaaaagatggaaaccagccgaggacgagtcgtgctcttatctttctccaatgttgcagtcaatacctttaatagagggtatgcaggactcgcttctgccctcccggatgatattaaccgtcgtcgggtggaggtcgatacacttgacggttttttcaccaaacatattttacgcccccatgcctatcggactatggacacggatcgggcggcgtatctagtgtcaggctcggaaccttttctaaccagttttcaatattggcgtaaaaacagccatccattgccattaaaagatataaaagtaggtatgtgtaataaaaaattctactttattacaagcaaaggagatgagctggagctacttgatgaaagtgaggttttaaaaatcatcactagactgggaaagataggtgcctacactcatgagcttggccggtattgggtttatcagactttagtctcacaaccagctgtactacgtgcgctggcaactcgttacccgcaaatccttgtcgatgaatcccaagatttggggacagtacaccaggaaatcttagaattacttattggtgcaggggtaaagataactcttataggagatgtaaaccaagggatttatggcttcgcaggtgcagacggagagttcctgaagagctatgaggatcgtgccgaggttaccggctacaagcttactcgcaactatcgttccctcccaccaatcattaacatcgccaattctctttgtcgccgtaatgacgagcctgaccggcagaacgaacaaggtggtgcattttttttcggatacaaggaatctgaactgccaaaattaactgaagcattcaaggcccatattgatgaattaaacatgcggcttcaagattcagtgattctttgtcgcggggcagcgagagccgaaacaattgcgggtagagcttccccgccaggacaaggtatggtcaaagtcttagcagaagcatcgttgttacgagatcaacataatgactaccatggctgctttaaattggtctgcagagcaattattggcttactggacaatgccccccctggactcagttcaggacttcaggggttatcacatgaaaacggaatgggagggttgaagcgactactatggtgttttagtcgcagcacagatgcgggacttccctcgtctggacttccagcgaaaacagactggcataccaagctattaacgaatgtcaaagcgcttctcgtagagattgaaaaacaatacgaatataaaattgctggcacgcttggcactaaactgacaaaaaagctcctaccggaccttccattgtccagtgtagcagtctctcagacgcatggattcagagtagagacggtgcaccaggttaagggggaatctatcggcgcagttatgtatctcgcgaaaaaaaaccatatcgaagcattgctctcagggactggtgatgaagaaggccgaattgggtatgtcgcaatcactagggcaaaaaacctattctggctcgctgtgccagaatcatgcctaaaagaattcagggataaacttattagagctggttttcaggaacggaccaaacctctggtcattgctcctgcctga

SEQ ID NO: 167349 - DNA, 1152 bp, Enterobacter cloacae
atgtggtcctctcaatcttacaaaaaacagggactagccaacgggctctcagtacccttgctcaatgaggctatcgcccagagtgagcttcttatttactcggaatactccctcccctctattttgagtctcaaacatttggccaaacgtactaccgttgaatatgagtggcttcgcagtttcgtgctccgtactgcaataaatggggttgagaattttgaaatttataagaaattttctattcgtaaacgatctggtgggcgccgttttattcatgttccatctcccaagctgatgcacactcagcgctggatcagcgaacatattctaaaagacttgcctgttcatcccgcaagtcatgcttatagaaaaggtaactcaattaagaaatgcgctttgcgacattgtggagctaagtggctaattaagatcgatattgcagatttctttagttcagtgtctgagattcaagtctaccgtatttttagatctctaaactatcaaccattagtggcctttgaacttacgcgcctgtgcactgttggcacgcccgatttaagccctagggctaagtttccgcactggaggacaaaagcgttcaatgaggttatccctctgtatcaccagactttgctaggttatttgccacaaggagcccccactagcccgttccttgcaaatctcgtcatgaaaaactgcgacaactccttgaatgctttggctcaaaagaatggcttactttatacgcgctatggtgatgaccttagtttctctacaaaagacaaagcttttggacgctctcgggctaagcagtttgtttttgaggcttacaaaataatttctcagtcgggctttcgaccacaatttagaaaaactacaattgttcctcctggtgggaaaaagatcatattaggcctgaacgtagaatcagagtttccaaggctagcgaagagcacaagagacaccattcggcagcatctctactttttggaaaaagtggggcctgtgcaacatgccttcaaccgaaaattcgactctgtatgggggctgaagtcacacgtccgtggtttaattgactacgcaaacatgattgaacccgactttgctgaggtatcccttgaaaagttccagtctattgaatggcctgtataa

SEQ ID NO: 167350 - DNA, 207 bp, Enterobacter cloacae
atgactagtgctaacgagcaatacaaagtcaccccttttgggatgatagagggttgctacaccactttacagtgtgtgttggggaatggatttccggaacctcacgaaaaagcccacgcttggctggagacggcgcactctgcctccgccagcgtaagtcttgggttaccagagcgcgccgtcgcctgcggcgacgcatcggagtag

SEQ ID NO: 167351 - DNA, 1443 bp, Enterobacter cloacae
atgtctgctatgagcgaggtgcggaaatactggcgtaatttgcacttggcgactattttagtcagattattagcttcgataagccgacctaacctgttgctattcgatagacagatggcaagttgtatggaaagctgtagctttggagatgagaaaattaataaaaatcaacatgatccaagaaaactaatttacactcagcaaggcgaaagatggttgagtcaattcgatgcattagaccaggaaactgcgaagcttctgctcaactcactgactcttgtctctcatactgaatttcgtcggaatcttgaagcccttattttggacgtttcaacaaagttagcgggtccggtcgccctttatgccgtaagggagttaaaaaaggaacccaataaatgcaaattgttcagcaatcatgtagtaccattttttgatcaagtgattaaaagtagtaatgggaaaaatgtaaactcgatcagtatttcatcagatcaaggtagcgaagccattatcgctcaaataattagacaattgtccaaagccaatccggaaaaaattctaaatcatccttctaaagaagagcttcgagttcaaagatgtgactctttgatatttattgatgactatattgggtctgggaaaagagtctctgattttattgaatcattctggagagacagaactatagtctcttggttatcatcaaaacacattaaaattcaggttgtagcctattctgcaacggcgaaagggctcaggcacctagaatctttgaaagcttccccagaattgattatctaccgagactcagcaacatttacaaccctcccaattaagatggaaagaaaagatgcactactgaagctttgtgaaaaatatggtcgtaaagcactgaaaggaagaaagcacttttggtgggggtatcaaaaaagtatgtcttcacttgtttttgagcatggatgccccaacaatacaccagccattttatgggattccgatgacaaaaaagggaagtgggttggtatatttccaaataggacagtggatacaacaacggcttcggtttttccgcctgaaatcgtgtgtggcaataacatacaaactctccatgatgtaggtcagacacgattagcgatgtcaggcgcactaatgagacggggggaggttggagcaatcattcttgttgttctaggcttgattgcaaaaggccaacgtaagcgttcaactatctgctatgcaacaggattaaattcaaaggactgtgaattacttctttcgaaatgtattaagtggaaattccttacacctgaacgaaggattacccctcgggggctatcggaactatctgcagcaaagcagacttccttttcacctaaaggatatcttgccgttggttccgactactactatcctaggcaactgagagcgactacgtatgactag

SEQ ID NO: 167352 - DNA, 324 bp, Enterobacter cloacae
atgtacatttcatctgtaccggccacggtgccggattcgtcacgactgtcgcccgtacaggtttggcatcaactgttaacgtatctactggaacatcattacggtctggcccttaacgacacgccattccacgacgacgcggccattcaggaacatatcgaggcggggataactctagccgatgcggtaaatttcctggtcgataagtacgaactggtccgtatcgatcggaagggattttcatggcaagaacaaacgccatatctcacgattactgatatcatgagagctcgccgcgagctaggattgttaagtcgtcattaa

SEQ ID NO: 167353 - DNA, 2460 bp, Enterobacter cloacae
atgctttgttcttcaatagagcttcaacgtaaaccgccaaaatcagcagaaaaaaaatacccgctccatcaagttgatagacttataaaaataattatcccctttgtcaataaaggaccgggtacagccgtagatgttaatatagaagttgatacaggaaaagagtcagcaataatattcaataatgaacaattcagatgtggtgatgttccaccgggaaattttgccatttgccttgaagctaatgttctcgctgcaacaaaaaaaattgatattatattggaacttaactggaaagaaattttcggttctgataaaagccaaatatatgaaattgtcgtcgaaggtcaaaacgaacatgttgactggaaccaactggaaaatcttgaaccatatagtttagaggttgcagaaggcgacatgtttgtaggacgagatgcaaaagttaaagctattgtaaataagttattaaagcgaccgatgacatcaacctatgttacaggccaaaaacgaattggaaaaacctctctggcaaaagcagtaataaactatttagaagaagagtgtaaagattttcattgtttatatcttgagtatggagaatactgttcagcaacacctcaaaagacattaaaatcattaggcgaaaatatttataatttcatgctagggttcattcccgggaatcatcaacaacaccacgacttcggtgagtcgttgtccgacttgaatctaaccgcaaaaactcttgaatccaaatgcccggaaaaaaaatttattattgtacttgatgaatttgatgaaatacatccagaattgtatcgttcaggtccgttagcagaaactttttttgctaatttaagaaccttagcagcaagaaaaaacatggctttccttttagtgggtggagaaaaaatgccatttattattggtgctcaaggcgatcagttaaataaattctccagggaaacattggattacttctcaagaagcagtgagtgggctgaatatatagaattaataagaaaaccagttgatgggtatttgaactgggatgatgctgcaataaataaaattttcaacataacacacgggcatccttattatacaaagctactatgctctaagattgttagcatagcaatttcagaaagagatactgaaatcattgagtctgacgttactaacgatttgatttatctcctccctgaattagatacaaactcttttgcccatttatggaaggatggtataagttctgaaagggatcaagctgaggttattgaacttaaaagactgaggctattagttagtattggccgctcaattcgtgagcataaaagaaacgaagaggatataaaattaaaggcgacactttcacagttattagatcatgagatctcacctttgataacagattttcagcgtagagagataatttacgaaaataagaaggatttattttttacaatccctttgttcgaaaattggttaactgagtatgggttaaacaaattaattacaagtactcttggcgatgaacttgaagctgggataaaaaaagcagaagatagagctcatgtaacttcaggtgaaatccagcaattaattgagggctggcctttatatagagcacaaaaaatagatggcgagagagttagagcatggcttgatcaaataccagacatcctttcacaacggcttgcttttaaattattaaaacacttacgtttcattcgtcctgtagaaattgatgaatatctaaaagacgcccattcaaaattagtgaaaaaggtagtaggtgtttctactatctacaagaaaacagatcgtagaagtgatttcatacttacattctgtgacggcgttgggaaaagtggattacaatatgctcgtatttatgcaaaaaacaatgcaattgcgacatcaagtattatcgatccaactgcactagtaaaaaaacttaaaaacctcgatgctgactcacaaccaccaaaggcgatagtcttagttgatgatgttattggtagcggtcaaaccctttcatctggaataaataatttgctcgaatcaataggagagcaattaattactctaaaaataccaatgctggtcattagtattgtagggactgaggatggtgaatctgttgttaacagcatcctaaaaaaacattcaaatgacaatgaattatatatagcagaattattaaatcattcaaattatgctttcattaaagacagtttaaatttttgggaaaatgaagaagagatgcatagagcaaaatctttatgtttagatttgggagcgaaattgtacaaaaaaccgttgggatacaatgaccaggggcttctccttgttctgccggagacctgcccgaataactcactaccgatactatttcagacaaaagtgggcgcaaactcttggaatccattatttccaagaccagtttcatag

SEQ ID NO: 167354 - DNA, 180 bp, Enterobacter cloacae
atgtcccaccatattacatttcgcatcttcgatgtattaaaaattaatacctattatgatgatgccattgacatcaaaatttccgataaacaatcttcccgcctgcgtattacccgtttcgggatgatgattattcagacaggatgctttatgcttttcatcttccctttgaggatatga

SEQ ID NO: 167355 - DNA, 159 bp, Enterobacter cloacae
atggcgacttttcataaagaactcaattatctttctcgctatttcaaagaagcgaagcatgcggaacacattttatttcgctggctttatttgagcccggaggcgcgcattgagcgtctgcgcgagctgatgatgccggtcagtgaacatgagcggtaa

SEQ ID NO: 167356 - DNA, 270 bp, Enterobacter cloacae
atgaataatcagcaaaaactacgcatctcaaccacaccaggcgaagtattgctgcacgattatcttaagccactcagtctcggcatctcagaactggcaaagagaataaacaccgatcacaccactgctagcgcgctggtaaacaataaaataaaactcaccgccgatatggcgttaaaactggcaaacgcattcgataccagcattgaattctggctgaatctgcaacaaaacgcagaaaaccaaggaatgagaatcgaacatccctaa

SEQ ID NO: 167357 - DNA, 450 bp, Enterobacter cloacae
atggatacggtcgaggaattaaacggaacgtacttctacaaagggattagcaatatatcggcgggagagctatttttctggatttttttggataaaattgaagaacagtttggagggatagtagatgtagtaacgctgagttgtatcattttaggattgcccttattaaagacgagaaataaaccttatggaaccactgcgggaacgtccatagcctcaaaatatttgcgccagtatctcaatgttcagttaccggtaagactacctaccttaacggaagcaagtattaccacattaaaacctaagtatgttactaacctgggtgccttcattgggagaggactgcctgtcattggctggacaatggttgcaggtgatttggctcagatatgctataagacaattaaaacctataacacgattgctcacgagaaagatcgactatggtaa

SEQ ID NO: 167358 - DNA, 600 bp, Enterobacter cloacae
atgttcaaacatatcttagagattgtggagaactcaaacaaatttctgcgcatttatgcatctaatggccaacgtataaacttcacgttcaataataagccacatgtatactttttaacagagggaaaagtagacctttataggaaaaaggatgatatattagtatttacagtttatgccccttatattttagggattatcttcatgtatgaaaatgatgattatcactactttaaagctgcaactgatgcgcaacttacagctatacctgcgaatgaattagattacttagcagatctgaataatttatggaagcacttctttttaatgacgtgtgaaatcactttaaactttttcaggcgagatcaacgattttcatcaaaaagtgcgtacgacatcatcaaaaataatctggaagctatatgggaactacctgaaaatgaaagaactcagatttcagtattcaaatttatattatcaagaagtaacatatccagaagctctctcaacaaggttttaaaagacttacacaatggtggttacataaatatttatagaggaaaacttttagctataaaaagccttcctcagaagtattaa

SEQ ID NO: 167359 - DNA, 678 bp, Enterobacter cloacae
atgaatgttattagcaaaaccctgctgagcgcggcggtgatgactgcgtcgctgtcacaagcgtatgccggggtcgtgattggcggtacccgcgtaatttttgatggcgggaaaaaagaggcgtccattagcgtaaataatgtggatgcagccccttatttaattcagtcctgggtcgacatgccagagggtaatgctaataaagcgccatttatcgtcacgccccccctgtacaggctgaacggtggccagcaaaatattgagcgtattttattctctggatcgctaccgcaggataaagagagcctgttctggttaaatattaaagcgataccgtcagccacgaagcaggcaaacgcgttgcaaattgccgttaaaacccgcatcaagctcatttatcgtccggcaggtctgaaggcgtcaacgcctgaagaacaggcgagtaaattaacctggtcgcggagcggaaataaacttcaggttactaatcccacgccgtacgtcattaactttaatgaaataagcgttggcggcaaaaaactggaggatgtcacctgggtggaccctggcaaagtggccatatttggcttgccgccgggtgccgctggcaatcagattttatttaaagtgatcaatgattacggcagcccgggaataacgcatcaggccagcttttaa

SEQ ID NO: 167360 - DNA, 663 bp, Enterobacter cloacae
atgcagatgtcggtaattgttatgttgaatattctgattaaagaaccggattctttttttaaaaatggcctgcaatattttcttgtggatttcttcctgcataatttcaggcatcaaattcattttgataatgagcttacttatgacagcgtcagtgccgccgatattattattctcgctttatgccctggggaaacgctgacctgtattcccgaattgaaagcgcgaaaaaaagggattgtgattgggctggtggacgatgagcggcgtttttccgcattttcatcctgttttcaggatatgatgttcatctcccgccgcgccccgcttggtcaggttagcgagatgctcttcattgcctggtaccgtacgcagctgccgggatatcgctggcagcataaaggttgttttgagtgccagcacaagatactttcgccgcagcagatccgcgtcacggtgaatttttacagagggttatcggtagggcaaattgcggatgtgctcaggacaagtgataaaacggtattcacgcataagtatttgctgatgcaaaaattcgatctgcgcagtgattacgagctaatggcgctcattcacaggatggtcgaaaagaatgcctacccgaacaaattgcgtgaccatctgatcggttacgacggatga

SEQ ID NO: 167361 - DNA, 192 bp, Enterobacter cloacae
gtggataaagaagagaaagtcttgtatttaactcgcttagcggttgatacatataactcttaccgttctgctcaaatctcttctggccggaatcttgctgacccccacgatccggtggaagagatagaaaaaatctatgcaaaattcgaagtctttcttgaccagaaactctcagaagacgaatggaaatag

SEQ ID NO: 167362 - DNA, 987 bp, Enterobacter cloacae
atgcaagaaaataatgaaccaaagggaaaggccaaaggtggtaaagctcgcgcagccaaaatgacagccgatgaaaagaaagctcaatcactaaaaatggtgcaagcaaaagctgaattagcaagcatgccaaaagtgattgctggttctaacgatgagccattaaagatcggtgaaatagaattagagtgttacgtcttagatgatgaaaataagacaagggttttctctcagcgtggcttagcatcagcccttggctgggaccctagccaagctgccgcgcgacttgcaaactttactgagggcggtttcttaaacccatttgtaaacaatgagataccagatttacttcgtggcgcgcttaaattcaaaaaccctcatactccaggctacatgatcggctatcctgccacaattcttgctgatttatgcgatgcgattttggccgctgatgcaaaaggagtattaaagaaagggcaagaagagctagctcgcagggcactactcctggttcgaggttttgcaagagtaggtattgtagcccttgttgacgaagctactggttatcaaagaattagagaaagggactcattagctaagattcttgaagcttttgttgctaaagagttacaaccgtgggtgcatacttttagtcctgattattacgagcaattatgtcgcctcagagggatcccataccctcctcaaaaaaggaattttccagcatactttggtaccttaacaaacaaaattgtttatgaccgacttgcaccaggattgagggaagagcttaaactagctgcttctaaaagcaaaaaaagtggaagactacaccagcatttaactcaagaaatcgggcatccaaagcttagagaacatctttcgtcagtagttacggtaatgaaactaagcaacaattacgaggatttcgaaactaagttcgaggttgttcaccctgaattgccgaaaccttccatacgaaagtaa

SEQ ID NO: 167363 - DNA, 588 bp, Enterobacter cloacae
atgtgcgaatccgtccgtactgttcgcctgtacggtgttctaggtagtacgtttggccgtgaattccaactttcggtagcctcaccaaaagaagccatccgtgcattatgcgttatcgtgccaggcttcgagcgttttttgaataccagtaagcagcgcgggcttacttacgctgtattcagtggaaagcgtaacctgaacgatgatgaactctctatggatcagagtaccgctgatatccgtatcgcgccggttatcgttgggagtaagcgagggggtatcttccaaaccatcctcggtgttgcacttgtcgctgctgcaatctggatgcctggagtgggtatcaccgcaagtaacataatgttccagttaggtggagcaatggccttgggtggcgtagtacagatgctctcaccgcagacaaccggcctcgctagcaagcaatcggcagacaacaaggccagttatgcctttggtggagtaaccaatacgacagcccagggtaatcctgtgccgctcctttacggcaagcgccgtatcggtggagcgatcatttctgctggcatttatgttgacgaccagcagtag

SEQ ID NO: 167364 - DNA, 567 bp, Enterobacter cloacae
atggatggttatgctataaactttcaagatttgcttggattaagaaaattaaacgagcctggtttggacagaagggcgttcacagactgggctgaaaaccagatttctgccggcaatcagtcttcaaaccttttgattttggcatctttgggattggataaggaaatctcgaaagatgaggtgtttcgctattttgatggctacgttgatgagattggagaagtgatgccaactgaacgagtcgcgttcatattggcaatgcgactaacattcaaaaagctcgcctattctgaacttgaggatgatgtctggagtgagttaactagaacttttgttaaatggtatgacttgccaaatggccttttaaatagagtaatgacgtactggagcgcattgcatgatgattttataaataattatgaatatgaggctgggtattattacctgaactacccgcgacacggtgacattcctcgcacgaaacaattagagtatgttcgtaattgtgcaattcgctttctccgtattttcgatgaacactattattttggtttgcttatcaaataa

SEQ ID NO: 167365 - DNA, 339 bp, Enterobacter cloacae
atgaaaaagaccgtacttgcattatttatcacttctgtaagcctttcagttcatgccactgataacacgaaatccttgtctgatgaggcgttatcatatcaatccgaactaatatgcagtcctaaatttagagaagaagctgcaaaaccagactttaagattaaaaaaggattgattaacgcaactgatcctactcctttcaatgaagacgttctgaaagcttatcaggaagtcgtgaaggaacatccggggattgagaaaatcgtagtcgaccctaaaaatgttgacgcgtgtaaaccaaacgtcattgaaaaataccgtaaaaaacatccgctttaa

SEQ ID NO: 167366 - DNA, 306 bp, Enterobacter cloacae
atgatttacattgaacgccttgaatttattcataaaagtggagacgtactgtatcccgtaaaaataaccagaaaatcatcggggaaaacagctttccaccttgtgccattcggtctggataagactgtggatcttgttgaggtagaagatcctttagaagccattaggctggttattgatgagagtcattccattcgctgcagcaccctaaccgctactattactgataaaaatggcaagcggattaagcgaacaggtatatatagcattaacggggttaacattagagaatacaacgtcaggtaa

SEQ ID NO: 167367 - DNA, 126 bp, Enterobacter cloacae
atgcgagtcgttgttttgcctgctttcgtgctgccgagactgcgcatggacgggttgtatctttattatccgcacggcaacgtgtcgcctgcgcttagagcggtgattgatacgcttaaaatttag

SEQ ID NO: 167368 - DNA, 537 bp, Enterobacter cloacae
atgtcgacgggtcaggctatacttgccgccatgcacattcatattcgccccactacccctaacgacgttactgccctgcccgccattgaacgcgcagcgggcgaacgctttcgtgaagtcccggagctcgcctggcttgccgacggtgaagtcatttccgccgagcagcatcttgagtatgccgaacgtgggctaagctggctggcgctggcgaacgaccgccccgtagggtttatcctcaccgaagtgcactcttcgtcgctgtttatcgtggagctctcggtcggtctggactggcagggaaaagggataggccggcagctcatcgcccgtgcggctgagcatgcccgcacgctggggctggcgtcgctgacgttgacgacgtttcgggacgtaccgtggaacgcgccgttctatgcaaagctgggttttgaaaaaatgaggacgctgacgcctgaactgcgtcagaaaagggaagaagaggcagcgcacggtttcgcgtatgaaacgcgctgcgccatgcgcctgcctctgtaa

SEQ ID NO: 167369 - DNA, 1098 bp, Enterobacter cloacae
atgttcaaatcgttaacacaccgaatgacggtgagcagttcgtcgggtttagcgctcgcgggcctgttattatcgctgagccagacatgctgggcggaagaatgtcactttggctggtatggcgaggggggtaccacaacgctggtcaatggccaatggacaaagggtccggtacgccttcctccggcggacgttgtatttaactctgtcggcgatggcggaacgggtgtctcaatatcaccgggcattcaggttaagtgtgatgcgggaacggatggtgacagcttttatacgcagacggcaccgggcctcataatcggcaatgaacacggacacgctgtctttgcaacaaacatcccgggcataggctattcggtatacgtccatactgatgaagttggcggaggctatggtggatactttggaatgaacaccaccggctggcaagaccaaacaggcggctttcccgtgtcgaactgggcagataaatggatgacagcaacgatctatctctttgctggcccaggctataaaggtaacccaaataaagaaacggtgataaaacctaaagccgggacgctgggtaagatgggagttggcgatcccaacgccagcgaccacaagccctggacatttatggtggatgaaaactcattccagatccctattattctaccgacctgtgacactgcgatgataacaggtggctccaacacggttaatctgggtgattattttgcttccgacattaagaataacaaggttaaagatgtgccctttgccattgaattaagcgactgcaccagtgcggcaaaattcaccacgaagctcacgaccaccaaagcgacaggtctaaacaatgaccttctgggaaatacgctatcgtcggaagctgagggggcaggtgtaaaaatcctgtataacaacggaacgtcccaactcattccgaataactcaaactcatcctatgtcatcactgatgacaacgttccagactggaaacaaattgattttattgcccagctggtaacaaatggcagcacagtgaagcccggcgcgtttaaagccaccggaaccttcaccctctcttacgattag

SEQ ID NO: 167370 - DNA, 564 bp, Enterobacter cloacae
atgaatttcaaaacaacctttatcgccctgtccgtttctgccctgcttttctctggaatggcaaatgcagccattaccggcacgggtagcgtcgagatgaccattaaaacaaaggtaacatcaggcacctgtacagccaacgtacttaacgatgcaggcgctacagcaactgaaatagcgtttggtgatgtatacaaatcagacctggtaaacaaaagccgtattaagccgcttaaaatttccttcaccaactgttctggcgtaactaaggccatggtttctgcgaccaagggttccggtggagaatgctctggactaaacaaggatggcgactcctactccggtggtttagcaacaggtttcgaaatctggtctggtaatgtggatacaggtctgcagctgaactgtaaaacgccgccagccgcgcaggaagtgaccataaataatggtgcaggtgagttcccaatgaactcccgtattgtgattgccaaggataaaaccattaacgatgttggcacgggagccgctaacgcaccggtaacctttaccatcgcttatccataa

SEQ ID NO: 167371 - DNA, 576 bp, Enterobacter cloacae
atgggaaataagacgaagaaacaacattgcggatattcattattcgcattaacgatgctggctacttctgcttcggcaacggagttaaatgttaatttcacggccaatattcacgaaaccacgtgtgatatgaagctagagggtggcacgggctcagacacacagcaaacattgacgataggtaatagcggtcaggtacgtcttgacgatgtaaaagcgggcaacgccagcgcgaattttaaaattatattggttgaatgtccttcctcgctgaagacattaaaaaccacggtaaaaggcacggcttccggtgttatgccgaccggactggctaaccagataacaacagccaacggcggcgcggactattctgccgttgaaattgccagagcaagcgcgccaacggctccatttaaaatcaactcgaccgtggatacagagcgtctggtctggagcgccaccgaaatacaaaacaaagaggtacctttaattgccactgtacgtgaaacaaaggcaggtagcatgacaattggcgattttcaggccgtagcaacttttgaatttagctacgaatga

SEQ ID NO: 167372 - DNA, 615 bp, Enterobacter cloacae
atgtttaagaaaacacttctaactgcttctattatcgttatggcaacgggttcaatttcagcaatggcagccgatccagttccttctgatacaggtactgtaactttccacggtatggtttctaacaatacctgtaaagtgtctctggatcagaaaatcgatcaggatggtaacgatttcgacgttaacctggacaccgtatttgtcaaagatttcgcggctgcactgggcaccaccagcaccctgggcgaaaagaaattcgctctgacgctgaccggctgtgatcctcttaccgttaagaaagcgtctgctcagttcgattcctgggcgggttcaacttcaacttccggcggcctgctggttccaccaacaaacacccagggagctgctaaaaacgtcaacctggtgctgtcaaacgatggcaactccgctaccgatcagatcaaactggatcaggctaacaacactcagagagccactgttgacgcagctggcgcaggcgcactgtactaccgtgtagcttatacccagggccagagctggaatgccaccaccaacccagtatctgccggtgtggttcaggcgcaggctgccttcactatgatttacgaataa

SEQ ID NO: 167373 - DNA, 1005 bp, Enterobacter cloacae
atgcgtcaatgttgttcagccaaaacggtgctctcaccactgctgcttttgctggcgagcgcctttttccattccgcccatgcggactgtacctttaacggcagctctgacgttgacgccgtggtgacgtttcaacttcctccggcaattgttattgcgcccgacacgcccgtcggcaccgtgatttacgacgccagcgtcgagagtaaggaggtgacggtggaatgtcatggcgatgcgcagattcgtcgcgggtatttgtatctcacggataccgatgcgcgcgaagatgtaatgcccggggtttatcaaaccaacgtgccgggtattggcattcgtgcggcttcgtcgagcgaacggttccccagctatagcgaagaggatcttatccgtcctgttcactatctgggatcgatagggggttcttcgcagaatacatcaacgtttcgcgctactgcacagctgattgtcacaggcgatattcaggaggggtatctggatacctcgcgattaacgtccgtggatattctgggcaacgcggtgatcggtgaaatgcacttttcccccaccagcgttcacattacgaccaatacctgtaatctggtcgaccgtaatatttatgtgcccctgaaaacggttaacgtgcaggattttaacgggcaatactcagacattctcaccgacggcagttttaagattgaaatcaccgactgcgcggcggggacaaaggtcgattatcagttcaccagcgcgggttcaacgggcgtgacgaacggcaatatcctcggtatcgctgccggagattccgccgccgcgggtgtcggcatccaaattctcgacaagaacaatacggtgctgcagtttgaccagaactatacggcgataaccagtacgcaggacaaggtccccgttgaaatccccctcaaggcgcgctacgtcaaaacgggggaggttaaagcgggcaaagtcgactccgtcgccacgttcgaggtgtattaccgttaa

SEQ ID NO: 167374 - DNA, 483 bp, Enterobacter cloacae
atgagtaaaattaaattttgttcaatattgctgttgttgagttccagtgccacccctgtacatgctaacaactcagtttctctaaattatgcaattggtaaggagagcggtgcggaatcaatgcatggtgttaatgtgatgattaaacataacattaatgattttgcattcctcgtgtctggaacatatgtacaaaatataactgacaatgatagtggttattttaaaaataagtatgcctctttaatgcctggcgtctcatataatctctcaaaagatttatgtttttatgggctggcgggtctgtcagcaggttctaaagtaaaggattcacaaactcatgaaatttatggagtagcatttggttctggaattctctataccctgactgataatatccaatttaatgcaggatatgaattaggtattgtagatgccagggagatcaacacctttatcgtaggcttggggtatatgttttaa

SEQ ID NO: 167375 - DNA, 1311 bp, Enterobacter cloacae
atgtcagttgaagcactaagcgctttcatcgctgagtacattgccggacgacggcaaacaaagctggaagcatttgataaagaggccgcaaagcgcagcgatacagatagcgcaactcttgcggcagaacgccgggatatagaacttcgctatgagccgaaagcgtggctaacggatgccgcgaagcgagccggacaaattaacctcgtgacccatgcggcgaagttcacccacggggattcaaaaagcagcagtatttacagcgaggcagtggcgaaagaagggtatctcggcagtgcagcgttgtcaggtctggaaccggacgccgtgggcaatgcagcagcacttgatgtggctaagctcatgcaaacgcgtactgaagatggcgattcccttctggcgagcctgaaacggggtgaccacgctgcgctgtcggcatttaccgatgatgataatcaggtaaatgagtgggttgcgggattctcgcgagcctacgctcccggaaaaccagcatctcataagctggcgaagcaaggctattttcctgttggcgatagttaccatattttaagcccgctgtttgccacctcgttcgttcacgcggtacaccaaaaaatggttgccctgaggtttggggaagagatgaaaaacatctggaaagcgcggcgcgagaaatcctggcatcctggtacgctaacgcttttccctgattcagcggaaatgcactttgggggcaccaaaccgcagaacatttcctatctcaacagcgtgcgcggtgggcgtgtctggctcctgtcctgccaaccgccgcagtggaaaaagtcagtcaagccacccacggctttacgttccctctttacgtcagggagtcagttcgatcgccgcgcgaagggcatcgttcaactgcttgcttcattactgactcgaaccggtgattataccaatttccgtattcgtgaggcgcgtgatggctatatcaatgcgcttatcgacctgttgttcgacgtggcggcacagcttcaacaggaagcctggcaaaactggacgttaaaatgtcctgagctggaaaacaatcaaaaactttggctcgatccctggcgtacaaaaacagacgaagcttttcgtcttgagcgagacaaagatgactggcagacccgcgtggcaacggattttgccgtctggctgaacgtgcgtttgcgtaagtcggtgaaggaattggggaaagaggaacaacatgaatgggaaactctggaacgttttcgcactaatctgcgcgaaatggagaaaatccttcaggaggcgctgaaatga

SEQ ID NO: 167376 - DNA, 987 bp, Enterobacter cloacae
atgggacaactcgtagacggcgtatggcaggatgtctggtatgacaccaaatccaccggaggtcgcttcaagcgctcagtttcggccttccgtaactggctgaccgccgacggtgcgccaggcccgagcggcgaaggcggcttcgcggctgaaaaagaccgttatcatctttatgtttcgcttgcctgcccgtgggcacaccgcacgctgatcgtgcgcaagcttaaaggtctcgaatccttaattccggtttcagtcgtgaacccgctgatgctggaaaacggctggacgtttgacagtgatttccctgcggcgaccggcgacgatctttaccaccacgatttcctttaccagctctatctgcgcgccgatccccactacaccggccgcgttaccgtgccggtgctgtgggacaagaaaaaccagacgattgtcagcaatgagtctgcggaaatcatccgcatgttcaataccgcgtttgacgcgcacggcgcccgtgccggagattactatccggttgagctgcgagagaaaattgatgagctgaacagctggatttacgacaacgtcaacaacggtgtctacaaggccggtttcgccaccagccaggaagcgtatgacgaagcggttggaaaggtgtttgaatcgctggagcgtctggaacagctcctgggcaagcatcgctacctgacgggcgatcgcctgacggaagcagacattcgcctgtggaccacgctggttcgctttgatccggtgtacgtcacccactttaagtgcgacaagcaccgcatcagcgattacctgaacctgtatggtttcctgcgcgacatctaccagatgccgggtatcgccgacacggtcgacttcgaccatattcgcacccactatttccgcagccacaaaaccatcaacccgacgggcattatctccattgggccgtggcaggatctggatgaacctcacgggcgcgacgtccgttttggataa

SEQ ID NO: 167377 - DNA, 492 bp, Enterobacter cloacae
atggccataccagtttatctctggctttacagcgaagaagagaagcagctaaaaggtagtgttgatgtacatagacgtgaaggtagcattgaaataaccggtttttcacacggcgtggagatacctacagatgattactccggaaaaataacagccacacgccaacattccccctttgtttttacaaaagcgcaagacgtctcaagtccttacctttatcagatcgttagtacgggaagagttctaaaatctgctgaattaaaattttatcgaatcaactatgaagggcaggaagaagaatattttaatatttttatggaaaatgcacgtattacctgcattgtgccttacatggaagatgttaaggatcccgacttcacacattatgatcatatggaagccatagaaatgacatatgaaaaaataacatggaaatatctggacggtaacattgtccattccgatagctggaaagaacgcagcgctgcataa

SEQ ID NO: 167378 - DNA, 2580 bp, Enterobacter cloacae
atgaaattttttattgattgtttagcaagaaaaattgacacctcaaaaagtgattctgatttcgctttcttctttaatcttttaattgccggagaggctcttacaaaattaattacattaatgataactgcaagtcttaaaaaagatgtagataggcatcaatatcgaattttatatggcttagtaagaactagcggaataggtgagtggagtagagcaattgatgacttgcttactgggacagcatcacaacatttacctgaaagcatgagggtttatcaagcagaattaacaaagaaaacaactaaagatgaatggcaatcacaagccgtgtgtgaattgatggaagcgcttaaatgtttgaaaattaatttagaatccatcccagagaaaaaagatttaaaattatggtttaaactattcactgaattaagaaacaaaacaagagggcatggagcaactattacaactacagcctctgaaatggcatttcatcttgataaaagcttgagtattattttagagaatctgtcccttttgcaggtgccagcagcgtatctgaaaaaaaacatgaatggtaaattccgcgttacaaaaatttcaactcttaacgaacacatggagttattgaagcgaactgatagttttcattatgaggagggggtatatatatatttagacaaaatgataaaaatacctttgctcaaaagtgacccagatctatctgatttttatcttgctaacggtaatttcagtactgttaagtatgaaatgctctcatatttaacagatgatataatatatggtaactcagaagaatatcttgcaccaaaaggacaattgccgcaaagtgagtcagaagggttaggagagcttatagcatatgaaaattgtttttcaaatgttcctggtttgtcgtatgaatatattagaaggaaggctttagaagatgaactctatgatcttttagttaatgataggcatatcgtaattacacttttaggtcgtggtggtatagggaaaacatcacttgctttgaaagttataccaaggttttatgaagaaaaacattttgatgcaatcatctggtttagttcaagggatatagatctatcttctagtggtataaaacttgtaaattcaaatgtgattactcaaaaagatatagctatgtactatgctaagcttctcaagtcggaatctgaggtgaatactaaaggttttgatgctatttcctatttccagtcgcagctatctaactcggatgctggatctactcttttcatatttgataattttgaaaccattgacaatccagttgaaacttataagtgggtagatacttacattcgccatccaaataagatgctgattactactcgccttagagatttcaagggcgactatccattacaagttcaaggaatgagttacgacgagtcgatggaacttattctactaactgaaaaaaaacttggtattaccgggcagctttccattgaaagtaaagagaaaatttataatatctccgcaggacatccatatataataaaaatattaattggtgattttgctaaaaataagatgaagggttctttagaaaaattaattgccggtagtgatgagatattgacggcactttttgaaagaacttattctgtattaagtccttgtgctcaacgagtgtttctaactttatcttcatggaattctgcggttcctcgattaggcttggagtcggtgttaatgcattctatcgaagatccacttgaggtggaaagatcaatagatacacttgtgcaatactcaatgatagaggaaaataaagcagaagatggtttttattttctacaattaccttatgtagcttttgcttttggtgcaaaaaaattaaaaattagcccgttgcagcatttaacaagtatagatgtctccttaataagaaattttggtgttactaatattgatgataaaactatttcgctaaataaaaatcttactaagtatttatcttgcattcatcataatgatgaatttttcaaaactcatagaggtattcttgagaagatttgtttaacatatgttgaagggtggagattattagcaatatgggcgtttgaagctaatattcaaaggtttgatgaattagcaaataaatacattacgagatatcttgaagaagaaacctctgaaaaaaataaacatcatgcttggtttatgtatgcatcaatttccgagagacagagaaagccctatgaacagatacttggcttaacaaaagcatctgtatttgagaatattacaatccatgaattatcaaattatactaataaaataaataatacattcaagcaaaatgaaatggctttaggggaagcaataaaaaaagaacttctagaagggttgtttaatgtggtgtataaaagaaggactgaggcagatgcaaatgcttgttctagatttgcatggttagcactccatcttaataaagaacaggaagctagggaacttgctgaacttggtctaatgcaagatcctgaaaatcaatattgtataagacttaaaagacgtttcaactaa

SEQ ID NO: 167379 - DNA, 1215 bp, Enterobacter cloacae
atggaaaaagtaaaactgcggctttatcagcttacgctgattttgagccttatttcgcttgcgctcgcgctgctgagttcaggtaagcaacgagagtttttctatattgcaatttatgccagtattatcggtttagcttgcgaatataaaaaaatcacactgcgtcccttttctatcgcattacccattttgctgatagggttgctcaaccttatctggtatatggtgtatgaatatcatagcgaaggtttaaacgcttacagcgattatcttggtgccagtaagaaactgattttagcgagcattctcgttttctaccttgaccggtttaaaagttacgtcgataaaacctctttccaaaaatatttcctgtttgtggtaagtgccggatttgtccttgccacaggttatggcttgtggcaggcgacgcagggtgtggatcgtgttgagatggccataaatcgtcctaccgtatcggcttatgtttactctgtattgtcattggcgctggtatacagtctttatcttcaaaaaaacagaaaactgtacgtagtagcgggtctcaccatcttaatttcctggtttgtgatcctttttacaggaacacgcgccgcaatggggctatatttgcttctggcgattgtactcacactttaccacttcagaagaattcatcttaaatcgatgctaattttcttatgtatagtggccggtattattattgttagttacaaaccgctgatctcgccaaagatagatcaaacgcagatggaactggaaagataccaaaaagggtacgacgccacgtcactcggagcgcgtttttccatgtggatagtcggtattcagaacggactttcgcacccattaggacagtcaattgaagaacgcgaggtttggacacagcattatgttaaagagggacatccccacctgggttccgcactcggatttctcaggatacatctgcacaatgagtttatcgaaaaatattctctgcaggggatcccagggctagcgatattattctttttctatatttcgatgatcgcttacgcacttaaaaacagaaatggcctgctgctgacgaccatgcttcttttattactttatggcctgacggacgtcatactgttgagctcagaagccttaatcttctttgtcaccgtgtttgcgctgagcacacctttttcgcaaaccagacaacgtcaataa

SEQ ID NO: 167380 - DNA, 909 bp, Enterobacter cloacae
atggcttttctcagcatcattattgccgcacacaacgccgaaaacacccttcgcgccacgctggaaagtctgcaaaacgcgattaagaatgcaggtgatgatgtagaagtcattatctttaatgacagttccaatgatgcctctcaggatattattgagacgtggttaccaaagcttccgaatgcgcaatcccgatacgttgagtaccgtaacgtaggtcacgttcgaaacagcgcagtctctctggcgtcaggtgaatatatcaccatgctggatagtgatgacctgttgaaaccgggtagcattcgtgacgcggtggcatacctcaaaacagagcgccctgatatgctcctgacgcgcctgctggaaattcgtgataccaaaaaaatcaccgccgactggcaggggttctctcctgttgctttgtcacaacatgaggcaataaagcggttcctgcagcacaaagattttcaggcacatctcatcgggcaattcattcatcggaaattgtacgtaagcaacccgattccttcgatggtctgctatgaagatttcgccgtatttcccggtatgctgatgcaatcgagtaaaatagtctatcagcgtcatggacactattattacatcaaacgtagcgatagtttgtcgagccaactcgatgccagtaaaatcgcgacgttggttgattgcacattgcaaatggaaaaaacattcccgcattcttttaagcaacttgttaattgtcactggtttgatatctacagtaatcaccggcagcatctgactgacctgcaactaacactggtgaaacagcgggtaaacgcactttattctttcgctttcttcttatccagagatgtacgtttcagctacaaaaaaagggtcattgaagcattatggaaaaagtaa

SEQ ID NO: 167381 - DNA, 1068 bp, Enterobacter cloacae
atgtttaaaaagcttacgatgattgctggcctgctgggcgggtcagcgctgttctccggccaggcgctggcggcggctgcctgggggccgtgtacagcagattctatacacacattttctgcggtgctggacaaaacgatcaccgatacctcagagaatgcttcaggaacaataatgaaggacttctggtcctggagtttgggaggaacgtacaatgcagtttgtgaatgtccggcaggaacagaagaaacagctccagtcttttacaaagcctcgtcacctctcattccgggccaaaacgtcggagggcgtcaattttttgtggtcgacaggaatatacagatttctgcagacgtctggatcgatggtgacttcgatgattacaaaacaatcccattcgaaaaccaaagtaataatatatcagatagggacgcttgtgatgtgacttccagcgcagcgttttctacagggagtaaagggaaattaacgctttatattgatcaccctttcgtcgggcagctagatataccaaatacgaaaattctggatgtttatggaactcgtaaagagaatgtctatggagcgaccccgctgtcttctgttttctttagcggacgcgttattgtgccgcaggggtgcgagctttccagcggcagcacgctggaaattccgtttggggaatttaaggccagcgattttaaagaccgcaaagggcaaattgctaagaacgccacgaaatttaccaaagagctgcagtttaaatgcaccaacatctccgatggcgtaaagatcttcctgcatattgaggggatgccaaacgccaatgattcgaacgccattgatatgggcaacccggatatcggcgcggtaattgaaggggcgaacggtaaaattctggtacctaatgacgccagcgttaatcaggagatgagcgtatccgcgctggtcgatgacacgcaccgtaccgcctcaacgaccatttcggcgtacccgataagcacaacgggcaaattgcctaaggctggggaattcgaagggattgccaccatgcgtattgatgtggagtaa

SEQ ID NO: 167382 - DNA, 789 bp, Enterobacter cloacae
atgcatgagttaccgctgctgatatttacgctgttcttgcagggctcggttggcgtgacgctctggctggcattcgggggtgaacatgcttcaccgcctagcgcgctgctgccttctgtcggggcgtttgtgctggcgagcctcgggctgctcgcctcggcgctgcacatggggtatccgctcaatgccctgaacgcgctgcgccatgtttccagctcctggctgagccttgaaattgtctttgccagcctttatctcggatcgcttggccttgcgattttgctgttgtttacgaaaaagccgggagggaagctgcttttaactgtggcgggtcttgtcggggtggtggatgttttctgcatggcgcagatttacatgcatacgtccgtggtgacctggcaacacattaatacgctggtgctgtttatcggctcggtggggattatcggttcagcctgcatggccgttgggacgcgttctcaaactgccctgcgcgcggcggtggtcattatcacgctgctggtcctcgtgcgtctggtgctgcagcaagtctggctggcagacatggctgccgtggacaataccgtgatgatgttccctcacgctccgctgcagatgctggcgcaactgcgcaccgtgcatctgctgagctggtgcgtttccgttgcgggcatgctgtgctttgctgcgggcggtctgaaagcggcgcgcggcccggtgctgctgggcagcgcgttgctgattgcgggtgagctgatgctgcgcttcgttttcttcagtattggctga

SEQ ID NO: 167383 - DNA, 876 bp, Enterobacter cloacae
atgggcggattaacgtttgcctcggcgatggacgtgacgcatgcgtgcgtccgtcgccgttttcgccgcgctgcctgccgcgcctgtgcggacgcttgtcctgcgcaggtttttacttttacggacgcgggcgtttcggttgatgagagtcgctgtattgaatgcggtgactgcctgtttgtctgtcccactggggccattaccggtatcgcaccgcgaaaacgctttctgcggaaggatacccttgtagggccttttactgaacgtgcacctggggtgaatgaactgcttctgtggcacgcgcaataccacgttcgttttatcagtatcgaggcggagcagcaccctgaatggatgctggcgcttgcccggcttaatcttgtgctccggcgccgtggtgaaacgtcctggacgtttaagactgtcccgaacggtgaggttaatatcgcccgccgtgcgcttatgcacgttccacgggaatatgtgagagggtgcaccgtaatgcctggtcagcgagagctgagaagggcattcccgggatttagcgagtcagagatcgtcctcaggattgggaagtgcgtactgtgcggggcgtgctggcgaagctgtacggaaaacgcgattcgtttcgagaacgccgcgctggtcgttgaaaccgggcgctgtaccggctgtggagggtgcgaagcggtatgccagcatgacgcgataaacgtgacgcatagggaagggatagcgaaaagtatcgccactccagcatatgaggcagtttgccagacgtgtcaccgtcatttctggtcatttacgtctgatgaaaagcactgcccgctctgtgtacaccatcattacggtatgcgaaattcggcctgttgctaa

SEQ ID NO: 167384 - DNA, 786 bp, Enterobacter cloacae
gtgaacgcgacccatatcactgcatgggtgaatctgcttcagcaaacctgcgctgatataaaaatgacccaccttgattttattctcgaccagtgcggtattgatttttccgtcatccctgtactgcgggatttttcaccgcctctggtatggcaatctctttatcaaggtttgccggaagaagccctacctgaagagtcgccgctgttgatcaggatctctttaaacgatcctcagcagaagcagtggtttattgaactggctcgggaagtacaaaagacagccccgctgttggtgctctgttctccctggccattcactactctggctgaatggttaactacctgcaccgatgcgacacatgaggaacgtgcaggcctgttcagatactttgatgcccgtattttcccttacctgttttctcatattctggaaccggatcagcaggcccaactgcagcgtccggcactgttctggagttggctggatctcgacgaaaagccggggttgctgatggggcagggagcacagcccgcaatcaacgagaagtgtaagaatatcgctttgcgcgatagtcagtttgaagccctgatgtgcatctgtgacgtcaagctgatgcttcgccatcgggatgttcctgatattggatttgcctcgcaggatgaacggtttactgcctgcttcaacggtatgctctctgccaccgccaaagggataatactggataaagagcgcgaggaatgggtaattgggaccctgaccggacggccttcagcagaagtctga

SEQ ID NO: 167385 - DNA, 510 bp, Enterobacter cloacae
gtggtactgggtgccctgctgctgacgggatgcagtcagcctgcggcgaaggctgaaacccggagtggcggtggtggaaccattgttgccatcaaccataccaaatgggcgatcaaccatttcagcgtcgatggtcagtcggggatagacattatcgggccgtatcagggcggcggcggtggctgctgctatggtgtgccggcgaggtggcggccgggtatgacggtgaaagtcgactgggaaacagggatgggggggcaaaggggtttcccggctttgctgattgggaaaaatataaggcctgggaaaaaaatgaaggcccagaataagcagcacagcgcggtggtaccggtgccggactatacggggcaaaaaacctgcgggatcacggtgcactttatgccatgcgatgaggtgaaagtgacgaccagctgcgtgagccccggcaggccgggctacccaatcaacgagccgctgcagatgccggagccaaaagtatgtccgaaataa

SEQ ID NO: 167386 - DNA, 531 bp, Enterobacter cloacae
atgaaaatacgacattacctcgtggctctgggtgctctgatgctggcgggctgtagccagccgacggcgaacgcggaaagccggggtggcggcggaaccattgttgccatcaaccataccaaatgggcgatcaaccatttcagcgtcgatggtcagtcggggatagacattatcgggccgtatcagggcggcggcggtggctgctgctatggtgtgccggcgaaatggcagcccggaatgacggtgaaagtcgactgggaaacaggagttggggacatggatggttttcctggctttggtgacgatgccaagtatctggcctgggaaaaaaaaatgaaggcccagaataagcagcaaagcatcgtggtaccggtgccggactatacggggcaaaaaacctgcgggatcactgtgcactttctgccctgtgatgaggtgaaagtgaccaccagttgcgtgagccccggccggcctggctacccaatcaacgagccgctgcagatgccggagccaaaagtatgtccgaaataa

SEQ ID NO: 167387 - DNA, 234 bp, Enterobacter cloacae
atgtccgaaataattaccgatctggcgtggttcccgccggtatttcctgctcaggggcgtttacccacccagtctgcgctggttggcgcaagctgcgcgcagcaggacaaccaggagctggcctaccggcaggagctgtgcctggccgccgggcgacgcgtggagcccccctgctgtaaaactttgcatatcagcctgttttttgacggcaccggcaataaccttaataactag

SEQ ID NO: 167388 - DNA, 534 bp, Enterobacter cloacae
atgaaaatacgacattaccccgtggtactgggtgccctgttgctgacgggctgtagccagcctgcggcgaaggctgaaatccggagtggcggtggtggaaccattgttgccatcaaccataccaaatgggcaatcaaccatttcagcgtcgacggtcagtcggggatagatattatcggaccgtaccagggcggcggcggcggctgctgctatggcgtgccggcgaaatggcggcccggaatgacggttaaggttgactgggagagcggagaagcctcaatgaaaggttttcctgggtttgcggatacagctaagtatcgggcctgggaaaaaaaaatgagtgctaataatcggcagcacagcgcggtggtaccggttccggactatacggggcaaaagacctgcgggatcacggtccactttatgccatgcgatgaggtgaaagtgacgaccagctgcgtgagccccggcaggccgggctacccaatcaacgagccgctgcagatgccggagccaaaagtatgtccgaaataa

SEQ ID NO: 167389 - DNA, 2451 bp, Enterobacter cloacae
atgtccgaaataatcaccgatctggcatggttcccgccggcgtttccggctcaggggcgattacccacccaggctgcgctggttggcgcaagctgcgcgcagcaggacaaccaggagctggcctaccggcaggagcagtgcctggccgccgggcggcgcgtggagcccccctgctgtaagactttgcatatcagccttttttttgacggtaccggcaataacctcaaccacgacttatatattgctgacccgaagcaccccactaatattgcccgtctgttccgtgcaaccatcggccagggctatgccggggggctggcggacaaaaaagcggagctgctggatgccagcggcagcggtgatgataaatactacaaatattatattcccggcgtcgggacgcctttccccgaggtgaacgatctggatttcagcatgatggggctggcggctgcgacccacggggaggacagaatcaactggggcctgctgcggattatcgatgccctgaagcggacgatgggcctggatgcgctgtcggacgacgaaagctggacggcggtggacaaaatggggacctcgatggcgtcttttgggctgaccggcagcgctaaccgttttgagaccttccagagcctgctaaaggatatggcaccagacctgcaaaaggccctggtacctgtcgagcccggaaagccgaagctgttaagtgtcaagctgtatgtgtacggcttttcgcgcggggcagcggcggcgcgggcctttgtccgctggctcagcgaactgttaccaaagcctgaagagggaaaagacaagcccgagcagtgtctggcggtgggggggctgaaaattccactcagcgtggagtttcttggcctgctggatacggtggcctcggtgggggtggcgcatatcgccccggttgctgaagggcatatgggctgggcggacgggacccaggagctgccggcagagaaggtctatggcgggttaattaaaaagtgtgtccatctggtctcttcccacgagcagcggctctgcttcccgctggattctatccgccgcccggatggtcactatccggcgaacagccaggaagtcgtctatccgggtatgcactcggatttaggcggggggtatccaccgggggatcagggaaaggcgaatgctgaggatgacggtttgttattatcacaaattgctttacacgatatgtattcatcggcgttccaagctggagcaccattaaaagtgcctgaggattctttaccaagtgaattaaaaagtgacgattggaggaaaatgcctttgagcgtaggtaaagagttttttatcgatgaggttctttccggtcgtttcaacgcctggcgcagtttaaccctcggtctgagctcgtccttagaccatatttctcccgaacaagccgcaaaatacgatccgccgcgtgcgccggtcagcctggagaaagcgctggaagatcagatgggctggatcaccgcgtggcgcatcaatcgctatgccgggggaacctacaagacccagcgcttctatgtcgattcggcggcgaacgggctggataaagacagcgatccactggtcagaaagcagtctgaggaagcatggaaagaagcacagaaaaaagttgacgatgctcgtaaggcagacattgccaaacataaacctgaagagggcttcctgatgctcccgccgggcccgaaggatttcgacgccgcgctggggcaaacccagctgcgtcaggccgccgaggagttcagggaagattacagcggcctctcccgatcggataccggtaactggctgtttaccgccgttgattcaatgagtaatgccatctttctgctgaatcacgacaatgagtacggcgaatggctcagcatgaaaaccgccggggacgatcgcgtgaaagtgcttttcccgacaaccggcgaagcgagtaacgcctctgagcctgccggactggtgcgggcgctgtttgacgatcaggtccatgattcccgcgcgtggtttatgcacaacgccttcggctcccgcgaaccctggggcagctatttcttctaccggatgatctacttcggcagccgcagcagtaagccgatgacgccgttgatgattgccggggcggtggtgggggtcgcgacccttgccgcaggcgcggccgttatcatcaaacagaaaagcgcgaagggcaaactcgctgggcttgccggtaccgtgggggctgtttacctcgaaacgcaggccatcgatctgctttccggcaaaccgctgccgatgctgcctgaagccgctcagctgcaggcaccaacgatggagccaggcacggtggttgcacagcaaacgcaggttatcggcgagcagcggctggcgctggcaaaatcaatgattgagtccagctgggcggaaaatcttaaggcaaccgtaacggcctga

SEQ ID NO: 167390 - DNA, 1059 bp, Enterobacter cloacae
atggtgttgctgtgcgggggcgggggcgcgctgcttcatcctgccgggagcggtgccgggctggttataaaaggaatggctggcgcagtcgctctgatgggcgtgctctggttaatacgcctgctgtattaccgggtgtcggcccataacgcccggtattatgaacagctggttgagcaacagcagcaggcctggtgggagcagcatcaacaccgtttcgcgctcagtgaaatggtactgttgggtcctgtcggcaccgatacgccacactggctgcggctgctaaagcgagagcatcgggttcccgaggtaaaaaatgagtcgagcgggaaagcgttgcgtatcggtcgaacgctgatcgatacggtggctgaacgtgaggctttgctggcaaaaatgctggtgctgcaatggcagacacaacgcgcagatacctcccttccatacttattgcgctgctactggcaggggtctctggatgcctggtgcgcattctgtacgcaaatgcaggtttcatttccggacgtggtgcttcctgaaaaaccggagacatggcaaggcgaaaagacgctgtctgtacttgccgcaacggctcaaacgctccctgaaacagaggccattctggtcgccgggtgtcattctatagctgcctcgtttaatgctgcgcagcctgccggtgagtcagctgcactgtgtctggtcgcgcagaaagggctggtcagcctcacacggggagaggtttacgatatcgctggaaaagaggttttaaccgcagtctgcgagcgagcggagcagcaaagcaaactcgacaagcagtttgacgcctgcatgctgttctcacagccgacgctgcccgccctggcgcaaagcggctggaatgtgacccatcacgttcaggacctcaactgggggaaccccggtgatatggaaatgcttatcgtgctggttctggcggccatttacgcaaaaaattatcaagaaccctgcggctggatagccaaagatcctctacacaatctcgcacttggaattattaaaccttatggtgaaggaaaataa

SEQ ID NO: 167391 - DNA, 471 bp, Enterobacter cloacae
atgtcagtaaaatcacagttcctgaagaagctgcaggccagacagcccgttccggttttgcctggcagtaagagtcaggctgatatagcagagtttcgcctgagaatagatcagcttcagatgcagatggatgagtggctgacaggtaccggactgaacgtagagacactgacgacatcagtcccggacctgctggtggagagcggggctttcgagatttccggtatcgttctgcgttatgacagccgggtggtcaagtttatgccgatatttctgtatggtcagggagcagttggttgtgtggaggtgactttctgctcgagggaaagcgttatttctcaaggacgcctgttcatgcggatgggaagcgtaaataactggacctttattccctctgatacctcatctcagtcagcgcaactatttgatgaaggtatttttttcggtctgattttggcgctgttgccctag

SEQ ID NO: 167392 - DNA, 1341 bp, Enterobacter cloacae
atgaccacacataaaatattaaaaaccggcggcgacccgcgcacccttccggaatatacatccttgcgtaatgaactaagtaagttaagccatcccgcgcgcccggatgtgaactgggtatatgtggaaaaatgctgcctttcattattcgagcaaaacggcgttgaattgcagacagcagcctggtatacccttgcccgtacgcatctgtctggattggcgggcatgaatgaagggctcgcaatcctggaggcgctgattagtcggcagtgggatattctctggccgcaggcgttgcaggttcgtatggaaatcctgagcagtctgagtcagcgcctgcagcagctcgtacgtatgcttccattgaacaacggtaatcttagcgagctttatagcgctgaagagctgcttaccagcctgggggcggtgctccagcgtcttgagctcaaacactatagccagttcgatacgctacggacgctgatacattcaagcgcagcaaggctggaaaacagtaatggcgtaacagatttgaatgagagcaggccgggcagtgaaatgcctccggagagagctgagccgatcgatgaggtgaaatgggtctatgttgcgcagcaggaaactgagccaaatagtgaggaccgtatggcagctcccggatctgccacaccatggaaagcctttgttgccgggatgagttctacgctggtggtttgcatcgccgtggcgtggggagcaggctttctgtccagacccgatcccttaacggctcaggctattgcctcgctagcgccgttacctgaagtgcttacacctgttcagcaagacgcgttaatacagcgaggtactttaccggccacgttaatcacagatacgcagcagcagcttgcccgactggataaactgcctcctgactggaatatttcatacagccttcagctattagcacaactccagacattgcggccggaggaggctaaaccgctcacaatgcagtggcagcaaaaatttaacgcgacagccttgcctctggacgcaatgaacagctggtatcagggaatgatgaagcttcagcagctgagtaatcggctgagtagtcttgatgagcaaaaaggaaaatatataacggtgagcgagcttaaatccgtggttttttcgacgatgcagtcatttaaccatgcgataccggctgaagagcagctcagacgcctgtcgcagtatcctgccggaaatgcgcttcctgaagctgaaaagacccagctggagctgcatcttaaacaactggcagcacggtatgttctaataaaacagggttcttcaattctggcggcggacaggtga

SEQ ID NO: 167393 - DNA, 714 bp, Enterobacter cloacae
atgagtaagaaaaaaagctatgcaaagttggccggactgatgctgatagcggggtgcacacaagcgcaggacgcgccgacacaggtaatctaccgctttgacgctcaccgctatttggaactgaagggatggaactgccagggcgcgttgtactacgttgacccggtgcgcggtatccgttctgaagtcgccagccagttttaccgggcgtttgctgacaagtatgtgcatccttctgaacgatatatcgctatcccatcatggcaaaccagtgcatttctggtatctaaagactatggctctacatggcaagttgcaccgtttaacaccggttttcatacggtcgaaccggatggctcaaacagtccatccagagaaaatatgctctcgttcacggtcgttaacgatcagggctttctcttaacccgccagggtaatctctacatgagttcaaaacccttcgatgacccacggattttgcccggtggcccgggtattgattatgtcgatgaggacggcgataagcatcaccttcgaccgggatttgccggagcagcctgggggctatcgtacattcctccgaagtctcttaaatacctaacggcttctgagttgtcatactggcaggacttgccgacccgcgtacctgaagtccgtgactataagggctgggatcatatgcagtgcaacccggataaagggtttaagtcatga

SEQ ID NO: 167394 - DNA, 717 bp, Enterobacter cloacae
atgatgaataagcacaggcgctatgcaatattggccgggctgatgctgttggcgggatgcacgcgagtgcaggacgcgccgacgcaggttatttaccgctttgacgaccatcgttacctggaactgaagggatggaactgtgagggcgcgttgtactacgttgacccggtgcgcggtatacgctcagaagtttccagccagttttaccgggcattttctggcaaatatgtgcatccttccgagcgctacattgccattccgtcctgggatacggatgccttcgctgtttcaaaagattacggaaaaacctggcagtcagcaccattctctccggctacacatagtgttgaacccgatggaacaaccaggccatccagagaaaatatgctctcgttcacggtcgttaacgatcagggctttcttttaacccgccagggcaatctctacatgagttcaaaacccttcgatgacccacggattttgcccggtggtccgggtattgattatgtcgatgaagacggtgataagcatcaccttcgaccgggatttgccggagcagcctgggggctatcgtacattcctccgaagtctcttaaatacctaacggcttctgagttgtcatactggaaggacttgccgacccgcgtaccacaagtcagaaactataagggctgggatcatatgcagtgcaacccggataaagggcttaagcggtga

SEQ ID NO: 167395 - DNA, 339 bp, Enterobacter cloacae
atgaaaggtcatgcgctgaaaatatcttctgccgccattgcgttaataaaaaaacatcagggtctttctctggagaaatatcgtgacgaaaacggattatgggttatcggctatggccacgttctccgcgatcgggcgcattttcacggtcccatcacgcctgccgaggcagaagatttgctgcatgacgatattcatcggtgtgaggcgctgctgcgggaaagtgtgacgcgtccattaacccaacagcagcatgatgcgctggttatgatgatattcagcttcggcgagatgccttcgctcccaaacgcgatttttcaggccgttgcgcgggtataa

SEQ ID NO: 167396 - DNA, 408 bp, Enterobacter cloacae
atgccattcaaaacggctactaaatggattcactcccttgtggcgctttcgcttctgattctggtcattggatttgtatggctaaaccaccagcctaaccagcgaactaaagatgaacttcagcgcgtttataaattatcggacagcgtctggctctatatgaccgtgaacaatgaggggggcgcaaccgtgcccacaatctatcgttactatctttcaggggggatagcaggaaaagataccgacattattcatcaattggccatgaagcatcctgtcattgaaggtacaggtacgatcaccgcggccaaaattgatacaaacggagaagttaaaatcacctatagcgggaaggtaatttcgattgagagcgatatctccgatcttcagttctcggttaagccctga

SEQ ID NO: 167397 - DNA, 270 bp, Enterobacter cloacae
atgaataacatcgcccggcgcagtgccgggcaaatagatcagaaaatcattttgaatacgccggtaaccactaacagccctatcaaaaatataattaaaataacccacaggaatattttcattcccttctcctgcccgtgtatgatactgaataagtgtagcagccaattcataattcgcatgaatatgttgaatttattcattgtgattggaaataaattgccgaatatgaaaatgtatgacaatttgcggattgccacgcgttactaa

SEQ ID NO: 167398 - DNA, 471 bp, Enterobacter cloacae
atgaaaaaaacacgcttagcagtagtcatggcaggtgctactgctctgctttctgcttgtacgtcgcctgctcagcgcatggctgaatgtgaacgccaggggattagcaaaaatacctgctacctcgctgagcaaaaccgccagaatgcctacaatgaagccgcacaaaatgcagcatgggcgaacgcgcgtgatgccgctgcgggtaagggtatctgggctaagaaagacgcgaaacaacatgctcaggcagctaaagcaacgcacgcctttaaatgggaaaagatgacgatcacgattagaggggagatattagatgttgacggtgtattaggtgcgctggatgaaaacgagcctcaggcaaaggtttattcgcaagggttatacaccttcatttactatcctgttaaaggcaaattagcggtgagtaaagaaggtcagttccagggctacgccagaaagattaaataa

SEQ ID NO: 167399 - DNA, 882 bp, Enterobacter cloacae
atgaaagtttttaataaatctgttattcctgtttttgttttaggggtggtagcaggtagcgccatgaatattaccgatgctgccgcagcctgggacgatgcatcaatcacaaatattgtgaatgatcatcaagaccaaattacgcaaaacaatgctgatagtattgctcgcgatctctcaactgacaatcgcttaactcaggttgatagcgaccttcaatcgactaaattaggtgttttgatcgttgatcaagccacaaaagaggctaaccaaaaagcattacttgctggtgcgctcgcagatactgcgaatcaaaaaagtgaggctgctttacagggcgtcatgaagaacggcactgaaattatcaatatggaaaacgttaacaaagtgcaggataaccgccttgataacctggaaagcgcccctaaacccactaacggtgtaaacggcgtagatggaaaagatggcgtgacgactaccgtaacgcgcgtgcaggtagacgcagcgacgcaaacgaaagtggccaacaacagccaggctgttactgccaccgctcaggaacttcaggcaacaaagcagacgttacaggcaatgaataacaacaccagtcagcagttcaaatcattacacgacgaagtggataataataagaaacaggccaacgccggtatttcgggcgccatggcgatggcaggtttaccgcaggtacaaacgaatcagcacgttatgttctctgctggcggtgcaacgtacaatagtgaaagcgcccttgccgtcggggcatccgttaacgtcaatccacatacgatcgcgaaagtcagtttctctgatgacaccgcaaataacatgggcgcctccatcggcgtaggggtcggcttttaa

SEQ ID NO: 167400 - DNA, 1386 bp, Enterobacter cloacae
atggaagataaaaattataaaaagttaacttgtttcaaagcctatgatattcgtgggaaacttggcgaagaacttaatgaagatattgcctggcgtattgggcgagcttatgcgcagtgcttatctccgaagcaggtagtgattggtggtgatgttcgtttaactagcgaatcattaaaactggcgcttgcggaaggcttgatggatgggggatgcgatgtacttgatattgggttgtcagggactgaagagatctatttcgcgacattcttccttgaagtagacggtggaattgaaattaccgcaagccataatccaatagattataacgggatgaaactggttcgcagaggcgcccgtccagtgagcggtgacactggcttaaaagatattcaagcgttagcagaagaaaacaaatttacgtccattacaacaaagggaagttataagaaaattaatatcctggacgcttatgttgaccatctgctgggatatatcaatcttgataatttccgcatcaagccgttgaagttggttatcaattccggtaatggtgcggcgggtcatgttatcgacgaaattgaattacgattcaaaacagcaggcattcctgttgagtttgtcaaagtacataatgaacccgatggcacatttccgcacggtataccaaacccactgctgcctgaagcacgacaggataccgcaaacgctgtgttagaaactcaggcccatatgggcattgcctttgatggtgattttgatcgttgtttcttgtttgatgagcatgccaattttattgaaggctattatattgttggtttgttagctgaagcatttctgaagaaagagcctggtgcaaaaattatccatgatccacgcttaacatggaataccattgatatcgttgaaagtgctggtggcatacccgttctttcaaaaaccggccatgctttcattaaagaacgtatgcgcatagaaaatgcggtgtacggtggcgaaatgagcgctcaccactatttccgcgagtttgcttattgcgacagcggtatgattccgtggctcctggttgctgagcttgtccttacgtcaggttcttcgctgggagaactcgttaaatcgcgcattgcaagattccccgtttcaggtgagatcaatcgtaaggttgagaatgcagctgagcttattgctgatattgaagcccgctattcaccgcttgctatcaatattgattatactgacggcttgagcatgtcatttgctgattggcgttttaatatccgtacgtctaatactgaaccgttgctccgtcttaatgttgagacggatgctgacgaggaattaatgataacgaaacgagatgagctgttagaactgattaatagctga

SEQ ID NO: 167401 - DNA, 1317 bp, Enterobacter cloacae
atgattgaagttttattagcggcgttaggtttaattttattctttattttcctcacgctttcgttaaaagttagactgctgctggttttagtttgcagcgttccgcaattatatttagtccaattgggtggggcggatgtcccacttgcttttttactgccagcactgcttcttcctgagtttttaaagaatgcgaaccggtttttagctaaacctgcaattttgtctttaatcggtctgatctgtattagtacaatgagtctcgcgtggtccgaagacaagtcaatgggtatacgcgatatcgcttatcttatagagtttatagtaattgcaaatgccgtttacgtattgggaataacgaataaatgggcgctttataaagttatcaatgctatgctttttgttatctgtcttcaggcagtaacagttatcattttcagattaaatgaaacactagagttatctatcgtactctctccagttagtaagtatttgatgggcatgaatacgctacagggcttgctggatggggccagaaataacttctacgatcctgtaaaagcaggtggcgtattattcgtgaatgcgaatgcggcggcttgctatgcaggcgtctcatcatttatggcctggggaatttataaagcgctcaactcgaagttcacgctgctgatggccattttattatgggtaacagtcttctttacaggctctaaagcaggcgttctttttgcggtacttattcctatgttcatcttctacctgaagcttcagcggcaaacaaagatcgttgtgggttcagtaggtgcctcattcgctattgctcttatcgcaattagcatgatatccagcgttgctgaacagagcggttttttgcaagaatcgacaaatacagctgaaacgcgctatgaaatttggaactatgcattcaatgcgtttttgaacaacccgctgatggggcagggctttggtggctgggaaattgactatagaaagcatacggattatttcctgcctccacacaataccttgatctatctttggtcaaaatctgggatcatcgcttcgcttatggggctgagtttcattctgaccagtattgctgttgcattgcgtgcagtcaaaaatatcaatccagaagcgaagaatctcggtttctccttattaatggttcttgcatggcaatttgcccacggctttggtgaaaactttggtctgatcggtgaacagcatcagatgataataatggcagtaatgcttgggttatgtatgacaggaaacatatcgatggcccgggagagtaagggacaacaatga

SEQ ID NO: 167402 - DNA, 990 bp, Enterobacter cloacae
atgcaaataattaaacagtgctttttcttactggttctgggaacggcggcgttatttatgccgcatgcgaaggcgacctgcacgtcgccggacctgccgaaaatgatcaacgtagcgtccatctccgtcccgacgacgctggccgtgggcgagacgattccgggcacggagcagatcgcccatgtcgccggtaattgtgataatgccacggacagcgggctggaaattatctcgtgctattacggcacgggtgctgaaatccccggtctgaagggcgtctacgactctggtgtacccggcgttggcgtggcgctgatgaacgatcagggccagcgcatcagcggtgccggcggtacgacctgcaactcaacggcaacgccggtgggctatgtctccaccgatggcaaacagtcctttaactttgacgtgacgcttgagctggtgaaaacaagcgataccgtctcgtccggcacattgatccaggcgcagactcgattcggtatcggcgtttaccgtcacgaagggatcggcgatcccaacgacattgcctacgcgggtaacgttattctcaaagcggtcacctgctccgtcctgccgaaaaacctgacggttaacctgggcgatttcccggtcagcgattttttgagcgtgggaatgctctcctctccggcgcagaatttcgatgtcaccgtgcactgcgacagcaccgtgcagccagaggtaaaagtcaccagttcaaacggctatgaaacggcgttcgaaggcgtgctgaagctgactaagcagaccggtgcggcaacgggcgtcggggtacagatggtgttcgacggcaatatcgccgcgtttgatacctacgttaacacccgcagcgaggccgtcgccaacgaaacgctgaccattccattccaggttcgctatgaacaggtcagcgatgtggtgacgccgggtcctgccaacaccgttgccactatcaccctcgcctataagtga

SEQ ID NO: 167403 - DNA, 297 bp, Enterobacter cloacae
atgtcaggaatggttttttgccgaggatgtggcaaggagttgcacagtaccgctaaggcctgtccgcattgtggcgcaagccaggttgcagcaggaagtaaaaataagcttaccgcagcattgctcgctttcttcttaggaggcctgggcgcacataaattttacttaggtaagattggccaggggttcctttacctcatcttttgctggaccttcataccgtcagtcattgccttcattgagtttattatctatctgtgcacctctgaagacgactttgccagaaaatatggttaa

SEQ ID NO: 167404 - DNA, 630 bp, Enterobacter cloacae
atgtctaccatctgtcttgctgcccagcgcagctacaccaccggggaggcagtctggttttcgtaccgccttcccagcctgagaaaagtcttcggcaacgcctttttatggacgttgggcctgtgcgccatgctaatggccggcgtgtacgcgcatacttactggagcctgcgtcatcctgcgccggaaccggtaaaaaaagcgagcgtcgcgaaacccgaaacgcagctttccgatatgcactatgtgtacgtgagcaagccgttcccgcatcctcatccgaaaccggcgccggtgcaggccgaggtccccgccatgcaggatctgccgattaacagcgacgatgctgactggcagcaggcgcccgacggtgccgaaccgcacgatacgtcgcgggatacgttacccggcaccgaagcgcatgaagtctcgcccgccagcgcaggcagtgaggatacctcgttaaccgagctgtttaagcaggcgttaaaagaacaggagcaagattattcgcaaggcaaaattcccgcgccgccggtggacgaaacgcaggataattcacagtcgaggctactacataaggtggatgaccgatcgccattgagtcagaaaggcgaccggctggagtaa

SEQ ID NO: 167405 - DNA, 1074 bp, Enterobacter cloacae
atgaacatgttccccacgcaggagaagtgcaccgtgacccataaaaaaaggatcgtcatcgtaggggctgggatcactggcgtatccatcgcatggcatctcgcccaccgtgaatttgacgtcaccctcgttgaacaggatatgcctgcgtcaggtgcaaccggtagcgcgtttggctggctgaccggtgtggtgaaggatgatgcggccgacgtgtttatccggcgcatcgcacttgcggactggcacaggctggaagaacacctaccggaacttaacattaaatggagcggttcgttaacctacggcgctgcatccgggtcctgcctgcaggacgaatgtctcctccacaaggcggagattgcccgtcttgaacctgctttgaacaatcctccctcagaggcccgctatgctgcaaaagatggtgccattgacgccgtcagcgcaacgcgattattgctcgacaaagcctgtgagaagggcgtcgtgctaagtacccaaacaaccgttacgggtctttacatgacggaggggaaggtgacaggcgtccagacctctcgggggaaactggacgcagattgcgtcgtactggcctgcggtacaggtattccagcgctgactgagcgggtgggtatccatgttccggttttgtcatcaccggccatattgctgcgctttgcggcctcccggaacgtgctcaacacgatcctctccggtgatgatattgaggttcggcaagcgcacaacggggatttgttagccgcagaagattacccggcaaacggcaacgtcagagaaacggcggaggctgcacaacgcgcggtaagaagcaggctcacgggcgcagagtcggctgctctcatccagtactcaacaggagagcgtcctgttattcaggatgggtatcccgttcttggttttgctgatgagagcaggacggtgtacgtcgcctctatgcacccagccgttacttgcgcagcgacgattggcagactggtctgtgaagaattatgcgactgccagagcgatgaaatcccgcaatgttacaggccatcccgctttaaaaataaatag

SEQ ID NO: 167406 - DNA, 582 bp, Enterobacter cloacae
atgagttgtcattttcaatgtgaactatatccgcaagcgacaataaaaatgatgggttgcacagaatccaaatattgcttatggcccgacaagaacgtgtacttgaaatgtggaacgcagctattgctaatgaatgcgcgttacaagcttctgcataatggccttatttttgttgatttttctcgttacaacatacgattgtttaccaataacaaatggattgagtatttggccaaaacgggtttgcgcctggtattgatcgctgacaggctcacgcaaccactggcgctgtactggaaaaagcgcagcaagcatatcgtgtcagttatttatgccagtgatactggaacagagattgaaaagaaaatacatctgcattttttagggaaaagggacgggcgggtttacctgccaacactaagcgataatgaagtccgggtttttgaactattggttgaggaaaaaacagtaaggcaaattgctgatgaattgtcttttccggaaaagaaagtctacgcaacaaaactcagcttgcaaaataagatggggggcagaggtaagttaaatattattttatcttga

SEQ ID NO: 167407 - DNA, 579 bp, Enterobacter cloacae
atgaaaaaaatcgtattagctggtattgcggcggccgctcttgtatctaccagcgcgatggctgatatcactgcttctgccactgcgagttgggatgccagcgcaaccaaagatacatccagcgttctggttgttaccccgctgaagtcactgacgttccagtacgcggaagggatcaaagcctttaacaaccaaaaaggcgcttttgatatcaccatcgaaggccagtctggtgcgactgactttaccctgacctcacaaattgtcagcaatacgctgagcagaacaacagatgcgtcaacgctggacgttggtgtgaactggaacggcacggccctgagcaaaacaacgccagtaacgatgatcgataccgctaataacatctcagccggtcttgatgcgctggcggttagcaccgcatatgccggtagcgaccgcgtgagcactcagggtcttttcgacttctcgattgattccgccacctctgatggtagtaccgctgccgagttcagtgctttaactgatggttactggagcggtgatgttcgcgttcagtttaccgctgtctggaccgtttaa

SEQ ID NO: 167408 - DNA, 678 bp, Enterobacter cloacae
atgaagctgaaaccgctattactctctctctttttactgagcgtcacgtcgccatctcaggcgattaatgtcggagaggtaacctcaataatgggccctgaagcatccagtcttgctaaggaaattattaacaccaccaatactgcacgttacgtcagcgtcaatgtagaacgtctgtcttctccaatggcggggggcgttattattccgatggagacccgatcggagttattgtcaacgccagcgagtcttatccttcccggaagtgcgaaagaaaattttcgttttttctataagggacctcaggataataaagaacggtattatcggctgtcatggactgatgagccggtgacggagtttgatgccagtaaaaagaagaaacagggagaggctaccacctctgctattattggtaccattctggtggttgcaccccgtgaagaaaaatttgattaccatcgtagtggtgacaccgttacaaataccgggaatgcgtctttccgcattatttcctatggaccctgccgggataaagccaaagacacagggcaaggctgtcgtgagcgctattatgtcatgcccggtatgagcgtcaaaattaagtacactgatctcaccagtaaaaagacacgaattggtatatggcacggtgagcaatatataaatgtaaactga

SEQ ID NO: 167409 - DNA, 2538 bp, Enterobacter cloacae
atggataatatcggttatgtcaaaggaacgttattcgctgggttattattaacaattaaccaagggtggtcagccaatacatcgacgccagtcagagtgagccactatgttatcccttcagtgtttgctaatgcgttatatcagggcatgactgtccctgtgttcattcgttatgaaggtgacgatagtatgcaacgtagccagcaaaagatagccgatgcaatccttaccattaaggatgatgagttccgcttaaaccagatagcgttaagcgatctgccgaagcgaacggaactgtcaccacacataaaaacgctgctcgcgggtttgcaggacaaaagcataggcgatgggcagcgcgttatgatcaataaagatgcctctctctcgcttgacactcgctcattctatcttgagctaacggttaaccgatcggctctgcaggctgccgttttgccacgcactaatatcctcggtgattcctccgcgcaggagttgtccagcgtgctgaattactctatcggaagctattacaataagtacgagaataccgatagcgccagtagctacctcacgctcgataatacctggtccctgcgggagcatcacctgaatataaacggttctctctatggcattggtaccgcaaaccaacaggcagaactgtatcgctccatgtatgaacgtgattatcagggacgccgcctggcaatgggtatggtcgatacatggaacctgcaatccattgccagcatgagcgccctgaattcaagccgtatttatggcatgagctatggcaataaaagcagcacacaaattgaggacaacacgctgtccctggtgcctgtcacggtgtttcttcccgccgcaggtgaggttcacgtttaccgtgacggtaaattgctcagcattcaaaatttctcgatgggaagctacgagctggacacgtcgcgtctgccgtttggcatctacaacgttgatattaaggtcattgttaacggacgcatagtgagcagccgtacggctaatatcaataaaacgttctcgcggaaatccagcaacaccggtgacctttcatggcaaatgttcgggggcagcctcgaatataataagatggattaccgtaatcacaataacctcaattacggtcagcagaatacgtggattgccggcattgccgccgcgaccaaccaaccctggctgtcaggcgtgaatcttaaaaccacgctgtacggttttgaccaaaatggcgtcaatgagacggaagccaatattattttcaataacgcatttagctttaaccagcaggcccttattggcaccgatagcacctggcaaagtatttccacgttcagtctaagtttgccggaagggtatggcaacgtgtggggatcgcgtcagtatagcgctatcggaaacgcgctaccgcttcagaagaatgactacgttaccgtaggggcaaccgcgaacctgcgtaaaatcgccccatttctcggtacgctaaccgttagccggaccaacaacaaatatacccgtaacacatataccaatgtcgattacgaccagtcattgttagcaaacagatatgcaacggtgtccctgcgcgccggtattcaaaattatcagtacgacaacggtgaaaacctgcgcgataagtacattaacattgacgtttctgttccctttgcaacctggttcagcacgggtgtttcgagccagaacggtaatatgctggctaacgccacgcttcgaaaacgctttgacaacagtgccattactcaggttggtgcctctgtatctaagcacataaaacaaaaaaacgataatgccagcagctatcgttccgatgactatgccactaatggtttcgtcagctatgacacgaaatataacgctggcaccgtttcagtcagtcgctcagcacagcgcagttccaattacagtcttagctcgcagggcagcgtggcctggacgcaaaataaactctatgccggcaaaggcaaccagactgcgggtctggttgttaataccggtttcagtgaacagggaagggtgatggctaaaatcaatggccaaaattatccgctaaccggcaaaagcaatttcatcagcctaccgccttacgcggaatataaggttgagttgatgaatgataaaaattcggaagacagtgttgatattgtgagcggtcgtcgcagcaatgtcgtgctctacccgggtaacgttagcgtgctcaatccggaaataaaacagctcgttaccgtctttggtcgggtgaaggataaacgtggcggttactacgctaacgccgatattcataatcacattggtaaaacgagaacggatgaactcggtgagttcgccatggatgtcgataaacggtatccggtgatcacactcatggataaattcggtggaatttgcgaagtggatcttgatctgaaagaagctaaaggcgccgtgtgggtgggggagatcccttgcgagatccagcaacagacagcatcactgactggagagggtaagcatgtttattaa

SEQ ID NO: 167410 - DNA, 1614 bp, Enterobacter cloacae
atgtttattaaaactcgtcgcgtcatgctgctgatgtgctggctgctcgcatcgcctgcacaggccctgacggcaagcagtagcggcagcggcagtaacacttatatgtttattaataataccgtcgatcatgaatatttcatcacgacaggctcattatccccgcgtttcagcggcgccaacgtctggacgaaatataagactaatcagcgtagtttgggatatatgggtaattcagggtggagctatctcaaccgttattatgatctgtggatcgacaactcgccgattaaccaaccttttttggggctccgctgtatgagtacaggggcgaattgcccagcctcgggatatatcactccagacgtcattgataaagatggcttttatcatgtcatgtccggcagcagcgttgagaatggcagctatggtgccgggacgctaagtccggcagcctacgagtatttccgaaaccagcccgtgggggcaacagatacgtttcagctgaatctttgctacttaaattccaatactgactacgattttgcctccggtacgcgctgtaaagatctcgcgagcggaggtacgtggcgctattacacgatgagccttgaaaaggtcgctcatttgacattgaacagcacggggtcaatggcagaagtgtgggtagcaagcgatggaaccccgagtattaatatgggttcagatttgtgccagattggcgtggtatcaaacgtaaccggggtcatatgtaagatggtttcttacaaccttcagcagacgaaaacgctgaccacctcgcttgacttccgcatggtcattgatacggcgttattgggattttcgcccggaacgtcggatgtaaaatacagtggtgatggtgccagctggaccaacttcggcacggccagtacctacacaaaaacgttcaccacctctggggaatacgtttacgtctttctgtctaacgccttttttaaaaaggtcctgacagctggcaccgacctgactaacaaggattcgcttttcacgttttattttgataattcagtgactccgcaatcgggttattatcagtttacaccgtcgacgctggttaacatcgttcctcgtgaatatggcatcagtattgtttccagtgacggaaactcagatccaaaagcatcgggaatgattggcagcgaagagccgatctcctttgagtataaagtcatgacgtctgcagcaaggcaggccgacagtattactgcacaagtaattggtgattccacaaccttaggtggcgtgccttactgcctgtttacctcaacagataatgacttaaaagttcctgtcccggcctatcttgaatggacttcttcatccggtggcgttgagcgggctcgtaacagctgtaatgaaaatgccgtcgatatgacaaacgccgcgtggactcagactgcgtggaatgccaacaacgacgatggctattttttctccacgacattgcgactcctgtttccaatggatgattcacgttcaaaactcacgttagacggtcgcgactggattggaaccgttagcgcaagcggtgagttaaaagtgacagccaaatggatcggtgtagaccgctaa

SEQ ID NO: 167411 - DNA, 684 bp, Enterobacter cloacae
atgatgaaatatatccttttaatcgtcttaagcgggtgttgtacgctccctgcttatgccgtatattttaactctattatttatgatatggatgccagtaaagagtttattgcgcgtcccgtcattaatgacaccactaaaacgaacttatatacgctatcggcttataaaatctctcgccctggaagcggtctggagccgcctgttaatgatatagccaaagatttggtctggtcccctttaaaattcaccgtgcagccaaatggacgcgaatattttaagctctattaccgtgggcctaaagatgacgtcgagagatactatcgggtgatctttagagaaacgccggttacgcttttcccgtggcgtgctgagcaaaagagaatggatttcatacctgtcgtttcgatgagtacaattctcattgtccgcccccgcaaaactcatctgagctatgagatagatgagcaaagcggcataataaaaaatacgggcaacacattttttagagtcatcctgcagaaagggtgcaatggtgatgacgaaagttcatctcaattttatatgcttccgggcgaaatctggaagggtactgaggcaaaaaaagaaaataagaattttattgttgcattaggtaaataccatcatttaggtaatggttgtttctccagtcaacaaccttag

SEQ ID NO: 167412 - DNA, 630 bp, Enterobacter cloacae
atgctaaataaagtcagcacagttaactgtatgggatgtagttttaactgcccacttataccagcaaagagaatggaaaggatttcttgtggagaaagacagttagcaatctggcctgatttgaattattactttaaacttgcaattcacgaacttgtctttaaggaattaacatgttatctacctaaaggggtaatcgcggttgatttttcgctggataacattttgttttttattaataaatcatgggcaaggacacttcaccagtctggactgaagattattctattgtccgagcacaatatgctacccatggcaaatttctggatggcacattcagaattttcatggtcagttgtagaagttgacaacaatttatccaatgtgatcgataaaattaaacgtgtcatgattggactgaatctgcaatgtaggcgcaccccctctctgacagaacatgagatggatacactgcgtttactcgcccaaggaaaatccagtcaggatatagcacgcattatgtcatgcgatacccgcagcgtttaccgcttccagtcttctctctgtaaaaaatttggagggctgaatcggctacgggatttgcgtctaatgcatgctatatatgactaa

SEQ ID NO: 167413 - DNA, 2004 bp, Enterobacter cloacae
ttgcttaaataccttattcgtgatggttatattgatgaaacctataccgactatatgacctatttttatgaaaatagcctgagtcgaattgataagatgtttttacgcagcattaccgatcaaaaaggcaaagagttcacttatcaactcaagaaccccaaactggtcgttgctcgccttcgagaagtggattttgaacaggaagaggcgcttaattttgatttattagcttatctgcttcaaacgccagcccaagtaaacttaataaaacgtttattcaaacaactaagaaaagatagaagagttgagtttattcgtggctactttgaaactgagagggctcagcctgtcttcattaatcgattaaatactcagtggcctgagtttttttcttatgcgctgacagagagtgaattttctgctgattgggttaaactctactctataggcacgttttattattctgccaatgacgccatcgaagccattaatattgatgattgtctgactgattacatctctgattcggtagaatatttagcaatatcagaaccgaaggttgacaaattaattagtggttttaagttgcttaacgtctcttttgtcagtattaaatttgaaaacgcaaataaagtactctttgatgcggtttaccagcattcactttatgatattaattttgccaacctgaccttaatgctaagtaaggtttacacgcttaatagtgaagatgatattcgccataagaactatacactagtgatgtcacagcctgattctcccttggctagttatgttaataaccatattagtgactatctagatatggttttatctagttgtgatggttcaatcgtggatgatgaagccattgttttatccgttcttaataatgagggaatatctgatgaacaaaaaggccagtatataaacgctttgcaaactttcgtgacatctctgagtgaggttgagagcgaatctttatggtcatctttgttggataaagatagaacagtgtgctcagaggaaaatattgtctcttattttgaacatgttgatgggctggataaaacacttatcgaatttatcaatagaactgataccgagcttgacttaaaaaaaattgatattgaaaacgagaagaaaatcaaattatttagatcgattattgtctgtaatgatttatcaaataataaatatgatgaattaatttgctcgctaaatcggatttataaaacctcctttggcattactaatattgctggtgataagtttaaaatattagtggataagaacattattcgcatgagtatgagttcacttgatttcatacgagataattatcctgaacaaaataactactacattaagaaaaacatccaaacctacgttgagttaatgacaattgagagttttgtcttagatgaagccatatcgatactttcttggaaagttgatgatgatttgaaaattaaattacttgaattgattaaagtaccgctggctatttataataaaaattaccctccggtcgttaatgattgtattttagagaataattttaaaccagacgaactattaagtttgacatcatcctataaaacttggggaacctctactcagtcactcattctgaagcgagcaatacaggatatatcgacattgatagcaaaccctgatgatgttgctgagctgttactaaaagacctgtttgtcgctggggacctaaatatgcagaataagatagcattgctaatcgctttgttgccaagtaaggatttgagtaaggctctctgcaaagaatatcttgatctgcttggtttatctgagttcagtaaaattttggggcgaggtaagcctaaaattgaggttgatgaagctaatcaaaggttattaacagcattaagagataaccacttcttctctgattttgaggaggatgatgaaaatcccccttattacaaaattgtaaggcggagttcgatgtttggctcaaatacatag

SEQ ID NO: 167414 - DNA, 210 bp, Enterobacter cloacae
atgacccagttaccgaaatttactgccgcgcttttgcatccccgctattggttaacatggtcaggcattggcttgttgtggctaattgtacagttgccttatcccgtcattttccgcatgggtaaaggactgggccgcattgctcagcagtttatgaagcgtcgcgcaggatcgcgtatcgtaaccttgagctttgttttcctcagatga

SEQ ID NO: 167415 - DNA, 1323 bp, Enterobacter cloacae
atgacaaataaaaaatatgagtttacaaaaacgcattctttccatggtgagttttggcataatcaagatgataataaaggacggttttctgcaaaaatagagtattcatcatatgatggcctaaccttggattattgtatttctgacagtgacagtccaacacaatgtgaaagactttatggtattttaaacactggaacattatgcacattgataggtccattcgacttctctcaaggaagaatgcatctcgggaaggcaagaattttaactggcctgcatccgttttcgatgattttttttgacggattctatgatgaaaataaaagcattgaatactgtgatttatctctcaatggattacaggagttcatgcatccgcaaggacttatcaaccgagcaaagcatcaatgggaaccaattttttcatgtaaaggaacagattggcaacttgacgttataaataatgctagtttcacccctttaggcaacgggttaatgaaccttttggactgcacaaataaacaaacacttgcagcactatcaaattttttatctgatataaataaaaataatccaaattctcacttcatgatcagaaaaaaattactttatttctttagatacaagaatagcactttaaacaaagtaaaagatcacattaatcaaatctggaatatatctggattactttcaatacttttaaacaaaccaatcattccagatgaattgtactttaaatttaaagacagcaaaacaaaaaccccttgcctatttaccataagttatgaacaaagaacaatcgatcttgcactaaaagaaatacatcatcattccttaccagtaaaccggagacaggttaacttggagaaaatattcaccaactggttcgaaatagctgacaactaccttccactaactgttacatatcaatatgaaacaggttttagaactctacctcaagctcattcagatataatattatttgcaacccagttagaggccataaatctcactctaaatggaaaacctaatgagaaatacattaaccctatcaatgagtatgcctcccaacaactcaagaaagatttagaagaaatattcatcgatattaatgatgagtctcttggctctaacatagccactttaagaaatgaacttgcacatgttgaccgtaaaaaaattctaatgaagaaaatgacgcttgatgattatattaggattggtacctatctaaaaataattatcacttcacatctgctctcaaaattgggggttgaaaaggagcaagttgagacatatcaaagtagggttgcaccataa

SEQ ID NO: 167416 - DNA, 975 bp, Enterobacter cloacae
atgggtttaggattaaaagacgctattgttcacacagctgcatttcatcagaaagatgagaacaagttacttttgccaaacaaccactggcaccccggatttattaccgtattagccgcttacgtaaaccatcatcggattgctgaggaaaactgtaccttatccagccctgactacatgagagccataaatttgcagggagcgttatggggacaggaccagtatcagcaagagcgtgttaatgttggaaaaaattacagtttagttacagctctaacgaatgttgaggctgttgataccgcaaccagtagcattaacagttgcgtaaggcagttaactttccccgagcgtgatccgcgagactacccaaaggggcttacggacctgactcatgtgataggcgagcttcatgataacgtctggtcacatggtaaatcgacaggcttctcctttgcacaacgctcggcagtccctcatacgaatagacaagagcattacttagagttttctttagccgattgcgggttgggctttctgagggagctacggcgagcaggcattcagggtattgaaactcatcgtgatgctatcgcatggtgtatccaggaagggcattcttcaaaacatgccgatctacaggatgattgggcgcaacagcttcctcaggattttatggggggaagtatgtttggtaatggggttgctgtaaaagaaaaagagaataaccatcaagggcttgggttgtaccacttgatgaaattggtaaaaacatacaatggggaattgcaactggctacaggaaatgtatgcttagaggcaattggtgatgaagtgagctacactgagttacgtaatgattggctgggtgttgcgatttcatgccgctttaagattcatcaactggcagtagataacgataacgaagaaaatgaccctcagcttatggaaatcatgcgggcgttaggaggagagtaa

SEQ ID NO: 167417 - DNA, 678 bp, Enterobacter cloacae
atgaaaattaataacttaatgttatcaatatctcttgctttagcagtctctggctgcgtaccacgttctcctaacccaaatgtcacctctattgaagtagttaagcctcctgttgggcaaagtgccacagcttatatgggcgatcctatcattacgtctgcaacagggtttaaaacggatgtactagaacttggagcaggcaatggcgcgttgtcttcaattgctgctggaagctattgcagcgttggcaatggcgtatatcgtaattatcacaatcctcaggcggttgcgttaaaaaatctttatggacagattggaaactatgttgattatgttagttacgacgctgccaaaaacgaggtttcgccaccaaatggtacttcttatactgccgcagaaatatctatcaaacgtgttcctgatggcctctgccgggtaagtaattcattggtaaaaactatcgaatacaatggaaatgctggcggggtcatgaagtttacctatcgagagtttgcaaatgatatggctcgtgctgcattcacaactgatttttcgatagattcgaagggtagtgatgtagttgcttataaaggcgccaagtttaaagtaaacaaagctgacaattcgtcgatttcttatacagttatttctggttttgataaagctgctgctttctga

SEQ ID NO: 167418 - DNA, 630 bp, Enterobacter cloacae
atgtcaattcaaaacatcacaaaacaccatattccgcaaaagctgcgtacggagattatgcagaacaaaggcggtcaaccggtcattgagcgcatccttaaagcctatggattcaccactcgccaggccctttgcaatcacctggggatatcacagagcaccatggccaataggtatgcccggaacacgtttccctctgattgggctgtgatttgccatcttgaaacgggcgtttctctgttatggctggccgctggtgaaggtccgatgcttgaggatcaggctgaggctggagcagttaccaggactctaaagcacttggtaatcactgatggggtttccacttcacaaaatgaaatcatatacgacgctagtttaattcctgcaggcttatcagctccctttgtcgtgactttcgaaagctcagtttatttagtcgataatcacgagggtgaaatcaacgatgggtggtggctggtcgaaattgacggcttaaccagtattagagaggtttttagattccccggcggacgcatacgcattgaaaatgggcgagcctcttttgagtgcgcgacgtcagacgtaaaagtattaggcaaggtgataagcaaaaccgagcagtttgtttga

SEQ ID NO: 167419 - DNA, 513 bp, Enterobacter cloacae
atgataaataaaataaaaacagtagaattaattgagaagagtatgttgcagcaaataagcaaagacatatttttagtaaatgcaataccacctaatacatttgctaatggaaaaggtattttaatatcaaatcctcaatggcttacagaaaaactactttctgtatcagcgggagtaagtaagggaaaatatacaatgctgtatgtggctttactggttgaaatggttgaaaaaatcaaatccatgaactccgatgagaaagataaaactttaaaaattttaaagcaaaaagaaaatgatattaaatttgcggttacatgcggaatggaaaaaaagaaaatacaattattagttcctgaaaaaacacttgatgaaattaatggattaatgcctgatagctttaagtattatatgattccagcattaattgaccatgctattaatttaaaagaacaaagcggaaatgtgtttttgtttgaaagcaaccatgaaggagaacattatgaaaactaa

SEQ ID NO: 167420 - DNA, 264 bp, Enterobacter cloacae
atgataaaaaaaagagaacgagaaacttcattagatgatatcgacgacactgattgggacgaatacgaaaatgacgaaacatatgaccctacaacaacctcactaacccaggaagaagacgacaagccagtaagcaccattagaatcttagtatttattatccacttaggactattcaaatttgcagctatgacattaaacggcttaatcagatccctggcttttctgcatgggctatatatcaaaacaataaaaagactttaa

SEQ ID NO: 167421 - DNA, 402 bp, Enterobacter cloacae
atgggaagaaatatagaaaacaaatcattcgtcagtatatggaaagaagtaaaaagctatacttgcactgtgaatgagacagaaacttttgaaatgctattattagtaatgaaagggcgagggtttacatttaacaagcatgaatttttcattctatctatgagaggacaaatgataaaccagagaatcgatagatgcagccaacataaacgttttttctacaattctgttgaagaaaaaatgaaaactgcgttcctttttataaaggaaatacacaaagaaaatgagcaatacagaaaaagattgttgaatgacagaaatgagattatcaaaatactcaatgcagaatcaacagttttaaaaggagtaggtggttttaccatctataatgagaaggattaa

SEQ ID NO: 167422 - DNA, 528 bp, Enterobacter cloacae
atggataaaagaaaaagaattaatttagttacagccacaccagaagagttaacagacatatattatgatgcctatcttaattatagagaaaccaatgaccttgttccttataactatacagccacagattatataaatgatgttatgcttgaagatgacattattagtcaaactgctaaacaaatatttgaggataaaggtattggtgaaaatgttttagtagatagcgattttttaaataaaagattgattatacctatacgatacccatttgaagatagtcctgtttattgctatgtagatatgagaaacactcatgacagcacattattaaaagaaaatgaactcttctatatgaatgataagctttcatggcaacacttcgttgaaggtgaagatcgtaaaaaattaattaaacatttagagtctgactatttcgctcctgtaatagccaaaatagaacagcaagaaattgagcaggtaatgaatgaaaagccagttgctattaagaagaaagcccgattgtaa

SEQ ID NO: 167423 - DNA, 633 bp, Enterobacter cloacae
atggagataaacaaattaatcgaaggtgtatatcttttaaagaatggcactattttagagctaattgatataggtgtttacggtggtgttattcaaatatattccaatgagcataattatatatatgatattagatgtacagaaaaagactttttaaatctatcagtagataacatagattcagtttatgagaaattcacttctttcatattggataatgaagataaatataatatatgtgaagaagagttagaggaattgaatttctatagtaatgaacactaccattacaaacaaaatggcggtattgtgtccagaagtaaagagttttatgattttttaaacacagttgaaacgaaaatcagctttttaccaaaatacatatatgaagatactaatattcgttcatataatataacaccagtatactatcgcaatattaacattgaaattcatgacattattaacattatcaaatttaatggcggcattataaaggatttgactacggatgtatgggaaagcgagcatttaaacaacgataaacttgaaaaaaggattgctttaagagaacagcagatattgaagatattaaccccaaatacaagcaatagtaaaacgagaagaatatag

SEQ ID NO: 167424 - DNA, 2478 bp, Enterobacter cloacae
atggcgctggttgagatatcgaattttccaggaacgcctaagctgcgttgcagggtgccaaacggcacccttttttatgactggctggcggccaatgacgctacctttcaccgtgatctgctgatcgtccgcaacggcgtaaggctgggcgacgatgacgagctggcgtttgaattgagcgagttggacaacatccagattttcgaccagccaaagggcattgtcggcgatatccttagcccgatatttaaagtagtgggccaggtgttttcgttcctggcgccgaagccggcaatcgcgaacaacggcggtaatgccgtcgactcaccgaacaatagcctgaccggtcaaacaaacaccgcgcgcgtctacaaagccaagccggatatctacggccaaatccgttcgttcccggatctgattcaggaatcggtatttgaatacgttcatcagacttccacagacggcggcctgaagtacgtcactgaatggatgtgtatcggtatcggcaaatacgattacgagtccgtgcgctactcagaatcaagcctgggctctcttgcaggtgctgaattccagttcttccagcctggcgaagtaatcccgcagatcgttgaaggttacgggttcgatgacgtcgacgggcaggaggttcccgggcagaacgaagccagcgacttcccgatcgaaacagcaacggcaaacacggtggtcagcggaacgtattccggcggacagatagcgatgaaaatcgtgaaacaagctgattttgactatttcatgggtctggttctgccgcatgcggttaccttcaccatcaacgttacgtacaacacagcatcaggcagcgtcaccactgacgcaaatttctccggcacgcttatttccgccgttgaaacaaacgatggcgctgtggttaacccggtgcgctggtacacgtttacgatgaaccagctggaggggccgcaggacattcctgctaacgccacgatcaacaccacgaaattcatcctcaacgataacgaggcgctggtggttgggccgttcttttctccggtcgagtcaacgcaactgtggctgcatacccagtccagcctcggcgggaagaaagagaccaactggaaggttgtcatctggaaaattgacgacgactacaaccaagttcctggtacgcagcagacattctcgtatcggcagacgacgcctcaccagtcgaccagcgaagtgttttaccgaaccgacaagatcactccgaccggaggtttcgggaagtacgcggtcagcttccagcgcacggataactccggcgacgcgtcactgctgaaggtcgaagagatccatagcatcaacatccgtacgaatgtcgttcacccgaccgacacgctggtacgagtgaaggtgagggcgaccgagaacgcgctggggagccgcgagcgcaaatataacgcactggtgacgcgccataccattacgtacaacctcgacacgcaggaggtggattacactctgcggccgtcgcgctcgttcgctgatgcggtggcgcatacttggttgattatgggtgaacagccggtaagcagcattgacctgtacggactgtattcgctcgctgaaagtctgcctgatgagcgactgggttacttcgactacacgttcgacgacgagaacgattctctcggcgaccgcgtgcaagcgatctgcaacgcggcttcagtggtggcctactgggatgacggtgtgctcactttcaccagggatcagaaagttgactacccggctgccgtattcaaccggaccaacatgaagacggacgagtacaaaatgacgtacgaggccacgcttcctggcggctacgacggcgtacaggtgtcctacgtccacccgaccacgaacaataagacgtacatcaactatcgcgtgctaaacggcgccatcgtcgaacaggaagcggaaaatccgaacaagctggagatagtcggctttcgtaatgagtatcaggcccgggagcgcgcattacgagaaaccaagcgcctaatctactcgcgcgtgaagatgaacgccaaagtgtttgaggacggcattatccaggtcggcagcgtcatacagatgcctgacatctacgacagcaaccagcagcagggttacatcaccggacgctccgggaataactttgataccagcgagccgatcacgtttaacggctcgatgtatgtgctggttaccgacagcctgggtaacccaactccgcgctatccggccaccgcccgtagcgacacgaagtacggattcaccgcggcaatacccggcattcagctcaatatctggaacggagacactgtccagctcccgtcgcgctacctcattgcgacggtggaggaactggacagccaactatggacagtcaacagcatcaaaccgaacacagataacacggtatctctgaccgtcgcggaatacagcgacgccatctaccaataa

SEQ ID NO: 167425 - DNA, 534 bp, Enterobacter cloacae
  misc_feature (521)..(530): n is a, c, g, or t
atgcttcgtttcaatttagacaaaaagcttttttcaatgatattgcttatgtcattgatattcttcttaccaattatcttatcaagtcactattacgttgatgatttaggtcgttctatttacggatattcaaagtggtctgataacggcaggcctcttgctgatcttttattcctatctttgagctttgggcctcagttgccagacatatctccactaccgcaattgcttgccttgggcatcttatcgctgagcgtttacttttctgcaaaagcatttctcactgaatttgatgggtacgttgctgccatcatttcaatggttgcaatttcaagcccattcttgttggagaatatatcatataaatacgatgctttcccaatgtcgatatccgtattgtgtgcaataattccttttgcattcaaatcggtagaattaaaaaaacaatttctatattgcttcacttctgtaattttaattttgtgcatctatcaggcatcaattaacatatatataatatnnnnnnnnnnataa

SEQ ID NO: 167426 - DNA, 873 bp, Enterobacter cloacae
atgatgagtatatccgatacaaatggaaaattattatatagaaatttaactgaaataaatcaagatgacattatagatgcaattgttcgagcaggaggtgtaaacaacatcgatatttttattgatttagatgtttatccccaaaaagaaagtgtcgaaggaataaggtttttaaaaactataggttatgacattagtaatatcaatatttttacatgtagtccagacatcggtgttgagttaatcaaacaaggatacgatatgtataaattacgatcaaacaacaaacctgtgatcgcagactgtgatttaaaagtcattaaagagtgttttaatcaagggttagatatgagtaaatttagtaaggaaaaccattttagtttctatggtgaaagccctctgctaacaaatgaaatatctcattttcttgaaagcttccaaaatataaatttcattgacgaaaagaagcttgagttatttattgatagcggattttttaatagtaaaaatgcgagtgattttgatgggtatgttccattatattatttctgcgattcacgctatggaggcaaacttagtgataaattacttgataagctaatcaatgtttacgacaaaattgatataattgaagaccgaatttttgatcctgataatgaaagagcaaaagattttatcttcaaacgatacattgaaacctgtgaagacaaacagggtgcaattgagcatgttaagggactctttgagaaagaagggttagacattgcagaatgtgaaagaactatggcaacaatagccagatatgacagtgaagccatacttgaagttttcacacatacagcaccaaagcccagcaccagaagaagaatgtag

SEQ ID NO: 167427 - DNA, 537 bp, Enterobacter cloacae
atgataataagagatttagaaggtaataatttatacagaaacagaaacgatttcgaaccagacagaatcattgatgccatagtaaaagcaggtggcatagaaaatattgacctgacttttcatgccagtgatttctatgatgacgaagctattaaagcaataaggtttttgaaaaatatcaactacgacattaacaagcttccgatagaccaatacgaagaagttgtagctattgaacttatcaagcaaggctatgatatgtacaaaacaggtaggcataatatcccggtcattacagaatgtggttatggggttttaaaagagtgtattaaacaaggttttgatttaaataagttcaataagaaaaaccattttttagaatttatcgaatgtgacgataatggcgaatatttaaagaaaaactatcgtatatctaattttataagagacaaagaaaaccctaagtttatagatatcaataaactcgatttactgatagataatggattgcttaataataacaccttgtttgattag

SEQ ID NO: 167428 - DNA, 426 bp, Enterobacter cloacae
atgaatacattcaatttttttaatataaccaatcctgttgtgactattccaataacaattatcatggggtttatgtttattgttgtcctttttaatttattcaaaaacacctttttaactaaatacaaaagactcgatgagtctggattctggaaaaatatattccatttattgaaatggcttaaagggaagataaattatcttgttggggtttattttttcagtatgacattactgttttcaataatggtgtttgtattcagagataaaacattcacgttagatataaccgcatatattctatgtgcctttatcagtgttggtttaagtgttttgttttatacatacagagatataaatttcgacattaaaacttacaagcaagtaagacaagagcagaaagaaaagagaaggagaaaagtatga

SEQ ID NO: 167429 - DNA, 1059 bp, Enterobacter cloacae
atggcgatctatgccgtatggaataacaaaggtggtgtaggaaaaagttatcttacctttcaactagcctctgagtacgccagacagaacccgacaaaaaaggttctggtgattgatctatgcccgcaagctaactcatcctcaatgttacttggcgggatggttaatggcgaaaacacgctaaatcaaattcattctgcgacacaaagaaagactatttctggatatattgaggataggatcagaagcccatacattccgacaaatacaggttctaactacgtaatcaacgtatctacatacaatagcagaataccaaataatctatatcttgttactggcgatgaacaattagaacttcaagcatcaagagttgttggagcatcattcccagggcctcacgacgcatggcgaacagttcacctttggattaacgatctaattagtgacatttgtaactcatgggataatgacgacagctgtgtgttcatcgactgcaaccctagcttctctatttatactgagctagcgttaaccgcagcagaacgcctcttaattccattctctgctgatggttcatcaaaaagagcagttaaagctgttctttctttagtttatggcgagcgccgtcatcagaacgaaccacagtcagatttctatttaaacagcaatcgctactctatgtcattaccgcaaatatacatgtatgtaggtaatagattaacccaaatgaacaactcatctgctagcgcatttaagactgtggtaacagagattggcgatgagatttggaaagtgtggcaaacaaaaccaagtctgttctgcatccatccaaatggaaactcaacgccgaataataaaaaatcatttaggaacatgttccagtatgaagtgaatgatgcaaatacagcatctgtcgtatcaggagcacttgggattccaattgccacgctaaccgcaggaaataaaaacgtttcaggaagaacaataaaggtaaatcaaacacagcttgataagcaagttcccaacattgtagctcttgccggtatgattgagtaa

SEQ ID NO: 167430 - DNA, 258 bp, Enterobacter cloacae
atgggctttaataacgatcagaataaagacctacaagataagcaagctgaccttctggaccagacttatactcttggctggatggatggttattctgaaggatacgatgatgccattgacgatagtcagaatgctttgaataaactggaaaatgaaaacgaattactcaatgaaatcattgaaaaaaaagataatataatcaatgaaatggcgtccggtgtaggcaaggcgttacaaacagtaaagaaaaacaaataa

SEQ ID NO: 167431 - DNA, 552 bp, Enterobacter cloacae
atgaaagatatgaaggctgttgttgtttttaccggaaaagatttgaacataatgagaactgagggggggtcaggctactggcatgccagaacagacaggcttaacgatgccgaatacctcatagcagtaagaaacagaagggaaacgtgggcagtaaaagacctggaacacggcacagccttcctgattgcaaaaattaccgggtgctttaaaaatcccgattacgatgacaggaacgtcataacctttgatgagtatgcagtaattcactctccagacgcatggaaaatgctaaccggtggtcagcgctatcctgttgcttacctgaacgcacaggaagcctttttacgtattggggtaacaccggaacaactggaatggaagaaattccatccttcatccccatcgcttcctaatgcagtggttcctagtctggctgaagagaaaacagaaaaactctcccttaacgaggcaattgaaagagccaaaaaggatattagcaacgcaacaggaattgatagctcagccataacaataagcatcaagatctga

SEQ ID NO: 167432 - DNA, 1041 bp, Enterobacter cloacae
atggcacagaacccattcaaagcactaaatatcaatacagacaagattgaagctgccctgacgcagaatggcgtcacaaacttttcttctaccgtgagaaacgaaagagaaacgcatttatcagggacatataaagaaatagattttttaataaagttaatgccatcaggtggaaacaccactataggaaaggcatcaggacaaaacaatacttactttgatgagattgctggcattataaaagaaaactgcttgtattcagataaaaagacgtttgaatacaccattccgagattcagcgatgaaaataagaaaatgttattttcatttctcgctgaagaaaacgtaaaaatagaagaagataaaaacaacgacccaaactgcaaacatcaatacatcatgaccgctggtaatggtgacagagtcagagcaaaaatttacaaccgtggctcaattcaattccaaggtaaatatcttcaaatcgcaagtttgattaatgatttcatgtgcaccatactggacatgaaagagattataaaacagaagaatcaagaatttaatgttgacataaaaaaagaaacaattgagtcagaattacatagtaaactaccaaaaagcatcgacctaatccatgacgacatcaaaaaacagctatcctgctcgctcataatgaaacaaatagatgtcgaaatggaagattactcaacgtattgtttttcagccttaagatccttggaaggctttatatatcaattgcttgacagtgtttgtaacccatcatcatcaaggaatcttggcgagtacttcactgagaataacccgaaatacataataagagatatacaccaagaaactattaatggtgaaatagcagaagttttgtgtgagtgctacacttactggcatgaaaacagacatggtttgttccatatgaaaccaggtgtggctgacactaagacaattgacaaagcagaatctattgaaattatcgataccgtatgtcaattgatagataaaggcatagctaggttaaaatcatga

SEQ ID NO: 167433 - DNA, 381 bp, Enterobacter cloacae
atgaaaataaacaaaaaatatcaaatagaggtgataaaggataaagataaaactttattcattgtctacgctacagatatttatagcccgagcgaatttttctctaaaatcgagtctgatttaaagaaaaagaaagttggcggcgatgttttttttgatttaataattcctaatggtggaaaaaaagaccgttacgtctatacatcattcaacggcgaacgattgacaagctacatattaaacaaagttacggaaacagatgagtataaatccttatctgaacgctcagcttcgttctttaagaataactttaataagattaatgcaaaccttctatctaaagccacgtcgtttgctttaaaacaaggcattccaatataa

SEQ ID NO: 167434 - DNA, 1569 bp, Enterobacter cloacae
atggttgataatattaaccaggctacaggggctagcaacgggatggttctggttatcgattctcttgctgttgccattggcaggcttaccgggcaggccgctaccgccagtcagcaaatagcagatctgcgctctgaagccgaaatgtacgccaagcgagcgagaacatggagttggcttggctttggtgactggcagaaagagaacgaggagaaatccgcgcaacttacagctgaagcgtgggagaaggcctctcgcgccggttgggatgcggttcagaaaacagcagcagctactaagcctatcgaaataaaagccatcgccacttcaggtggttctaaaacgaaaggcggaaagtctgcggcacagaaagaagctgagcaatacgccaaagctcaagaatctgttaatcaaaagcttgatgaactgaggcagaaggccgagctgtcagctggcagtgtcggtgaactatccagagcgcagtccgtgcttaatgcgcaacagtctctcggtaacacagccacgcaggaacaacttctgctggccgggcaactggcaggaaaagcctgggacaatgccaacgcattgcgtgagcaggccaaggctgaacgggagcgcacagaggctgccaataagttcagtaccatccagggtaaaaccagcaaaactgccgggctggatagccagtatcagaaagacattgctgacatccagctttacgcccagctttacccgcagaagatcggggaggctgaggcagcgcgtgccgctatagagcagcagtatcgtgaccagcgtaacgctgcgatgtgggaagaatgggcgcaacagaacgcggccactcaggcagcagctgcggcatttaccgcattcggcaataatgcctctaacactctgactggccttatcaccaaaagcatggacgctgaagaagcggctaaatctttaggaagaaccgttttaaatagcctagtaaacacatttgtgcagatgggcgtcgagtgggttaagtcggccattatgggccagacggccactacctcggcggttgcagcatccaccgcggcacaggcagcaggcatcgcaaccacgacggcgacatctaccgcggcggcggcggccacaacggcagcatggactccggcggccatcatgtcatccgtggcttcattcggtggtgcggtggctattggtcttggtgcgatggctggcatcctggcactgtcaggaaaacgtaaaaacggcgggcctgtctcggctggtgggatgtatcaggtcggcgaaggtggcatgccagagatttaccaggccagtaccggtaagcagtacatgataccaggcgacaatggcagggtgatcagcaacaaggagatgacttctggcggcggaggggtagttatcaacatccagaactacacgtcatcgtccgttgatgcacaggctggcactgatgcaaatggaggacttaccgttgatgtcattgttgcagacctgaacaacggcgggccaatcagcagcggtataaccagtaacttcaatgttaaacgcacgccaagggggcagggctga

SEQ ID NO: 167435 - DNA, 504 bp, Enterobacter cloacae
atgccaattatcgactatcccgactggctgccgctggcgcagaaggccagcaaaaacatgacgctcgataccgggttccagaccgaccagccagcggtcggcccggctatcttccagaaccttaccgacgacctgaaagtgacctggtctctgacgtggatcttcaccttggcggaagaccgagcatttcagcaatggttacgtagtcccaactatcttcacggcggtatttattggttcagaatgccgataaatcttggcggtagtggcttgcaagttcaggagcttcactttacgaaagatggtttccctgtccagaccaatatttctggcggagtggtgacctggacgggaaccgttattgccaaccacctgtacaacgccgatgacgagtttgacgacatcattgttgaactgccgccgccgtgggattcgtggctggatatcgttgccacgggttatccggacgggcgcgatccggaatcactaccgagggcgccgtaa

SEQ ID NO: 167436 - DNA, 765 bp, Enterobacter cloacae
atggaaaatattttaacacgatctaatcgctcacattctgatacagtcagagagttctttaattgtgtgtcttacaccatgataatgaatagtctttatcagttagaaaaaagagaacagttttactcaggtgaaacaacatatcggttttcaactattctcaatgaattgcatgtagcagagagaaatataatcataacaaatagacataaattcaaagttgatagtgtgttttataaaagattcgcaaatgaaataacatatatttcaggagtattatctaatgaaattgggaaaaacccactaactgatatattcaatgagttgtttgaagatttatttttaacaggtaaaaaaggtgacagctttggtcaatttcttacacctactgatatatctgaacttttgacagatatagtttatactaccagtaaagataaatataaaatcgctgatagctgtgctggtactggttctttaatattcccattaattaaaaggatattttttaaagaagggtttgaaggtattcaaaaagtagagttgttttataatgacaaagattcatttgtatctcagttgttcatagctcaaatattgactaatatgatttatcataatttagattttaaagatcttcgtatttatattggtgatgctataactgaatacgacactataaacactttatttttaagatttaagcaaaataaattagtagctcaacgggtattagaaattgataaagaaaagaaagcggcataa

SEQ ID NO: 167437 - DNA, 462 bp, Enterobacter cloacae
atgaaaaaaccaaatcaacaatactctaccttcacttcatatctttctaaaaccaataaaaatgtagatatgtacaggatttataatccactaaatgaaagtttgcgtttcaattcaaaacgcgataaaaatttttatgatttatattttaaaaggcattttatcacaagaagaaatattttaactgtcttttctattcattgttatctaacaaaaaatgaaagatttatatctgaaagagtatccttcgtgaaatgttcaatatatttatctagaataatgtttaatttattagctaatgatattgattttaacatttctttccgtggtggaaatttgattttcatttcacagttcgggaagaaagaagaaatttcatatttcactttatcaaaaattgcaggtgatatttttgatattaaagacttttcaatgagcaatgaaaaattacttgcggcataa

SEQ ID NO: 167438 - DNA, 417 bp, Enterobacter cloacae
atgacccaacggaatatactggcctgcaatacctctgattttgttcgacaggtgatcggcgtgccgtgggctaaccgggcctgttcgttcgaaaaggtggattgctgggggctggtggtgctgtattaccggcacgttctcggcattgagcttcaccagacgccggattacgaagccggggccgacttcttcacctgctatgagggtgacgtcgttttctggcgccaggtcgataaacctgtcgatggcgggatatttgtcgggtaccgcggcgcgcaaccggcgcacgttggcctggtgctgaaccggatggcgctgcactcgcgcggcgagaatggaagcgtgcgaatggactcgttgctggtcattcagcgggcattcaccaaagtggagtttttcgaatatggcgctggttga

SEQ ID NO: 167439 - DNA, 186 bp, Enterobacter cloacae
atgaataaaattttacttatcgctgccctggaagagattgctagtcgcgagggccatgaacttaacgggcgggatcatcttatggtgcgcaatcgcgttgccgcttgcttggctgcgaaagaacgccaccggcaaaggatggatgccaaaccttatcaatggagaaagccggaaaggccaaggtga

SEQ ID NO: 167440 - DNA, 141 bp, Enterobacter cloacae
atggccatactgatactgctgtgtcgttcttgcaccggtcaggcgacaattaccgtcgagtacgatagaagatttggcaaacatatttgggccccttaccgccagacgatgcgtagacgtcagccgtccctgttcgggtag

SEQ ID NO: 167441 - DNA, 1857 bp, Enterobacter cloacae
atgaatagctcaaataagtatcgcaactatgtccagtgttcaatggctgaaaatacttttgaacaccaacgcaacgctgctgagaaagcatttactaaattgaactctggttcaaaagcagtgatccttgctgcggaaatgcagtcaggaaaatcaggtatcgctcttgcccttgcctgccttcagagactatctttacccgatgaattattggctaaccggaaatacttaaaagatactttatatcttgtgacaatggcagatctggcacttcaagagcaagcaaagcgtgaccttgccccctgcaaaaatgtcgttgttagtaacttcacaaatatagataatgcgcttaaatcggattttaagcgccaaccacctaagctcatcatcatcgatgagtgtcactatggttctggcattgatagtgttcgctatgaaaaggtatttaattacctggaacaagttaatgtagactgtaaagttgtatttatttccgcaactccatttagctcactctactcagctagcgaagattccattctacgtcacagcttcaatacgtctttggtatttcacaaagctagtgatgaatatcatggcattcgacaaatgcatcgcagtaaccagctggtcaaacttgatgatgatcaacgcgatttttgtgaagattcactgctacaaaagcgctttatacgccagtttaaagaacatcagggcgtaggctggtcactgattagggttccatcaagtcaagcaaacatagccaaacaagtactgattaatcaaggtgtagatgaagagcaaatcttaatcataggtcaaaagcttgttggcgttggcgatcacgaactctcatctatcgatgacttcaaacgagcgtacgaaacagcagcaatgtttgatgaaaagataatcgctataactgtggctggatttcgcgctggtattaactttggccaagaaatgaaaaacacgctaataaacacatgggatagctctattgccaatatagccgcagtggtgcaagccaacgttggcagagcatgtggataccaccagaatactcaggcgaaacattttacaaacctagaagctgttcgagcgtattcagaactacttgatcatcttgaggccagcgatgaattgaatgatttcgatgggttacggtattcatttgaagatatttgtgcgaaatatcaagtcagaggctttgaccgaggaatgtttatcacccctttttctgaaactgtaatcaccaaaaaacgtgatgattcggaaacatttctaactcaaagctatctagtcattcctggaaaattgtctgagcccgaagttaatttcagcgcctataccaacgatccacagctgcttgaggcaatcaaattaattcgtgacgaattcctgaatgaaggaacgccctatcctaaatctggtcgtgcaatgcgaggtgatgatagaaactggataaaagctcagtgggtaaatggagtcacctataatgacttctcgccgagctgtgcgaagagcagagtgctggattttaattcacgcctggagctgggtgaagatgtagaattcaacttaattgttaaccctggtggcggagagaccactgctgacaaactcatagttgcgtgtgtattcagtatttataatctttctaaacaaaaagatgcttacaaacgtgccatggaccgagaggatatgtgggaaattagtgaagccttaggttgtgaatatgacgatacgattatggtgctctatcagcgcggaaactactctagtggagtgacagaacaaaaaaaagtaactacaaaacagctatctcgcatccgcaattccagcgtgttcaaatag

SEQ ID NO: 167442 - DNA, 3474 bp, Enterobacter cloacae
atgcgacagtcactggataaaacgcttagaaatcagctggaaaaagttgttgtcagggcccgagaactgatagaaaaagcagcatcagaagcattaatacgtttaggggtagaaacggcggaagctccggcatacctaaatgataatgagcgaaaactgcgtaatcgcctgcgtgcccatgcccgtcagttgggggacaagctgcaggctaatggtgtgcagagtattgaacacctgcgagcagaagtcagttatgaacactggcatcgtatgttgtttgcccgctttttggagcaaaacaatttgctgatgctggataaataccttgctgtcacgctggcagactgtcaggaatatgcccaagaagaaggctgtaaagatggctgggagctggccggtaagctggcgcagagaatgctgcctcaggtgtttagggccgattcccccgtatttgagttgcaaattcctgtcgaccgcattcgcgagttagaggaactggttctgacactccctggcgcggtgtttgaggcccaggatagcctggggtggtgttaccagttctggcaaagcaaacgaaaaaaggaagtaaatggggcgggtattccgattggtgcggatgagttaagcccggtcacccagttattcactgagccttatatggtgagcttcctgctggataatagcctgggtgcctggtgggcgaaaaaacagctgacggatgcggatttacgctcggccagtgatgagaaaaccttgcgtcaggctgccgctatcgagggtgtgccgctggaatatctgcgttttgttaaaaccagcgatgagcagggtgagttgtggcaagccgccggcggctggtttgatggctggccacaggaagttcgtgcactgaaaacgctggatccgtgctgtggttcagggcattttcttgttgcattattcctgatgctggtgccaatgcgtatgcagcttgaaggacttgatgccagaagcgctgtagataaggtgcttgctgataaccttcatggccttgaacttgacagccgctgtgtggagattgctgcctttgcgctggcgctggaggcctggcgatatcccaatgccggtggctaccgtaccctccctgcactaaatattgcctgctcagggctggatgtcagcgcagctacccaggaatggttggcgcttgctaaacacaatccggatatcagcgaggcacttaattggtttacccgaaccttcaaagatgccccggtgctgggcagcctgattgacgtcaatacggcttattacgaaggaaaaactgaaggcaaagcctccccctggcaggttctcctggatgcgaaagctgcaaccgacgatgaagcaaaaacagcagaggtgacagcccaggggctggcagtagcagctaaattgctgtctggaagttataatcttgtagcgacaaacgtgccttatctggcccgtggtaagcagtgcgacaccttacaaaatttttgtgaaaactattttccggaagcaaaagcagatttggcaacagtgttcctagaacggtgtgtggattttagcccagccggtggcacatcgaccatcgtcttaccgcagaactggcttttcctgacgagttatactgattttcgtaagaaattgctgactgaagatacttggaacttagtcgcgcgcctgggagcgggagcgtttgaaactatttctggtgaggttgtgcaggcaattttggttgttctaaatagggggccagcctccctgggaaatatgctacatggaattgatgtttctggtctaaaagcaactgcaaagaaagcggaacaacttttggttcagcagtttagaagtgttttacaggctgagcagttggaaaaacctgatgcaaggatatctttaaattctaaatccagcagtgccttagttaataattatgcagatacagcaactggtatgcaatcctttgatcgcccaagatttatacattacttttgggaaatgagtgttttttcagatggttgggaaccatgtcaatctactgttcgcacaacctcccatatgggcggttgtgagtatgctgttctatgggaaaatggtcaaggacagttatacaaaatgatggagcaaaagcgagtattagaaaattataccagcgctatctggaaggccggctctcaatactggggaacaaagggagtaatggtaagtctaatggggaatttacctgttagcttatatctaggaagaccctatgatcaaaatgcaggtttaattaaacctgataatgaagactcgttgttgtcactatgggcttattgttcatcgggtgagtatagttcttccgttcgtgaagttgaccaagcattaaaagttacaaatgcgactctaggaaaaatagaatttgatcacgaattatggcttagtgttgctaaggtaaaatatcccaatggacttccaaaaatctatacaagtgatccaacacagtggatttaccatggacatccttgcggttccgtcatctgggacgaagagaaaaaatggacagtgattgctgataagcgtaccgatgaaaccgtgctacaagttgcggttgctcgcctgttaggataccgatggccagcagagctggatgacgaaatggagctggctgatgagatgcttcactggcttggtaaatccgatgatttgctgagattagtggatgatgacggtattgtctgcctgccagcacttcgtggtgaaagagccgcggcttctcgcctcgaagctatgctgcaggctgcctacgaagaggactggtcatccagtgttctcagtgatttgcttgccagtgttggtagtaaaagccttgaaacctggctgcgggataaattctttgaacaacattgcaaactcttccagcaccgcccgtttatctggcaaatctgggatggtcttaaagatggattctcagtactggtcaactaccataagctcaattaccagggtttagaacgcttgatttatacctatcttggggactggatccgtactcaggagcacggtttcaaagaaggcattgatggtgcagaaagtcgtttgatggcggctaaaaacctcaaagactcgctggaagccatccttaaaggagatgccatcaccggcaagagtggtctcgacatttttgtgcgctggaaaccgttacacgaacaacctatgggctggaacccggacttaaatgatggtgtgcgcctaaatattcgtccgtttatgcaggcaccagatgtggataagaagggggccggtgttttacgcactaagcccaatattaagtggggtaaagaccgcggcaacgacgttgaatcggccccctggtattatctgggcctgcagtatggtgaaaaagagggggcgcgtatcaatgaccaccatatcagtcttgcagataagcaagctgccagagacgaatatgaaaataaggaaaatcacggatga

SEQ ID NO: 167443 - DNA, 1170 bp, Enterobacter cloacae
atggaacagatgaaagcccccggtttcttggctggcaatattggtgaaccgataacattagagagggttgaaccccttgcaggtttttcctctgcctacgcagctaaaggagatatgtgtcagctttggacgaaaaacggattcacatctgatcaggatatttttcataaaatagctaaaagcttcatttcaatgcttgagcattatactcaaagagaggggaaatttgtaaaactatctaactgtgaaatgcttcttttcattatccatggagatttatctgctgaaatttggaatgataaagccgcagtggctagcaatattattatgaaaaaacaaattcagccaggaatggttgtttttgaaaaggaaattgctgatatattagatgtgcactttccacttttagagttcaagcaggatgataaagttatatgcttgtttagagaggggtggcgctttggtttatattttgatttaaatccagatggcgatttctccgtggatgatatgaataaaagtcttggtgttttgcaccgaattgtgaaatataaaaatatatacgattcgatgttcgattccgaaacgttatcttttcttattgcccgtggttggtttccttttgctgaattgatcaacaacggttttgatgtattgcagtatcgagagaaaaatgatgaggtgtttaataagtcggcaaatcatcttgtctctttgtttgataaagatagggttaattcaatacacagtcgttggaaaagcaaagtttacctaagtgagaagatgcctatattagatgctgcctttagttctttctataatggaaattatattgcgacaataaaaattatacttactgaaattgaaggtgttcttcaacctttttatataaaagcaaacttaaaaaaaggtaacagctcagccttaactggtttcgtcaaagatgctgcgattagaaaattgcaaagtaaaaatacactgctctttcccgaagaatttttgatttatcttaaacaaaacacatattgtagctttgatttgatgacaggaactgccagcgccaattctagacactctgttggtcatggtgccgcagcagcaaaaacttatacgaaagagaaagcgattcaagctatattaacttttgatcaaatcgttttttatttgtaa

SEQ ID NO: 167444 - DNA, 1842 bp, Enterobacter cloacae
atgaagacaaggtctttttctatttttttgcttaaagctggctacaatgcacagaactcccttaagctgaaccatcaacttatcggtggctttcaggctctaaatctcccacaaggcgcaaccttgtttatttccgatagggttagaacaaccccttggtgggttgactacttctcaattggtggaaatttaaaacaagaaaacaaaggggcattaatttttcttccggtaagagatcgatgttttgctctaacttttggccatatttatcacaacttgctagatgtttcctacgagtatgattttggcttaaaagttactttaaacagccttgaacctaatgagttaaaaagcgctgatatagtcgatcccggagcatcaagaaggaaaagaatgcaagtccctgttatgtctgacttaacctatttagattttgatagtaatagcgagatattaaaaagcctgacaggaaaagtaaaaccacaatatattgatctcttcaaaaatgcgactggttcaaccagcttaaaagttggacttaaagtcgagccagaacaacttaccggattgtgcgaccaactactagatttatattccagtgatgaatacttagagtctttccctaacatacaaaaaataacgccagaaaaagaccctattaaaattaagcgtcttgatgattctcttttagatgctttcattaataaaaacaatgaattagccttatcaatcccggacatcgtggattatagtgataatatttactgctcctttaaaggaaggaaaggcatatccccaatatatactgacattagtcttgaagagttttatgactatttaggagaagttgacttaaatacgttcaatatagacaaaatcaaagatttctcgcttaacctctgcaatgaagaaggtgttataacgaaagcatataacatttacagaagttttatctatgatattcactttgataacgaggaagttgtttaccatctctgcgaaggtgaatggtataaagttgaccaagaatatttgcagagtttgaaagattatatagatgcaaggtgtgaagatagccaacttccctcatatgatcatgacaacattaaggatgacataagaaactatagtgaagagaactataatgaagatgtggcaaacaactcagcatgccatatatgtttagatcagaaagacataagtcccgatggatactcacaaatagaaccatgcgatttaataagttaccaggataattactgtatttttcatcatataaaaatatcttcaagatcatctcaacttagccatcttttcaatcaaggtgtcaattctatagaattactcattttggaaaagagcagcaaagaaaaacttaagtcattaatcgaggaaaatattcaaggtaaagatttggatagtttcaaccgcgtgatagatagtggtaattataaagttgagtttggcataataaccaagaaaccagcggaactgaaatctgaaaacctccctcttttttctaaaataagtttaatgcgaagcttaagaacactttctctttatcgaacagagggtgtggttagttttataaaagatattagcccttctaaagaaggctatagtaaacacccgcgcattacagtgattgtgtctgccggtgcaaatggtaaaaatgaagttattgttgatcacagccaactttttcctcagggaacaaaagtcgcaagatgctcacaagaaataactaacagccctatcggctcgagatttatgattcatgtaaaagctagtgaacacgggaagttaagcacgagccatgcttgggagagcgaacgtctatag

SEQ ID NO: 167445 - DNA, 414 bp, Enterobacter cloacae
atggaatcaaaatacgatctggttgacgcggttccacccgcagaagatttttgccgcttgcgcatcatatccggtttaacaccccgctctcctgaagctgcaaaacatgcacttccaagaacttttcatggcgtatacattgaatattcgggactcattgtcgggatggggagaattgtcggtgatggcgcgctcaacttcgaaatcgtagaggttgcggtcgatccagaacatcaggggaaagggctgggccggaaaatcatggaagctttaatgtcctggcttggacaacatgcacccgcaggagcatacattaccttgatcgcagatgtcccggagctatatgaaaaattcgggtttaaaagcgttcgccccgaaagcgaagggatggcactcaattggggacagcattaa

SEQ ID NO: 167446 - DNA, 336 bp, Enterobacter cloacae
atggaacgaaccgtcgaaatactgcaatacaccttacttaaaggcaccggaaccatttttcacacaatcatgcgggaaatcagcgttcctctacaccaacgccacgggatcgatgtagtatcgtttggtaactccctgcatgattccgattgctactaccttattcgtgcttttaacaaccaagaaagcatggctatggttctagattctttctacgcaagcgctgattggcggaacggcccacgccaagacatcattggcagcatcgagacaagcattaaaacagtgataagcctgccaccggaaagcgttgacgggttgcgggtgcaatcgtag

SEQ ID NO: 167447 - DNA, 870 bp, Enterobacter cloacae
atgtcaaatgatgctttgatgattgcaagtgctattttaaatttgcagcaggagtcgagtaattttaaggattatatttttcctgcattgactacttcaggttctgtgttactcggttacttaatggctaataatacatttgccaaacaggaaatcattaagtcagagatagcgcgagtcaatgattttaataaattcctagtagcaatcgatagtggtatgcaaactctgatagcaataaaaaacacatatatgggtcgaataaattctaaccctattgaaagggctttaagtatacctacaattagctgttatttttcaccgccgccagatgttacattgattatttttttagcaaaggctaatgaatacaatgcgtctcgtgcattttttgagacatggaataaccttcctcgcgtgaatgctatgttaggtaactttcaaaaccttcatgataaaataaatcatcgcaatactgtgttatctcaattgcgtgaattctatcaaatagatgatcagggacgtagtgttatgaacatcggaacattaactcctgaacagtttaaagtcttgaaaacagcagtggacctaacggaaggcgtattatgtttggttgaggggttacttaaagagtattattcttgtttaaagaatatacccagtgcggcaaagttatctataaatgaaaaagtaacaaaaaagcatgttgaagtattaacctattcaaacccatcacctcaatttcaaaaatcattttcctccattccaaatgtggatatttcagctctagctttcatacttggcgtttcagaagaagttgcaaaagcatcattcattacaggttatgaaaaagttccggttgttttttag

SEQ ID NO: 167448 - DNA, 363 bp, Enterobacter cloacae
gtgacccaaaacgtactgccaatcaatcagcgcctccacgatcaggctgttgatgagttcaatcgcctgcatggaacaatgattggcgaaattagcgcaatgttgaaaaccgctaaagtggcacctctggtagaccttcgcaagaaggatccaacgttttcaaatgttgtcgcagaattgagaatgttccgagatgtgtgttgtgcccttgcgccgcactttctcgtggacaaaactggcgaaatcgctgacatcgacaagttactaacactggctaatgacctggctcaagccatcgacgctgatgaccctgacgcactatgcgcagctatagcagcccttgatgtagagccttatatttaa

SEQ ID NO: 167449 - DNA, 414 bp, Enterobacter cloacae
atgagcaacatcgacaaacgcgcattacgtgaagcggctgagagggcgacggaaagcgattggatagttgatgcccatgaaggctggcatgcagttattcccgtagctgatgcagtgaatggaaactacatcattgcagagttccaggggccggaatcaaagcgcaatcgtgattttgttgccgcagccaaccccgccatcgtgctggcgctgctggatgagctggaagcagcagagaggcggattgctgagctatcgcaccacctccaatgcgcgcacgcctttatcgaacatacagaggcgtttggctacgaagcttcaaacgggattctgtgctgtggtgatgcgcagtggaatatcgatgcttctaaggcagcgttggcatcaactggccgcatcaacggggaggactaa

SEQ ID NO: 167450 - DNA, 222 bp, Enterobacter cloacae
atgtctgatatttacgtattccgcgatgatgcaaagaactgcgttgtgctgaaggatggcgagaagattttcacgttcactcctgagcagtggggggttatatgcagggcggcgaattctgatatggaaaaccgcctgtacgcgctgaagcatggcgagacgctgcgcctggagcgcgagaggacctgggcagagaaccgtgacaaggtcaggaggggatga

SEQ ID NO: 167451 - DNA, 198 bp, Enterobacter cloacae
atggataagtgtcagggtattttcgggaaattgttcgggcactcatatcgcccagccatcaccaggggatctccgtctgcgaatcttggcgtaatggagggaagtggtggcgcgataattaaagtgataaatagcacccgcccagagacgtatcacggtatttattgcaagcgctgcgggaaggtgattaatggctaa

SEQ ID NO: 167452 - DNA, 282 bp, Enterobacter cloacae
atgaaattaaaacagaagattgttaacgcctttgttaattcaacacatgagtggaatatggcaatgcacaatgccatcgagcgaaaagtacatgaaggatttaaagataccttcccaaatggactgaaggatccagaggaaacggagaaaagaatcgagtccatgcgcacattctattatcagcgaatgatgaataccgcctccttgcttctaacaggatcatcgctaatcatcgctttaatggcgctggttgtggcaatggtctccatccactatgcatag

SEQ ID NO: 167453 - DNA, 333 bp, Enterobacter cloacae
atgaaagagaagactgcagctgagcgctatgccgcagctatcaatgccgcgatggcgattgttaacctgcgtgaagagattaaagatctccttgcaattatccataacaacctgacatgtacagagttgcttggcggtcagtacaacggtgaggcggtgaaggaggcatttaaaaatgctgaggtaggaataattccagcaaactatgtcaagtctgaatgcgtgctcctaaaggcacgagtgagtctgcatgaagatcctggtaatctcggtcgaactgcaatgcgttacgtgatagacgaatcgaatgctaaacacaatctaccgaaataa

SEQ ID NO: 167454 - DNA, 2256 bp, Enterobacter cloacae
atgacggtatcaaccgtagttgaccataacgattacaccgggaacggcgttacgacatccttcccgtataccttccgcattttcaaaaaaacagaccttgctgtatccgttgtagacctcaacgaaaacatcacggtgctggtactagacacggactacacagttacgaacgccggaggttacaacggtggtagtgtggtgctcaccactccgcttgcgaatggctggcagatctccatcgcgcgcgagctggagccaacgcaggaaactgacctgcgcaaccagggaaaattcttcgctgaagtgcatgaagacgctttcgataagctgacgatgctcatacagcaggcgtacagtgtgttccgcctggcgctgcgtaaaccctcaagcatcgccaactggtatgacgcgctgaacaactatattcgcaatcttcgcgatccgcgtgaccctcaggatgcagcaacgaaaaactatgttgatactacgagttcagctggcgatacagcactcaaccagaagattgacgctaactttgcaaggacattacgtgttccagaagccagcgttaaccagctggacaccgtagcaaatcgtgcaaacaagatattggcatgggataattcaggccaacctatcagtgttcccgctccatcaggtagcgcagcagacgtatttattgaactggccaaaccaactggtgcggataaaatcggatatcagcatccatacaattctgacgttcttgtgacccttaaaaatctgcttgatgatcgcatctcggtcacccagtttggcgtggtgcctgatggaacagatgtgacagctaaactctgtgcagctcttgatgcggctaatggagactattctcagttggtagaatatgggaaaaacagaaaaaccctttatatcccgcccggtgactatgttgtagacatgaccaagctgactggcatccacgcttctgctggtcgctttgtgatccgctgtaacattgattgtgtaggccgcatccctaacggggatttccttgttgcgcatgttcgatcaattaacgtgagtgggttgtcaggaaagagcctgaatattagaggttttcagttttgcaacttcattaacattgatatgattggtgaaactaaattaatgggatcaacttcattcactcttccaggtttaattagctggggtgggggttcttattggaataattttgaaagattgaggagtggaaccacaagcgggggtgggaaattaattatcgattgttctgatggatcagttaatcagaattcattaacacaagtgctatgctctgggattaaagttacgggttcaggctctaatccagctggtatactttatgaagcccatcagaatagtttttatggcgttgactgctctggaacaggagattatttattagataacgatacgccattaaaccaacacaatattgttagggatttatacggggaagtaaacggcaatggaagaataaggggtaactggagtgtaattggttatcgttgtcagtttggcaatgttgcatcaacactaggccacatgaacacaatgctgttctcagagccaagctctaaccagcaaggtggagactttatgtctgggtctattgctaacctgtgccctagtggggattggagtgttatcaatgccgaaggagcccctgtggactacaaggcaataaactcaggtgcctatgtgggtattgaccccaatgaaccttccggctgtggtcgttggttcgggtatgccacaactaccgaggtatcttatctacaagttgctatgcttcgctctggaagtggttatgttcgaggtgcattctaccttaggggggaacctcttgtgattagcatccagtccgaagatagcactggttccttctatcaagatgttactaagttcacggacatgggtaactcttggaggctttatcgctttgcagggccggtagataagaccaaggcatctcgtgttgttatatcagtgggtgcgggtaaatctcttgtactggggggctttgttgcgtcaccttatcaaacctcattcttgcctgcattctgtggctgggataaatgcaaaggtaaggcgagtatcatgccaaactccaatttgcctccggtaggtttcatattttatcgcagcagcgcagtgaatccacctaccgacccaacatacgcatgggtacacaaaggctcaggagcatattcatcgataaatgttgcatcttaa

SEQ ID NO: 167455 - DNA, 1413 bp, Enterobacter cloacae
atgcatcttaacaaaaaagatttcgctatttgcttcagcgccgcctttgtgtttttcttacctttaatgatggctggtgtttactatagggatgacctagacagggcgacaactggttactttggatggagttcactcggtaggccttttgctgacctgatcttggtgttgttttcttcatcatctacgcatgctgtcaatttattcccattatcaatagtatacacatctgtatttattgcattagccgcttacttccttggttgctatcttaaaagaagtggtgaggttaattatcgcctgatatcggcaatgattatcttcaatccattttatttacaaaatgctgcttatcgatatgatagcatcggaatgtcacttgcatttgcattaagtgttttttcattttgtttttttagtaagagcattgcagtaaagtatactgtatcagttatctcgttgatactggcgctaagcacgtatcaaacatgcacaaatgtgtttatagctttaataggttttgaagttcttatttcattgaaaagtaaaacctatactgacgttttcaaaattgtagcaagcaggtgcttggtatttgtaactgcatatgcagtgtatctgttaagcatttcaaatatatttgccagcggaaactcaagagcagaaacaatttcctttggtgatttaggtttgctaggtaacactctatcaaggttaaatcattttgtgttatcttatttcgaaggtttaaatcttatttacttcgcaatagcattgctgctcgggatggtagtttattttaccaagaacattaaaactggtgcatttaaaataacgttatcaatctttatcgtgttcttgtctctgtacgtatcacttttaggtccagcggctcttcttaaaagcgcacctatcgcaccacgcaccattgttagttttagcatgatatttgttgtaataacatatatgttgagccacgtaaatattacaagattcattgctttcttgcccgtgatatctgttttcgcttttagcgcaaatgttgctaatgcaatgaaacttcaaagagattacgagcaagttgttttttctggcgttaaaaatgatctgcgcaaaattaatgatatcaaagatgtccggttcgttggcactgtcaactacagccctatgacatcgagaatcgttagtggtcggaagttatacgaaccttttgtcagcagagcttcagaatggattgctgcatttcagcttaatgaaatgggggttaaaaacgtctatcttggttatggcaaggatcgtcataacagagagctattacgatcaataaaaagcaagccgttcgcaaagaatgatgattactccatattttttgatggaaagaccgctgtcatagtcttaggtgatggccgctaa

SEQ ID NO: 167456 - DNA, 483 bp, Enterobacter cloacae
atgatctgggaattcgtcaaagcgtactggaagcaactgtatatcgtcgcaatggttatagtgtcgattattgcctgccgggtagcctggctgaagcatggggatatccagtacgacgccggttatgcgcaggcacagtcagaccgcaaagcagaagatgataaagctcgtcagcaggacgaacaggagaaagagaccaatgaacgtgaagcgcagcagaggatcgaccaggcgcgtaatgatgctcttgatgctgccgctcgcgctggccggttgcagcaacagctcgttgccatccgtgagcagctcaggcagtataacgccactgtcggcgctgggacgtcagccgcagacaccggagttttgcttgccgacgtgctcagcaaatctctcgagcgaaaccgacaactggcagagtacgctgaccgggccgcagaagccggacgagtctgtgaaaagcagtacgattcgctgacccggtga

SEQ ID NO: 167457 - DNA, 702 bp, Enterobacter cloacae
atgtcccaacaagaaatcagcatcattaacctcgaccagcttgtgtccatgacctcagttgaaattgcggagctgacaggcaaggatcaccgaaatgtcctgcgcgatattcgcaatatggctgaggagcttaacgcgctcaaaactgagctggttggcgaggaagtatacaaggacgctaaaggcgagagccgggtaatgtaccgtctcgaccgtaagcatacttttattctggtcgctggctattccgttcacctccgcgccaagtgttacgaccatattcagacgttagagcgtcgagtccttcaactggaagaccagaagaagcgagcagccattcagtctgctaaccgtcgaggcgtgacttggggtgactactgcaaaacctatggtctacctgctcagaagctaatgaccgcacttcttcagcatcgtggtctctttcgtaagaatccaatcagtaacgagtggtctgtaaatccaaagtattccgactgcttccgtatcattaagccgtcagaccagaagttctcagcaggtggttataactttcgcttcaacgctaagggattggaggtcttcggtaagcctgcgatagtcgataaactgcgaggcatccttattgccttcactggcaccgaccagcagaagcaagagcatctcctgaagcaggcccaatccggcaagctggagggactctaa

SEQ ID NO: 167458 - DNA, 165 bp, Enterobacter cloacae
atgtctaacattaagaatatcaatcccgtcatgatcaccgatgatgataaagcttcagtggcaattaaaaatggagacatttatcttcgcgttcgcggtacggtttattcgttcacgacggtaggttttgatgtccgcacgcatctcgatagctcgccttactga

SEQ ID NO: 167459 - DNA, 1245 bp, Enterobacter cloacae
atgaccaatttaaacaaatggtgctatatgtatataacttcaaaattgaatgagtttgaaaacggattcgataatagttctgatatttttaatcgtaagcctttgtttgaacaaataaagcgccttatcattaattctccagatgctaacctggtctttgcaatagatgatgtttggggaagtggtaaaacatcctttgttaagatgctaaaatctgaaattgagctaaataacagtgaagatattgatgtcgtatattttgatgcttttgaaaatgactatcagtctgatccttttatttccatatctgctgagctttattctttacttaaatccaaagggcctgatgctgagtttgttgcagagaaaatcatacaaaccggaaagaaaattggcgcaaaaatattggtcgggagcgctaaaatagcaattactgctctaacggcaggagttgttaatggaactgtaatcgataaggctaacgatgttattagtgattctattagtagtgaaatggagtctttcgttgaaagtaaaattaaatccatggaggatgaaaaaaaagaaattattgactttaaggaatcattggaaaaaatatatataaacactaaaaagaaaacattagttataatagatgagctggatcgtgctaggccggactattcacttgatttgcttgagaaaataaaacatcttttttcagtaaaaggtttggtttttttattggtcatgaatcgcgagcaatttgaaaagggaatagcttgtagatatggcgatataaatacgagtctataccttaataaattcatacactattggtttactttgccaaaagtaaatcttcatgatctgaataatgactataatcaaagcggaactacaatctatgattatgtacagaaacttgtaagaatgaatcactcattaggtataagttcaaatgggatgttttcaaaattattatcttatctgattgaggttaataactgctcgttacgagaagctgaacgctgcctatctgctatggtagttgttgataatcatgaaaatattgcacgcaatcgtgataatttctatatggccgcgttggcgcttgtatgttttttgaaagttacatcatcaggaatactttacaagttgttgaggaaggaaggtaaaactcaggatatcttagatttgttgaacgcaaataatcaagagtttcaacttaagccagaaggggtaatgactccaacttattga

SEQ ID NO: 167460 - DNA, 852 bp, Enterobacter cloacae
atgaaaattaaaaacaaagcagcaacaaactattctttgataattgtattttttgctgcagcatactattttgcttggtcactttaccccgactcatttataaaaaacaacgcactaaactccactcccattcataatgctatgaatttagcgttttcgtataatggtgaagattatgaagaacatgataagatttcaaacgagtttttttccaacgagactttgaaagcaaaaaatgaatttgacataataactagtcaaagcattaattttgaaaatatactatcccagcaagaatcaaaactaaaattaataaacgaaaatctgtcaaaagcatggactaggaatacagaggcatatgtggatgaagcgtctcttaaaaatcacaaggaactgaacgtaaaagaagatgagctaaaggctatattgtcacagaagaataaaactcaaggaagccagtttgatattatgttggcttataaaaatatagaaatatcggaagttaaactcaggatagcaacttcagaacgcaatgctttagaatatattttatcacatgctggtgacttcaatgatccaaaactcgtttctgaattaaatgccaccaataaaataatagatgacacaagatctaaatttcaagatttgttgagtaaacgtcaaaaagaagatctcaatttttgggatttcgtcttttacagcattggaatatcaacaacaactacatttggtgatttagtagccaactcaagattaatcagaatgctagtttgcatacaactgttgttatctattttggtgctagccaacgtaactcaaaatttcttgtcaaaaaataaaaactccctatga

SEQ ID NO: 167461 - DNA, 1227 bp, Enterobacter cloacae
atgtacgacagtgaaatgaaagcatttgcgaaagagcaagagcaaaagttgatcaacgccttggcaaatactagagaacactttggtaccaattttgaagtaagaaatcgagatgactatcagcgcgattacgcacgaattctgtattcatcatcatttcgcagattacagggaaagatgcagcttttcgaagtcgatcctgaaaaattcaacagaaacagattaacgcacagtcttgaggtagcgcaaatcgccagaagtatcgcatcagacctcgaactggttcatcccgtggtggttgagctggcagctctcgcgcatgatatcggcaatcctccatttggtcattcaggtgaaaaactgcttaacgagctgtctgaggatattggaggttacgaaggtaacgcgcaggcgctacgcatcctgaggaagcttgaaaaaaaatatgcaggctgtagtggtttgaatctgacttaccgcagcttgctttcggttattaaataccccaatacccgttctactgctaacaaattcatttatgatgacgactttgatttttacaataacctactttctgaaaggcagctcgatctgaaatctggagagaaaacgattgatgcgcagataatggatcttgcggatgaaattgcctatgcagcacatgatctagaagatgccctaagcagaaacatggtcacgatcgaagacattgagtatgaatttctgatttctgacaaattccaatgcgcgttagaccagtttagggaacttgtcagtaagtcaaaagtaacagcctttcaggaaatttcacttaagacctcagaggagtttgcaatgattttccgtaaggaattgacctccaatattgtcaattgcctcgtcacggacatttctgtaataaagaacaaaaatggcttttatgagcttggattcggaaatctgaatgccttatcggaaggtctaaaaaagcttctttttaaagtcatcatgagaaaacgtaatatacttacctatgagttcagaggaaatgtgataatcaatgatttatacgttttctataataaggatgaaaattataagttcctctcccctgaacttaagttttccttgcccaaagaggacactgatgcctttgaggccaagaaaaagcgggcggtggttgactatatttccggtatgatggacacgtttgctataaaagaatgggaaacgcattgcctgaaataa

SEQ ID NO: 167462 - DNA, 1509 bp, Enterobacter cloacae
atgaatatagtttatctctcagccactgcaataactgtcgcagttttgtctgttgtcatcatttttgtccttttgacaaaattacgcgcagtgaaagcctctgatgccagtaaaacagcacaacttgagcgttataccgtcatttctgatgcagaaacggaagcaactcgaatagcgcaagaggcggaacaacaagctcgagaaatcatcgacagcgcaaaaagtaccgccacctctatcgagaaggaagcaaccgcattgctaagtaatgcacagtcaacgaccctatcattacaggatcaaattacgtcattacgtgcttcttatgccgagaaaaaaagcatctatgacgaacttgaaaaagcgatagctctatatcgcgaggatgtagattttgctgagatgggtatgttcgaaccacatttcgatttcgatacctctgaagagtttaaggaggcgctcaaagataacagaaatgagcaaaaagccttgttacgcctcaagaaccaagccggagctatctggtgtggaactgactggagggtccataattcccgcgccgaagggaaaaaaatgactacccgagctatcaacctaacagcgagagcattcaatggtgagtgtgatgccgcaattgccaactgtacatttaagaactggtctgtcatgcatgacaggatccaggctgctttcaataaaatcaacgctctcaacgaagtaaatgatgtgcatatcagtagagaatatctcagattgaaactgaaagagctcgaccttgtacattcctacaaaatgaaaaagcagtcggagaaagaagaacagcgagaaatccgtgctcaaatggcagaagaacgcaaagcgcagcaggagattgagcgggcgattagagaagctgaagcggaagaggttcgcgcacaaaaagcactggataaggcccgtaaggaaatggaatcaaaattggcgcaactgactacagaacaggctgaaaagtatcagtcgaaaattgacgagttgcgtgatgccttaaccgaagcagaacttaagggtcaaaaagctttgagcatggcacagcaaaccaaacgtgggcatgtctatatcatctccaatgtagggtctttcggcgaagatgttttcaaaattggtatgacgcgccgtctcgaccctcaggatcgagtggatgaactgggaagtgcctcagtaccttttctcttcgatgtccatgcaatgatccatagcgaagatgctccagctctggaaaatgctctccatcaacactttgatgctaaacggacaaatctcgttaacagacgtaaagagttttttaacgtcagcctgaaagagattaagagcgctgtttatgaactagctggtaatgacgtcgattttatcgaaacggttgtagcacaacattattacgagacattggcattacgtaacaaacaaagtggagctgcaggggtacaagcgcggaatactaccgtcctgccacgttttgctgaatcaatttga

SEQ ID NO: 167463 - DNA, 1368 bp, Enterobacter cloacae
atgcctatcgaagtccgtggacacctgatcgtgtctccctttacctttgtgtgtgatggtaagctttaccgcagctcaaatgcaaagggctggaccaatattcaggatcagttcggttactcggtgtttggtcgctaccaaaatgcttggcgtgtgcgtaacgttccttgtacatctaatcgtgatagtgagctaacgcgtggcttccgtgcggccctgatgcgccagactggccttaactactctcagattgataactacatcaatgatcaggttagaaagggtaatcaggtgctggttgaaggaaatagcgtgaaagtctacaacggcaagaccacggttaaagtttctggcttctcaaatgatattctaaccgttccagcaaccacgcctgtgcccgtaaagacgaagaaaaacaagaccgagggcatggccgttcatttcgctatgcttcgtagtaaaggagtcccccttggtgacgaacaggcatttcatgactggtacaagcagaatcccaaacagtctaaaggcaagccgctggttgatgctattaagctctggggaaatctgaccgcggaggctgtcgctcagcccgaaccggaggtcacggccgcaatagaacctacctccgtgattaagtctgcgaaggtgaaaaagccaattgcggaaaacaatattgccgtgggatatcgcagaaacggggtaccagaggaacacctagaggcatatcacgactggtattcgaagcaagcggataaatatcacggtatgaaactcgctgaggtagttgacatctggaaagccgaaaatagcttggccaaagccccccctgcgctcgttattttggatattcccgtgccgcaactttgtctgcctgccccaacgccagaatctctagctgcagacaaagtacaaaaagcgaagtcggccagagctacccataaataccgtgagcgcaaaaagcgcaagcttgtggaagatcgctatcacgaagaagatgtgcctttctatgggcaccgccgtcgtaatcaggcgcagtttcgtgcagatgtagccactaactgttacgatcgctgcgttgctacaggtgccagtataatccgctgcgaagctgctcacttggtgcagcatgctcgtaaaggtggggccagctttaaaaatggattattactacgtgcagacctacacagcctgttcgaaatgggcgcaatggcgattgacccagaacagcttactatgcacttcacctcagaagttctagcctctgacccagatctgtggaaacttgaagcgatgaaaattcgcccgaccgataagccgattaaagttgagaatcttttgaaacgctgggaagatttcaataaataa

SEQ ID NO: 167464 - DNA, 1623 bp, Enterobacter cloacae
atggaaaattacgttggtattcctattccttcagagaaaattgaaaatggattattgcccatctataaaggacaggttctttttattcttggggctaatggtgctggcaagtcatcactaatatatcacatactaaaaaacctaagagattataataatgtcgtattgatatctgcgcataggcaaatttggtttgacacatcggttattgatatgtcgaactcggagtttgcttctactttagaatatcttcaaaacaacgtaagatactcaaacacttctcgttggaaagtcgaggatgcaagacaaagcaagcttcctgtcattagattaaaaaaggcaattaatagaaggaatagagatgttgccgataaagtagacgcaagagatatagatggagcgctcaaggttagtgtgtcacctaaagaagtaattaattcagttttaatatcatcaggaatgcctatcacaatagagcacgatgatgaagataatattatggcagtcaactcaaaatataacccgccagcaatttactctatatctcaattatctgatggtgagaaaaatgccataactatatccgctgatgttatatcagcattgccaggcgctctttttatcattgatgagcctgaaaggcatttacataggtctgtttcatcccccttgctatcggaactgatagcaatcaggcctgattgctttttcattgtatcaacacacgatataggtcttgcttcagatatggataattcacagattcttttggtaaaatcatgtaaatatagttctgaaatcgcaacctcgtgggaaacggagctcataagagatcccggttcaattcctgatcacataaaaaaagatattatcggtgcaaaagagaaagttattttcatagagggaataaactcaagtcttgatataggactttataaatcgatttttcccgatgtttcgttaattccgaaggagggctgtgaagatgtggctatttcggtcagaggtattagaggtaatgataagctaggatgggttaatgcatttggtttggttgacaatgataataagaaaacagaagaaattgatagcttaaaaagtgattttatctttacactaaaatatcactctattgaatcaatattctatcatcctgtaatgatagagttcttcataaaaaagtatggtgacatttttgaaattgatatttcggttatgaacaatattaagcaagatattcttgacgtattaattgatccttcaaagaagaaggatttatgtagtcttgctgttaataaatcagtaagatggatgtttaatcaattaatgccaagtcatagaggcggcttcgagaataaaaacgtgtcaattaatgctggagatatttataacaatgagctatcgatttatgaagatgctcttgaacgaaaagatgttaatttcttgatagaaagatattcaattaggcgaactggtatgatagataaaatcattcgcaggcttaactgtccaaatcgtgcattttatgaaactaaaattatgtccttagtaagagatgaccaagaggccagacattttgttatagagtgtttggatggattaccagaatctgtatattcttaa

SEQ ID NO: 167465 - DNA, 558 bp, Enterobacter cloacae
atgtgtataagagacagcaaaagacttgttaataaattaatagctgacatccttaattggaacagacgagcagggattaatgcagtaaaatccatttctggcacaaatctttatataaaatacattaaactttttgctttagaagaaaacaaacatatacttacaactctgaaggaaaaaacaagagatttccatttacttaaagatagaatttgtttttttgaagagttatttaaatctccaaaaaatatcttaaatggcttagacatacatggtcaaagagttgcacaacagataagacgtatttacagagccaggaaccttatagttcatacagggaatctccctagttacacatccatacttattgaaaatttacatgactatttagatgtggttataggtacactcattgagctgaatatttctcagagaagaatatctactatttcacaaggatttaaaatgatggaaattagatactcttcttatcgaagaaaactcgaggttaaaaacctacaatttaaagaagataatattgattctttgttccattaa

SEQ ID NO: 167466 - DNA, 192 bp, Enterobacter cloacae
atgtcaacagctaaacgcgaccctaacaaatctaaatccggaaaagcaccaacttttcaaattcgtattacgccggagttgaaggcacagtttgatgaagctgctaaggatgctgatatgagtctaggaaactggctcaaaaacctaggtcggaaagaattgtcgaaattaggaattgagcctaaaggttag

SEQ ID NO: 167467 - DNA, 423 bp, Enterobacter cloacae; identical to SEQ ID NO: 25058

SEQ ID NO: 167468 - DNA, 1509 bp, Enterobacter cloacae
atggagacgttgcttgccacggaccctgaaaggcatggctatatgtcggggctgaaccgcatccagcgctacttggcaaaacgccggtacgcatgggaagaccgccatcccgtaggtcgaacgatttacgagggcggatacatcaaaatacagccggacgtttacagtcctgttttcctagaacgattgcttcatgtctgttgcagcatggactacatggagcaaaagagagctgatgagctggcatacaagctggctactggtcaagcagaggataacgactggaaccgtcgaatggcagagccacaattccggatcatatcggaagaggctttagtccatatcgacttcatgtgggccttccatcatttcaatgataagcctttccatgccctggagatttaccacagggtttggtcgatgggtgatctggacttgctggaagacgagccgcagtgtgaaaccgttcctcagtcaccaattccgaagccattgtggttgaaggttggtcgctggggcgatggttcgctttctgatggcttggccgatccgttagcggaaatggcttactttgacggcggggatgacccgttggcagcgcaagtgatcaataccgcagacggaaagagaagggtggtttgcttcgcagaagatgatgaagtgaaagtcgatcccgactccgctgcgttcatcatctggaacgaatacccgcgactaagggagtctgtactaaagggacattatacgcccggtagtgcagcgcagttctaccttcggttcggagcaatccagcttgcgaaaggaaaaggcgctttgtatcaccgtatgatgcaaagaggtcaaacctaccaccagatgggccttacagggctacagacgatggaaggaatccaacagcgcaaggatgtcaaagtgcttagcgatgctaagtacaaagatctggtgaagcgaaaaatcaagggaagactggcaacggtacgctggtgggtcaacttgcacttaacgttcaagtaccatctgcaccaccgtactccgacggggttgttcatcgagaagcaacttgaccaggaagcaatggaagaacagaaacggcatcaggagcgatggtttaactacgtgactgacgcgatgctttgttactccagcgcattctgtatgagcgtcatggaagggcgagaggggagcggaaacgccaacattcgtcgttacatggccgcgaccagaaggaaggcttatacggccctctgcgagctcttggacaatactgacgcccagtggatgaatgatgtggtccagagtgccgtagggcagtatgaggcgatacaggcagccctaaccgaaggttccgcgcttgctatctatctcgactggatcaacctactgtcaaaacgccatccagcctctttggagcgacatgtcagaacgatgatcaaggcggttcaacgcttacatcgccgcgacgacacagagttgcaaagaggacagcaaggcttgtccttggccgcataa

SEQ ID NO: 167469 - DNA, 195 bp, Enterobacter cloacae
atgaaaaaatatcttactatattagcgttagcggcgttcgggctgtctggcgcagcgcattccgcgttagaatgtaaatttaacagtaatgatacgctgctcattatgtctccgggcacacagccggtcattacacctctgcctgttggtacggtaacgacacccgtgcagatcagtaacactattattatgtaa

SEQ ID NO: 167470 - DNA, 1137 bp, Enterobacter cloacae
atgcgcgcgtggtggttatacaaacaacagccagacccggattccactgtgccagtcgtcatgattgttttcctctatgtgatagccgtcgcaatgggcctcgcgatccgggctctcacctggcctgaacaggaacacgttacggctctcttttttgtgccttcagttattctgcccatctgtgttgtatcgttgctagtttttacaagtttcatatttcatgacgccaacattcattatgctgaaacccgaaaattcatagcaaaagagcaggagattaatttaaaggcgtatgcgcgaaaaaatatcgctatcgcagcatggtctgcaatcacccccctggaggaacccgcgctgaatatgttgaaactggaaggcgaatttccgctggcaccgaaaacgccggttaatattcagctggaagatcgcttcgaccagaccaggaatgaacagatgttttaccgcttactggacccgatggcagaaaaattgaaggactataactaccgtatttttgaaaccgttgtctgggttcacggagggagtggatcctgcattgatgaactgaggcgcactctggagcggttgggtattgaaacggcaagcacgtgtaaaattgagtacagcacagaatgtcctgactacgcgatcgttagccaatggatgaacttatctgattacagagttgaaaaccggttgattgttatcgttgatttacatgaagaaagcggcgaatcaaagagcatggaaaatgcatgtgcattcctgctaaccagtcattatgtccgggaggagggcgaaaaaccggtatatttatatcagcctatgtctgacgtgaccgatgtagaggacaaaatggcggtcttccttgagacgggttcggtacttacgccgaaaaatctctggtataccgggctgtcccgtattgaaaaatatccattaatgcaggcactggataaaaaagcgctcacggtggaacggctggatatcgatgcctctctgggcgcaaagagtgccgggtatcggtggctggctctctggcatttgcggcggatgcggtcaaatatgcccagggggagcaactggcagcttattcagacaaaaacaaattttgtattacttcgctttcctccatga

SEQ ID NO: 167471 - DNA, 864 bp, Enterobacter cloacae
atggcaatgaaaactgaattagcaccagtagcggctcgcgacttgcagatcatcgagtatcgcggtcagcgggttgtgactactgagcagttggcagcgggatatggcacggatgaggtaaacatccgtaaaaacctgtcacgcaatctggaacggttcgaagagggtaagcattacttccttctgactggctcagagctaaagggatttaagaacctagtacctgaaagtcacttggttaataaacatacaagccagctgattctctggaccgaacgcggcgcggctcgcatgtcaaaagtcgtcgataccgatcaggcgtggggatatcacgaagacctggtggaattttactttactcagcgtgatgccatcgcggcaccgtcaacacaggtggccctcagccgtaagcagctggcgatgatggttatcgaggccgaagagcgagccgaagccactgcgctggaaaataaaacactaagcgtgacggttgagaatctggagaagcactttaccaaaggaatgactctgcctgcgttcggcaaggcgctcaatggtgttaacaccagcaaaattacctggtgggcatatcagcgcggctggatttacaacgaacaaccagatccagagaaagaaccgcgttggcgcgttaaatcttatgcccgtgacaaataccttactgagcaggacatacagattaaggacgtgggcaaagagccattcactaaaaagaaaatcgttctactgcagaaaggcacccatcggatttatcaactctacctcaaaggtgagttgccgatgaaaaccacctggaacggcgagttcagccacgacaaagcgatttatacgccggaggaaaaatga

SEQ ID NO: 167472 - DNA, 429 bp, Enterobacter cloacae
gtggaaaataacgcattcgtaccggctggctctatcgagctagcccaccagcaagctctgacatgggtatgcgatgcgtatctgttttatctggtcagcctgcaccgccgcccggtttatcgccaccagttcggcgatatttcgcttaatcagccagcattgcaggcattcatcgattcgtatctggaagacaagggctgggatatggatcgtcgccgtgcacattacatcaatatgctcgatctcatcgcctatatgagccgaaaaaattcagactttatcgactggggaactgtaccagcgctaaccccaagaggcatccgctggatgaatgcgtgtttctcgaggcttggggaaatggtcagcagttatggaggatgggaaggatacaagactgctgttggggagaaattattgcatgaaagctaa

SEQ ID NO: 167473 - DNA, 333 bp, Enterobacter cloacae
gtgactgactccaatctgttcgagctggttaaattgattgaatccgctgccggtgatccatcggcaatgacagatgctatctgggaggctggttatcgccagcctgagaggacagagcaggaggcagccaaaataaccatcgacaccttcttctactgcatggccttcgacatgccgactgacttctggccccgtgattacgacggcgttctcaagaatgaactgatgaaagctgttgggggtgaagacggcgaactgtgggggggcgatccaaaaactatcgcccgcagcgttatcagcgcgggattcagcaaggaggcaacaaatgggtga

SEQ ID NO: 167474 - DNA, 354 bp, Enterobacter cloacae
atgtcaaagaatcttgttaagtcgtggacaacaaaatcaggcctcaacgcatttatttttcttattaaagattcgcaccattgtggttatgtcgtgctaccagcctgcctaagcgactttgattttgatgaggagttaatcgatgtccatggggggataacctacagcggtaatccagactggtctggaggattgacggttattggctatgactgtgcgcatgcgggcgatcaatgctttggatataaagatggagtatggcgtgatgtcgatttctgtacggatgagtgcgaaaaattagcttctcaactgatctctttgactaacaggaatgtggacggaaacataaagtaa

SEQ ID NO: 167475 - DNA, 555 bp, Enterobacter cloacae
gtgaaactgattaattatttgctttcagaaagcaaaaaaggatggaagtggcccagccacgtagttaaagctgtagtcatggaaggagacagaggcgttaacttttattttgactatacatgccctcctagtttatctgagactcttatttcaccgcatccgttcacatctgcagaggtagtaacgagccagcaatacgaagccgcacttgcagccagcaagccagaatggaatggcgatggtgtgcctccggtaggaactgaatgcgaatattcactaaacgctggtcgcacatggttcaaatgtaaaattgactatgtactaggcacgcaaggtttaatcatgcttgctgacgtgtatgaaggcggtcaatttgtgggctttgcagagtatgatgggaagttgaaattccgccctatccgctcagaagcagataagaagaaggaagaggcagtttttgccattgctgaattatgccgacagtcagccagcaacggtcactcagcagaacttatctacgacgctatcaagtcaggaaaaatcataatcgactag

SEQ ID NO: 167476 - DNA, 528 bp, Enterobacter cloacae
atgtcaaagcaaccgttaacacacgaaagactattgcatttgctttcatacaatgaagtcgaaggcgtgtttacatggaatgttaccaatagcgcaagagctgttgctgggaaaagagctggcacaatcaatggtccaggatatagatgcattcagttagatggggtcatttacaccgagcatagactggctatgttttatattaatggaacatggcctgaggtggtagatcatatcaatggagttagaggtgacaaccgcattgcaaatttaagagaggctacgccgttaagtaactcatggaactcatctttgcgcaaaaacaatacatcgggctatacgggtgtgtgctggcataagcagaatcgaaagtggaaggttcagtttaagtttgaaggtaagagttattcgtttggtctttatgatgatgttcatgaggcaggaaaggtggctgatagggagagaaggaatctccacaaggagttcacaagcaatagagataatccaaaattgcctacttccccataa

SEQ ID NO: 167477 - DNA, 672 bp, Enterobacter cloacae
atgagtgtgaatcgttatgagtttgaagattatggcaccaatgaagatgacggccgttatgtgacttacgaagactacgccgcacttgaggccagatgcgcggcgttggctggcttatttggcgatgtaaaagagatttttggttttaagtatcgctatttcatcacctcaaaggggctcattttctcattgtcctctggcgaactaagacagttaaacccaaccatgcgcggcaagaacagaaatcagtatttattcgttaggctggagcttgaagggaaactgaaaggcgtaaacatccaccgattagttgctgaaaactttcttggaccaaaaccttccgatgagcacgtcattaaccacaaggacggaaacaaacaaaacaatgatgtttcaaacctggaatggacaacgattgctggtaacactcagcacgcatatagaacaggcttggccggcggaagaaaacacggatcgtataaaggacctgtctgcgcagagaacgaggaaggttttgggtatgtgttcttcgacagcaaacaggctatcgaggctggatttaacccaaactcaatcagggacgctgtagttaagccatggaagaaagtattcggattctattttagccgcatcaataccgaagttcagcttcgcaaaggagtgcagtcatga

SEQ ID NO: 167478 - DNA, 267 bp, Enterobacter cloacae
atgctcgcgcaggatgagcgcaactacatatcggaatactgggcagggaagatgccagggaaggaaggaagccataccggtgggataacgattaattgccgaaacccatactggacaaccgaaggcctctgctcatgggataactggtatatcagcgccgcagagctggaaagcgtaaaggatgtatgcgaagcggagccgtggggaggaaatgttcttggtgggattgagtaccggctgaaatctgaattgaggaaagcagcatga

SEQ ID NO: 167479 - DNA, 192 bp, Enterobacter cloacae
atggagtggattaagtgtagtgatcggatgccggatgagaatgcagaaaaagaggttctagcatgcttcaagggtggtgacatatcgactctgtattatttcgagggtcgatgggatgacgcatacggaatcgttccgattcgacaggacgttacccactggatgccattacctgaaccaccaagcgaatag

SEQ ID NO: 167480 - DNA, 294 bp, Enterobacter cloacae
atgaaagagtttaagggatgtaaaggtgattgggttcatcacaagccacatggatatcagcattcagttggtggctggattcagtcagaaaaaggaaaggtttgtgatgttgccggattggatgttggcagagaagcggcatttgccaacgcccgcctgatagcagctgcacctgatttgctcgaagctctgcttagcattgtcaatatggactatcagcctacagacgatgagtctgacaaggtgtatttaaaggctcgcgcagccattagcaaggctctgggggaggagtga

SEQ ID NO: 167481 - DNA, 282 bp, Enterobacter cloacae
atggaacacgcaagttacagcaagccaacccagcgagacattgatcgcaccgagacagatttactcatcaacctctctacagtaacacagcggggcttagcgaagatggtgggatgtcatgagtcgaagataagcagaactgactggcgctttatagcggcggttctgtgcgcttttgggatggattcagatatcagtccgatcagtcgtgcattcaggcatgcgctggaaggattaaccaaagaaaaggcctcgatgagcggtaactcattcgaggcctga

SEQ ID NO: 167482 - DNA, 279 bp, Enterobacter cloacae
atggaaaacccaacgattgcacagatgctcatgaacccacgattcatggcggtacttgataagtgtctggaagaggaggagctgatatctcaatttgagaggatttatgaggttagccgaccagctaagcgtaagcatcaactcgaagcgctggtagataaggtcacaggttatgcagatagccagtgggaaaatttctacgataagtttatcccgttcgtttatgaagtcgtctggcttcgctggcctgaacgagataatgaggactgctggaaatga

SEQ ID NO: 167483 - DNA, 453 bp, Enterobacter cloacae
atgaacacacgagacaaaatactcaaccacctcgaaagcaacaaaccaacatcagcaagagagtttcatcagcttacctgcgcaccaaaatcccgcattacccaattactccgcgaactcacagaatcaggccagcttgaaatccacagcgtccataacggcatcaagcgttatcggctgactgagcttcatgctaaccgtcgccaggcgattctggactggctggacggtggaagcgaaggaacatcaggagctatctcagcagcaaccggagtagacctgcaaatgacagctcagattctggcatcgctgagcaagcagggtgaggtttatcgtgagtggttaggccgcgagaaggtctggctgtatcgcaagaatgcaccctttaccttcggctgcgccaatcagatgactgcatttatcaacaaggctctaagagaggtaatgacgtga

SEQ ID NO: 167484 - DNA, 318 bp, Enterobacter cloacae
atggaaacaacaaacgaaccttttagcctgattatcaatgatccggttgagctgaccatggcatcacttaagtcaaagctgattatcacgataacgcagctaattaggcaggaaggatggacacaggttgttgctgcaaaacggcttggagtcagccagccaagagttagtaacttgcttcatggctatgtatcaaagttctcgatagacatgcttttggagatgctctgcaaaatcggctttgtagttgatgtgacattcagaccgcacaacacggaaagcccaatcgagatgacaatcaaaaaggcggtagtttag

SEQ ID NO: 167485 - DNA, 255 bp, Enterobacter cloacae
atggacgaatcaagaaagcagtttttggagtggtggattcagccagaacaagaagaacttcggaaaagttgcgcagaaggttgggcggagaaaatctgggcttcgtctcgggatgagaccaaaattgagctaccgcgaccaatcagtatgcttgtgcgctttagctttaactcaacataccattcagtaaacgctatcaaatttgatgatgttaaaaaagccatcctcgccgctggaatcaaagtgaaggagtga

SEQ ID NO: 167486 - DNA, 165 bp, Enterobacter cloacae
atgagcgcatacgaagaaatcatgttagccctgcgattctttttcgatgttgaagaagatgaaaacgtaaacgagattatcgggcaagaccatgacccgatcggaaccattgcggctgcacttgacgattacaggagcgtgaagggtgaggaaactaacgtttga

SEQ ID NO: 167487 - DNA, 396 bp, Enterobacter cloacae
atgctgttaattcaaactggattcggactgagcataaagcaagggcatatgtttggtcagaaagaatccaacagaaagatggttgccataaagcttccgtttatctgcatttactggctcaacaagcccgcaacagcctattggtacgagtgcgcgcgagcggcattcaatgaccctgggtggttcatagaaaatcatcacgcagttcggcaggctaagcgcaaggcaacattaaccaaaatgaaggcctaccagcaggcatgggaagagcatcaggcgcgttaccagaaggatagagagaagcttgaagaagaaaacatgagcttaaagaaaaaactcaccgaagcaataagagacatcgaggcgttcagaagaatttacggagataaaaaatga

SEQ ID NO: 167488 - DNA, 231 bp, Enterobacter cloacae
atgagcagtcttatcgaagattaccagggccgactcgatgacctgctcaacgaggcatcagaagacgacattgaccccattgacctgctgatcaactcaatcgccgattatctggaaggcgagcttgaggatgaagaagacaaaacgctttgcgtcgacttcggcggaaagagcctgattatcagcatcgtcagcaatgacgaccagccagttagcgagagggtgcattga

SEQ ID NO: 167489 - DNA, 468 bp, Enterobacter cloacae
atggactattcacagttatcagattttgaaattaacaaacttgtagcgattgctttgggcttagaggttaaggactggccagaagcggatcgcccatacatttggcatgtcgtcaaaaatgaattgggaaacgattattttgattacacggactacaaggattactgcaataacgcttcagacgcgtggcctatcatccaggacaacttaatcagcatcatcttcgatgaagacggcaacgaacctccgcaaaatgcctggtgtaaggccatcaccaaaacaggtgagtctcactatggtagcgagaaagagccgcttaaaacggcaatgatcgcgttcctcatgaaggccaataaatgcaccttctgcgatggcaatggattaattcaaattgaccacggggaaaacatcggcattgagtataaagcctgccctcaatgcgaaggaaaatgctatgtgcacccttag

SEQ ID NO: 167490 - DNA, 519 bp, Enterobacter cloacae
atgggagtgcgtgaacttaacctgacgaaagagcagcatgactggctcaatggctggcttgaactgtggggtgcatgggtttactcgggtcggctggaaaaacgcatgagcagcgttatagcgcagtttatggagagggtagaaccatcacgagtaatgacaaggccaatgtgcaatgacgatgacggaatgttgatttctcaggtcgtagattccgttatgcgcatcgacacaaaggcctttggtattcttctcagctactactctcacggctcttccaagagagcaattgcatcgtactaccatgcgactgcaaagccacgcaagatgtgcggcagaagcggagaaggatggcgtcgaccgtctctggcaacgtgtaggaacgagattgacgaaatcctcaaagcttcactcttcgttttatatcaacccatgcaagatgcctttaaaagtcgcaaacgtgttgagaaagttaaacatgttgctcctaaaaggcttgacaaccttttagtcatttag

SEQ ID NO: 167491 - DNA, 522 bp, Enterobacter cloacae
atgctaagcgaaacagcaaaagatatcgcaggatatgaaggcaaatattccgtaacgactgatggacgtgtttattcgcattcgcgagttgatgcatatggaaggttacagaaaggcaggtggcttaagcctattaatcatggtgatggttacttgtatgtaaacctgcgcgacaaaggaaaaactaaacaactttacattcataggttagtagcgatcacattcattgataacttggactctcttccgcaggtaaaccacataaatggaatcaagacggataacagagtagagaatcttgagtgggttacgggtagccagaatatggtgcatgctagcaagtcaggattgctaaatcccatcagcggtgagcgtcactattgtgcaaaactcactactgagcaagtgaaagaaatacgtgcgtgcaaatcaatgtcacatcgtgaaatggcgagaatgtacggcgtatcaaaagcaacaatttcaggaattcttaacaataagacatggattattgattaa

SEQ ID NO: 167492 - DNA, 378 bp, Enterobacter cloacae
atgaacagggtaacggcaatcatcgtcgctgtggtggcctgtatcattgtttctctggtatgggtcgccaatcactaccgcgacaacgctatttccttcaaagaccagcgcgataaagcgacggtccgagcagagacatctgaggcgatctccaacaacgtgatcaccacaatgaacctcatccgtgacatttcacaggctacccagaatgcaaagaacgaactggctcaaaaaggcgagacgcgcattgtctacatcagacaggaacttgaaggcgatccgtgtgctaaccagcttgttccttctgccgctgctgacagcctgcgggaatacgcagacagtttacgtaccagccccggtggttccgataagcgctga

SEQ ID NO: 167493 - DNA, 261 bp, Enterobacter cloacae
atgggcgatcagcgcgcatttagccgactcgaacagggctgcgtcgagctggatgatgcacacctcagttgtgaaaccgagctgacgagctttcaggatgatgttacgggtgtggatcccctcgaagtattcccgctgctcaggcgtcatcctgaagcgcgttggctttccctctttgtcggtgatccagtaaagattgttaagccgccagtctttattggaaagcagcttgatgtgctcaggtttcattacgccccctga

SEQ ID NO: 167494 - DNA, 378 bp, Enterobacter cloacae
atgagcaacatcgacaaacgcgcattacgtgaaatcgctgaggtagcagttggtgcacatgagcgccttagtgttatgccgcctgatgatattttcgatatctcactggtagaagaaactcagcttgatgcagatatcactgccttgaacgcgctgaactcctcagccaaccccgccaccgtgctggcgcttctggatgagctggaagccgcagagaagcggattgctgagctggaagcgaagctcgatagcgcagataaattgcaagatagcgcatttcgtcatggtcttcagcatggcttcagtttaggtcaaacggataatcaggctggatttgaagagtgcttatcttcctatggaaccggtaaaggagagtga

SEQ ID NO: 167495 - DNA, 900 bp, Enterobacter cloacae
atggcaaacactgctgaagtaatcaaattccctgtgccagaaccggcgcagcaggagaatcgcatggctgatctggacaatggctatcttcgccttgccaaccagattcaggatgccctgtgtatcgtagagctttcgggtcgtgagtttcgcgtactgaatgcgatagttcgcctgacgtatggctggtccaagaaagaagatcggatcaccaacagcctcattgctgataaaaccagcctggcggtcaagcacgtttctgaagccgtgctcagcctggcctatcgcaatatcatcaagatgcgcagaatcgggcaaacacgttacatcgggattaatacctgtctggataaatgggcttatacgaaaccgaaatgcgcaaagtgcccggttaatttctctcaacctgaattagtaacacaagttatcaccatccctgaaaacagggatatcaatttcaccatcaaaaccatccccgaaaacggggataaccatccccaaaatcagggagaggtatccccgaaaacagggaacaccaaagacattcttccaaagacaaatataaaacctaataccccctctaatcccccaagggggaagagcaagtttgatccgctgagcattctggtccctgagtggctcaatccaacagcctgggaggaatgggtggcctatcgcaagcaggcaggcaaaccaatcaaaacggaactgaccgttaccaaggccttcaagctgctaagagagtgtctggacgaagggcataaccctgtcgatgtgattaacaccagtatcgccaacggataccagggactgttcaaaccgaagttcgcggttaaaccagtcgctaagccggatctggactacaacaacactgactgggcctatggggtgatgcgatga

SEQ ID NO: 167496 - DNA, 585 bp, Enterobacter cloacae
atgattcctggcggcatggctcgcatagaatttgacggaacaacgtttgaagccaccaggcctaacggcagctttgtcacatcacctcttctcgctctggcaaacaatgggatgcttatggttgatgataagaccaaggtattcgttgctaatcagcagaaaactgaattcgctgtctctgacagaatagctaaaacaaccgagcaatgggcgaactgtaaaccagacgcagctgtagcccaactgaataaagtagacaaagaaattgctgaggttcagaagctttcagggtcaaaagccaaatcatatttcatgaatgagaagcacgcgtttctgacaaattgtatggtctgggatgatgtgacgatgattactggcaaggcaccggccatggtaattgcaggaagcattcacatggggactaatccgcgatgggatggaaaggagtattcattcaaattcaacggtggctctatgattgcgagattcaccccatcagaaccaaagcacaagctactcatccaggctggcgataaattctatggttgcggaccctctaccgtcgaccatacctttgatgattaa

SEQ ID NO: 167497 - DNA, 687 bp, Enterobacter cloacae
atgatacccaaagttatacattatatttggctaggtggtaatcagcttccaaagacttattcggactgtatcaaatcatgggaagattatgccggtgattttgaagttaaaatttgggatgaaaaaaactatagagctcatttcggtactgatgattttgttgaatcaatgttaaacaaaaggaagtttgcttttgcagcagattatataagatgtcaagtcttattcgaatttggtggtgtttaccttgatactgatatggaattagttcgtagtatagaaaaattatgtcttcacgtcgcttttctcggagaagaggacataaataaacccagttgcggtattcttggatgtcaaccaaaattctggctttttggcgaacttatgcaagcagttaagaatgcaaatggattatttactattccagaacttttgaaaaacattcttgatgaaaggcaaatagccaggaaggattcagaagatattacgactattcaagatgtaacgatctattcagaaaaattcttttatccttataatccctacggtagtgcaggcagggtgcaattgttatatcgttatgtttctaaagattgttacgccatacatcattggggaaagtcatggagcctttcttttacacaacgtttaaaaagaaagttattaaaaattatgaggagaaaataa

SEQ ID NO: 167498 - DNA, 936 bp, Enterobacter cloacae
atgtctgactatttaaagggtaagcgcgtcgtagaccccgtgctcaccagtgtggctcgcgggtataaaaacgcggcgtttatcggtgaaaacctcttcccgatcgtccatgtcgagaaagaaggcattatcgtgccgctgtttggtaagggcgcattcgttgaatatgacactgagcgtgccatcggcgctgaaagtaacgtgctgttacgtgaaaaagccagctcgatggatctggtgctgaacgaacacgatcttgccgcgccagtcgactatcgtgagcaggctgaatccctgttcaacgaagaatcgaaagccattcgtcgggcaacgaacggcgtcaacctgaaacgtgagctttacgcggcacggcttgcgcaggacccgaaagtgtatctggccggttcgaagaaggcgctggccgcagcggaacgctgggtgaatggtggtggtgagccggttaaggtgattgaggccggtattgaagccgtccgtaatgccacgggtctgcgcccgaacatcatgacaatgggagccagcgtcatgtcggcactgcgttatcacccggccattcaggctcaaatcggggcaaacgagcgtaagcgtatcacggcagaaatcctccaggatattttccagatcccgagagtggtgatcggcgagccggtctccagtccatccgtcaaaaaggacaccacggatatctgggctgacaacctgatgctgcattacgtgtctgcgccgcagcccggcgtcgacactgccgacgaaaacgagccgtcgttcggttacacgttccgtcgtaaggggatgccggtggcggataaatatgaaggcgtgggtggcaaggtcaactatgcccgtttcactgatatctacaaagtcgcggtggttggcggcgatgcagggtatctcatctctaacatcctgaaataa

SEQ ID NO: 167499 - DNA, 267 bp, Enterobacter cloacae
atgttcgccatcgacggcgggtttaaccgacataagctggcagcgaggctcccagcgccggatggcatcgacggattcgcgcaccacatgcgggatagcccggtcgatgggccagtcgatataaaggtgcagattgctgccgaactccgggcgatgcgggtcgctgccgcgaggggttcgcaggatgatttgaatggcctgccagatatcatccagcccccggacgatttcgccgggagcctgcagggccggttgccagaatactga

SEQ ID NO: 167500 - DNA, 228 bp, Enterobacter cloacae
atgaaaaaactactgctgcttatccctttcttcctggtggcctgcgacgcttcgcatgacgttgattggtacaaaaagcatgacaaagagcgcaaggcaacgatcgaggagtgcaagaagaatgctgatgaactccagaagccagactgcaaaaacgcgcgtgaggctgatcgccagctgtttgttcacggtaaagaggacggtgaaattaactcaccgaaaatttaa

SEQ ID NO: 167501 - DNA, 1416 bp, Enterobacter cloacae
atgttcagaaatcaatatgctatatcagactcctcgctaagaggaaacatcacccccgacatggaatggcacggaatgagcgtacacctaggggagggatcagaggtttgcgctaatgacaattgtctaatcataggcaaaatcgtcaacagttgcgaccctggcatgacgcctagagatatagtagacgctgtatcatcatgcgacagccttgaaagtgttttcgcatttaccgatggaatggctggaaggtacataattgctttcatcataaattcagatgtatatatgctgactgatgcttgcggattcaaaagagcgctatttatgatgcataatggcgcaaaattaattacttcatctgaaaattacgctgctcacatatttggatttaacacagttattaatgaaaatataaaagagatgatgcgtgatgaagcctacagaagaaaagaaagcccatggtttggagtaacttctatagatgaaaggttcaggtatttaataccaaaccactacctgtctatacgtgatttttcgttgcatcgcatgccttccccaaggattggtggtaatgcaattgccatctcgtcatccatgctaaagaatacaatttcagcactctctgaaaggtataaattgatgcagcctataactgctggcattgacagcaggattcttcttgcagcatctgaatctgttaaagatagcatcgattattatgtttttggagaagaaaactcaaaccacgaagatgtgtacattcccaaagagctatccaagatagtgggtgtaaatttcaatgctataaaccctccgtccgcaccaaatgagttcaaaaatgaaatcaaaaaaacagttcttggtgggagggacttgcctaagattgataatatatactaccactataaaaactcccactttgaaaaggtgaacattaatggtaatggcgcagagatattcaggtcgtattatggcacatcaatatttggatttagcgctaaatcgctctctatactttctggaactaaaaaatggccaatcctggaaagaaaaattaatgattggctaaccttaactggagctaaaagatattctcaagataacaacatatcaattaccgatcttttctactgggagcaaagaatggcaatatgggggtctatgttccccttagagcaagatatcgcaatggatgaggtatctccatttagcaatagaaaattaattttcacaatgctgagcgaaccttcaataaaacgcagatctcctgatttcaaatcggccactttgttgattgaatatttggatagcaggttaaataaagttcctgtcaatcctaaatcatcaagcactattctagaccttgtaaaggctcacacaataactcagcttcttgttaagaaaataatctaa

SEQ ID NO: 167502 - DNA, 2544 bp, Enterobacter cloacae
atggctacgacaccaacaaacctgcctgtaccaagcgaatcacctcgcgatctgaagtttaatgcggggaaaattgacgagtttgttacctctcaatccgaaacctacaccgataggtttggacaatcgcattatacaattgaaggaatacggcagttagcttttactgcaatatcacagtcaggttttgttacgatggattcctttgaggaaggcaatacgctgactgctcctaatcaagcattgcgctggaaaagcaatggcgtttactatcgttgggacggtgaattccctaagagtgttcctccatctagtacgccggccacaagtggtggtgaaggtaaaggtgcctggttggcagttttagatccaagaaggcaatcaattacccttcaagaatttggtgctacaggtgatggagtaacaaatgacgcccccgccatagctcaggctctgaactatgcttttgcaaataatttagatgttagacaatcaagcgggacgtttttgcttgatggtggaacatatctcgacattaaaagcttaaatgttgacctgacgggatgcgttttaaagccgactgcgacatggactggtcagattgttattagccagtccgtcacccctattacctacggttctggttcggctccagttaatggagttaatgcgtccacaagtaactctcgcggtgtaggtagtaactatctcgatggtctggcttctaataccgaccttgacggttgcttcattcagttatcgacatctcaaccgatgtttatattcagggatacggcgtatactcgcgttgatttcaacagggtatataaccgtggaaatattgaaaacccgcttaggtatggacttggcacaaacgctacatctattaaagcccttaaaatacgcaaggatgtgcaaactattaaagggctaaccatagatgaaagtctcactaggaattatcgaattatttacattaatcaagcatcaagagttcggatgattaatacttcatttgttaatagacctataacacaaaacttcagtgatagtaggattgaaatcaacgaaagctacgacgttatattagacggcctatttgcgccttcagtggcagactcgtttaccggtgtaggagatatctactcctacactattgggttaactaactcgatgaacattgagataaaaaatgccacggcaaatggagaggggtggggagcaacagggagtaacaactgtgcaaatgtcaagtttgaaaattgcgatctaagtcgtatcgactttcacatgccatttcagaactaccttaaagttaataactgcaatataggtcgtagcggagtattagcatctggtattggtgacctgtatgtcacaaattcaacgttcaattcatccccagatatggttgggaacataatcgccacacgttctgatgcaggtggtttttttgatggtgatttatacatggaaaatatcaagctaactggtttgcgcaacgctgtgtctggcaacggcattatcaatgccgccgtcactgcagggcaaggacctagtagcgggtccccgattagcccaacgctctttaataatatcaccctaaaagatattaaaatttacccaggaagtgtgtctgcttacccaggaactttgatcacagttggccgcgacgatgttctttacttcccgaagaaaattgttattgacggtctagattttggcactctccccaagagtgcaggagttgggcttaacatagacttctcccgcttcaaggcgctatattcagatatgtctaactcggagagcgctattgcgggtcgatataccactgacattcttatcaatgacatctgtgcgccattcttctctgtaacgtcagcatcattccgtcacaatccgcgtattgttgcaagcaatgttagacacggtgtgcctggcgagtcttatacattgttcgaaaccaatcagcgcggcagttatgaattcacagattgcaaattagagcgtatacgagcttttagtgggacagaccctaacgggcctgtgagtatcaaaatgaaaggaggtaagctctggagcgcatctactacattgagccctatagacggaactacagcgcacgagatcgaccttgataatgtgcagattatctgtgctttcttgtcgcaagaccagactgcactgcctgtaacaagaggcctgatcagtagggcagtattgcgaaactgtgagttctgggatgtgacgggggttaaacagcctagcctgccctttgctactgtcgagtcaacatccgccaccatgtcggtgccattcaaagttggccagcattttgttatagccactggcttttctgctggaggtacatatactctcactaacgcaagagcgattggtgtatctggagctaagcagaatttcaacattggatctgctggcaatctaatactaacctacacagtgtcagggcagaacgtcacgcaaatagtaatgacttctcctgccagcaatgacataagaaccctatcaataacttaa

SEQ ID NO: 167503 - DNA, 231 bp, Enterobacter cloacae
atgaacaataattatgaacctgttcgggaacttgaatgtaagtttgatgataatgggcatccttcctggcgttcatttccctctcataaaaattgccaaatcagaggtgggtgtgatttacctccacatttgcctggaattattattcttgtacatggtgttaactcgacaggagaatggttttcaattgctgaggacaaaatttgtgaaggcctgaataagagactttga

SEQ ID NO: 167504 - DNA, 369 bp, Enterobacter cloacae
atgctgatttactggcccagtatgaaaagaaacgcattacaggctctctggcttatactccaccaggctcagtggtcaggaaaagactgtgacagcgacagcggcgtggataggacatgggatactggagataaatggatcaggcgtatccggcaggacaccagatacaatagaaaaggagggacaccgaatgggtggcccacctgtctcgatggctttatagtggctttacttatcaacgacctgccagccatcttccgttttgacaagggttatagcagcagtacgcttttcgttatcgacaatagccgtcacattgcatttatagcttttatcagatacttctacgcagtcatgctttttgactga

SEQ ID NO: 167505 - DNA, 951 bp, Enterobacter cloacae
atgaccaaacaaattataaatatattaatccaaagtgagacaagagaggaagttatgaattgcataaattcaggaataaatattaatgcttttgattattgtggtagaaatgcccttttctattgcgaccaattagacgccgccaaagcactgattgaagcaggcatagaactaaaccatatagacaattatggcaataacgcactgttttgtaacactaatccaaccgttctggaattattaatccattcaggcattcatattcagcacaagaataatcaaggccaatcttgcctccaccaacaacgctataatataaaatgtgcagaaattcttattaatgcaggtgctgatatccacagtattgataatgaaggccagactgtactctacaacctctattccacagatagttttgactactggataaaaaaaggctgcaatattaatcatactgaccataatggtaaatcagtactcgatttgtctatggacaatggaaactggcattaccgatccaacgtcagtgctcttatccggcatatagaaaaaattgatagcacacctgttttaatcaggcatatcaactatcactctttagatcttattaaattacttaaacataatggtgttaatttcctgcttgcagagcattgtacagttgaactatatgttaaagacatgaaatcaatctttaacaaactcaaacaacatatcgaaatcaagcacactcagttttataattgtcgcaatgagcatattggtatctacaccggcatagagagagtgaaatggtttattcgaaatggtatcagaatggacgacgatatactcagacagcgttccgactccgataagattttttcttatatcgcaggaagagagaaaaaagacctgttaaaagaaatgaagccagaacacccccgtgcacctgtgcgaaaaagactctaa

SEQ ID NO: 167506 - DNA, 441 bp, Enterobacter cloacae
atgaaaaaacaaaattacccaaccctgacaaactaccttgccaaaactaaaaaaaacgcagatctctatagattatataacccacaattttctatattcggaaaaccagtaagtgaggagcaggatttttacttttgttacttctccagacatatgattactgagaggaatatcttaaccctcttttcaattcatacctttctctcttacaacgtaagcaaaaaagagacaattaaatcatttgtccattttctcaaaaaagcaaaccatgacaccttcaacaatgcattccagtttcgcgggtgcaatatcatttatcaaaataagaagagagaatttatggagatctcatggttttctttctcacggatctatgacgatatcgtaaaaatcaaagagtatagtgctaacaatgaaatttataacaaattcgtagcttaa

SEQ ID NO: 167507 - DNA, 180 bp, Enterobacter cloacae
atgagcaataaaataatcattgccagaagtgattttagcatcttcttcattatcaagatcaattggattgctttttgtttcgatgataaggtgctgccgctcaattttctgaacgaaatgaatttttatttcagatgtgtaattgcatccgagttttctattcaattgctatgtagatga

SEQ ID NO: 167508 - DNA, 1470 bp, Enterobacter cloacae
gtgacattttctaaatcatttcctgataatttcctttggggtggcgcaacggcggctaatcagctggaaggcgcgcatgacgtagatggcaaaggcttatcagcctccgatgtctttatctttgatattaatgcgccgaaagagacatggcttgatcagtgggccggaatgacgcatgcgcaggtggcggaggctcagaacccggccagcaaaaagtactaccctaagcgcaaaggcaatgacttctatcaccattatgaagaggacatcgcgctcttcgccgaaatgggattcaaatgcttccgtatgtcgattgcctggactcgtatcttcccgcgtggtgacgaatctgagccaaatgaagccggtctggctttctatgaccgggtgttcgatacgttgcgtaagcataacattgagccagtggtttcgctttcacattacgaaatgcctcttactctggttactgaatataatggctggccaaaccggaagatcattgatttttatctgcagtttgccactactgtctttaagcgttaccgcaacaaagttaaatactggatgacgtttaatgaaatcaactgcgttaaacatcatccgtacgtcagcgtcggtgtcattgaagagaatcacccggctcttgaacaggccaagtatcagggcgcacatcatcagttcgtagcaagcgctcttgccactaaggcctgccacgagattattcctgagtctaaagtgggctgcatgatcagctatcagatcctgtacccacatacctgccatcctgacgatattcaggcctgcgaggatgcgcaacgtgtttccctgttcttcagcgatgtacaggctcgcggcgcttaccccgcctggacagagagaatgtttgctgcgaaaggtgtggagttgcaaaaagaacgcggcgacgatgaaatattgcgtcagtaccctgtcgatttcgtatccttcagttattacatgtcaagcaccgtgagtgcgcatcctgaaaaactggaaggtgtcaaagggaatctgatcaccggagggattcgtaatccgtatctgcctgaaagtgactggggatggcagattgacccgaaagggcttcgcctggcgcttaatcagctctatgaccgttaccagaagcctctgtttgtagctgaaaatggactgggtgcagtggatgttcccgacagcaatggcgaagttcaggatgactaccgcattgattacctgcgactgcacattgaacagatgcaggaagccatagccgacggagttaacctttttggttacacctggtggggaccgattgatatgatcagtgcaagtacatcacaaatgtccaagcgttatggctttatccatgttgatcaggatgatatgggtaacggcacgcttaaacgtacacgtaaaaaaagctttggctggtataagaaagtgatcgcctcgaacggtaatgatttgagttaa

SEQ ID NO: 167509 - DNA, 1902 bp, Enterobacter cloacae
gtggattatcaacataccgcgcgcaggattattgcgcttcttggtggcgatgcaaacatcaattctgtttttcattgcatcacgcgcctgcgattcagtctgaaagataatgataagcccgatcgtgaagcactgatgcaactcgatggcgttatgggcgttaatctgtcaggcgatcagttccaggtcattattggcaataaagtgacgcaggtactcagggcaattcaggatgagatcccacgccttgtggcggaggataagatggatgaaaaggttgaggaaaagcgccgcaatcccgtgtctctggccttcgaagtcatttcaggcattttttctcctatcatacctgcgattgccggggccggtattcttaagggcgttttatctcttttcgtcaccttcggctgggtgacagccactaatcagacctatcagatcatgacggccatcagcgatggtgtgttctactttatgccaatggtgctggccttcagtgccggtctgaaatttggtgcgaacccgtatctctccgttgcactggcagccattctttttcacccgacactgactacgttactgaaatcaggcgatcctgttgcctttgccgggttaacagtctcacctgtttcttatgctaactccgtcatcccgattttgttttcaatctggctactgagttacgttgaacgcttctttaatcgtgtcattcccgcttccattcgaatgatgttttctccactgctgagcctgatgattgtcgctccggtgatgcttatattcattggtccggccggaattttcatcggcaactcactttctggcggaatcatctggcttgtggagaatatgggcccgcttgccgggattgtggtgggcgggacgttatccctgatgatcattaccggtatgcattatgtgctcgtccccatcatgatcaataacatcacacgcctgggcttcgatcccatcaaacccctcatgtttgtcgcaaactttgggcaggcaggtgccgctttcggggtgttcctgcgctcccgcaacaagaagacccggaccctggccttgtcgacctctttcagtgccctgatgggtgtatctgaacccgcaatgtacggtatcaacatccgtttcaaaaaaccgttcgccgcagcactgattggcggtgcggcaggcggatgcctggcaatgaccatgggcgtgaaggcatatgcgtacgccttaagtggcttgtcaggtttacctgcacttgccggcgagggattcggatgggcgctggccagcatcgcattagccttcgccgttgccgctctggtgacggtagtgctgggctttgaggaagcggctgaagttcagccagctacagctactgaaactgatatcgtagcagcccagtctaaagatttgcaggcgggtattagccgtgtaaacgttgcggcaggcgaacaactgtatgcaccggcagaagggaaacttattccgctttcggaagtgagcgaccctgtttttgccgatgaggtctttggtaaagggattgctatcgtcccggtgaacggtcaactggtctcgccgctaaatggccgggtaggttctgtatttgcgaccaaccatgccattacgctggagagcgaatcgggggcagaaattctgattcatatcggcatcgataccgtcaagctgaacgggaaaggttttacgcgtcatgttgacgacgagcagcttgtgagagtcggtgagccacttatcagcttcgacctcgatgcattacaggcggataacatcgatccgagcatcatcattatcgtgaccaatacagaacgttataacgacatcagcctgatttcacaaactaaagtggaaccacgtgaagcttttttgaaactgacagcagcagctgtgtaa

SEQ ID NO: 167510 - DNA, 834 bp, Enterobacter cloacae
atgattatcaaacaggtacttaataacaacgtcgtcagcgtttccgatgcaagcggagctgagtttatcctgacgggccgcggtctgggctttaatgccagagtaggcgatattgttgatgaaaaaaacattgaaaagaccttcagtctggcagaaggatcagtctcggatcgctttaaggttttacttaatgaagtgccggtagaaatcattcagttgacggatgacatcgttacgctggcgagaaactctcttggataccccctgagcgataccttgtatgtctcgctggcagaccatttgaactttgcacttaagcgttattctgagggccttgaaattcagaacccactggagtgggaggtccgccatttataccgtaaagaatacctggtcggacggcaggctctggcgttgatcgcttcgcgtaccgggcaactgttaccggatgcggaagcctgcagcatcacccttcatatcgtgaatgcctccatgaatgtcccggatgggcaggttatggagatgacccggctaatcttccagatccagaatatcgtaaagtactggtttgcgataagtattgacgaacaaagcctgaattatcagcgatttgttacgcatttaaaattctttgctcagagggtaatggcaggcgagattcttaataatgatgatgcagaactgttcgcgcaaatgcccaaacgttatgaaaagacgctggaatgtgttcaggcgattagcgaatttgtggcgaaaaattacaaccattccatgagcagttcagaaaagttatacctgacggtgcatatcggcaacgtattaagccgtcagtaa

SEQ ID NO: 167511 - DNA, 942 bp, Enterobacter cloacae
atgttatccactttaaacgttgtcctgcctgtatttgctctcatcctggttggctggctagctcgtaagctaaaaatattgggcgaaacagccctgactgaacttaaccgctttgttgtatacctggcgttacctgctttgcttttcgatatcattgccaatgcaatgtgggcagatctggctcagcctgcgtttatcagtgccttttcgatagggatgatggtggtgtttttcctgaccttatttgttcagctgagacgcacccgccaccttgcagatgcagctatcgatgcactgaacgcgggttatgctaatacagggtttatcggtttccctcttgtcatcgtttttttaggccatgaagccctggcccccacactcatcgccacaattttgaccgtctctgtgctgtttggtattggtattatcattatcgaaaccgggctgcagggtgaagtgaaacggcgcatcatttttacgcgtgtagcgaagtccttgattaaaaatccgttactcgtatctccggctatcgccatatgtattccgctgtcgggattaaccgtgccggactcaataaatgtgttcctgaagttacttggtggagccgcgtcgccttgcgcacttattgcactggggttattccttgccggtcagtcagataaaaagacgaacaatgataattttacggtaacgctattagtagtacttaagttattgattcaaccagctttaacatggtggtttgctacaaaagtgtttcacctgtcacctcttctggttcacaccgcagtgttactggcggcattaccaacaggtacaggaccatttatgctggctgagttctatcgtcgcgaggcatcaacaacatcgaaatgtgtactggtttcaacagtgctttctatgtttacactttctgcttatctgtacaccatcggtttataa

SEQ ID NO: 167512 - DNA, 885 bp, Enterobacter cloacae
atgtccgattttagacagttgaactatttcttgacccttgccgaatgtctcaattacggcaaggcagcaaaagtacttaacatttcgcagccacctttaagtagacagattgcttcactggagcatcaactcggtgtgaagttatttaatcgccatcactatggtgtctcactgactgaagccggcaggatgttctacgccgatacccgtgcggtcgtcagtgcgtatgaacttgcctgccgaaatgtcagaaaaatggctactggcgaaaagggtaagctgtcagtaggttttatgatgcacgctgcgtactctacacttcctgaactcactaaacaggtgattacgcaattccccgatttacatcttatattgcaggaagtcacaccggctaccctggtcgatgccgtgctggaagcaaaatatgatgtaggtctggttttcaatccggggccggttcgtttactacaatgtctaacattgcatcgtgaaaacttgtgcctggcagtcaatgaaactcactctcttgcagaagaaaaaaaggttggcgttgatcgattaaaaaacgagccaattatcgctactccacactcggttgcaccagtattaagagatatgatcgatctttacttgcgccaagggggaatcgagccttattaccgactagaaacgcagttacaacagactattatcagcctggttgctgaaggcattggggtggcaattgttccagaatcagtaaaaaaattacattatgctggcgtaaaatatcttgaacttgagcagagcccagctatagaacaggttatcatctggcatcaagataacagtaatccagccctgaattcttttacacgtctggccagagcgatagctgaaagatag

SEQ ID NO: 167513 - DNA, 900 bp, Enterobacter cloacae
atgttggcacaacaaaacatactggcactactgcatacgtttgaatgcgcggcacttcatatgagtttcaccagggcggctaatatcctgaaccttacccaaggagcagtcagccagcgcatacgtcatcttgaagagatgctaggatttcggttgtttattcgcttgacgcgtaaattgcagttgacgaacgaaggtgctcggttgctgggcattttgtcgtcttcactaaagcgcattgatgacgaaatcgaagacatccgcgtgcaagggctacgcggaacgttatcggtaggattaccaccaacattttcctttatctggctaatgccccgtctggaagaattcgccctgcgttggccaaatctcaatatcaattttcgagttcgtgctggactgattaatttcaaccatgaacgtgtggatatagcaatctactacggcatgcaaaaatatcctgatctttattgcgagcggcttgctgatgagtggctggtacccgtttgcacccctgctctaagtcaacgaatcagacaggataacaattggtttgaaaaagtacggtttattcatgcttctgaatccgttgattcgcaggatacattctccgaatggcgagaatggtgttccgcaacccaaactgagctacctcttgaaaaaaacttcatgagcttcaataactgccatatgtcgattgaagcagctcttacagggagcggtatagcgatgggtagaaaacaattggttaaaaagtacattgctgagggaaaacttaccattccgtttaacaaagaggtacaggctaagcgcggatatgatttgataatgcctcgcgagaaccgttcaaggccgggcgttaaggcattaactgaatgggtacgaagtataattaatgaataa

SEQ ID NO: 167514 - DNA, 1320 bp, Enterobacter cloacae
atggaaggtttgaagattgttgttataggtgctggctcaagttatacccctgagctgatggagggaattattaaacgtcagcatgagttcccggtgcgtgaaatttggctggtcgatattgaagacgggcgcgaaaaaatggccatcatcgctgggctgacacgcagaatgttggaaaaaaatggtctcgatattaccgtccatgaaacgctggatcgccagaaggcgctggctggggctaactttgtttgttcgcaattcagggctgggtgcctggaagcgcgcataagcgatgagcgtatttcattaaaatataacatgattggtcaggaaactaacggactgggcggttttgctaatgcctgccgaactattccaattgcactggaaatcgcagccgagatggaaaaactttgtccagacgcatggttgctgaactttacaaatccttcaggcatggttacggaagcgatacttaagcattcctcggtgaaaacagtgggattgtgtaatgtgccggtaattatgcagaaaggtattgccggtatgttcggcgtagaggatatcaacgaatttatcatgcaggttgcggggctgaaccactttatttttgcccgacatgtctggtttaaagggaaagatattattccggacataatcagcaatattgagcagggaaatgatccacttattccgaaaaacatccctccgtttaaatggccagcaggaatgctcaaaaacatgaggatgcttccatgtccttatcatcgttactactatatgagtgatgatatgtatcgccaggaactcagtgaagcaaaaggagaaggtacgcgtggtgaagtggtgaagcaactcgaaaaagagctttttgatatttaccgcaatccagaacttgctgaaaaacccaaagctcttgagggccgcggcgggcaattttactccgatgccgcctgcgaattaatgagcgcaatttacaatgataaacgtatcattatgcacgttaatacgcgtaacaatggcgctatatcaggtcttcctgataattgtgcggtagaagtgagttcgatgatcaccagctcaggtccaataccgctcaatgtcgaacctttcccggacgatattatgtgccaaattcagctgatgaaaacttttgagcagttgactattgaagcagccgtgaccggagaccgacatacagcatggcgcggattagtaataaatccgttaatcaagagcggagcatcccttgaaaaagcattggatgaagttattgtacataaccgcgcgttgatgcctgcattccacacatctaattaa

SEQ ID NO: 167515 - DNA, 339 bp, Enterobacter cloacae
atgcaggccggaagactgagagacagggtggtaattcagaacatcacaacatccatagacccttctggtcagcctgttgaaacatggcatgacggcgcgactacatgggcagaagttaaaggtatcagcgggcgtgagcttgtagcggcaggtgcagaaacggctgtagccactatcagggtatggactcgatttcgtaacgatataactgctgcgtcaagactcagggttgtgactggcccgttcaagggtgtcattttaaatatcattggtccgccgatacctgattctcgcggcattcagctcgaaattctttgtaagcaggggatcgaaaaatga

SEQ ID NO: 167516 - DNA, 216 bp, Enterobacter cloacae
atgctctgtttcgatttcttgtattacctgcacatcaaacaccgccgctacctacctgatcacgtgacgcacgttccgtcagcggcatcaataatgatgaattcagaacgggttgggctcgtctcagaaatacgtacttccctgatcattatgtatgggttgttttcgcatgcttttaacagcgatacagtctatgttaaggaacagatcctttaa

SEQ ID NO: 167517 - DNA, 210 bp, Enterobacter cloacae
atgaaagccattaataaagtttttatcatcactgctctttcactggtttcgttaaccagctttgcacagtctgtcaccgcaacaggcagtacgctcgatgaagcccatgcaaagatcgcagcaaaagcaaaagaagccggagcagaatattccatcactgaagcatacagcggcaacagagtgcatatgactgcaaaattaacacactga

SEQ ID NO: 167518 - DNA, 333 bp, Enterobacter cloacae
atgtcagtcaagagtgttaataaagagacgttttcacaggaagtactgaacaacaaccttcctgttttggtggatttctgggcgccatggtgtccaccctgtgtctcagtcgcaccaaccatcgaacaactttcaggtgagcatgaaacccggctgaaagttgtgaaggtcaatatcgatgaaaatgtcgaactggccagcatctatggtattcgctcgataccctccttcaaagtatttaataaaggggagatcgttctggaatttggtggtgctttgcccaaaaaacagatagaagaaaaactgaatgattacttaactactgaaaaatag

SEQ ID NO: 167519 - DNA, 906 bp, Enterobacter cloacae
atggatatcaaagcattacgttattttttgcaagtcgcagagaccctcagttttaatcgcgcctctgaacggctcaacatatcacagcccgtagtgacacgtgttatcgcccaactcgaacatgagattggcaccaggctttttgacagaaccacccgccgcgtttcattgacacccgcaggaactgttctgcttaatgaagtccggcctcttatcgcacatgttgagtctgtccagcagacggttcgtcatgttgtggctgaacaaagcggtaaattcacggtgggatataccactctggctatgcagacggtcactcctgatttactgcgacttttcagcgagaagtatcctgaaattgagttggacgtcagggaaatgaccacccatgctcaggtcgaagcgctgctgtcagccgaaattgatgtaggcttcgtattaacgccggttgaagatgaggcgctgacagtcattccgctgcataaagagcgactcagattagcggtatccagccgtcacccgcaagccgctctggcaggaaaaaataaaccgcttccgttggctgcttttgcaaatgaggagtttattatcccctgcaaagagcagttccctgccgtttatgatgaaattatccgactttgtgaggaggcaggatttcgtccccgcctgcgttcatgtggagaaaaccagacgtgtgtcggactggcacgagctggtcttggcgtagtattcgtctctggcagaacagaggatattccttcagaagggttagaatttgttgaaatagcagcaccgatacctgaattagaaattgcagttgtctggcggacacgtgatccctccgtactattacagccattcagggagttggcagaaataaccatagaaaacggaagcatagattga

SEQ ID NO: 167520 - DNA, 699 bp, Enterobacter cloacae
atgaaatcattaatgccccgaatctcagtagatgtctggtctgattatgtctgtccgtggtgctggatcgctaaaaaaagatttgaaaagggtctggaagagtttgaatattctaaacaggtcgatgtacgtcatcacagctatcgtattgcaaatgaccacccccctattccattcagatcggctttgtatcagaagtttggtggtgagcatggcgcagagttaatgatgaaccagattgaaagcacggggaaatcagagggattgatctataactttgacactatgctttttggcgatacacgtgaagcgcatacccttgcagctgctgcgcgtgaggcagggctcggaacacagatgtcagaaaagttgttctctgcggccacaactgaagggcgttctatttttgacagggatgtattgattgctctggcaattgaagccggtatgacagagtctcaggctgaaagtgcccttgaaaaccctgtattcagggattctgttgatgacgatgaggcaaaggctcgtgcgataggtgcaagtggcgtacctctatttgtgatcaataataaatatgcaatcagtggcgcacagccagccgcgaattttttgagcgccttgagacaagtctgggaagaaaccaaagatgagtccatgttcatggaggggatggtctgcggaatagatggttgtaaataa

SEQ ID NO: 167521 - DNA, 1158 bp, Enterobacter cloacae
atggtcgttgtggccagaaatttcgtgactcttaagatgaggaatgcaatgaagacgttatttaccccttacaacctcggtggcgttgagctgaaaaatcgcgtggttatggcacctatgacacgtactcgcacgttgaatgacatcgctgatgacgtagttgccttgtattacgcgcagcgtgcttcagccggattgctgatcactgaagggctgcctgtttccgaagaaggtcgcgggtatctctatacgcctggtctctataatgatgcgcatgttgagggatggcgtaaggtaacggatgctgtccatgcgaaaggtggccgaattttcgcgcagctgtggcatgtggggcgtatgtctcatacctcactacaacctggtcatattgcccccgtctcttcaggcaccattcctgcgactaatacaacagtatttgcctgggacgaaagtggtaaacccggcccggttgccccaagcattccgcgtgcactcgaaacgcatgaagtgaagcgcgttacccgcgattttgtgaagtcagcacaactggcggtggaagccgggtttgatggcgttgaaatcatggcggctaacggtttcatctttgaccagttcctgagcagtgagctgaatacccgtaccgatgagtatggtggttcggtagaaaatcgtcagcgcttcctgctggagaccattgatgccgtttccgatgcaattggcggcaacaaagtcgcagtacgactctctccgttcggtcgcatctatgatcttgccccctatgccggggaagaagaaacctggtcagaaatggcaaaggctcttagccagcgctccctggcctacgtgcacctctatttccagccgacctacgtcaccgcaccgcaagccgctgagaaatttaaagctgatttccgtgaatcatttggtgggacgatcattgcagcaggtggattcagccgtgatattgcagaagaacgcctgaataacaacgaagttgacctggttgcgtttggtgtgccatttatcgccaacccggatctggttgaaagaatgaaaaataactggcctctggcggaaagcgatcgcacgacctattacggtgtaagcggctctccggaaaagggctataccgattacccggtatacagcgaaaaataa

SEQ ID NO: 167522 - DNA, 342 bp, Enterobacter cloacae
atgacaaatgtacgcacctacaatgaagacaactttcatgatatcgcatggggtgagggactggccgtaatcaggttctttgcaccgtggtgtccaccctgtcgtgagagtgaagcggaatatttgcaattcgcaagaaaactggggccacatgtcaaagttggtgtggtgaatgttgataaatcacctgttttatcaactcggtatgaggtttttgggcttccttctgttctggtgttcagaaatggtcagctgatgaaacgtcttacaggacagaaaactgcagagcaatacgcagctattttttcatcaattaccgaacacgaagcagacgtacactga

SEQ ID NO: 167523 - DNA, 795 bp, Enterobacter cloacae
atgcaagatacacagtttacgaatcataaagtcctgatcattggtggcaccagtgggatcggtcttgaaacagcaaagatggttttagagcagggcggaaaggctgtcattgtaggtagccgtgctgaaaaagcagaagccgcacgccaggaactcgtggctatttcgggtgaggagaatgcattcgctctgactgctgacttatccagtatggaaagtgttgcaaagctcatcgctgccctgaaaaaggatcacagcgatattgatatgctggtcaattccgccggcatttactatccaaaaagtttccttgagcattcagtcgtggattacaacaacttcctcgatctgaaccgggcattcttctttattacacagcatgttgctgcatcacttgtagatcagaagaaagctggatctattgtgaatgttactgcagtcgctgcacgccaggcagtagaaaccatcaccgcttcagcttactccatggccaaaacgggtctggatactctgacacgccacgccgcagcagagctggctgagcacggtatccgtgtcaatgcagtaagccctggtattgttgaaacccgaattttcgaacgttttattccgggtgaacaactggatggtgcgctggccagtttcaataacttccatccgctggggcggaacggtacaccgcgtgatgttgcggaaactattgttttcctgctttcagataaagcttcgtgggtaaccggggcagtctgggatgtggatggcggtgtaatggcagcccggaaactcggcaattaa

SEQ ID NO: 167524 - DNA, 336 bp, Enterobacter cloacae
atgtctgcagaatggggcaatcgtctctccgcgctgatcaaaagcgtcggtaatctggccaaaacaaataaacctgttgctaacgcgtttcatggtcttgaaaccgctacgcgcgaaaacagtgttctggatgccaaaactcacgaactgattgccattgctgtggcagtgactactcgttgtgacggttgtatttccgcacacgtggccgctgccaaaaaagctggtgcaacgaaagatgaaatcggtgctgcagtagggactgcgattgcgcttaacgccggtgctgcttttgtctattcagcacgcgtaatggacgcctacgacgagctgtaa

SEQ ID NO: 167525 - DNA, 552 bp, Enterobacter cloacae
atgacagagaaaatgaacggtattgatgttgctgcattccagcaattcgccgaaaaagtgacccaaaacccggaaaaagcaaaagccaggtttaacgtagagacccgctgggcaggacagacccgttcagtttctaccatgaagtcatatgaactctttggtgacagcatcgagcgtaccttccatgtcgccgctgatgaaccatcagaaatacttggaagcgatactgcacctaacccacaggaactgctcatggctgcgctgaatgcctgtctgaccgtagcgtatgtggcggtagctgccagcaagggcattaaggttaattccctgaaaatcgaaacgtcaggcgaactggatctgcgtggtttccttgggcttgatgaaaatgttaaccccggatacgattcagtccagtacaccgcgtttattgatgctgacgctcagccggcagaaattgaagaaattcatcaggccgtactgaagacgtcaccaaactatgcgaatttctcgcgttccattaagatggagccgaaactcgtcattgcacaataa

SEQ ID NO: 167526 - DNA, 561 bp, Enterobacter cloacae
atgtctatggatacccgacaatcattaatcaattctgcagagtttatgctgcgttccagaggttatgctgccttcagttacgctgatctggaaaaaatggtcggtatcagaaaggccagtattcaccattatttcccaaaaaaagaagatcttggtgtggaaattgttgaaacctacatcaatcgttcggctgtggatttcgaaaaaatcgatcatgactttccaaatgcttttggtcggctctgtgctttcgctgcattgtttcgggctgcaatggctgatggtatgttaccgctatgcggggcactggcagctgaaatggcagccctgccggagaccatgcaaagccttacgcggaaatactttaccctgcaactgcagtggcttgagaaaaccatagaggaaggtactgcggctggtgaattagcggcaacaggcacaccccggcagaaagcgtttcagattttaagtctccttgaaggcagcagctttgtccgctgggcaatgaatgacggcacagatctggagccggctgctattggtgctattgttttccattaa

SEQ ID NO: 167527 - DNA, 1239 bp, Enterobacter cloacae
atgaaccaacaatctttaatcgataataacctgaaactttttaaaataaaatcaccagcagaactcataaaattattaaagacaggaattgacataaacacgctaaattcatcgaaccagaatgcgctgttcggttgcagataccctgagcttatggaagcaatgattaatgccggaataaatattaatcatactgacatgtttaacaggaatgcgcttttctatgcaacttgtccagaaaccctgtgtgtgttgactgagaacgggattgatattaatcatacggacacgctgggcaggaatgcgcttttctacaccagtgacgctgaatcagttcagttactggtaaaaaatggtatcagcataaaccaccctgaacttgaagataaaaatgcgcttttctttgcgaccaacgaaagctcagccagagaactcatcgacagtggtattgatattaaccacactgacagctatggaagaaatgcgcttttctacgtctgtgaggctgacgttaagcgtctgctgattaagaaaggtatcaatgttaatcaaagggatatatatggtcataattccattaacatttccggcatagatgctgacttactggatgtttatttcgctgcgggccttgatcctgacatacaggatcgaaatgggaacagcttaatttttcacccttataaaaaaccaattacagacattttaatcaacaatggctgcgatataaaccgtgttaataataatggagaaaccgtctttgaatacatacagaccatgttgttcagcaactatcaacttgaccagtgtctcagcgtgcttacaccttacattaaccttattaaagcaagaccattaattttcaatcgccttacttatggctgcattgagctaattaaatttttgcaaagccagaatatcgattacaaaattaatgaccgttgcgttgttagatacgccaacaaagatattaaaaattttattactgaagctcagaaagttattgatctcagcaatatcaccctttgctcatggtatgacaccccgctggtcagcgtaaaaaacaaggagatcattaaatggttcataagaaacaatgtaaatgtaaatattaatgacattgaagatcaggacattctcactgaaattcttgcctaccttgcactaagggaacataaaacgcttaaaaccgtaattaaaccggatataaaacacaccgcctgtaaaagtaggctgtga

SEQ ID NO: 167528 - DNA, 312 bp, Enterobacter cloacae
atgctgaggaggtacgctataacaaacaccgtgtatcagccgcggcagcgtgatgtagtcagcctgagtcttatcagcaacaatcagtcgctcagctatctgcatttgatactgaggtgggcggccggtaccgagataaaagctcagcatgtagtcagggaaacgcaccagccagtcagtcaccttatcggtgaaaccctgcacaggaaccgcgtcgtcctcacacaccactacccggcatggttggcaggcagcccattcaagtgcacggcgatggttagcattggccccaccgtcgccttcatcaattag

SEQ ID NO: 167529 - DNA, 630 bp, Enterobacter cloacae
atgactagcacaattcaaaaagaatgccgcaagccactgtccgcagagcaaacagccgtgtttgaccgcttatcaaatttggcagtcgagttagtggcaaaattagctgaaaaaaaacagctaaccactgctcgcaacatgacagataacgagctggctaaactcttttttgaaactcaactagaccgatcttctgagatgtcaccgcgtgaaaaacgcaaaatggatcatctaaatgaaagcgcggtcaaatttgcagaacgtttgaagatactcggcggaacatgccgggcaagtaaagcagctgacatcctcggagtaaaaagacagacaattaacaatcgactgaaagcgaaaaaattgctggcagtgcaggttggtggcgagagcaaattcccgacattccagtttgacggaaaccgcatggttgatgggctggaagaggttttattgttgctgggagattttagcccagtcactaaaacctcgttcttgactgcaatgtattttttcgatgatgaagaaaatttaaatgtcatcgatgcactgaaaaaatacggcacggcaggtgaacatatgaaagagatccgcaaacaagccgctctcttcggtcatcaggtatcccactaa

SEQ ID NO: 167530 - DNA, 708 bp, Enterobacter cloacae
gtggcaacaaaaaagagaacgaatggagattccatccatgagcagttaaaccagttagaaatgcaggggcgtgttccgagtgacattcgtgagaaaggcactcaacaaatgcgctggcaatgggatgaatatccttcaggtgtgcattatggcgcaccgatggatccagaaccgttaggtcgatacaacgaccctacgggccgcacaggtatctgctacaccgcagataacgccgccgctgcaatagctgaatcgttgggaagagtctaccaacgtgacccagaggattttactctcggtttgagtgatttacgcaaggctcagatgtatacgctagagacgactcgtgatacgagaaccatcaatatgacgaagttgcagggtatgttgcatattactgctgatcagacgatgggcaatcgacaggacattacacaagccattaccgattgggcagcgaacacaccagggctacagtacgacggtgtttcgtacagttctaggcattacggtgtgggtatgtgtacagccttctgggaacgcgagggggagacaggccctttagctgatgttacgcatagttccgtttattcacatgttgattcgaacccagataatttccctcaaaactggcaggaaaaagacattgatggatttgaaattgttgtggaaacgctacagtttgatgtgagtgcagatgactcgtaa

SEQ ID NO: 167531 - DNA, 636 bp, Enterobacter cloacae
atgcccgttgacggttgccgtgatgctgtttacctgcgtggccatagcctgctggtaatcggagaacgtctggttcaggctgttgatggatgccttgtttccgttcacgtcagtctgcaaactcagcagcgaacgcgccgttgcctccttctcgttgacgatcacctcatcaatgcggtccagctgcgcgctgttaccggcgaccgatgccgacagcgttttgcgcgccgccacctgcgccaggttgccctgaataatcgcgatggcggagttcttcactcctcccgtcataccgtccacagacacgctgatgttatcgatacgctgacccagtgcggtatcggccgtcgccactgtctgctcaagctcgctcagagaagaagacacatctccgaccgtgctcgacaggtttgtaacgctggtctgaactttcccgatatcctgggcgtttttggcgatttcctgcgcctgttgcgccagttcgtcgttggcctgtttgatatcgtcagccatgccagcaattttttcattgctgtccaccgcgctctcgatcaggtctttgaacgtatcagtctctttaatttcctccaggattgcataggtgatatcgctaaagtcatccgttggctttcctga

SEQ ID NO: 167532 - DNA, 1143 bp, Enterobacter cloacae
ttggctgggaagtatgccgcgacaaaatgggacactgctaacgccattaaagcccaggcggcagcagagaaactgcttccagaggcgcgcgaaaacgccagctataagcaggatgttgaggctctgaataccgctctggctgcgaagaaaatcagtcaggagcagtacaaccagacctcagaacgactggcggcaactcaccaggttaaccttgcgaaaatccgcgcccaacagacggtaacaccacagcaatctgctcttggtgaaatcgacccagttcagcaattggcaaatcagcatgctcaggaactggctctcattcagcagtttgagacgcagaaaggtcagatcactcagcgcggcctcgagctgatgaacgcagccaataccgaatatgagcaggctcgtattgcggcgcaatgggagatttaccgcaaccagagcacgaccaatcagctgatggctgacgctatcgattctctccaggggggggcgaccaatgccattaccgggctgctcaacggcacccaaagcctgcaagaatcctttgccaacatcggcacgacaatcctcaacagtgttgtcggtagtctggtgcaaatggggattgagtgggtcaagagccagttaatggggcaggccgctgccgccgcatcactggcatcgactatggcccaggcaacagctgccgcatctgcatgggctccggctgctgttagcgcctccattgcaaccttgggtagtgcagcagccgtgggacagactgcatacgctggctccctgttatccgccaaaggaatggcaattgctggcgctcgttataacggtggcccggtttctgccaactctatgtaccgcgttggcgagggtggaaagccggaaatctaccaggctaacaacggcagccagtacatgatccccggtgacaacggtagggtgattagcaaccgggatatgcagggtggcggtagtggaggatcttcattcaatcctgtaatgaacctggttataaatactactggtggtgtgggagacgaggaaatagcgcgacttcggaaggcgtggaacaaagacatgctgaaaatgatggtagatcagagcacgcgcccgggcggtttattgcaagggaggcgaaagtcatga

SEQ ID NO: 167533 - DNA, 1251 bp, Enterobacter cloacae
atggatacctcacgggatacgtcgccaaaagtagatgataagagtccacatggaacagcacaggcaaaggaaaatactgctgcaacaaaggcagacggtgatacgcagctttactatgtttataacgcggataagataatcgttgcctggcgtggaacggccagcttgtttgatgtaggaacggatcttgcgtttaggccggtaaattcagaattatgcgatatagacaaaacgcaatgcactccgttagtacctgctgggaaagtgcatactggtttttggagtggttataatcgagtaggaaagaaatttaaaggtgaaattgaaaaattaaaagatttacttgcaaaccgtaagttatttatttgtggtcatagcttagggggggcactggcattaattgatgcggcaagatttagaaattacaatcctatactttacacttatggaatgccacgcacctttacccgcgatgctataatgcagttatcggatattacccatttccgccatgttaatgataacgatccgataccagccgtacccgcagaagctaacctggataacgagttatataaattatggggatggtttggtgggacgctgggcttcttctggtcagtgggtgaactgattgcataccagttgatttcctggggagattgtttctggcatcacggcaacaccgtagcctttcttacggccacccaaagcagagaatggaaggagtgcaagagagatctgccaactcacgcagggtgtattactatcaggaattcacttcctattaaggctaaactatatttggtgtccactctggcggagcaggagatgcagcaagctgggcagaagcaaaaagagtttaaagcatcattaacggaggcagatctaactgactttttccctaaaggaagcaacccggacagaggcgttagtttaaatatttttgatcactttatgacctcctacatgccctatatgtataacaaggtgttagagttaattgataacgccggtatagtagaaaaacgcacatttactgagcatatgtataacgttgattcattcagggagcagatggcagaaaataaaaatgatataccgattggtgaattatccagaaatgcaatgttccttaatatcgaaagcttgttgggagtgtcgctgactccaacattatctatgccgtctggcaatgatacgcttttgcggtttgctcaatatggagaagaggtaatggaaaatgtataa

SEQ ID NO: 167534 - DNA, 726 bp, Enterobacter cloacae
atgaccacagctgttacctcactttgccgtaaaaaccctcatgcgccatgcgaagagcaaatgccgtactggattgaaattcagctggttgatgagcagggtgctcccgtggcgaatatgccatggacagctgaaagttctcatccgatttccggttcggcagatgagttcccttattcaggcaaaagtgatgcagaaggactcatcaggatcgatatgcggcatggcctggaactactttttaccgtcgaacctatgccattaattaacgaaatggaaaaacgtcagttgcggataagcagagatgcaccacaggattctcttgttcggccagaggccgaagcgaatggatctgtatggcactatgcggtagtgggagagctttgtcagagttcaccaaacctggaattaaggccaggggaaatgttacccgcataccactttcctgccaaaacggcatttaagggatttaaattccgcacgaatgaatttgaaaaacgtcatgtagtagaaatatgccctttcagagtctgggagctagtgcttcatcatcagaaggactattccattgcgaatggaatcaacctgggagcagcagcaacgcttgcttatgcaaatgacagtaccctagacacagattcaattacgcgttttttattaaccagtgccaagatctttcccgtttaccacagctatataaagacggttcagcatggaatgccctag

SEQ ID NO: 167535 - DNA, 675 bp, Enterobacter cloacae
atgtgtataagagacagtaatcccactcataaaacatcagatatatggagttgtttttctcggccagaattatcacgaaaaatatctgacgatttaggaaataaacatgatatcacttttagtaaaatagaaaaagattctcttgcaagtgccaaagtaaaactgactaaataccttgcaaaaatatgtttaaatagatgttcttattgcaaaaggcctatggggaattatggctggagttggcatattgaacatataaaatgtaagcaacatcatcgtaatgctacttttctgcttgaaaacttcacccttgcatgtgtagattgtaattataggaaagcttcaggagtggataaacctaacaggtttagtgatataataaacccaaattcagttggctttcattataaaaatcatttggaaatgaatatacatggtaatgaagtgatcctatctttgaatttttctaaaatagatcgtttaggaagtaatacttatgatttgttaaagcttaaaaatttagaatactcgatgacattaagaagtatcaatcaatctattgacgtattaattggtgatattgataggattttaattgaagaacctaaagatgaaaacgaagaaagattaatgtcactactgaatgaattgaaaactaatttaatagaaagataa

SEQ ID NO: 167536 - DNA, 2343 bp, Enterobacter cloacae
gtgactgcttttatcgatagcttagtttggagggattccgcagcaattgattttgaaaaaattaagccttttgtaaacaagcaagtactcggtttcgataatagttttagtcattttcttgagacgctaatatctatttctggattagaagaacatcctttcaatgctaatttcttacataactggctattacagcattctttaccaaatcgagatgccttttggactactgcgttaaaatatagatatagtgaagactcagcatttaaaaatttgattgactgggcatggagtgggactgataaaagctatatatcagatgattcgatagagttagttgcaaccactctatgctggtttttaacttcaactaatagagagctaagggattgtacaactaaagcattggttaatttgttagaggaacgtatctccgttttaattaggataatcaataaattcgatgggataaatgatccatatgtttgggagagagtgtttgctgtagccctaggttgcacattgcgaacaaagaatcataataagctaagtcaattggcagagacagtttttgccaaagtgtttcaacctaaatatgtgtatccacatattctattacgagactatgcgagagagattatagagtatgtttcacatcttcaattgataccggaaggactcgatctatccaaaactaagccgccatacaaaagtaaatggcctgaaaatataccaaccaaagaagaacttcaatcactttataaaaaggatgggtattggtcactttggggatccataatgggtggaggagatttttctagatatattattggaacaaatcataatcactcaaattggtctggttgtaaatttggtgaaactcctattaatcgcaaaaaaatttttaacgattttctaggtcaattgtcagacgagcaaaaagcgctctacgactctacagaccctattatttacgataaaaattataaaagcatttcattcggtaatacacttattaaatatggtgtagcaataggtagaaagagtgaggaggaagttctttcccataaatccgtgttcaagaaatcattgtcagaggacttattagctacatttgaaagagacatagaaaaatatttagatcacaataataatctgctcgaaaccgataaatattttgatctaagaattgctgaacgcatgatttttaatcgtgttattaatcttggttgggatccaaaacttcatggtgattttgataagcaggtaggctctgggcgcggacgaagagaatcgttacaagagcgaattgggaaaaaatatcaatggatttcttactatgaatatatggcaatgctttctgataattttattcgttttgatgggtatggagatgaacgcaaagaaaatccttatcaaggaccttgggatccatatgtaagagatatagatccaaccattttaatcaaaaatacaggaacaaaagagttaacccaacaagaaatgtggtgggatactaaagaagtatttgattgggattgtacttttcaagaatgggttagcaatccttccacgataagtaacccatatggactgattgaagtcaatgacaacaatggtactgaatggttgatattagaaagctatccctcatggaaagaacctaaaactatcggtaatgaagagtgggggcatcctcgaaaggaagtttggtgtcaaatcagaggatatttagttagaacaacagaattaaatgctcttaaaaattgggcagaaaaccaacactacatgggcaggtggatgccagaaggaagcaataggtatcaattatttaatagagagtattattggtctgaagcattccattattttaaatcagattattatggcagtttagattggagttctgtaacagatcaagattctggagctaaaattgctgatgtaagcgtcacatcgatcaattatttatgggaagaagagttcgataaatcaaaaacagatactttaagtttcctcaaaccaactagtttaattttcgacaagatgggcctcaaagatggtaaatatgaaggtagttatgaggataaatatggaagtatagtttgtttcgccactgaagctttaaataactcaaaagcacatttgttaattaagaaagagccgttcttaaaaatgttgaatgaaaataatctagaaatagtgtggacgcttcttggtgaaaaaggtgttatcggtgggtccttaagttcaattcaccagtatggtcgtatagaattcagtggttttttttcttacgacgatggaaaactgactggagcaaacaaaatatattcatcttga

SEQ ID NO: 167537 - DNA, 243 bp, Enterobacter cloacae
atgaataaatccctcagatgtatcttagtgctttccgtttcaatattgattgctggctgtgttggcggtcctccaaaaccaaattatgttttcgtccatgactcttgtgactgggtcaggccgctgtatctcaccgatcacgatattgacgttatggaccgccagacgaagaaagacatcctggctcataacaaagcgtggcaggctaactgtcagaatccaaaggaagtgaggtccaagtga

SEQ ID NO: 167538 - DNA, 630 bp, Enterobacter cloacae
gtgaatcaatcacaatttcagagggcggctggtatcagcgccgggttagctgcgcgctggtttccgcatatcgacgccgctatgagggaatacggcatcaccgcaccgctagatcaggcaatgtttattgcccagatggggcatgaaagcaccagatttacccggctggtggagaacctgaattacgcggttgataacctggtaccgacgttcggtagccaccgcatcacgcaacagcaggccgccgcacttggcagaactgcaacccaaccggcaaaccagaaagcgatcgccaatctggtatacggtggtgagtggggaaaagaacaccttggcaatcaggtcgctggtgatggctggaaatatcgcggtcgtgggctgaaacagattaccggcctgagcaactatcgcagttgtggccaggcgttgaaactggaccttgttactcatccggagctgcttgaaaaggatgaatacgccgcgcgctcagccgcgtggttctatgcctcccgcggttgcctgcttcattccggcgatgttgagcgcgttacgctgctaatcaatggtggccgcaacgggctggaaaaacgccgtgcgttgtttaacctggcgaaatcagttctggtatga

SEQ ID NO: 167539 - DNA, 198 bp, Enterobacter cloacae
gtgttcatacataccacggccgtatatcggatcgaatccacctactttctcaatggcgctgcggtggtaatacagcatcacgccgcgctgcccggtgtaagccacatgctgatcgtcacggtaaagctccgaaaggtcattcagcttgttcgtgccagcaagatcgagaaactggtaagccaggtgcggttcgggtga

SEQ ID NO: 167540 - DNA, 990 bp, Enterobacter cloacae
atgatgatgacagcgcaaaccagaatcgggacgccaatcgtaccgcgcaataaagctgacccgacgcaatcatcgcggcaggtcagtcggatgttcaacgttatcgaagatcggtatctgaacattaagcgcaggctgaaggcactctttgaccaaaggctgacaggacagcagcgagaggcgaacgcacagcggtcatggatgatgtgcaacaacgaaggtgcagagccttcgctgtatcaggtcaatgccggtaagttcatctatgacatgacagctgctgaactggccgacctgctccaggtggtgcagtcgattctggatgatgagcttcttgaaggcggcagtcagaacctatgggcgatggactacgtcattgcggaatatgaccgcggcacgctaaacgccttcaccaacctgtcggtgcagtctcaggtatacgccagtcagactacgctacagcagcttttaagcagcccgggatacctgaaccagattgcggcggccaggctgacaacgttcagtgactggaaggtcatcagcgacaccgcccgcggcgacctgacaaacatcatcaccgatgcggtagcgcgcggcgtgaatccccgcgagacagccagcgtaatcagtaagcgcctcgatgtgtccatgtcgaaagcgaaaaacatcgctcagaccgagcaggtcggcgcgctgaggcaggcgcagtggaacgaaacggactgggccgctgaccggcttgggctgagcaccggcctgctgtggctgtcagcgcttaagccgaccaccaggtggtggcacgccgctgaacacggaaaggtaaaaacgacagattgggtcagggaattttactcgcgggatggtaacaaatatcactgctactgcggccagattcctgtgttgctcaacgacgacggcagcattttcaatgaagggctggaggagaagttgaaaaaagagcgtcagcagtggaaagctgattctgattag

SEQ ID NO: 167541 - DNA, 474 bp, Enterobacter cloacae
atggtcaaacatcatgttggtggcgatctcgttgtactttttgcccttcgactcgccgttggcggcgataccggaatacagcaggccggtggagatgtggatcgggtcggaattggttccggccagcatctcatccagacggttaatcaggcgcttgcccttctcgctcgattcggcgtactgccggttaacgtacatgtcgcccgtcactttgccgtctttgtggctgacgttctgcagccaggccccgacgtggtactcattcacagcccggacatctcgcgccgacacatgcttgccgtctactttcgggtggcccagcggcatcgggttacgctcaagcgtgttgtaggccttttcgatttctgctgccgggtacaacttccggttcatcacaatatcgtccacgacaggcgtgatgccgcgaaccacgatatgtggcttgccgtcgatggttttagtggtgatgtttga

SEQ ID NO: 167542 - DNA, 375 bp, Enterobacter cloacae
gtgctaactagtattaaatcacaagctgttaggtatgtattcgttggtttggcgaacacagctttgacggcagcggttatattcagcttgatgcagttcggcgttggcatctacctatctaatgtctccggttatgtcgcgggcattctttttagcttcattatgaacgtaagattcacattctctacttcattgagcttaataaagttcatcaagttcctatcagtctgcgcaatttgttatatttttaatctagtagcgatgaaattctttttaacactcatgccccagcatgtttataccgcgcaatttataggcatgtttttttacacagcaataggttttatccttaataaattttggtctatgaaatga

SEQ ID NO: 167543 - DNA, 198 bp, Enterobacter cloacae
atgtcacacccaatcactaccgaaaaccaaattaagccattggatatcgattatcgcgatccgcgcggtgtgattgtgcatgtcaccggctggaatcgggataaacagcaggtgtacttcaccaggcagaattatccgcatgaatgcatgcagccagtctggaagtttcaaaattatttcaggagggttggggagtga

SEQ ID NO: 167544 - DNA, 339 bp, Enterobacter cloacae
atgcaggccggaagactgagagacagggtggtaattcagaacatcacaacatcgcgtgatccttcaggtcagcctgttgaagcgtggcacgacggcgcagaaacctgggcagaagtaaaaggtatcagtgggcgagagctggtagccgctggtgctgaaacctcagtcgccaccatcagggtatggacacgatttcgtagcgatatctctgcagcttccagactcagggttgaaaccggaccgttcaaaggcgctattttgaatatcattggcccaccgattccagattctcgcggtgttcagctcgaaattttatgcaagcagggggccgaaaaatga

SEQ ID NO: 167545 - DNA, 198 bp, Enterobacter cloacae
atgagtaattatgcgctagttaaaaatggcgtcgttgaaaatgttgttgtatgggacgggattggtaatattttcgacaattatatagtggtaaatattgaaaatataaatgcaggaataggctggttgtatgacggagaggcttttacccctccgtctgagcttacgcctacaccaccgggaaatcaggccagttaa

SEQ ID NO: 167546 - DNA, 408 bp, Enterobacter cloacae
atgatgaaatattattttttagatggtgcattttatattgacggattaaataaccacattccagataacgctatagaaattagctcagatgaatatcaccggctgtttgacggtcaggccaatggaaaaataatttccgctggaaatgatggtcacccggtattgcaagagcccatcggtttgacgcgtgaagaagaagttgcgagaggcgagcagaaaaaacagtcgctgatagattcagcaatgcagtcaattagtgtgctgcaaatgaaattgctggcagggcgtatgctgactgatgcagaaactacgcggttaaacgcagtgctggactatatcgacgcagtgcaggtaattgataccagcactgcgccagatattaactggcctgatttcccggtggtgtag

SEQ ID NO: 167547 - DNA, 1317 bp, Enterobacter cloacae
atgagcccctatcaacttattttaccagcgaattatcttgattataatcatgccgcagctcataaactcagcctccagatggtcagcaatggtaagccgataattttaagggctgtacctgaacattctaatcagggcatcagaccatttcgcttattaaccattgccgtcccaccagttgaagcctcattagttgcttcatatcctgacaatctgaaaaaactggaagagcagcttcaatcctggggaagtgaacttctccagccactcgctgatgctgtttatgatgctatacctgatacaggtcttcgccctagctctggtgaaaaggaaggtttgctaattctgctatgggttcctcgtttaagggatggtaaaacagaacgtactgatgttatgggctatatcgtgcaacgctcactctacgaacttgccagcgtattagacatacttgcccctaggaatgagcggggaatacagcaccgtttccgactacttggtggcgtaagaggtacacaatggcaacaattaccactgttacctgtcgaaatacgttcggctatgaatgctgcacgagcaagagacatttctgctgttgattctgataatgcatctttctatggtgttctggctggcgttggggctcttggcggcacattagctgatatctggatacgagtcggctggggacactggacatttatcgatcctgacaaactccttccacataatctgccccgccatattggggttgatgatcatattggataccctaaaactgatattcttcggcacctcgcaggtagtatttatccacatgaacctctccccggagcgatcaataaaagtattcttgatgacgatcatgatattgccagagctgtgaatgaggctcacttagttgtggatgtcagtaccacctttgaggtgcctaggaccctagcgttaaaagatgatatacccagaacagttagtctgtttctgacaccatcaggcaaggccagcgtgatgttaatagaggatacagacagacagtgccgaattgatgcaattgaggggcaatactaccgggcaattttgagcagcgagtggggaaacactcacctacagcacaattatggtgatcgttgggtcggtggtggatgtcgggatatttctgtacgtatgtctaacgaatgtattcacgttcatgctggtatcctgtcgcgccaactacggcagaccgtccttaaggatgatgctcgattatgtatctgggtgtctgatgaaaattcaggtgcagtgagcgctcatgaaattgagctttaccctgtgtga

SEQ ID NO: 167548 - DNA, 351 bp, Enterobacter cloacae
atgcagcgcgtccataccgcccatcttgtcctgatgcgcgtgagtcaccaccgccagcgcgaccggcaggttgatctcctgcttgatccagttgaggatctgggcggtctggtcatcggtccaggcggtatcgaccaccagcacgcggccgccatccctgacgatcaaaccgttggaagcgactgccccgaaacccggcatgtcgagataggaagtgtgctgccagacattcggtgcgagctggcggaaaaccagatcgccaaaccgttggtcgccagtttccatttgctggccaatcgtcgggcggatttcaccgggcatgcacccgctcagcatcaatgcagcggctaa

SEQ ID NO: 167549 - DNA, 408 bp, Enterobacter cloacae
atgaaagataaacgcatcagctcaacctcaattgatagtgcctttgctaaagatatgcagccagtttacgtcgtatcacgacacggctactcgcgccgttttctcagcaggagtgcggcgatcagcaatcttgctcactacatggtgaccaaaacttttcagcgcgccggcttgaataccaacgaaccagacgagcctgtgttcagcaacggtgtgctcgtcaatcgaatgggccagcacacccagcaatatctctttgcacataaccgatgcatgaggcgcatccgccgaatcctggaacgtaagcgcaatatgcagaagtggctcgagaagtgggacgccatgcacgaccgctacgtgaaagagcaagcagagctacaggccagcaaaccagaagggatcagctga

SEQ ID NO: 167550 - DNA, 408 bp, Enterobacter cloacae
atggataatttaatcaacacctatcgacgcagaattttaaaggcagcgttattacgccatcagcgtaaaacaggcagtaactgtcttgttattaaactaaataaaggcggtattaacacggtcgagttaacagagattcttctcgatggattattacgaaaattcgaaaggcttgcgatcagtgagtacgggagtgtcgaaggcataaaagctattaagggaatttacagcagcgctgttgatgttaatggcagcggtgaattccttacggattgcgggaaggaattaatcgacgagctcatttgtgagctggttgagttcgtcaaaaaacaaaaagtggaggctccgaaaacggagggtaatgaaatggggggatctggtggcactgacagcgatacgaattcctga

SEQ ID NO: 167551 - DNA, 681 bp, Enterobacter cloacae
atggcggcgattggcaccaccagcagccgtgcgcgcttcggcctggcggcgttcttcggtaaagcgggaatcagcaaaacggatgaacagctcgcagttcaggcgctggcgcgatatgcgatggatgccgcaccgaagaatgttcgcaaagcagctggtggccagttcggatggtgtatgcatatgttggcacaatttgcctttgctgattactcccgttcagcggaaaccagcgtgacgtgtcacagctgcagcggtaccggtttgacgtcacgctatgaggatgtgatcaaacatcctggcattgttgatgctgagggtgcggaggtggtagccccgaagattaagcatgagctggtgaaaagggtttgcgaaacctgcggagggaaaaaggtaatccttgcgcggtgcagatgcggcggtaaaggtgaagtgctggatcgcaaagcgaccaaagaacgtggcgcaccggttttcaaaacgtgtgaacgttgctctggtaatggcttctcagctatctcctcggcgacggtacaccgtgccattgtgaagcgtctcccggacctccatcagtcctcatggtcacgcaactggaaacccttttatgaaatgctggtggacacgctgcgccagggggagcgtcacgcggcagtagaatttgagaaggcaacaacttattaa

SEQ ID NO: 167552 - DNA, 195 bp, Enterobacter cloacae
gtgattgaatgcgatcatggcaaactgaaacggataatcggcgccacgctgggatttaaatccatgaagacggcttacgccaccatcaaaggtattgaggtgatgcgtgcactacgcaaaggccaggcctcagcattttattatggtgatcccctgggcgaaaagcgcctggtaagcagagtttttgaaatgtaa

SEQ ID NO: 167553 - DNA, 225 bp, Enterobacter cloacae
atgagcttatcaaaaaggcaagacattcaggttgtgaatatcaaagccgagcaactggctggtttatcgcaaactttatttgaataccacgacaagctggaccatttccaactcaaaactatttgctctcttgtttatgaccttgctggcgaaattcatgattggaccgaaaaagaaaaggaaattgttatgagcttagaggaggaggagcgccgcaatggataa

SEQ ID NO: 167554 - DNA, 198 bp, Enterobacter cloacae
atgatcatcaaatctttcaaaggatatataaacgacctcttcaacagagttgtcttcattgcgaacgatacctttggtcagtattccttcatctatcatagagctgagaaatgttttatcgttcacatagtctttaacaacagactggacagctgtatgagcatccttaagagcaatactatttctgccattagctag

SEQ ID NO: 167555 - DNA, 861 bp, Enterobacter cloacae
atgacaactttagtgagttgggtaacttatgatcaaagaggtcctgcctcattatatattgcaagtgacagtagatttagttgggagaaacgagcgtgttgggattctgggcgtaaaatacatttctcaaataaatatcctgttattctgggtttttgtggtgatgtaatgttttgttctcaagtaatatcacaagttatttcatatatagatgcttgtgatattttcgaaaaggacgtcaatactgacgcaagatttgatttggtatttaatttaattaaaagaagttttggtgactaccctgtcgtttttgcgttagagagttttcaaattctatacgcaacacgagaaagtagacgatgttttcatacttatattattaaatgggataagaataaatctaaagatcagcgttggagtacaagaaaattatcaatcccttcccaaacagatttaatagtaaccctagggtctggtggtcgcccttatcgtaagcattatgaagaaatttatagcaagtcagaaattggcggattaagtcgctcgttttattcttcattaagcagtcatatcgactcaggaaaagacccttatacaggtggtccaattcaattagccagcttaacaaatatcggtggaagtaacgcacttggggtaataaagaataataaaagatatttatatggcatggaaatcgatccgcatgaaaaaatcaataacatcagatgggtgaatgatctatttgaaaactgtgatggtaatgatgtgaagagacttaaacaagcacaagttcaacctttaccacggaacctcaacaatccactgggtaaaaatactaaaaaaatacctttacccaggtag

SEQ ID NO: 167556 - DNA, 1239 bp, Enterobacter cloacae
atggatatcagactcaaagaacattttgaatttgctgcagccaagacattacgtgcggtagatgctctgccaactcggtctaaccagcacgagataggcggattagttgaagccggtttggggagggctttaggtccgttagctgaacagaaaaagacagaattacaatgcaaaatgtttcgactcacagatagtgaggaaacccccatctgcgttgatacccaagttacttggtacaatacccgtgccggaaatgagaaacggggccctgagtatcgtctttactatcgcgataacgcagtcactgaatgcttaaatgaaggtgacttcatgcttgttgcgcttagaccaaataaagatttggtgatatgtttttgtccgcagggaagcccggttgaatggcaactacgtgatttgtttggcctgaataaaaccggagattcaaagtttcactcgtctgagcttaactctcgcacactgttggtaacggtacagatgtgtcttgaggaaatgggcatcatctttgctcaggaaggtgatgaagatcagttgatacttgagcaactccttgaaatatcaccaaatggattcccagcttcccgtgtgttttcgaatttggcgagggagagagttgctagatcttcattagataattctgaccaagtgttgatggagtggttagcgcaagaggaaatgctatttcgcgtgctagagcggcatattgtaagaaagcggcttaaggaaggatttggcctgaatttcgatgatgttgatgaatttatcagttactctctcagtgttcataaccgacgaaagagtcgggtcggatatgcttttgaaaatcatcttgaggttacatttgttgaaaatggactccattatgaaaaaggtggaaagtttaacgtcaccgaaaataactccaaacccgattttttatttccccactttcgggcctatcatgacccgtcatacccggtaaactcgctgtttatgcttgcagcaaaaaccacctgcaaggatcgctggaggcaggttttggcagaagctgaacgtctgaaagaaaaataccttgtcaccttgcagcccggtgtcagcgttaatcagataaaagaaatgaagtaccacaatctacaattagtagtaccagagccacttatcaatgtttatcccccagaagtgaggggagatttgataactcttcaatcgtttatcaatcatgtgagacgttcccaagtataa

SEQ ID NO: 167557 - DNA, 1440 bp, Enterobacter cloacae
atggaagaattacagccggtcatcaaagagcttttagagaaatccaaggatatagaaaagcttaggcaggaagaagatcttcatcttttgaagaaagttttggagatttatgatcagaaagttgtggctgaagtattgcgggcagtcagtggcagcgactggtcaagggaggctattaatcgttgggtaaatggtaagctaatcggcaaaagactagttgaagttgaagtgcagatgctacgaagcatgctgcctagtgctcccgcccattatgagcaaagtaaatttcgtttcattgacctctttgccggtattggaggcatccgcagtggcttcgaagccattggcgggaaatgtgtatttaccagcgagtggaatgaatttgcagttaaaacatacaaagccaattggtactgcgacgagaatgagcatgttttcaattcagatatacgtgatattactttaagcaataatgatgatattactgaggaagaagcctacgccagcattgataaacatatcccggaccatgatgttctgctggctggttttccctgccagccttttagcttggcgggtgtaagcaaaaaaaactcgctcgggcgaaagcatggttttgagtgtgacactcaaggaacgctcttcttcgacgttgcacgtattatcatggcaaaaaaaccatccgtttttgttctggaaaatgtgaagaatctaaaaagtcacgataaaggaaaaacttttcgcatcatcatgcagactttagacgaattgggatatgacgtagctgatgctgatacaatgggctctgatgacccaaaaataatagatggtaaaaatttccttcctcaacaccgtgaacgtattgtgttagtcggattcagacgagacttaaacctttcggaaggatttacgttaagagacatagttaaggagtatccgccacgtctgccagcagttaaagacttgctggacaagagtgtcgatgaaaagtatacacttactccaaagctttgggattatctctataagtatgcaaaaaaacataaagaaaaaggtaacggttttgggtatggtcttgtaaatccagacaataaatcggcggtttgccgtaccttaagtgctcgataccacaaagatggatcagaaattttgattgatcgtggctgggatcataaaaaaggcgaagatgatttttttgatgctgaaaacatggctcggcgaccacgtcgcctgactccaagagaatgtgctcgtatcatgggatttgaacaacccggtaaagtcactttccgtatacctgtctcagacacccaagcttatcgtcagttcgggaattcagttgtagtacctgtttttgctgctgttgccagactgcttaaatctagaatagaaagagctgtattgcagcgtgaaaccgactcatttaatgaagcggtatga

SEQ ID NO: 167558 - DNA, 2169 bp, Enterobacter cloacae
atggctacgacacctaccaacctgccagtaccgagcgaatcctatcgcgacctgaagtataacgctggtaagtttgatgaagttattacttcatttgctgaatggtatattgaccgcttcggtaacaagcactataccgtgcaaggcttaaaggcactattcgactcgaagatttatgaatgggaccagatttttcagcagtttttagtctcttctggatatcaatttttaggtgattacgtagatggaccgctaacgtttaccgagcgaaaccagtatattcgctacgatgggcaatactggaagttgaatgctgaaacagatttagatttcacaacaacaggtacagatgcaacaagctgggcttcagacgttacccatttatcccttattgatggggatactctccggcaagagttggcgagcgataatggatctaatctggttgccacaaggctgccttatgcgagttctgtgaaaagaactcaaacagataaaaaccttgatgtttatacagcttcagattttggtataaaaggagatggtacagacgagacgcaaaagcttttgtcattgattaccaacaggaacggaaggaagattgatcttcaagggttaacaatttctttttcaggaattaatttaacagaagtttctgacttggttatatccaatggagctttgaattacgtaggaggttcagcgacatttgcgtttaaaattaacgcctctgcacgtataattctcaatgatatagctcttaatgggaactctgttccagctaaagggctatatttaaacgcatccagcaatgaagcccaactttatattagtgggtttaaagggcgtaactttagagagacaaccacaggactggcttcaggtattttcgcaacatccgattcatcagtattttgggataaggtagttattgacaactcctccgtctacgacatcacaaacgccggtacaggtacaaatgttgggagggggatacttatccataacttcaaacttgctatctgtacacgtcttgatatcaggcgtgtagctccatatcaggatgctgatggtatttttgcactaagcccaaattatccagctgctgtatttatttgtgacgactcctactttgaagactgtcagaagcgttctgttaaatcgcagattatgaatagccgtatatcaaatattacagctaaacgcactcagtctttcactgttggggctgggcaaactgaggttgatttgcaggcgggaggatcgcttgacggtttgagttgctattatgctgatggttctgctccgcaatctattgtttctggtgggtatgttagcggggccacggtttttaagggggttgcgcttcggaatatagatgtccattgtgatgattcgacagacataattcctaggctggtatcgtttttcaataacttctcaggaacatacgatggttatgttgccgagaacattaaatgtaacaccattatagaaaacatgtgttatttctatggcttggttgggaactcaagccctacagcatatattttcaatgaggtgattcttaggaatattcaggcctcaggcatatcatcatctccatcatcagccgtggtgcaaattagtaggggtaattctcagtatgttaaagcgatagttcgtctccaaaactgcaatcttggggatgggaagacagcgccaataagttatcttgataccactccaggatctacaaccttccttgatgtgctttgcaggcaggttagcaactgtcgtggattcgacgtgttaacaaccgcaaactctgacacaatgcaaagaatctacgcaacatttgttgatgtggcagaaaattcagcaactactttatcaattccaataagaactgtggccgggagaacggcaataaaagtatctgtaatgtacaactcaagtagggattcgcaggcagctaagttatttacagaggggtacttattttatggggccaccaccccttattacgttgagtcagtagcgggagtgaagacaaacgcaaacacagggtcaattagtatcacttcctccggcaatagcattgccatcaacaaaacagccggttcaacctcttcaggaggtaggcttacggcaattgtagagcacattgctagtgtcgatgttcaataa

SEQ ID NO: 167559 - DNA, 675 bp, Enterobacter cloacae
atgaccgctttaaccgatattggcgaactctctatcagcgacagccgcgaaagcgggaaagattacctgctgcgaccttcatttgagtccatgaccaggatcggcactccggaagagattgtgcaggcgtacgccaccatccacggcaatgatgtcactcagctgattgatgtttgcgctggcacgctgggacgctttcctgaatggctggctccatcattcaaccgcgctgctgagaagctgttatcaactagcatgctggtgctgcaggcatgctgcgaggaagacctgacgccaatgatcggcgagtggaagggttggctacactgcgttgtatatcgacccggccagatgcctaaaaacgacatcatcgtactggctcagcaccttatgcagcacggcgtcgtcggcaaagctaaggtccgccagttgcagcgccatgagaccgccgagaggacgagcgagtttagggcgctggattacatagttgccgcacagactcatttcaggatgagcgaggaagaggcagcaaggctgacaatgacaaaattccagatgctgctggcggcgaaataccctgaccagaaaggcttcactcgcgaagagtacgacaccattgctgatcagtacctggctaaacaggcggcacgcagagccaaaagaaacagcgaataa

SEQ ID NO: 167560 - DNA, 696 bp, Enterobacter cloacae
atgaaccacacagacttcctgcggtatcaggccgaaagcgttaagcgcgccagcatgccgccagtagcaaagcacagccagaccaaaaccaaccagcgcgaagtttcagtggatctcaaaatgaggggagaattgatgaaaaagcaaagattgaatatttcatatctcaacgagtgttttacttactctcctgaaactggcgttttaacttggaaggcgagacctcttgaccatttccatgacgaagccacttgcgcagcatggaacaaaaaatatgccttcaagcaggccgggtatgagcatcgcggatatttgagcctgtccctgaatggtagaaatatgtttctccataggatcgtcatggccttaataaagggccagtggcctgtagccatggtggaccacatcaatggcaataaatcagataacagggagtccaatcttcgcattgttgataacgcagagaatggtaaaaacaagtccctgcttctaacaaacaaatcaggctaccacggtgtaaggctttgcaagaattcattgcgatggcacgcgtacatatatgtgaaaagaaaacaaatcttccttggatctttcaaatctaaagacgaggctgtagtggcaaggaaacaagctgagaaagagctgggatttcacagcaatcatgggcgaaccaatatctatggtggtgccgcatga

SEQ ID NO: 167561 - DNA, 1041 bp, Enterobacter cloacae
atgagcaatttagacttaaaaaaaggtgagcgagccgaagaattattaagaaaatattttctgagcattggttattatgttttgagatcagttgaattcaaatatcatggtttcgacattacagatattgacttatggttatactcacgaccttccccaatttctagggaaagaacaaatgttgatataaaaatgaaaaaacaaccacaagcacttgagcgtgtattgtggacgaaaggattgcaaaaagttttaaacctcgaaaaatgcatcgttgcgactaccgataaaagacctgatgtaacggaattcggcattgagcatgacgtacttattttagatggtaacttcctctcaaaattaacgtctactgaacgatatgatgacaaaagaataagtgaagaagaatttgaaaatcttctaactttacttgactctagttcttatggtggcaactggaagcaaagataccgtaagtcaaaagccgtcctagtcacaaaacttaatttcgacggtgtaaatcatcttctagatgacattcagtattatttagaaagagttgcaacatctgaaaatgagtcttatagcccagcgtgcagagctctttactcttcaatatccatgttattgattttattggattattcaattaaggatataatattcaaagaacatgaagaacgtgtaaaaatgattagcgaaggtattcgctacggtatagatggtaaggatcaagctaaaaagttattatcaatggcaacaacattaatttcatcattcgtaggttctgcaccaattgataatactgcaatcactgcagaagttgaaaaccagttcaaaagcattcctgctgagattatagggaaccatttttctacaactcaatcaatgaaaaacatgtttcacttagcaatagctttcgaagggttagcatttggtaaagaaacagttagaaccatagatcttgaattcgagatgaaatcaattcttggagtgttatgtgattttaactcaatagacagaaaaaaggttattagataa

SEQ ID NO: 167562 - DNA, 1263 bp, Enterobacter cloacae
atggataacaatacgaaaggcgcatggttagtacatcatgctgaaaaaatcaaaaaattccctggagctgatagtgaatttgaacaaataagtttttccggtaagtgtggaattcttttgtcaagcattagctctaattctcagcacgttctatctgaagatagaatcttaagtttatctaaagctgccggaataaatcgtagaactgaacttccatcaattttagacgagttaaaaaagcagcaaataattacacactcgaaaaatttaagtaaatatgaagttttgggtattcctgattccattacaatacttaatcatgtgtcgagaatttttgatgaatccgaacccagtcaatcagaaagtgcagcaattgagctttctgagttatgctctgaatctccaataaatgaaagcagcgctaaaacaataattgaagatacattcaggctagcaagaggcgatagtgataacttgttcactaatagccaacttgttggcttcgtagattctgagcaagcatactcgggcgacaaacttttatttaatggtaatttattcagaacagatgatgtcaacaaatcatacactatactcaattctcttagcgatggcgacgcacaaaaaacaaaagaattcaatgaactactaagaaaatccggctgtgttgatattactatggccaagagagtccttggggatgagttattaaaaaaactacactcaatcggggttttggatataaaccagattggtaatgaatatggtaaccactattacattacaaagccttctgccttcaacaaattctcatcttcggctatagacgatgcttttgatttggctaaagcgtttgttacctctcttacttttggtatgcaaaaaagtgctagttcccgtggcagaatcacgatgattgaagctctcttaagaaagttaattaatggttatgaggtcggcccagcaacagctatcggccgcgactatcaaatacttgaattaaaaggggtgattaagataaccgagtcggagaaaaaaggtcaatacaatatgagcttattaaaaaaggatattggccagatggcacttaaagttataacaagtggagatgccagcttacaatctttaaatactctcccctccgtaactgttacttcttacattgctccagaagcaacaagaacacttgaaaggattaatcaaccagaaccacttaagagaaatataggggaaatacttagccaacttaggaagggtaactaa

SEQ ID NO: 167563 - DNA, 192 bp, Enterobacter cloacae
atgaacagggcctcaccagttgatttgaggaaaagcctcgaagcagctcattgccttgcgaaaatcggcattcgctttgtgccgatgccggtagcaaccgaggaagaattccagacactggcagcaaagagcttacgacgacttgagcagatggctgtcgaagccgagaagaatgaaggcggtgccgcatga

SEQ ID NO: 167564 - DNA, 1128 bp, Enterobacter cloacae
atgttactgaatgcggtagggtttctgtcacgcagtagcatgaaaatgttactcgctatttcattgttcatcatggcgcatttcccgtcggtggccttagctgcacctgtttgtgacgacacgaatattggccacaaggagatagtattacctggaggtagtatttcacccggtgttgacctatcctcgttgactactgtgatagcctcttattacactataacttcaaattacaattatcagtgttatgtaactggtggagatatcgcaacttatacgctatatgtttttcttgaaccattgagttcatatggtagttcttataatttgaatataggggttaatccagcttacagtgtcgttgcaatgaatgctccggcatttggagtcggattcactaattctctttcttcaccaccaggcatggcggtgactacagttcattatgtaacaattcacggccccgctggatcttctatcattggtaatggttctggcataggtatgggggcatattatatagcattagttaacggttccctcttacagccaggcgttttattggggagtgacctgcccaccttcggcatatacggcatgatttataagagtgatggaacaccctatgacggaaagaaaataacgatggggtctgtatcttttagcggctcagttaatattattccgtttacatgccagacacctgatgtggtcgtgccgatgggaaactataaaacaacggatttcaccggtgtgggaagtaccagtcaatgggtggatttcaacattgaattagataactgtccggggaattatccaggatattttcaggcaaaaaaccaaatgagtttattgattaatcccgtttatggcaatccaacccctgattcattcagtctcaaagcaggtactggcagcgcaacggggatagacatgcagatccgaaagcaaaatgataccagcttgataacaatgggaacagcttttgatcctctgggccccgtaaccggaaatacgggagtgacgcaattacgcatccctctgcaggccagatatatacagtcaggcgggcaggtgactcctggtttggcggagtcagcgctaacgttcacaataaattattattag

SEQ ID NO: 167565 - DNA, 297 bp, Enterobacter cloacae
atgagtaatgttaaaaatcttattgcagcgtgtattaactgctatgaagaaaatgatgtattcaccatcggaataggggatgacagacatgatccaaaaaattttatcattatcggacgattcgacgaagatgaattacccgttaacgaatgcattggattccagagtgagtcaacggaatatgagttaacagactctattcgttctcttcatcatcgtttccagctttctcagtgtcgattgctacaacaaaaccctgatgcttgtcagcataatgtgaccacatcaacacgttga

SEQ ID NO: 167566 - DNA, 585 bp, Enterobacter cloacae
atggatgcgtctgaaaccattgtgaatgagattgaaaaagcattaaaacaacttattgtcatttgcaacaaatactcgctgtcagggagtttcagcaccgtcaatgatctggacaatgccttcccgtccaacttacctcgttcgacagagttggaatttttatatgaaaattataatcctgaaaagttaaagattgaaacaggcttcacgccaattaaaattcattctgtcagtgagctctcgaacgctcaaagtgggtatgaatacttaccagataattatcttgttattggcgatgatttaggcggaggtaaacctataattgcggttatcgatgatgggagttcctatgtttatgcaagttatgatgttattgaaccatttaagatagctggtagtctctctgagttcatattttctttagctgagcttattgatttgatatatggccaatacgatatctttgatatagcagatgataatggcgaggtaaaaaatgattttattgatgagttgcggagaaggattgtgcctctcatcggtaatgcaggttttaatgcattctatgattatttttatggctag

SEQ ID NO: 167567 - DNA, 345 bp, Enterobacter cloacae
atgagtcggttagaatacagaaaagcgtatgggttagatggcttaatatataaaattatgggttggaataaattagataatttttgtgtgtatacaaaagaatatgaagcatatgctaaagaagagcttgtttgttatttagataactaccctgtcagtagtgatgacgatgaggaagtatatcctgattttgctgtcgaaaattcactaaagctctttttctatggagagcaatttatagatgcattacataatatttctgtccaaagagaaaaaccatctgtagaggatttcatatcaggtttaaatttttatctcgagaacgataacttcatagagctttga

SEQ ID NO: 167568 - DNA, 402 bp, Enterobacter cloacae
atgttcagaacagaaggcatcatcgatgagataactcaatggattgattcaaacttacacaagccgctgaagatagaggatgttgctgcgcgggcaggttactccaagtggcatcttcagcggatttttgtgcaggtaaaagaagttagccttggaaagtatattaaagataaaaagctcagacttgcggcgaaagatcttattgaaactaatgaaccagtgataaacatagcctttaaatatggatttgattcacaacaaactttcactcgggtgttctctaaaaaatacaaattgccaccattaaaatatcgaaacaccgaaaggataagaaacatgtacctttgcagtcgattcatggcacaaagcggaagagccaacaaagttgaaggtccgatgtga

SEQ ID NO: 167569 - DNA, 858 bp, Enterobacter cloacae
atggctgcaaacatattcacaattaatggtcaacgtgttgactcctttgaagatttcatgttagctgaaaaagaaaatgtttggtctaatttattattttatgcagaagattttagaagctccaaaggagcatactttacatttgaaaagaaatctttcacacttatatctttcaaagatacagttttttataaaattcgttttattagatgtgtgtttgaaagttgtattttcatgggcgcaacatttaatgaatgtgaatttacggattgtgttttcaaaaatactaacaccaataaaattaaattaaactcatgcttgatagatcctaaatcttttgatgataattttgatttgaaatcagacactaacattgcagttaatttgtatcagtcgttatataaaaatgcatcgcgagaatatcaatcagagcatgcgttgtatagtttatataatatgaaaaatgctgaatatcaccatctaaattccaaattaaacagaggtgttatcacaaaaaaagaatacattcttaaaaaactattctattatctgcatgacttcatatctggctatggattgaaaacatttaaagtcctaaggctcttaatattaatcttatcaatattttcgtatataaactttagctatagtgagattatattcaaggaaggctcaggactttccattatcgattccgtttactttacatgtgttacaataactactcttggttatggtgatattacgccatatacagattttggcaaaatattaatttcgctgcaagcgcttttaggatttgtagtattatcattatttatggcgtctgttatcaatagagcggtcaaggcggtttaa

SEQ ID NO: 167570 - DNA, 924 bp, Enterobacter cloacae
atgttttcaattgcccagtttggttctgtctgtagaaaaacgaatgatttatatagcgatcatgatctacttgttatatgtgagggtaaaaaaagaaaatattactatgacaagtttactaaaagaggctacagtgtttcgacctttactgagaaccagttatataatatgaagcgaaaaggttctctttttttgcaacatttaaaacttgaatcgagaatattagtagataaaaatgattcactcaaaacttttcttgatgattgcttgttaattgcgccgagtaatattgaaatagacaattgtagaagaactattgaaaaattatattgttggcctaacgacgctaaatcaatagcttggaaagcggattttttatatggttcttctcgagattatcttattaaacttttagcaaagcatggaatatttgcatttggattagataatataattgcacagtgcagtgaggtgtttgcgattgaactcgagttatttcaacctctaattttgctgaggtgtattaaatcagcatatcgtagtgatatagagttacctgattatagcgctataaaaaaagcgattgatgattggtttgatttacttaaaataaaaatgagctttagctataatttgttaaatgataatgaatttttaatacgaggagaattttcatctaactatgaacgtttaaggtatcttgaaattatatatgtatccttggttggtggtgggtatgtccacgaaaaacatcatgagatagttaattatattctacagccaaatttatatcagtcattaaagcgttgtaaagttaaaaatatcgagattttttttaacgaattatattcaatatataaccacaccgtcttttgttatttaaacatccctttgaaatcaaacattctaatgcagcagttttaa

SEQ ID NO: 167571 - DNA, 372 bp, Enterobacter cloacae
gtgggagaagcgctaaaagaaagccgggtggcggctgcgccttacccggcctacattcattatctgccgcattttcccaggctgattgtaggcccggtaagcgaagcgccaccgggcaaaagcggggctctgcggcctgatgccctcaccccggccctctcccacggggagagggagaaaacattaaaaaaggcaacttacgttgcctttttgcttttatttggcgtctgtcgccgtgccgttggcatgccagtcaaacacgccgaactcgaagcccttcaggtcgcccttctcatcccaggacagcggccccatcacggtttccaccgagttcgctttcagccaggtggcaatctccgccggatcggctga

SEQ ID NO: 167572 - DNA, 1506 bp, Enterobacter cloacae
atggaactcgcttttagttacgcccgattcagtacaaaatctcagtccacagggaccagtctagaacgacagttgaacgcttcaagactgttctgctcagagcgtggccttacgctcagtcctaaaggatatcatgacctaggcgtttcagggttcaaacaagtaaaaagaccagaacttgaacagatgctccaagccattcaatctggtgatatcccatccggtagctatatcctcattgaagctatcgaccgtttatctcgtaaagggataagccacacccaagatgttctcaaacagattcttcaatacaaagttaaagtcgcattcgttggtgaagacgctaaaacactggctggacaagttcttgatgaaaattcattgaacgatctaagttcagttatcttagtggcgttggctgctgatttggctcacaaagaatcattacgaaaatctaaactcgttaaagcggcgaaatcaatcattcgtaagaaagctactgaaggacataaagttcgtggtcatacaatgttctggattgattggtctgaacaaaaacaagatttcgttcttaatgaccgggttaaagacgtacacaaaattattgagctcagacaagaaggacatggtccacgtaagattgccaagatattaaatgaacttaatatacccggtccaagaggaaatccttggaaccatatgacagtcactgtggttcttagaagtcctgttctttatggtgcttatcagacacaccaaataattgatgggcagaaagttccagatgttctacttgagaatcattatccagctgttattactcaagaagaatttgtaactatccaagctgacagttcaaaatcaaataaaggacgcccatcaaaggcaaatccatttagtggagttcttagatgtgaatgtggccaagccatgttgttctcaaaaagaactaatctgaataaagatggcgaaccgctggaatacgaataccatttttgtttaggacatgcagaaggacgttgtaagaacaataaaagaatacgagacctcgttccattattggttagtcttatggacaaactagttattaaccaagcaccaaagaaaaatctaaatgttgaactgataaaacaaaaagaacaaaagattgaacagttgaacaaaatgcttattgaacttgatagtcctccattgagtgttctgaaaacaattcaaacactagaggctgaacttgatattcttttgaacacacatgttgaagaacctgttcaagcagatgttcaaacattgagctctattacagacgcacaagagtataatcagcatcttaaacgtttagtaaaaaagattgttgtttatcagaaaaatggaccgaagaacctgcgtatcaaagtctacaaaaccgatggacattatcagaacttcttggtaaaagacggtactgtactgttcaagtcagacactaaagcacttaaggagttaatagatggattcaataaagcatga

SEQ ID NO: 167573 - DNA, 234 bp, Enterobacter cloacae
atggattcaataaagcatgattcaagaacaatggtttttattaaagagaacaatatgattgttctccctgtggaaccacattgttatgctttctttactgttgagcaagcagaaaggttaggatttgatatctcaaagatgaaacactacgaaaaattaagcctgaacggaagttctgacggctatgaactgattgaacctgacccaatcccagacccaacaggttattggtaa

SEQ ID NO: 167574 - DNA, 186 bp, Enterobacter cloacae
atggaaaagataaagaaattcgccagtaatgcgaaatcagtactcacatttttaatcatcatcgttattttctacaatatggttctagttcctattttaatggcatttggtgtcccggctccaatcctcatgattgacgaggcgacaaggttcttgatgaccatcggaacattaggagcagtataa

SEQ ID NO: 167575 - DNA, 480 bp, Enterobacter cloacae
atgttaaaacgttcagaaatacccagttataaagaaagtctctttaaagaacaacaaggtctgtgtgctctcacaggtcttccgatcgatgaaatcagtaaagcccatcttgaccatgaccacagattagacggtcctagtgctggacgctgtagaggcctactgttaggcaacgcaaacgttcttgaaggccgtttgaagcatcagttcaatcgttctggtcttgcagggcaaattgattatatcgattttttaaagagacttgtctcctatctagaacgagacaacacaaaccgtcctagacatccccagatgataccagatttaaagaaaaggttcagccgatataatctatcagatatgagacaaaacctctcagaagtccatctggaaacccaggggacgaagaaagaactgcaacaaagatacgcgaagtatcttaaggttcaatatggaaaagataaagaaattcgccagtaa

SEQ ID NO: 167576 - DNA, 306 bp, Enterobacter cloacae
gtggggtacccgatggggtttgatattacggtattattaactatcgtaggactaataggagggttaattggctggattatcattcagatcaaagataaattcaaatcaaaaattcagttagaacaacgtatagcagccgtagagcttcgtctggctgttgatgctgaaaaagattcgaatatcacaagatcaatgaacgaaattttggaaactctaaaagagctcagaactgaattaaaatcagtcactgatagtgttcaccaaagtaatatagatatagctatactcaagaacaaatcaggatag

SEQ ID NO: 167577 - DNA, 2265 bp, Enterobacter cloacae
atgtgtataagagacagggtacaagctggtttcacttccggtaatacgtacttaatctataacatgaacgttactaagaaatatgatgttcgtgtttgtgctgcgggtgttattttcgcatctgattgggtttatgttcgtgataccaacccatctgttagctataacttgccatctgttacaggtcttcgtttagttaacgcagtagagaacgctacaactactaccgctactcaatttgaatttgcatggaacgaccagtcacaacagaaattcatggtcaacggtgttgaacaaacgttttctcaggtattccagtactaccaaattgatataacaggtactaagacagtttcttacagaactaaagacttgagctttatctatgatttcagaatgaaccagaacaacggtttgtcacgtcagattaatttcaagataacagctgttggctattcaggaatgaaatctgccccagttgaaatcactgttagaaacaaccaagctcctgcaattaaaggttttcaggtacttgctggtccgggtcaaatgatgtgttcctgggacgatccacaagaccaaaccccaaaaattgttgactttgccggaacggttattcagatagctactgaccagaactttacagctggtgttaaatatttctacagcaacagtccgttcttagaaaacttcccattagaagacgggaaatactatgtacgtggtgcatggtatgacgtattcggttcatctgacgctatctggtcgcagccaatctatctggacatgaaatggaacatcccttgggatgaagaaatgaaagaacagttagacgaccttctgaaccttgatgagcgtgttgaccaagctatcgatgatgcttataagcttgctaatgagtacaccgacaaaactgttaaagcgtctcaagttgatacgttgaataaagccgacgcgaatgctcaggccaaaattgaaactttgcatacaactgttacaaatgaacgtgatggtgcaattagtcaggctattaagacaactcaagcagattataacgacaagattaacaaatctaatgctcgtataactgaagttgagaaaacacaagcaaatgaccgtcaagcgttcgcacaacagattactcagaccaaagccgaactgaatggaaatatcgctaaggttcaacaggaatctaaagcgtctgttgatgctcttactggtaaagtgaactctcagtatgctgtttctgcaactgctaatggtgttgttgctggtattagcttaatggctaacggtactacacaaaatagtagcattatcttcaacgctgataaaatcgctatcactcatggttctaatgcttcaacggctaaagttccatttatggtcgctgataatacagtctggatgaactcagcaatgattaggaacgcttctattggttctgctcagattgctgacgccgctattacgaacgccaagattgctaacttgtctgttaacactgccaaaatcgctgatggttctattacgaatgcgaaaattggtaatgcgcagattaactctgcgaaaattgcacagcagattcaatctgataactggaacggttctaacacaggttggatgattaacaagaacgggacggcgaacttccagaacgttactgttcgtggaacaattcaagctgacagtggttatttccgtggtgatatcacaggtgctaatggtactttctctggtactgtacgtgctgaaaaaattgaaggcgacgtaatggttgctgaaggtgctacttttgggtcggttacacaaccaacttcaggaagcagtgcttctgctggtgaccaccatatattctggattgaaggagaaagcttcgaccgtattatggacacgaatttgacattgtttgtcaaatgtgcagaacgtaaccgtttcagcttggttattaaaacaccaggaaaacctgaacaagtatatttcttctacgacactggtaacaatggtggtgaatggaccaacgcccttcgtggtattactattcctgccgctggtaaagggcaaagaaaccaagttgtagtccgtgtagatgcaaaccgttcagcttcgatgtttgtcgtagcgcctcaatttgtactcccacagacaagagacaacagaggtattattgtaccaaacctgaacggatctgctgctcctggcgctgcaagagaaaaatcttatatttcaatgtatcgtaaaggtaataaattgataactttataa

SEQ ID NO: 167578 - DNA, 951 bp, Enterobacter cloacae
atggacatgaccggactcagtcaagctatctctgatatgcgtacacaaacagccaatttagagcaaggttataagaaagcttttgatactggaatgttaagcgctgacgagtacaagaacaaactgaaagaacttcagcaagctcaaactgattgggaacttgcactttctctttcaagagataagcacgctaatgacgttgctgagatgttcgcacaggatggttggttaacagctcaagagaacatgcagctccagcttgaacagttgaacacccatactgaagatatgcgtctggttattcaaaactatgaagactctcgtatattaagccatgaacaagctaatgccgctatcgaacggttagacaaacagtacgctgttaaagccgctgctatcgctcgtcaagaaaccatgatgaagattcaaatggctgatgatgccgcttccggtatcgctggtactcttcaaggtctattaggcgaacagaacaaagtagcacaggccgcgttcgctatctccaagggtatctcaattgctaacggtgttattaacgctcatgaggccgctactaagtctatggcgctttatcccggtccattgggtatggctatggctgctacttcgtatgcgaaagtaatcggtgaagtaatgtcgatgaaatcaatgacgcttggacagttccactccggtatcgataacgttgctgaaactggtgattacacattacagaaaggagaacgtgttgttgaccgtcgtttgaaccaagatctgaaagattatcttcagaagaacgacaacgacaatacagaatctcaaggccaaccaatcgacgcttcaatccatattggtggttcagtaatggatgaacgtacactgatggcggcgctgaagaaacagcaacaaactcttgtgcagatcgtccaagacggacaacgacgcaggatgtaa

SEQ ID NO: 167579 - DNA, 1029 bp, Enterobacter cloacae
  misc_feature (976)..(985): n is a, c, g, or t
atggctagatctagatatgacgtcgagattaacggtaataacaaaggtttaacaactgccgttaataagtcgatggatgaacttaataatctgaatgaggccgctcaaggccttttcagtaatatgacagggccactcagtaacttacagggtggtctgaacgctattaactctttaagtcctgcattacgtgggctcggtgctgctggcttagctgctggggctggattcgctgcgttcactaaagcctcacagactgttaatactttgaccgagattcagacaaatactggcgtatctattgagatgcttcagaaactgaagaaagaattcaaagacaccggaatggaagttgataaattcggtgatattaacaaagacatgttagataaactcggtgactctttacgtgctggtaaaggtggtgttgcagatgatttggctgaatggggtatcaaactcagtgaactaactgattacgcttataaagctgaaggtggtatagaagctattatagatgttttctataagatgaaagcggcaggacgttcacaggctgaaattacgaacgccatggaaacaatggcatctgatgcatcgcatctgacaagtactttatcaaagtacagttcgaagcaagaagcactgaatgccattaataaacaatcggctggtatctctcgtgaaaacgctgatgcaattaaagaattcgaccgtaatatcaaaaatctccagacaaatattgatgaactgaatgttaaagccgttggtccattaataaaagaacttaacgaactctgggaatactggaacagagattggacttcagccgatttcgtaaaagtaatgaaagatttctggtatggtggcgatacagctattgctcagtttttccgtaagatcgatggaatatctgacgaaggttattcaaacgaaagtaaaaaggctgctgaattcgccagacgttcgagagaannnnnnnnnnaagaaacaatgggcagcaaaagaacaagccgagaaaaaacgtaa

SEQ ID NO: 167580 - DNA, 318 bp, Enterobacter cloacae
atgttctttgaactctggttgtttgacacttatatcgagccacaaggtcctgtgatgaacgacttatatcaggcacgtttggcgcatacagttaaagcatacagttccgttctttcagaaaaaggtcgtaaagaaatgaaactcgaagatttcttaatgttgaaagacactgtattcaaaagtcctgaagagcttgaacgtattaagaaacaacaagctgaacagaataaaaaagcagttgaagcgatgatgggtccggcattaatggcgaaggctcaaaaggcagctgcacgattaaaggctaaacaaaatggctag

SEQ ID NO: 167581 - DNA, 315 bp, Enterobacter cloacae
atgaaattagattttcaagaaatgatggctgcactggcaccaaagaaagaaccagtagaaatcaacggttttaaattctatgttcgcccaatgtctgtcagtgaactcgctgctgctttccaagtttcagacaataaagaagaccgtggcgatctaatgattcttgcttgtgttcagcatgaagatggttctcaggtatttgaaacactggaacaggtacagcagttatatacaactgtccgttctaaactttatagtgctgtccaaaaagctagtttcttagatgaaacagcacatcagatagaaaagccctga

SEQ ID NO: 167582 - DNA, 489 bp, Enterobacter cloacae
atggttacgttatatcaaatgattaaaagagatgaaggcgaaaaattagaactttatcttgatactgaagggtatcaaacaattggtgttgggcatctctgtgttatgtccagctcaagagaaaaagcggttgcccatcttgataaaatccttggtcgttcaactcacggtcgtatcactcagcaagaatcaactttgttgttcaatcaggatgtccagaagtcacttagggaaatcgaacgcaccggactgatggatatatacaccgtgtcaaacgaagctcgtagagccgctctggtgaaccttatgttcaatcttggtggtccacgtctactcggtttcaggaacgctcttaaagcatggcgtctgaaggactacaacaaagccgctaatgaattcttagattctcgttgggctcgtcaagtcaaatctcgttctgtacgtgtcactgaatgtatccgtaatggtgatatgcgttcttatagttga

SEQ ID NO: 167583 - DNA, 567 bp, Enterobacter cloacae
atggccgttttagataataaagacgttcttacaacggacgttaaattaaagtccaatgctccatacttcagtaatagatcagcatctggcaaatttcaaaaaagatatcttggtgttcaattctttgagttgagttttaatgttcaattccaatcagaacatatcaatcaagtccaacgttttatcgcattatatcaacacggacgtgtattcgatttcccaatgagttacgctggtgaatataaaggaacagcacaaggtattatcagctcagtctctaataatcttccgggttctcgacaggttactcttggtgtgttcactggtactttagaggctggaacattggttcaattccagaatcatgggaagctctatacagtccaagaagatgttaaatcaggtggaacattgaaattattcccggcattaatgggacaagttcaagctggtgaacagattacgtatcgtaatcctaaaggaaagtttgttctaacaaatgaaagcttcgactttgatattaaaagtctcagccaaattaattttaaagccactgaaaaaatttaa

SEQ ID NO: 167584 - DNA, 180 bp, Enterobacter cloacae
atgaaaaccactgaacaaactcgtttcgaaaacattctttttgaccttcagaaccagatcgttcaaaagaacgaattcagtaagattgaagccgtcacaaaattgtacaagaatggtcgattagtagccacaaagagaacaacaatcgctggttcacgattcaagttttatgaagcttaa

SEQ ID NO: 167585 - DNA, 210 bp, Enterobacter cloacae
atgaacaacattaaacaaccccagcagccagcagaaagagttatccgcgaagccgagtgccgccagttaacaggcatctgccgtacaacccgctacatgatggaaaaagaaggtcaattcccagcccgccgtaaactgggtggccgtgctgtgggttggcttctctctgaagtttctgagtggcagcaaagccgctgcaaagcagcttaa

SEQ ID NO: 167586 - DNA, 183 bp, Enterobacter cloacae
atgataggtgcattagtttttgatgacgatcctaaagacactcaagccatcaaagagactatcaagccattcgcattggaggctatgagtgagcagtacactcgtttgcttcgcttacatatgagcaaagatggagaagttaactcagcgaaaatgtctgatttaatgagtagaattttgtag

SEQ ID NO: 167587 - DNA, 213 bp, Enterobacter cloacae
atgtctaaagccctcattcgcttacctgaagttcaacgtcgtactggctatagtaaggcttggatttatcgccttcttaaagagcgtaaattcccccaatctgtaaaaataggttctcggtcgatcgcgtttgttgaaagtgagattgatgcgtggataacccaacggattgaagagcgagatgctttactcgtcagaagaccacaactgtaa

SEQ ID NO: 167588 - DNA, 912 bp, Enterobacter cloacae
atgagaaaaccaggcagaattaccttaggttggtggaatactagcctttcaccaaagacaaaggaaaatcaagctacagaagaacataaattatatgtcgcatttgtattgtttcgtttacttaatgaaagatgggttgacgtaatgtgcttatgtgaagttactcctgatgatatagagaatatatccgatgccttgggtgatgagtttaaaatatacaatggagcatttagagaaaagagaaagaaatttgatatatgcataatttatcgaatgcaaattgttgaatttttgggctctagtttagttagcaaacctcaccattcaggaactacagtttatgctggtcaaaaagttgaattcaatataaatgaaactgacgaaaccttggttttgtttattgctcattggtctagtagactctacgattatgctgactccccaaataaagcacatttaggaatgatacttcagtctgctgtgcacgaatgtattacatctagaaataataaagttattgttctaggggattttaatgaagagccatttaatgaaagcatatctcatcatttaggggcgtcgagagatatagctttagttaagaaaaagcccggattgctttataatccattctggcgtcatatgatgtattcagcattacatcccaattctgatacaacttttattcatggcgggacttattattataaaaatgatgatactagccgatggaaaacattcgaccaaatgatgttttcttcagattttatatctggtaattcttggcatttaaacgaaaccgaaacaacggtgttcagtgattcagagtttataagttatatttgtagctcaaaatcaaaatttgatcaccttccaattttatctgtgatcgagagggtccaaaatggctga

SEQ ID NO: 167589 - DNA, 459 bp, Enterobacter cloacae
atggctgattttagaaaatcattatctgtaggagttgcagcagcagtagctgccgctgagaataaaaaggagatacaagatttaataaatgaggttaacagccaaattgaagaaacgtatgaagggaaagtgcattttggtgtttggaccttaaagaaaagtacccctaagaaacaaaccaaaggcaatattttttttggtgctctgaattttgattttcttgaatatgatgctttgtgcataactaaccatgaagacaaagaacctatcgacctcgttgaatggaaagtaggtgatgctgggtatccatgcatcttaaagtatgaggaaagagaagcatattgctataatagagaagatttaataaccgaattatcgactttactaagcgacgtaaaaacgggtgaggctattttaaagcagttgaacaaatttaataaagaagagattggtgagtaa

SEQ ID NO: 167590 - DNA, 705 bp, Enterobacter cloacae
atgcttcaaggtgaaaaaatgaatcaagtaatggattttattaattctacgtcatcagttctggaatactccattgtttcaaaatggtatacaataatatgctttgttatgttggtcttaagttttattttgaaatgtgttttcccagtaaagaaaatatatcaccacacgacaacagaagacggcttgtctataattgcatctaaagaatttaaaacgcgcacccaaggtttaatgttttgcgaaatgaccaaaaataaatacttaggtatgaagccaggaaaagaatcagattatactattacttttcatggtaattctttaaagaatttgaagccgataaatttaggtttgatatcatttattttaccgtggagtttattaaaggctttcactggtcaatggacaacttcaaaaattggcgatgttttgatatatgatactgatgagtttaatggtggtgcatgtgtaggaaagataaaaattatcaaacataaaggaaagttgttactgtattcttatgcaagaaatattgggttgtcatttattaatatacctgttctgctaatgatatatatgccagttaaaacaatatctttcgtcatgaataaccttttggtcacgctattatttatggtatttgtaatagtggggatgttgttttttttctttaaacaagattggttcaatgatttctttagatag

SEQ ID NO: 167591 - DNA, 357 bp, Enterobacter cloacae
atgaatataaaggcaatagaaacaaaatatggtctgatttacggtcgtgatgctttaatagtatctagcaccgagctaaaactttacccctttaattttttggtaaaagcttctttaagtttatcttcttgtaagccaagtataaaagatgctcctgatgttcgtattgagttttcattcagtaatatcgaaatgatgtctgtatataaaatagatgattatccttatgatgggaatttacagtcgagctttgatttaatcgaaactgaaagagaagatgatctgcaacgactagtgctaagcacatacgaccacgttttcgatattattggaaaatgtgaggttaattatctttaa

SEQ ID NO: 167592 - DNA, 312 bp, Enterobacter cloacae
atgcaacgtgtagcaaacatatatgcggccgccttcattgcggacacagactctttatttcactcatccaaaagtatcgttgaaactcagcaaggctatgatgttattgagaactcaacgttgtttaagcgcggagacatattgctcatttggttttgcggacgccagcagcacgcatactgggccggtgatgcgctgatcactgatgatggtgaggccatagaaggcgaggcattagatgacgttcgccttgttggtgtggtgactcataccattagcccagtgtgggtagacgacaatccggtgatgtga

SEQ ID NO: 167593 - DNA, 1833 bp, Enterobacter cloacae
atgaattatagagctgatattgatgcgctaaggacctttgctgtgcttgctgtagtgatatttcactttaatggttcattattgcccggcggttttgccggtgtggatgtgttttttgctatttccggctaccttatgactggaattatcatatcaggaatcaaaaaagacacatttaatattgcaaaattctatttatctcgggccaaaagaataatccctgcgttaagcgtactttgcttgctgctaatgttatatgggtggtttaaattaccaccattggattactcagctctatcaaaacacgttttctctagcttgttatttgtgtcaaattttgtttactggggagaggcgggatattttgacgctgaatcgcatcataaatggttattgcatacttggtcattatcagcggagtggcagttctatattatttatccttttattattatcgcattcaaaaaactcctgcgggatggatgggttggattggcactcatagcattggcagttgtaagttatgtctttagcatatattcatctaccgtatggcctacggcttcttacttccttttaccatcgagagcatgggagatgtttgcagggggtgtcgcttactgttatgccataaactccaaaagcaaaaaatccatagctatgcattacactggtcttgctttaatagtatgttcatattttatagtttcatcacaggatttatggccagggtatatggctttattacctgtgcttggtgcgtgtttatatctttcagcgaaccatcagggcttattgtcgcggttcacgccagcgattatggtcggaaaatggtcttattcgatatatttgtggcattggcctgtggttgtatattgtacaatcaataatatatcagtaaatatatggcttggactcgcattctcagtaatgcttggactgctaagttatcagattgtagaaaaaagaaggagtgcaaagctgttaacattcactccatttgcagccaccgcgtcgtttattgttgcaatctcaaatggttatgcttatcagatgccaaaagaggtatataatgcgacaatgcttgaccctaattcaaaagaatttgggcaatatacatggaagaacattcgagaagtgaattcagagtttactgggaatggtaggaaaatacttgtaattggtgattcaaccgctggggattttgtaaatatactctttgaactaaaaaagaactcaaccaatcagattagatcaaggcttataaatgcaaaatgtggatcattttaccttaatgaagatcagcgtgaaaactattttaagatttctcctgacataataaagggattggtatcaaaaggtgcgtgtaattatgaaataggaaaactttacaatgaccaagctgtaaagcaagcagacgtcattatagtatccatgaactggagagggtatgctcttgactctcttaagcagtctttagagaacttaaaaaacacaacggcagcgccagtgtatattgtgggaagcaaaggttttagtgattctgttccagatataatctatggagcatattctcacaatgaagatatacggaagctggcatacaagaaatccctatatcaaataaaaataaatgatagcattagaaatataacaaaggcttttcgaaacgtatattttattgatttaaaatcgactatgtgcgatgttaacaaacaagagtgcgtagtgacggatgataagaaccctatcttgtatgatagcttgcattccacccatcacggagtttcttatatggctaaaaaactatccgatcaactaattaacctttga

SEQ ID NO: 167594 - DNA, 1443 bp, Enterobacter cloacae
gtgtatggaattagaatccgaactagtagctatataaatattaataatttgataatagatggcggtagtctagctgcaaaagggttgcagattattgctatgagtaatgatgcatcaatgactatctccaattatcaagcacaaaatatgcgcgaaacaggcggcacaggcctggctgctggtatttatatattggcagattctgacaaatgctggtctaacattgtattaaagaatattaaagttagagacattaccaattccggccaaggaactaatgttgggcgtggtgtaatggttgaaaactttgcgtctttgatggtaaacgggctcgacgtcagaagggtagcaccatatcaagatagtgatgggatttatgttgcttcattaaactacccagaagcaactgttattatatctgatagttattttgaggactgccaaaaaagatccataaagtctcaggttaggaatacaaaaataagtaacacagtccataggagaacgcaggcatttacggcagcagaaggacaaacagaaatagatcttcaggctggaggctcctgtgatggagcaagaatggtttatgctgatggtgcagcaccgcaaacaatcctcaacggctggaaccctggcgcaacattctctaatgttgacgttgtttgtgcggatacgactgatgtaataccaaggctggtgagtttttttaacaacacatcaaatgtgttagacacttattctgcatcaaatatctcatgcaatgccatggtgcaaaatgccttgtatttatatagcaatactgggaactcaaatccagatacctatattttcaaagaggttttgctgcgtaatgttaaatgtagtggcatagcttcaactacctccgctgctgtggcgcaaataagtagaggggcgggtaattatgttaaagctattgtaaggcttttcaactgcaatcttggcgacggcaccacggcctccatggcatatcttgacccagcccctggagcaacaacattactggggattaattttcgacaaattagtaattcaaggggctttaataacagagttcctgaaaacagcgatacttcagcaagaatatttgctaccactcaggaattggctgaaaacgcaacaacgactttaagcattcccatccaggaatggaaagcagggaggacagcacttaaggtttccgtattctataactccaacagggacggcagcgccaccaaattgttcacggaaggatattggttttatggtagcaccgctgcatactatgttgaatctgtagctggagtgaagagtagcgcacaaactggagctatatcaatagtaaccagctcgaataatattgcagttaacaagacagcaggcgctgggggagcaggagggcaattatctgtgatttttgagcacataagcgcaatgtcttaa

SEQ ID NO: 167595 - DNA, 540 bp, Enterobacter cloacae
atgaaacgactattagccgcctcattggcgctggcattagcaggatgcgctactcccgcacccaaagccccgcagccagacaaagccgcgatagaggcagcggagattgccagatacagcgatcagcaactttgccaggcatctgacgcgatacagccgagcctgaacgttaacccatccagccatcctgaatacaacgacaatcttagccgctcaaaagccctagaggcagctgcccgctcgcgtaatctgagctgctataagctgaaggctgccaatagtaaggcaatcaaaccgatgaccgctcgccagaagcaggcccgtgcaactgctgtgtgcgaaggctacgcccagcgtacccagttcgctaatccgtctgttgcgtactctatgtgcctcaaaggcgcgcaatccacgccagaaaaatgcacccgcgacaatacgcacttcagcagtgaagccactaagctcacgggcgcaagccgtgctgaatacactgaaatcggcaatgccttccgcattggatgcaatctgaactaa

SEQ ID NO: 167596 - DNA, 450 bp, Enterobacter cloacae
atgaaactacgccacacactcattatgtccgcggcgtttcttatggcctaccaggctaatgctggcaccccatcaaccatagatcccgcagcaaaagaaatagcgtcaatgatgtgccggtgggtgctggacgggggtaagttgaccgacccagcgcagcggctgacaatctacgagaacggaaaatatgagcgttggctggagcttcacccgtccgacaaagggggcatgccacctatcgtgtatgaacgccatcgagaaggcggtttcgtcgcagatgacaagtacaaagagtattactggaaaggctctaacttccgattgacgatgctgcgggacgccatcttgcgcaaaagcgaggtaacgttggcacttgaggatatttataatgcgtccatgcccatcagtgatgcaaagtgtgagaatgtaacgtatgcaaacagcaactaa

SEQ ID NO: 167597 - DNA, 543 bp, Enterobacter cloacae
atgcaaacagcaactaattccagcgtgaaatttcagccttgggtgggtgaccattatcactcaagccgctacggcgtccgcgttatggtgttgggtgagtcccactatggtgaaccggaagactacgcccctgactttacccagcacgttattaacgagcatgctttccagccagggcttcgttttttcacgatagccaccaatctgctacgaggcacaactgacgagccgaccgcagaggaacggcgtgaagcctggcagcatgtagccttctacaactacgttcaggagtttgtgggcgatgctggccgtatacgtcccacgcgtgctatgtggcgtgatgcagctgctgtgcttgaagaagtggtggccgagctgaggcccgatgtcattttggtgttgggctatcagatgtgggatcacttaccggaactgccggtaacatgggcttgcgtcaagcatccctgcggcggaatgtcttacgatgaggcgatccccgagttcaaccgagccatcgcagaagccctttccctggctggctaa

SEQ ID NO: 167598 - DNA, 408 bp, Enterobacter cloacae
atgagtattcagcgtcgtgaagtgtacctggtcctgaaaaagctgccagatgggcgggtgatctatgtggaaggtatcagatgtgcccataattacttttttgatgggcattccagagtaggcttatccgcaggtagttcagcgagctttgtagaattctcacctaatgagcgtccaatgcagcttttccacatgccgaatgagaacaatggcaaatggcaggcggctttccataactttggctgctcgcctgagttcggcgaacctgaaatggaatacatcatttttgtcggtgcctattctaacgaccgcgactgtactttcgatctgatgcgtgaagggttaaatcgtgcgtgggaaattgttgaaggcaatcgccaactgcgagatggcgagtttaacgactaa

SEQ ID NO: 167599 - DNA, 204 bp, Enterobacter cloacae
atggcactagccctacaccacgtctttgagatcctgcaattttcggcctcaaaaccgagcaccgcgcgtgaagtgcgcggtatagttacccacgcatacaaaagctcattgcggcagttcacgctgttctcgggcctggtatcgctggacgctctttctcacatcgaagacggcacctacaaagggcgtaccctactgcgatga

SEQ ID NO: 167600 - DNA, 195 bp, Enterobacter cloacae; identical to SEQ ID NO: 18391

SEQ ID NO: 167601 - DNA, 138 bp, Enterobacter cloacae
atgaccatcaagagtaaagaaatttcattttcgaaacacctccaaacgtgcctctacgattgctacagcttctttcacagttttttcatagtggtcatgcccttcaggaaattggtcaaaacgtttaccgtgttctaa

SEQ ID NO: 167602 - DNA, 900 bp, Enterobacter cloacae
atgaaaatcgtaaaaaggatattattagtattgttaagtttattttttacaattgtgtattcaaatgctcaaactgacaacttaactttgaaaattgagaatgttttaaaggcaaaaaatgccagaataggagtagcaatattcaacagcaatgagaaggatactttgaagattaataacgacttccatttcccgatgcaaagcgttatgaaatttccgattgctttagccgttttgtctgagatagataaagggaatctttcttttgaacaaaaaatagagattacccctcaagaccttttgcctaaaacgtggagtccgattaaagaggaattccctaatggaacaactttgacgattgaacaaatactaaattatacagtatcagagagcgacaatattggttgtgatattttgctaaaattaatcggaggaactgattctgttcaaaaattcttgaatgctaatcatttcactgatatttcaatcaaagcaaacgaagaacaaatgcacaaggattggaatacccaatatcaaaattgggcaaccccaacagcgatgaacaaactgttaatagatacttataataataagaaccaattactttctaaaaaaagttatgattttatttggaaaattatgagagaaacaacaacaggaagtaaccgattaaaaggacaattaccaaagaatacaattgttgctcataaaacagggacttccggaataaataatggaattgcagcagccactaatgatgttggggtaattactttaccgaatggacaattaatttttataagcgtatttgttgcagagtccaaagaaacttcggaaattaatgaaaagattatttcagacattgcaaaaataacgtggaattactatttgaataaataa

SEQ ID NO: 167603 - DNA, 426 bp, Enterobacter cloacae
atggaacagattaataacatagaacttgtagatccatctatctacccaacagatgaaatcttaaaaagaatacttggaaaatcgtttagtgtatatttaaaattactacgactctatgaaaattatagtttaataccagagtggaagtattataaagatggaaaagcttggttatgtaaagttataaagggaaagaaaacgattgtttggatgtctgcatggaagaactacataaaagctactatatatcttccagaaaaacatattaacggtgtattagtattagatattcatgagattacaaagaaagcatttatagagacaaataatattggaagatcaaggccttgcatgtttgaattaaaagaagaaaatatattagaagatttcataaaggtaatgcagttcaaaatgacattaaaatga

SEQ ID NO: 167604 - DNA, 534 bp, Enterobacter cloacae; identical to SEQ ID NO: 25686

SEQ ID NO: 167605 - DNA, 333 bp, Enterobacter cloacae
gtgaagaactggctctttctggctattgcaatatttggtgaggtcgtcgcaacttccgcactgaagtccagccatggattcaccaagttagttccttctgttgtagttgtggctggctacgggcttgcgttctatttcctctctctcgcaatcaagtccatcccggtcggcattgcttatgctgtttgggctggcctcggcatcgtacttgtggcagctatcgcttggatcttccatggccagaaactagacttgtgggcgttcgttggcatgggacttatcgttagtggcgtcgccgttctaaatctgctatccaaggtcagcgcacattga

SEQ ID NO: 167606 - DNA, 198 bp, Enterobacter cloacae
atggatttcagaaccagagaacatgtcattgtactggaaggcgcattacaactgcggctgggggatgagtggcacaccgtttctgccggggaatccctgcgcttccatgcggatatcccgcacgcttacgccaatcccggtaaggccattgtgacactgcataatctgatccattatccgcgcccggcggacaaataa

SEQ ID NO: 167607 - DNA, 228 bp, Enterobacter cloacae
gtggtttatacttcctataccctttatacttcctataccccggttatccggtggttttctgtttgcggaataaaacagattagtgacagttttctcagaatggcgtgttccggtgacttctgttttcgtgtgctgcatccggaagtgtcaggcccgccggatatgaaaaaggcctccggagagtaccgtgactttattttcggcacaaatacaggggtcgatggataa

SEQ ID NO: 167608 - DNA, 1563 bp, Enterobacter cloacae
atggccatgtttaatatgaaattaataatggcagatgatggaatatttgatttagttgatgaacatctaaaaaataatgatgtcttaaagtttgatgtcgcttctggtcttccatggtttgttttattattaaacctgaagagatacaatgctcaacttttcaataattatcataacttaactaaatcacttagcgaattggaatctcataaaaggctgtgttctagccctgaaattatagactttaaaaaagccatgtccaatacagctcaagaaaataaagaagctgtacagaaaggaatttcaaacattctaaagtccagaagttatactgatgtaaattatgaactcactatgttacaaccgattgttttaaatcttttaaaaaactctattaaaactaaagattttgaagggattttaattgctcatgctctttcttcagggcctttaggctttgagataaatgctgaagaagcaaccatggattttacaccgttgaaaattgaagtagacattccttctccgacaatatttgacgattatatgcaacacctttcaaaaattatagagagatcacaggaatcggtattcctgtggaccggttgttgtgatgaattttgttatagcgtctcactttcaaagggggtgttttcgttatatacaaatgaaagctttggcaaaaaagatcttaggaattgggttgccacccaaactgaagcattagcctttaatgatcaacctaaacttcaatctatattagattctgacaatgattactggattcgagactctaaagaaattataaacaatctacccgtactaacggacatttctgacggtagaaatataattttatttcgcgatgtgagtatcgcgtcaatgccttctaatttaattaaaacaaaatcaggcaagttgctggccgacatagctcctttacatcaaccgtctactgttgaagtatatcttaaaagtgagccgtttagcatcgacatggatatggttaaactttgggctccagtcgaagaaggtgattttgcaattaatattgcttttgacaaaattgactccttatttgatgaatcgactttgttgaagataacaaccctaaaccctagggtagaacttaataaagatattaatatttttatttcacacgggggaaaagacgagctttatgggtttaaaagtatatctcctgctgatgacaaatattttcttaatgagaaagatatttttggaacgggcaagatcgctatattattcatatgtcattcgggcagtttaaagtcttcattgtacgcaacgaagttagatggattggtcaacaaaatcttagactttggttatgaatcagttttagcaccagcctggagttacaatgttatccttacaggcgtctggaccagaaacttcattaactctattaatcaaggtaaaagtctctctgaatcaacattttttgctaaccaatccgtgaagtctgtttatccaaatgttggagcttatgcagcaatgcatctttttggaagtgatggattagattccttgggaaagtaa

SEQ ID NO: 167609 - DNA, 801 bp, Enterobacter cloacae
atgttaaaagttattagtagtttattggtctacatgaccgcgtctgtcatggctgtagctagtccgttagcccattccggggagccgagtggtgagtatccgacagtcaacgaaattccggtcggagaggtccggctttaccagattgctgatggtgtttggtcgcatatcgcaacgcagtcgtttgatggcgcggtctacccatccaatggtctcattgtccgtgatggtgatgagttgcttttgattgatacagcgtggggtgcgaaaaacacagcggcccttctcgcggagattgagaagcaaattggacttcccgtaacgcgtgcagtctccacgcactttcatgacgaccgcgtcggcggcgttgatgtccttcggaaggctggagtggcaacgtacgcatcaccgtcgacacgccggctagccgaggcagaggggaacgagattcccacgcactctctagaaggactctcatcgagcggggacgcagtgcgcttcggtccagtagagctcttctatcccggtgctgcgcattcgaccgacaatctggttgtatacgtcccgtcagcgaacgtgctatacggtggttgtgccgttcttgcgttgtcacgcacgtctgcggggaacgtggccgatgccgatctggctgaatggcccacctccgttgagcggattcaaaaacactacccggaagcagaggtcgtcattcccgggcacggtctaccgggcggtctagacttgctccagcacacagcgaacgttgtcacagcacacaaaaatcgctcagtcgccgagtag

SEQ ID NO: 167610 - DNA, 477 bp, Enterobacter cloacae
atgaagattttcatcggtgaagaccttaagcttacgaataacgaaggagccaatataacaattggttccaaaacttctaagatcttcgaaaatgataatgcctcagaaaacttagttattcctactggtgacttcgttgaaggacaatacagcattgttattttcgagaatggaaaattcgttagttccgaattgctcaacgttgtttcaccttttgctgcaagaaccaaaaaacaacagttgattgatattatcaattctttggatgaagttatcgaataccgaatgactggtaacgatgatgcaattcaaagtatgtcaatcaatggaaaaacttttacctacgaaactcttgattctcttttgagtgctcgtaagaaattcctatcacaactgaatgcaattgttcaggcggaaaaagaaaagaaaggaattagcccaattaaaaccatcaaatattcttttaggggtgcttaa

SEQ ID NO: 167611 - DNA, 1416 bp, Enterobacter cloacae
atgctgcttgatgaagttgacgcagttgacacagatacggatgaagggaaccccattgtcattgcatctcagcgtgcaacaacgtttggtgaagacgctcgtatctttatctcaagtacaccaacctcaaagaatggtgctgttcataccgagtatgaagcctcagataaacgtaagtaccatgtgccatgccctaaatgcggtcactaccatgaaatcgtctgggagaacgtcaagttcgattggataaagatcgaagggaaatctttaccagaccctgattcagctcgtttggaatgtcctaagtgtggacaccatattaatgacgctgaacgtacacgagctgttaaagctggaaaatgggtaataacaaaccctgaacaaactgctgtagctggtttccatattagccgcttgtacagcccaatgagctctatccgttcttgtgtagaagatttcaaacaggcttatcagacattcagtatgtcgacattctataacactgttcttggtctgccatatgacgacctgaaccaagatgtagaagtttataagcttgagaaactaaaaactgatatcagcacaacagctattcctgatgacgttctgtttttaactgctggtgtcgaccaacagaaagaccgcttagagttcacaatattaggccataacgaaaagacttgttatatcctgcgtcacgaatcgattatgtctattaacgctgaagttattgagagtcctgcatataaagaactcgctgcgatattaaaagcaccgttcaaaacagtcagtggatataaagtccctatggcgtgggctaatatcgactccggtaacggtatggcaacaaaaacaatctatcggttctgttctactgattcaagttttaaagcaatcaaaggttcaaaccaagttgaagccccatacgttccaactaaaccatcgaaatctggtggttatacattgtattcaatcggtgttaaccaaggtaaaaaccttattcgtgaaatgattgttcgtaatacaaccccaggaatgcaaacacctgttcatctggaaatctcagattcaatggtcccagatgattattgtgaacaacttttatctgaagaagttaaacgttcaggtaatacagctcgttgggttattaaaccaggcggtacacgcaacgaaggtctcgactgtttcaactatggctattgtgcccgacttcaagtaactgaacagatcaaatggcatgaatggcgtatcaatcaggctaaacagatcgccaagttaaacgagggcatcgtagagggcacagaagcacctgaagtatataaacctattactgaagaaacaaagtcactagagcgtcctaaaagaacccagataattcaacgtagacgtccttctaaaagtaaagggtggttataa

SEQ ID NO: 167612 - DNA, 585 bp, Enterobacter cloacae
  misc_feature (556)..(565): n is a, c, g, or t
atgtctagtacaacacaaccagatatttttcttggtagttacgttcaagttagtttgaacagagatattacatctgaagacccaggatattttgaccctggctatatctacactgaaaacttggctggatttccacaagtagcaattgataaagaagttaaaggttttgaggcctataacgaagattttgaacgtaaactttccggtgatgttgcaattaaagacacgacattatcagtaatgtctgttcctaatgacccatttgttgaagaactcgacctagcattattagaaaaacgtccgcttcgtttccgtaacttatatgttattgattcagagaatggcgaaagagcccagtctggtgtttaccacatctttgatgcttatgttactaagaaagaaacaactggcaatgctaactctgtagttgttgataattttacgttgagtcctactggaaaattaacccaaggtttcgctgaagttggtgaaattctccgtgaaggtatgtatggcgtaggcgctggaaccgaacgaattcctggtgtttatgatnnnnnnnnnngctctacgtattcgttctaa

SEQ ID NO: 167613 - DNA, 300 bp, Enterobacter cloacae
atgttttttccatattccgaaaaacaaaaacaaagttttttaaatcgttttgggcagaaagttctcattaacgataaagaacatttagcgattatcgaaaagaaaatcgtagaagacgaacgagctgtaactgaatcaatgtacatcacagcagatgaaaacaatattaaagaagatgacactgtaatgattaaatcaaaggtctatacggtttcttatattgttgatgatggttctggtttagttgacgcttacttatcattaatttccgatactaacagaggttctaagtatgtctaa

SEQ ID NO: 167614 - DNA, 627 bp, Enterobacter cloacae
atgaccactgataacgttaatatgtctccattcaccttcgcgggtggtgtagctatctctcgtaagtctgtgaacactctgcctaacattggcgattatattgctgaccatatcgttaaagcttcacgtatcaaactggaacaagcggtattcagtgcaactgctactactaacttccgtgatggtatcgctaaacagctgattgatgctggtctggttaaatccggtgctttctcttataaagcattcctggctgttatcgctgaactgactgatgctggtgtttctgaagaagagatcaagttcatcatgcgtggtgctgttgctgctgacctgaaatctactctgcgtgacgctaacgttcatgattacatcatgaccgacgacaacaaactcggtggttgcgacgtatacagttctggtgttctgccatctgatctgattatggctggtgatttctctggtgttaccatcgctgaatgggctggtctggaacttgatctggacaccactactctgcgtgcttctggtcagattatccctactgtctggtgcgatatggacattgcggtaactgatccatctcgtctgtttgttatgcaggctaaagctcctgcttctaagtaa

SEQ ID NO: 167615 - DNA, 861 bp, Enterobacter cloacae
atgaaaaacgtaacaggcgtgtataccgcacctcgtccgcactgggtcggtgatggttttccggttcgttcgatgttttcttaccagacgcacggcgaaccgctgagcccgttcctgctgcttgactacgccggaccacataccttcccggcggatggcgcaaaacgcggcgtgggcgagcatcctcatcgcggttttgaaacggtgaccatcgtctactcaggcgaagttgagcaccgtgattccaccggcagaggcggcgttattggtccaggcgatgtgcagtggatgacggcaggcgcaggcattttgcacgaggagttccactccagcgcgttctcgcagaaaggcggtgaactgaaaatgatgcagctgtgggtcaacctgcccgctaaagacaaaatggcgacgcctggctaccagagcatcactcaggcggatatcccggtggtcaccctgccggataacagcggaacaatgcgcgtgattgctggccgctttggagaggtaaccggcccggcgcataccttctcaccgcttaacgtatgggatctcgcgctgcaccagggcagccacctgacgctcaatcagcccgaaggctggagcacggcgctggttgttgttgagggcagcgtgacagtgaacggcaccacgcctgcgggtgaggcgcagctggtcgtgctgagtcagagcggcgacaagctgcatctcgaagccagcagcgatgccaaagtgttgctgatggccggggagccactgaatgaacccatcgtgggctatggcccgtttgtgatgaacagtaaaaccgaaatcgccgaagctattcgcgatttcaactccggccgctttggccaaatctaa

SEQ ID NO: 167616 - DNA, 615 bp, Enterobacter cloacae
atgagcaacatcgacaaacaggcgctgcgtgaagcggcagagaaggctacaaaaggtcagtggcaatttcatgatcgccagtcactaagccattccggaagtggattcgtggcaattgctggtaaagaagcgattttatgcttcaacgcgcctgtgggcgggataaatcagagcaataatgtagttaaatatatcgccgcagccaaccccgccaccgtgctggcgctgctggatgagctggaagccaaagacaagagcatcagctttttgaaagaccagctcgcgaagctggcaaacttcaatcctgattgggacaagctggaagcagcaacttacagcctccgtgagcacatggaagaactcacagcggcacgcaaacggattgctgagctggaggcacgggaagtgaaattgcctaaccctcatgctcacctcatctggattcaggcaggccatgcccctgatgactattgggatgatgttgccgtttctcatagcgaaaaggataagtgctgcgacggttcagatcgctatccggtttatactctctgggaaatcaaagaggcactatctgctattggcatcaatatcgccgcagccggtaaaggagagtga

SEQ ID NO: 167617 - DNA, 432 bp, Enterobacter cloacae
atgcttcaacatcaaatgcagccaacttttaatacctgcatggctacctgtgtagcaatggttgctggccagcctgttgacgaggtggttgctcgctggcatcaggcattccacgacaaaacagactggctagacgatgcgctggattattacagaattccttatttctacggcagccaaagaaaatgtgaactgctttatgggtttatttatttcctgaccgtgccatctctgaatattcagggcggattacaccagattttaatgtcattgactgcagatcgtggcattgaagtatttgatccagtgatggggcgacccggtgctaagtattacgtttacggtgaagcgcaaaacgatgaccaatttggggtgttttcctggtgtgtagatttatcggttccagttgtacagcagaaaggtgaggactaa

SEQ ID NO: 167618 - DNA, 633 bp, Enterobacter cloacae
atgagcactatttccaaagagcagttaatcgaaaaacttcagcacaggattgcggttgcagccaaatatcctgatcttgaggaagcgcagctcgacgcggctatcttcaaaatcgcgctggcatcgctcgaagcggaggaaccagagcgaaatcccgtgctggcctatgcagacagttaccgcgatatggctaagcagggcgttgaatccattccggtatggagcgtaattacagacctggaaagaaatatcgccccgctattcaccgccccgccagcgccggtatctgtgcccgctgcgatggaaattgatgatgactttgacagctcgtttgagcatggaaaagcagtcggctggaacgcctatcgcgcagccatgcttcagtcgttcggtaattccgaacaactcaactctccggtgattcctgatggttgggtggcttgcagtgagcagatgcctgaagagaatgcagaacaagaggttctcgcatgcttcaagggtggtgacatatcaactctgtattatttcgaaggccgatgggatgacgcatatggaatcgtgccgattcgacaggacgttactcactggatgccactgccagcagcacctcagcaggaggctaaaaatgtctag

SEQ ID NO: 167619 - DNA, 1224 bp, Enterobacter cloacae
atggcgcaggtattagcaagggacaacctgatccgcgctttaaaccaagtgaaacgtaacaaaggagccgcaggcgttgatggtatgacggtagagagattatcggattatctcaaacagcattggccagcgctaaaagagcagttagagacgggtaactaccaacctgaagcagtaaaacgggtcgagatacccaaagcggatggtcgtaaacgcaagcttggtatcccaacggtgctggatcgctttattcaacaagctatagcacaggtactaagtcaacattgggaaagccagtttcataacaacagctatggattcaggccgatgcgcagtgcacatcaggcagttagctatgccaaagctttactgctatcaggcaaaggctgggtagtggatctggatttagacgcgttctttgaccgtgttaaccatgacaggttgatgagtaagttgcgggcgcaaattcaagatccaacattgctaaaactgatccagcgttatctgaaagcgaacattgaccacaatggtaaacaggaagcgtgtcgggaaggtgtaccgcaaggtgggccactgtcgccactgcttgccaacattgtgctcaatgaactggactgggagctggaacgccgtggccattcattcgcccgttacgccgatgattgccagatctacactagcagcaagcgagcaggtgaacgaataaaacagagcatagaacgctatatcgaaacccgcctgaggctcaaggtaaataaagcgaaaagtgctgtagctcggccttgggagcgaagcttccttggcttcacgttcagccgcagaaaaggcaacagactgaaagtgaccgataaggcactggacaggctgaaagacaaactgcgcgagctgacgcgtcgcacgagaggccataatattggcagtgttatcgcagatataagaaaagccctgcttggttggaaagcgtacttcggcatagcagaagtacagagtcagctgcgagacaccgacaaatggttgcggcgaaagttacggtgttatatctggaagcaatggggcagtaagggctaccgaatgttgaggaaagcaggagttgacaggttcttagcctggaacacggcgaaatcagcacacggcccttggcgtctaagcaaaagcccggcgctttacattgccttacctaacagatattttacaaacatggggctgcccaccatagcagcatga

SEQ ID NO: 167620 - DNA, 357 bp, Enterobacter cloacae
atgaaaaaggttttggctttagctcttggggtaatgatgttagctgggtgtagctcacgtgtagctgatctgactgtggctagcactaaaaactacaatcttaactcaaacaatttcgtcaaaggcgctcgcgtaaccgcagaagactctgctccagtcgtgattttccctctgggaatcccgaatgtaaaaacggctatcgaccgtgcaattgagaagaacaaatgctctgttgctctttctgatgtagttgttactcagttcaaccactccttcctgtttggtaaattcggatttgttatcgaaggcactgaagtgatcgaccgcggtcaacctggttgtgagaacgccagctaa

SEQ ID NO: 167621 - DNA, 567 bp, Enterobacter cloacae
  misc_feature (407)..(416): n is a, c, g, or t
atggctaaatatatttcattaacagagatcgctaatcgatacggatatagttacaacgcagttaaaaaatgggttcatgaaggactcccgcatgacgagacaaaaaataagtctccagaacttgaagctactcagtgggttctgaaaaataaaattaatccattacgtgaaatcagtacacgcgaggcgctagatattgccaagttacgcgaacaagaagcgaaagccgatctagctgcaatggcagttaaagaacgttcaggcgaactgatccctgtcgattacgtccaatcggaacttaatcgattcctggctgatctaaaagattcaatcagattgattccaactaaatatgcaatagatattctcgaacatgcggattcaaaagagaacttaaaagaataccnnnnnnnnnngggcttcggccctttggagaacttaaaagaataccttcgttatctcattgacggcacattagaacaactcgaaccaatattcgaagagccactaattgaagactctccagaggatatagaatctaatgatactgttgaagttggtgattaa

SEQ ID NO: 167622 - DNA, 198 bp, Enterobacter cloacae
atgagttttattagtattcctgaaaagatggaagaccaacaattaatcgagttgattgaacagttgggtcttccattaaagtatgaacagcaaacatacttctataaagacgaagtctatgttgttcagtttgaatcattaaaagccgagataaagttctggcatgttattaatcaccaacttcaacagtatcattag

SEQ ID NO: 167623 - DNA, 207 bp, Enterobacter cloacae
atgaaagttgaattcaccgaacgtgaaaaacaatggcttggttctgctgaagaagaacagttctttgaagaaatgatggaacttgctgatacaattggatatgcgaagaagattgtacgtcaaggagaaaaacacaaacctgagtattgggaatctatgtctacgttgtgtaaacgtaaagcacagttgttgaggaccaacagatga

SEQ ID NO: 167624 - DNA, 174 bp, Enterobacter cloacae
atgaaattaatctatgacgctttgttttacgtcgttctaacaatgatattcggtatctttatcggatttggtgccgctcttatagttacgcttgtttggctcggtcttttatcgttcggtcaattagtatatgacgcttataaagaacttaataataaagagggaacagtatga

SEQ ID NO: 167625 - DNA, 870 bp, Enterobacter cloacae
atgcgcatcagattatcattctggactaaatcaaaaaacgccaaactcgaagtaaatgatacaagtttttatttccgtgatggtactccatcaaaaatggaaaactcttacgcagcactgattaacagctttgaacgttccgaacgtacttcaaaatctttcgctgcaaaattcgaaaaccaaggtaaaggtctgtacttatttgctggtatcaaaaccaaacaaaccaaaaactatgtattgttcatcaatgaagattcaggcaatgccgttatccaagttcgtactaaaaacggcatcgaaagattcaatattaatctttcagttggaggttctgcggataataaagttcttcatggtattatctacacagacgaagctgaaccagttgaaattgaacttgaagctgtagctccggttgtttctactctgaaagaacgtgaccaagatattcttgcgttaatgaacaaactcgcagaagcaaaagccttaatcgaacaacaatcaaaacaaattgatgaactgttaatcgttaatgaatcactgaagaaagataacaaacgtcttcgtaaagaaaaatcagaccgtatctctattgcagaaacttttggtgaagaacgtgctgaatcagtagaaaaaattgaaaatgaactggacttaatggttggaattactgaagaagataaactagctaaaactgaacaagagattaaaactcgcgtatcaatcaatactgaaactgttgaaaaagaaattcctaaaatcgctcgatcaaaactgactgaactgtacattaacaatactgataaacacaatgcggcatgggaacttattgatgctggtaaacttgaaataaacgaggaagaataa

SEQ ID NO: 167626 - DNA, 210 bp, Enterobacter cloacae
gtgtttgaaaaattattcgccaacagttggttcaattacaccaacagcaaccggaccaccatcaacagacagagtcattgccaaagatgcaacttcagtttcaccgccaccgaacgtagcgttagtgataaagccgttatagactttgcctacgccaacagttttggtgtcgtcaacccaatatacaactttgaactgaccgcgttttga

SEQ ID NO: 167627 - DNA, 231 bp, Enterobacter cloacae
atgaaacttaaatcaatcaacaaacgtggtgattcctatcacttccagtttgaaaactctgtttggtctttaatgattagttctgacgatattcaatcaatgattcatgaacacgtaatgaaactggaaaaacaaattcatgaagctcagattatcgaagcttcaaagaatgcatctgaaacaaaaggttggaaattacttgcaattggtgaactgaatgccaacgtatag

SEQ ID NO: 167628 - DNA, 222 bp, Enterobacter cloacae
atgaaagtaataagtttcaattgttcagagtaccaagacgctctgaacgttattaaggtctgtgtttattctggttttaacgtctttactgggattatcgaaatagaagataccgatcttgatgttgctgcaatcacgttcgctgaacaagttgcggaacagaacggtcttgaatggtatgattttgaaatccaagaactgaataagaattcatttttctga

SEQ ID NO: 167629 - DNA, 411 bp, Enterobacter cloacae
atggtatcaactgcatctccagcaccatcctgcatggctattgagcaggaaattcaggccaaaggcttaaccgcaccgcgcgttacgccagatcacatccaaagcgtcatcagccacgagttgtattttaccgctcagcaaggcgtttttggggaagctgcaacccacgtgaccgacctgaaagatacacctgcattcccggtacataaaagtcttgggctgctgacattctgcgtcctggtactgcgcaacggctttaccgtcaccggagaaagcgcctgcgccagcccggaaaacttcgacgcggagatcggacgcaagatcgcccgcgaaaacgcggtgaataaaatctggatgctggaaggctacctgctgaagcagaaactgagcgacgaattcgacggcttttaa

SEQ ID NO: 167630 - DNA, 1803 bp, Enterobacter cloacae
atgagttactttggtctcaacgcggttaaccagaatcagcaactggatgaggcagcctcgaatcctgcaggatttaatgatgatgtcgggttcttcgataactcaggtactgctgccgtttccggcctgtactccgggttggttgccaaacctgaccagcttctttgggctggaatggacaagatcgtctcaccgatcgcgaagtttgttaacgaaaatacctccgtcaatgacacgtctgctgagtatatcgccgaacaacgaaagctcgcagagcaacaggtgaagcgcctgacgcctgacgcagctacgacaggtactgctggtcaggttctgcatggcctgttcgacatgggcggtcaggctgttgttggtacgctgctggctggtcctgccggcggcgctgctgccgtcactgcgttgcaggggttctcagagtttgaacgcctcaccgcccagggtgttgatttccggactgcgcaagagtctgggcttgtgcaaggaatcactgcgggtgcgggaacgctgatccccatgagcctgggattgcgcgcaggtggtgctcttgcagaaagtgttggcgcgcagctggcaagatcaggtgaaagcgcggtgcgaaatgtggcagccaccgccgtgcgagcagctccagatattgcttatgcggcaggtacaaatattgccttcggcatggcccagcgtggcctgaccgccaagacattacgcgacggcggatatgatgaaatggcgaatcaatatgatgtatttgatcgccagtctatcgctatcgatgccgttctcggtgttgcatttggtggcgtcgggcgattcctgaatgcccgtggtgagaacgctacaacaccaacattttcaccggcagaggtagatgccgcgctggcagcaaacgcttcacatcatgctgagattgatgttgcccccggcgtccccgtgaatgttctgtctcgtgatgcccatgtgcaggcattgcagaaagcaatgaacgaagtcagccaggggcgcgccgttgatgtggccagcattgtcgaaccagcctcattcagtgacatccctgggcgaagaaatataatctctcaggcgattgatgaatcattgtacagatcagaagagggaagcactcaggtagagcttgataccagagcacttcagcagcaggcggataaggctcttaatccagaacaattaagtaaattgcagtccgacatatcctcaatggagagaggtattgaaacactcaatcaggagcgagctgcaattgtagatgagcagccatctggtagcgggaaagagttatcacgttcacgtgctgatcgtcaggaaagattgagaaacgttgaccggcgcattgctgatgctggagtcagattgcagtcagccagagatgacctggcagcaagttcggaaggtggtgttaactttgaggctcgggcggaacttgcccgacgccagcaggcagaaagcgatcttaacgctcaagctatgtccttttacaaaacagccgaagttcgcacttctgatgaaaccgcaccatttgagcctgcggcggttcttcgccaggcagataacaaaccatcccctgagcaagcggtagacccggatgtcaggatggctgaagactctctggcagaatcacctgacatgatggttaccgttcttgatgatgatggcaatccgcaaaccagaagcgccagggaagtactggacgaggcgagcagggaaaatgaacaggcaatacaggattccagcctctttgacgtggctgtctcgtgtttcttgagagggtaa

SEQ ID NO: 167631 - DNA, 855 bp, Enterobacter cloacae
atggcaaagaaagtttctaaatggtttcgcatcggcgtcgagggtgacacctgcgatggccgcgtcatcagcgctgatgacattcaggaaatggccgacacgttcgacccgcgcgtctacggttgccgcattaacctcgaacatatcaaaagcctcatccctgacagcccctttaagcgctatggcgatgtgaccgcgcttaaagcggagattatcagcgatgactctgcgctcaatggcaaaaaggcgctgtttgccaaaattgccccgctcgatgagctggtcagcatggtacgtgccgggcagaaggtttacacctcaatggagatccgcccgaatttctctaacagcggcaaatgctatctcatcgggctcgccgtcaccgatgacccggcaagcctcggcaccgaatacctcgaattctgtagccgcgccacgcagaacccgctcgccggtaaaaaagaccagccgggcgatctcttctctgtggcctcactggctgagctggaatttgaagacgttcccgacaccatgctcaacagcctgaccgacaaggtaaaagccattttcagccgtaaacaggtcagcgacgacgctcgtcttgcagatgtgcatgaggctgtgacgaccgttaccgagctggtgcaaaccaacctcaccgccaccgaccagcgcgtcaccgagcttgagaccgaactggcgcagctcaagcaggatgtgaccagcaaggccgaagaaagcgcgcaggcgtttaacgacctgaaaaactccctcgataacaccgaaagccagcgccagccacgccgcgagctttcaaaaggtggtacgggcgacgagctgctgaccaactgctga

SEQ ID NO: 167632 - DNA, 165 bp, Enterobacter cloacae
atggcggtgtatgactgtgtggctattgaggatgaccagcatacccatttccgtctggcaatacgcgatgctgaaggtcagcttatctggcgggcctggaactttgagtccggagccgggcaggggcttaaccactatctgcaacgttatggtgtgaaaaaatga

SEQ ID NO: 167633 - DNA, 1605 bp, Enterobacter cloacae
atgaatcttataatcgcggattatgatggttctcagagtgaacagcttctatcgaaaaaaaaagcaaaacagttacaaaatcttataatgaacttcgtatacgaagcacaaaataactttttcagtcatagcttagaaatgagcagaccatgttgggacttggctgatcttattaaagaaaacaaaaatgaaatacgtaaatatcgcttacttattttttcaaattcagtaataagaacaaacataaaaaaaattgaatctgatactattaatggaattcctactgagtgtgaaatttgggacattgaacgtttattcaatatgtgtgcgtctgattcaggcaggcatgtagttgagattaactttaaagagtatacgccaaatggaattccctgcctaaatgcaagtgagacatcgacaaaagatttcaaaagttatctttgtattatacctggagaagttttagctgatgtatatgaccagtatggtagcctgcttttggagggaaacgttcgctcatttttatctactaaagtcgcagttaataaaaaaatacgttccacaataatcgaaactccagaaagattttttgcatataacaatggaatttcagctactgcaatgaatgtcttaattgagaaaactcaagaagggcaacggctagtacttgcgaatgattttcaaataatcaatggagggcaaaccactgcatctctctcaaatacacgacataaagacaaacatgatttaagcgaagtgtttgttcaaatgaaactcacggtaattgaacaaatttcggaggacaaagccacacaacttattcaggatatttctcgctcatccaatagtcaaaataaggtaagcgatgcagacttcttttcaacacatccatttcatatttggatggagcgatgctcacaacgcctttatgcaagagcaaatgaaaatgcccaatttgatacaaagtggttttatgaaagggcaagagggcagtatcttcaaaaacaaatgcgtttaactcggacggagaaaaaaacattcctcctacagaaccccaaaaaccaattaattactaaaaccgatcttgctaaggtgcgcaatacctgggcaggctttccatatatagtcagtcgtggtgcacaaacaaattttacgaaattcgctgataaaatgactaaggaatggagtaaccaaaaggaggttgcaaagttagataataaatatttccaggaaacagtcgctttaattctaatgtttaaatatatggagaaaatgataccacatcaaggatggtactcacaaggataccgcgctaatattattacatacacaattgctttcctgcacaaattaatacaaaaaaaattcaagactcatgagcttgatttaattgctatctgggcaagacaatccatacctcatcctattgagaaagctttaatcgagttatctgaaatcgtttactacaagctcactgatgcatcacgcggtgtagaaaacgttactcaatggtgtaagcgggaagaatgctggaggagtgttttgagcattccttatgacctttctgacgaaatggaaagttgcttaacagaactgaatgactaa

SEQ ID NO: 167634 - DNA, 804 bp, Enterobacter cloacae
atgagcactatcctgaaatgggcgggaaacaaaaccgccattatgtccgaactgaaaaaacaccttcccgctggcccgcgattggttgaacctttcgcgggttcctgcgctgtgatgatggcaacagactatcctcattatcttgtcgcagatgttaatacagacctgataaatctttatcagcaaatcgcacttaacgcggaagatttcattaaatgcgttaaagttttatttgatgaagataataaccctgaaagttattaccacaaccgcatgctctttaacgatggctcaaggctatttttaagggaccgtgccgccctgtttttgtatcttaatcgtcattgctaccgtggtctgtgtcgttataacaagcgcggcctattcaatgtgccgtttggtaattataaaaaggtatatttcccagagagagaaatacgtgcatttgctgaaaaggctaagcgtgccatttttatttgtgccagctataacgaaacgctggatttgttggtgccaggcgacgttgtttattgcgatccgccttatgacgaaacatttaatgactatcacacggagggtttcaccgaatgtgaccagtatcgtctggcctcaattcttgagcgccggtcatcagaaggttatcaggtggtggtttcgaacagcagcacgttgctgactcgttctctttatcgtgattttaagcaccacaaaatcacagctccgcgaaacatgggagttaaaggaggtgcaggaaagtctgcgcctgaaattatcgctgtatcgaaaccgtccagaaatgactga

SEQ ID NO: 167635 - DNA, 984 bp, Enterobacter cloacae
atgggttctttcgctagtatcacgctgaatggcttaactatccaagaatggaaaaattcttggcatcgttggtattttagagagagcgagcgtgtacgtaacgtcgacgaaaacaccggagaatttatcttcctggggtacaaaaccactgctggcacaattcgcaaacgactagaattagatggattttcatataagcatcttgagaatgaattcaatgaaatacgctcaaaatggattgacatgttggaaagttataatgatgaaggtctccaccaacatgaattaacgattttaagagaacatcccaacatgcaatcatgggtagatcttcttttaaccgcacaagaaaatgaattttccaaaaataaaaaccttggaaataatttattagaattcatgctctctgaagatttcgatgaatacccaatctattctgctgcaaacttccacttcccgtgtaaaacaattgaaagctgggcgatagcaatattaagcatttcgcctgatgatgcagatattgaattagacataacagaattagccaatgctgggtggactgatgactttcatgacctagcagaaattcaagcagaaaaaacatactttttcgataatttcatacattttatcgatgaactaataatcctgccaataaacttaccagaatttcatttaatgaaccgcctcgcattttccggagtaatttcagcattcgaggcatacctttctgatacaatgaaaaagcaggtgatgactcgtccagccgtaaagcgtcgatttgttgagtcacatgataagttctcagcaaaaaaattcacactaaatgatattttcacaaaattagatgagctagacaaattaataatggatgaattggatttcatatccttccataatatgaacactattcctgaattattcaacaaagttctttttgttgagttcccaaaaaaagaatctctaaattatgtgaggcagtaa

SEQ ID NO: 167636 - DNA, 423 bp, Enterobacter cloacae
atgtacggaatccgcgaagaactttgtgtacagcttgaaaacatgttcacggctgacgaacccctggtcctgctggtctggacggaggaggggattagcgtagcctgccgtgaagcccagccagaaccggacggggctgaaatccgggaggtgatgaaggccctcggcgaaatgaaaatgacgcaataccgccaggaaggggtaaatcatcagactatcaacgatctcctgacccgtcagcgggaggcggaaaaccatcaggtgagtgttccggcggtacttctgtcccgcgtcctgcgtaactatgaatgcgagctggaaaaccggatcggtatggcctgggaatccgggcggcaggagccggaatccgtcagaaatgagctgaataacgttcgcgccctacaggaggcactggccgcctga

SEQ ID NO: 167637 - DNA, 357 bp, Enterobacter cloacae
atgagtaacatccgtgacgcgcgcttccgtctcagtagcgatcacctcccggagctgttcgaatttcgcagaattagccccctgctgcgcagtctggcgcacaacaacatcagcaatagccagggcgttgccaatgattgcttctgctgtctgcttattcgaacctactgctgcagccagaccatctgcgttctccttaatcgcatcagaaagttcggccagtttctcgctactgtctacagcactctcaatcagatccttgaatacctcagaatctttaatctcctccaggatcacatctgtgatgtcggaaacatctatgctggcctgtcctcgcacccattctgtgtaacctga

SEQ ID NO: 167638 - DNA, 588 bp, Enterobacter cloacae
gtggctgaagagtttaagttctgcgttgtaggccatcacgcccgtcggcaacaggcggaagcgctggctttaagcatcagtgcccatcttctaattgatgaaggcgacggtggggccaatgctaaccatcgccgtgcacttgaatgggctacctgccaaccatgccgggtagtggtgtgtgaggacgacgcggttcctgtgcagggtttcaccgataaggtgactgactggctggtgcgcttccctgactacatgctgagcttttatctcggtaccggccgcccacctcagtatcaaatgcagatagccgaacggctgattgttgctgataagacacggtctgactacatcacgctgtcgcgactgatacacggtgtctgctacagcgtcccacagcaacacattgaacgtgtgctggctcggtgggacagcagcaagcctgccgattatgccgtgggtgatgcctatggcggcgctgtggtttatccgtgttactcgctggtggatcacgctgacctcccgacggttgagcgtcaccctgacaacgagccgaggacggaacgccgccgcgcatggagactggcatga

SEQ ID NO: 167639 - DNA, 216 bp, Enterobacter cloacae
atgtctaatcatgaaattaaggttaaacccaaagcaaatacaaagagcttcgaggaagttaatgaggaattggccagattgaagtttgttgtcggagttctacttgctaaatttccaccactccaacgcaatgaattcatcaaagatttggaacggttcggtctgaaagaagaagcggctctttattcgcacttcaaccctcaacctgaacaataa

SEQ ID NO: 167640 - DNA, 303 bp, Enterobacter cloacae
atgatttcgtatatggttgagtttccgactcaaaagtctgtaggtttcaaaattgatggttactcttcagcagaagggctgggctgtaaaatagttgagacaattggcggtgatgtcaaagttcaactcgataagaaaacaatgctgactgtgccttatcgtgaagacattacggcagacttcactcttgaaggttacaagcagcgcgcaacgcttcatgccgaagctgtggtatcgaagcttgtagaagcggcccaagagcagaccgctaaagtttttgaaggtgaaattaatgtaacttaa

SEQ ID NO: 167641 - DNA, 192 bp, Enterobacter cloacae
atggctattagcaccaaatgccccaaatgcgaatcgaccggttttgaattggatgtaaaaaccaaagtatctggtagtacccatcaattttatttcgtgcgttgctcaagatgtggtagcgctatatcggccatgaactacagagagcatttgttaatcgaagaaatggcaaaaaaaatgggggttaggtag

SEQ ID NO: 167642 - DNA, 234 bp, Enterobacter cloacae
atgagctttctgaaaacaattcagttattcgtggccaataaccctggactgacgaacaaagagattgctgcagcactggagaagctttacggtgatgttccgcgcatagaactgttcagccgttgcggtgcgcctggatgggaccactggggaaatcagtcagtatcaccggccgttgagcttatcccggcagtagccgttcccatggaaaaacaacaggagcgcgccgcatga

SEQ ID NO: 167643 - DNA, 2685 bp, Enterobacter cloacae
atggcaaacgcaaaacagcagtctccaaatacttttaaaccaaaaatcaaggcaattaatattgttattttaggcgccctttattcctggggttcctgcgcatctgcacaaaccatcagtgccgataccgatgttacaggtaaaaatgttactgatggcgtgctgatagacactgctggtgtcactgccaatatcaatggcggtagcaaaataagtaatgcccctgataaagatagtgtaaccattaatcttacagatcctacgaaaggcgcaacactgaatgtcagcggtacagggaccactatttctggtggaaaaattggtatagatgttgccagctccacaggggctgcggttaacgtcacggataacgcgtatgttgaaggcgtggaaaccggtttattcgtccgtaataatgttaatggtcaggctaacgcgaacctgaaggttgaaaactcaacaatcaagggtgggaaaaacggagtgtatgtttgggaagcaacgggaaaaagtggcagcaatatagatatttctaattccctgatagaggccagcggtggcggttatggcgacgcggccgtatttatgagcgaagggagtagtgttgtccatatcactaacagcacgattaaatcggacgatcgcggcatctcatccaatggtggttattccggtataatggatatcacggactccactatttcagctcagtctggcttaagattaacacaaaataacggaagcgcttataacatttctaacacaactataaatggcgatgatacaggtgtttattatacagcatccggtaataaaaataccaatgtaacgctgtctaatggcaccactgtattcggggctaaaaatgggatagccactgaggattctaataatgaaaataatattatcaatattgatggctccacggtacgttcctcgaccggcaatggtatttcactgggcggcggtttcacgttaaattctagcgccgggtcaacgatcgaaggtgataaagccatcatccttaaaggggataccactggcagcaccatcaacgtgaaagattcgaccgtcaccggcaaaaccaatttgctgaagatttccggtaccagtgcggtgaatacggtcggtttcagtggctccaccctttccggcgccatcaccagctcttcaggtgctgaccagtcggtgaacatcgacagctcagcctggaacggcagtgccgggaaaaccggtaccggcgcgctggcgctgaatatcagcaacggctcaacctggatcaacaacgcggccacggatgtcgatgccatcagcctgaccggtgccagcaacatcgtcatggacggcgggaatatccacaccgcaagtctttccgacagcgcaccgaccacgctgctagcggcggccagcccgacggcgtcaactatttactccacgtacaacgcggaaaccggttcagcctacgtgctcacggccgacaaggccaccggcagcttcaatgccggcgtgacctccaactccagcggtgcagcgggcgatatgaccggcaacaccattgttcaggtgacggacggttccggtgcgaccttcaactccatgcagaacgatgtcggggtttaccgttacgaatcacacagcgtggctaacgctgacgggtcaaccagcgtgatcctcgataactttacgccagaaccgacgccagaaccgacgcctggcccgaacccgaacccaaacccgaacccgaattcgcgcacgctctcgaccgccgcgcaggctgcggtgaatacccgtgcggcagcgatgagcatctggagcgacgaacaggatgcgctgaaccgccgtctggatcacgagcgcctcaccggcagcagcgacggcacggtgaacgcctggggcagctactacggcggctaccaccgtcagcagatggagcagaccagtactgcctacgatcagaccaacaacggctttatgttaggtgctgacaagcgtgtcgatatcgccccgggcaacctgctgttcggttttgccgccacccgcgggtattcggatgtgaacatgcatgacggcggcagtgcaggcacagatgtcgacagctacggcgcctcactgtatacctcactgcgtctgaacaacggtctgttctttgatgccagcatcaagggtacgcacctgaaaaacgacatcagcgtgacgtctctggacggcggtcatactaccggcgactataacaacaatggcttcggcggggctttcaaaacgggctaccacaagcagtttaatgcctggtatatcgaaccttatgcccagatttcatatgcacgctataacagcgtcgactacaagctgaaaaatggcctgcacacgaaagatgacggcagcacgtcactgggtctggaaggcggtgtgaatgccggtatggcgatggcgctgaacaatggcaccgaggtccgtccgtatgtgcatctggccgttgcgggtgaaaccgagaacggcaacacgatggacatcaacggcgagaaaatcaacgacagcaccgacggttcacgcggcatcgttggcctgggcgcggatgtgaaactcaccaaaaacctgagcggctgggccggggcgaactatgccaaaggtcaggataactatgagtcaccgtggatgctgaatgccggtgtcggctacacctggtaa

SEQ ID NO: 167644 - DNA, 204 bp, Enterobacter cloacae
atgcgtaactacaccaaccaggcgaacatcatcaagcgcctcgccttctatgacctcgccatcatcagtaatgagagcgtcaccgacccaatatgcgtgctgctgacgaccacaaaaccagatgagcaatatgtcttcacgcttaaccagcgatgcgatctcaataacatcgtatccttccggcgtttcaacaatgctcgctga

SEQ ID NO: 167645 - DNA, 159 bp, Enterobacter cloacae
atgccagagggaatggtcggaaaggaaggtcttaagaaggagttctcgatcagcgacggcatccatctgaatgccgtgggttacaccttatggaagatagaaattaataagaaaatggctgacttccctgtcaactattactatcgcgcccgctattga

SEQ ID NO: 167646 - DNA, 1920 bp, Enterobacter cloacae
atgaattttcgttatgatatcaacggactgcgtgcgtttgctgtattcgctgtagtccttttccattttaacccaacttggttgcctggcggatttgcgggcgtcgatgtgttttttgttatatctggttatttaatgaccagaataattgttggtagatatgatacagaaaagttatcagtctggggattttaccttgatcgaggtcgacgaataattcctgcgctggcatttctgtgtgctgtgttgatggcttatggcatctggaagttgtcaccgattggcctgacacagttagctaaacacacagtgggtagcctgttgtttatctctaacggaatgtattggctcgagtcaggctactttgatgcctcctcacacacaaaatggctgcttcatacctggtctttgtcggtggagtggcaattttatcttatttatcctttcatcattctcggtcttgtcagatatttaggtcggaatcgtctcggtgtagggttaataggcgtatgtggattgtcgtacgcattgtccattctaacccctgaatcgcatcaaagttcggcgttttatctgatccatacgcgtgcgtgggagatggtggcaggtgggctggtttgccttcaccctttgggcctaaccgcaaaacgagcaaaatttgtcgaattgacagggtttattctggttttggcgtcttatcttttaatgagcgagcgtgttgcgtggccggggtatatggcactgattcctgttctcggtgccagcatgattcttgctgcaaataggcatgactccatcctcaccaataacaggtttgcgcagttcctcggaacgacatcgtattctatttacctgtggcattggcccgtcgtcgtatacatgcttcagaatgaaatttctggcgcttcggcttctctatgcggcatcgtagtatccattatacttggatggatatcgtatacactggtagaaaacagacttcgcggcgacaaatctctcaaattgaatgcgtctttcgctcgtcggcacgttctggcagcagcattcagtgttgttctggcatcaggtttatttgtttatcaatctgaaggtcttccatctcgctacgatggaaaaattaatgaactgaccaagattaaggatgtttactccttctttgagatacctgctgtctggagaaatggcgtgtgtcattcatctcctatcggtatgagtgagcaggaaaggatccgccagtgtgcagagacaggtaaacacaaaatattcttgtggggtgactcgtatgcagcggccctataccctggactgaaagctcttcagaaagaaaccaagaaatcattctccatcgaacagtttaccgacggtaatggttcaccattctttactaacctgtcgctggccgataacaagaaagacctgattacaacgaacgaggaaaaactacagattctggctgccatcaaacctgagaaagttgtaatcacatggatggttttaggaagtaacactattcaggacccagtgcaggctgtcgcaggaataaaagacactattgccagaattcgccgggcttcaccggcaacagagatcatagttatcggaccggtacctcagtggaacgagaatcttgtagcaattatgttgaagtactgggaccagtttggcacataccctccaaaatacatggagtatggactcaataaaggtatgtttgcttgggatgaactgctcagtaaagaactaaaagcggatggggtcgagtatgtctcagcgatgaaagagctttgcaatgaacaaggctgcattactcgagtgggagaagatgctcactctttagctgcagctgactggggccatctaaccccagccgcctcacgatacttcatcgagcgtataaaggataagttactgcctcaatag

SEQ ID NO: 167647 - DNA, 327 bp, Enterobacter cloacae
atgttgagttattttttactgagctactcggtaatcccacaatctgattactcaggcgatattgaaaaagccaataaagtgcgaagaacaattggcgaacttaagcagtgggacaaatcagagaacaacgagacaaccttcatgggaatcataaccattgaaggagatagcaacgactcacgcatgaaaagctctattcgtgaaatagaagaggtttttaagccgattttgaagcaatacgatgcctcatctggtgatgttgtgatttattgctctatgatggtggaaggcatcgataaatactttgagttcgacgtttctcgctaa

SEQ ID NO: 167648 - DNA, 663 bp, Enterobacter cloacae
atgtcatggacttgcccatactgccagcacaaagcagttttaactggtagtaacagatcaacttcaactggatacttcgataatggaaatatcaacggccccttaagaaccttctgggtagcgatcacttgtctgaatgatgattgccgccaagccagcattgacttttatcttattaagaatgatgggtctgatgatgtcctcaaaaagtggaatctcttgccagaggggcttgtaaaaccatttccagaatacataccaaagcctatcttggacgattataaagaagcggtgttgataaaaaacctttcgccaaaagcgtcagctacactctctcgtagatgcttgcagggtatgatcagagatgtatggaaggttaaaccatcaaggttagttgacgagataaaggctatagagggagatgtagaggcaggaatgtgggcggccattgatgcgattcgtaacattggtaacatcggcgcacacatggaaaatgatatcaatgtgattgttgatgttgatcctgatgaagctgatatgcttataggcctgctagagcttcttctgcaggaatggtatgttgaaaggcatgaaaggcggttaagagttgaagcaataaccaacttagcggctgaaaaaaaagccttaaaaaaaattaaataa

SEQ ID NO: 167649 - DNA, 900 bp, Enterobacter cloacae
atgataatatctttttggaatactggaattattcatagcaacgacagaacaagtcaagaattacaagtcctgcaagttatatatagtatttttactgatgaaaacacagacattttatttctctgtgaaattgatgacgacttcataactcaaatatcacaatcccatgagattttcgacagtgtgaatttaatccccgcaacagaaaaattttcacgaaatctttgttttggcatttgtgctctgtataaaaaacacatttccttagatctaattaaatataatatatttaatgacttagatgatggacgccaaaatacaggaaccaacattaaagttggagtagagtttagcgtctcctcaagtgagaataatccagatctttcaataatagtttcccattggtcctccaaaaaaacaccagggtatgaatttaaacacaaagacgcagcagaagaactcagaagagaatgcactcaattattagaatatggaaagcaagttattttaattggggattacaacaaaaccccagaggaaattataagagatacaaatttaaaatcatataataacaaattttatgttttgagagatagtaaacgattatataacctttcattcagctttaacgggcaacattctttacttaacaacaatatgtatgggattgttaatcaaaatggtttcggtacatttgtttctagatcaagtagagcaagcgaaaacggctgtgctgttcttgatcatgcacacgtatcatcggcatttttgaatgaaggaccatggctattgaaggaaggtagtactaaaatcatttataatgatttgctaaaacaacttatttatggcaaagatacattaattgaccatttacctatcagcttagaggtgtactaa

SEQ ID NO: 167650 - DNA, 441 bp, Enterobacter cloacae
atgtctgataatccatttacaaaaattgtaaacgacacactaatgaccactagcaaaattgataaagcgattgccgatctcgaaaaatatcttgagcaagcaagtgaggctttgaatacattaatcataggcccgaatcatataaaactaacaacaaacgtgcctgacaacactctccctgctatttcttcattaatgattagttttatgtcaaccaatcaaaaaggtaaaaaatacatctacctaacaaatgacataaaatcagaaatgatagctggatgggcagtaagtgaagacggtgattctatgtctttaattattaacaaacttaaatccagctaccctgtatctgaggatggctatataaaatccatcggcgaactattaaccacgacatctattatggataaagcaattgagctgcgcaaagaagtaatataa

SEQ ID NO: 167651 - DNA, 492 bp, Enterobacter cloacae
atgaaaagaaagcatttgctgctatttgtgcttttagcattggcccaatgtagtcatgctcaagaacaatacaattttgaagatgtaaaacctgcagttattgaattcttcaagcgcggggcagggaatcctgatggctgcgatgtgttcaaacaacaactagccaaaaatcctgaagatgagcaagcaaggaaaatgatgattggtttttgtgacagtgacttagatacatctaagccagtaactttcacagaaatgtcatcgcatagctctgaagggcatccatatgtttgcggcatcatatctggccagacacaactaggccgaaaaataggcgcgcgttttattgctgccgaaccatatcatttagtgctgggcttcaagtattcacgacgaccgatagcttacgtaacggatgatgggtttttggtcgatgagtttcgttctcagctgaaagcctacaacgagctatatgcaaaagcatgtaaatga

SEQ ID NO: 167652 - DNA, 255 bp, Enterobacter cloacae
atgtcggcattccgcatgaaatgccgcacattttacgggggttaccaggttgtatcggcgggtttagcgattttcaatcgactggcgaagcgtgcctgccggggcatgaacgctgccgccaacgtagcgcacgtcgtctaccgcccagcattgtccttcacggatcatcagcacttcatcctgccaggtttgggttccctgcgtcagcttcacgcgcagcggaatattgcgggcatccgtgttcgggatggttga

SEQ ID NO: 167653 - DNA, 1527 bp, Enterobacter cloacae
atggcccaggtcattaataccaacgcactgagcttaatggctcaaaacaatctgaataaatctcagtcttctttgggtaccgctattcagcgtctttcttccggtatgcgtattaacagcgcaaaagacgatgcggcaggcctcgcaatttctaaccgcttcacctcttctatccgcggtatgacccaggcggcacgtaacgccaacgacggtatctccctggcgcagaccaccgaaggtgcgctggaagaagtgaccgaaaacatgcagcgtatccgtgagctgaccgtacaggcgaaaaacgggactaactccgcaagcgacctggactccatcaaaaaagaaatcggtacccgtctggaagaaattcagcgtgtggccgatgtaaccaacttcaacggcgtgaaagtgtttgacggttccaagtctgaaatcaccatccagattggtgacaaagacggtgataccatcgatatcaaactgaacaagctggatatggagaccctgggtctggacaaattcatggacgacttcgccgatatcggtattaccatgaatggtgtcagtactgctgctagccagtatgacaaagcggcagatattaaagctgtcggcgcggatactgggctgggtactaatgtcacaaataaaacctggaaggtggatagtgacgacaccaacaagcttgcggctgcaattggcggcaacgcaaaagcggcagacatggaggtctatgtccatcctgatactaaagaagcatttgtccataacaaagccgacggcaaagtttataagttagatatcactgcgatggaattcgaggatgatggtgctacaaatgccaagattaaaacggttgccaacaccaatttaacggaaatggatcccgctgacgctgacatgctggtgaaaggcccgactcacctcacagaaggctcgtctaccgcgcttaaagcgggtgataaggttaaacaggctggtactgccaatgaatttgatcttaatgcagccaaactcgacgaaattgctgccaccgcctttggtgcaggcgagactgctaaatcttcgggcatgcagatgatcatgatgaatgatggcacaggcgaccgttacttcgtttacggcggcgatgatggtgctggtggtaaggtattgaaagaagtcacctttggcgctacaggtgcaccagctgctgctgatgtgcgtcatgccgattccgaagttgtgttgaaggaatttggtattgccacagcagataacctgctggaaaaactggatgatgcaatcacgcagattgccgatttccgcgccgacctgggtgccgttcagaaccgcttcagctctatcattgctaacctgaacaccaatatcatcaacaccaccgaagcgcgttcccgtattcaggacgctgacttctccgttgaagtgtccgcaatgagccgtgcgaacatcctgcagcaggcaggtgtgtccgtgctggcccaggctaaccaggttccgcagaacgtactgtccctgctgcgttaa

SEQ ID NO: 167654 - DNA, 756 bp, Enterobacter cloacae
atgaacatttttattgtaaatcttaaaaattcagtagaaagacggcagaaaatggaagaacagttgcatgccctggggctttcagctgagtttatcgaggccgtagatggcagatttatgtctgatgatgagaggaagcgtgttactgcagatgtaaattacgcatttcttcctggtgagatcgggtgcgcgctaagccatcaaaagatatataaaagaatcgtcgatgaaggtatcgctcaagcattgatccttgaagatgacgttcttattgaaaacatcttacccgaactccttaatggaataaaactaagcaatagcacccctgaaattattttattaagtagagttaataaatttcgtatgaaggctgtgcgaagcataactacaatttataaaatacataaaacagagcaagccactaccgcacatgcctatattatcaataataaagcagcatcatcatttctaaataatttatatcctgtgtggatgacatcagacaaatggagtttgtttgaagacttatccatggcgaaaatttactctgtaattccttaccctgttcgcctttccgaagaggctgaaacatcaacaataaatcaatcaaaaggcgatgttgaaatcaacttaaaaaagaaacacatatgggagttacttatgcagcaacgaccactacgagcaaaaattcgccacagatatcgtcgagctattactccgctactccataaagttgtcaatcagggtaagggttaa

SEQ ID NO: 167655 - DNA, 573 bp, Enterobacter cloacae
atggcttttaaattttcaggaaaagatcgcactatccgtatttataaccttcgcgcagatacacgagagtttattggcgcaggtgatgcttatataccggcgaataccggacttccggcagactgcactaatattgcgccacctgaggtaccatcgggtaaggtcgctgtatttaacgggactgcgtgggaattggcagaggactaccgaaatcaaatggtctatagcaaagaaacgggtgaacgtgtttatatcactgggctcggtgctttgcctgctgacgtaacgaccatcgcacctgatggaaactacatgcgctggaatggcgaaggctgggtaaaggacactgaagcagagcgcgccgccgcggtggcgttcgcagaaagtgagaaaaagcggctgatacaggaagctacgctaaccattcaaacattacaggatgccgttgatatggatatggcaactgatgaagaaacatctttacttgttgaatggaaaaaataccgtgtgttattgtccagaatagagccattcgatgcaccattgatcgaatggcctgtgagcataaaataa

SEQ ID NO: 167656 - DNA, 189 bp, Enterobacter cloacae
atgcaagaaggtttttactggatacaacacaacggcagggttcaggttgcctactacactgatggcgaaacggaagacctccaaacggggcgaatcatcaggggtatatggcatctgactcaggggtacgatatttgcaatgacggcgaggctgaggttttacaggggccactgaccccgccaatgtaa

SEQ ID NO: 167657 - DNA, 189 bp, Enterobacter cloacae
atggatccagtcttgggtggcagcgccggaactgaacttttgccactgactgaagaagagattaggctgattacggtatatcgacagttcccaagcgttgaagcaaaaaacatgcttctcgccttcgaaatgcgttacaagcagctctatgaattcttcataaagtacgccaaccagcccaaaaaataa

SEQ ID NO: 167658 - DNA, 195 bp, Enterobacter cloacae
gtggataagaatgtggaagaactttttgaaaagattagacgcttggagctggcagctaagcgagggttgcagttcaacgaagagattaagcctcatttaacacaaggccacattgtctccgttgaatactgcaacgcgacgttaaagcactgtgctctttttcgtcggtggattaacgagtaccacggatcatga

SEQ ID NO: 167659 - DNA, 564 bp, Enterobacter cloacae
atgattatgtttaacgtaaataaattctttttatcatcaacagcctgtattttccttgctgcgggtattgtccactcggcttttgccgtagacccagtacaaattaccgtaacggggaatattgtcgcctcaccttgtgtaatcgatacgggaagcgagtcattagatattcctctgggcgaccagttgcaaagcgccgatctcaatgcagcaggaagcggttctgcatgggtaccaattaacgtcgttttcaaaagctgtccggcgggtacttcaaccattaccgcgacatttcacggcacagccgatgctggggacccgaatacactgtacagcaacacggcagtagatgcgggtgaaaacaaagcggccaaaaacatcgctgttcagcttgaaggtttggctaatgaagcttacggcaacggcaaaacggcgactattgatattgcctccgcaggcacgacccccacctttaagatgcatactcgcgctttcagtaaagacggtggcgcgacaccgggaaaaatcagctccgttatcacgatgtcattcacgtataactaa

SEQ ID NO: 167660 - DNA, 675 bp, Enterobacter cloacae
gtgaaaattatttctattttactgcttggctgcactatcgctgccacctgccagatggctcatgcaacggtcaatattggcggaacacgcctcgtctatgcaggtgcaaaaaaagaagtgtcgctcagcgttcgtaatccggacagtagtccttatcttatccagacggttatcgataatcttgatagtagtccgcaaaaaccgccctttatcatcacccctccgctttatcgccttgatggagggaaagaaaacctgatgcgcgttatccagtcaggaaatcttccacaagataaagagtccatgttctggctacgtgttaaggcaatcccatctgcgccacgtgaaaaaaatacgctacagattgcggtatcaaccagcatcaaactgatttaccgcccggactcgctaaaaaacctggatgtagagaaagagagcgacaaactcagctggcatatctctggcaaccaactggatatcaacaatccgacgccctgctacattaatttcaatgaaattagtgttgccggaaaaaaactcacgaatgtctcctatgcgtctccaggaaaaacaacatcttttacgctacctgcgggtgttaattcaggaaatattcaatttagcgtcatcagcgacttcggcgctgtgggtaagatgcactcaaaatctgcttaa

SEQ ID NO: 167661 - DNA, 552 bp, Enterobacter cloacae
atgaagaagcatatgttcgctgtagttatggcatctattatggcaagcgccacctgtgcacaggcggcaagcaccactacgaccgttaacggtggtaatattaagtttatgggttctgtggttgacgcaccgtgcgctgttgccctggaatctgaagaccaggttgtccatattgatcaaattacgttgaaaagcctcggcgctaaagatgccgtttctggccagtctaagccgttctacgtgaccctgactaactgcgatgtcagcacttatacgaatgccgctatcagtttcagcggtcagtctgacgctgtaactgcaggtgctttggctaacaccgcaggttctggcggagcaactggcgtggctttgcgcctgtttgggccagatggtaaggcgatggatgttaactctggaaccgcatctgacaccattccgctgtcaaaaggcgacaacaccattcctatgagtgttgattatctgacaactggggatgaaccaacagcgggtgctgttgaagctgttgcaacattccagatcatctattcctga

SEQ ID NO: 167662 - DNA, 534 bp, Enterobacter cloacae
atgtttcgtctgatagcactgataattttcgttcaactgctatttattcagccaagtattagcagcgatatatcaaccgtgggaaaagtgcatttctatggtgctgtggttaatagctcatgttcaattgatacgcagagttttgaccagagtgtcatgatgggtcaagtccgtaccggttcatttttagggccaggaagttgggcggaaccggtcaccttctggattaagcttgaaaattgtgccacttcaaccagcgagtcggcaggcgtcaccttcaacggactggctgatcttaaggatccacaggtctttcaggcaggttttggctctggtgctgcaaagggcgtcggaattggtatttttgatatgagaggcaaccaggtaattcctgatagccaacctctcgcaaaaatgccgctgattgccggagagaacacattactgtttaccgcacgatatcgctctgtatcgatgcccgttacggcgggggatgccagtgcggccgtcactttctcggtgatttatcagtaa

SEQ ID NO: 167663 - DNA, 684 bp, Enterobacter cloacae
atgaaaacccttatttcaatgttactcttgccaatgctctgtctgggaaatagtcattttgtttatgcagaagggatcgcactgggagccacccgaatcatttatccgctgggtgaaaaacaaaccagcatcaatgttgttaacaccaataacaaagagacgtttttggtacaatcttgggtgtccgatctccagggtaataaatccacacagtttaccgtgacgccgccattgtttgtgatgaagcctcaaaaagcgaacgttctgcgcatcatgtatgtaggcccaaaacttccggaagatcgcgagtcagtattttacttcaataacaaagcaataccttcactcgataaaaaacaacttcagggtaataccttacagatcgctacgcaaagtgtgatcaaattatttgttcgccctgcgcatttaaaaatgaaatcaatggatgcacctgcaacgctgcgttgccagcgtagtggaaaaagcatcaccattacaaacccttctccctattttgtttcgctggtgaaattcagcgttggagggaaagcattgccgaacaacatggttcccccaatgggtaaccttcaggtaacggcgccggataatgcccagggcagtatctctttccagaccatgaatgactatggcgcagtaaccccagcactaacatgcaatgcgtaa

SEQ ID NO: 167664 - DNA, 2631 bp, Enterobacter cloacae
atgaaacttcgaaaacaagctcgaatgattaatgcagtctgctggcggttatctccattagctttagttattggaacgggtttatttcccggtgttttgcatgcagagaactattttaatccggcttttttagcggatggcaaaaatcaggttgccgatctatcccgctttgaaaacgacggcagccaggcccctgggatatatcgcgtagacatctatctcaataatgattttatcaccagtcatgatgtcgagtttcaggcccggcaaacgcagaattccagtgccccgtcatcctccgatgatacaggtttgacggcctgtttatctgagaaggtgttgggcggcctggggctcgatctgagtattccgcaagaccgaaaacagtctgtagacggacagtgtatcgacatcgcgactttgattgagggggctaaagccagttttgattttagcaagcagcgcctggatctcagtgtgccacaggttgcgcttaaaaatagcgcacggggctacattcctccggaaaaatgggatcaggggattaacgccctgcttctgaactacaacctgaatggctccagacgaaaagacagcagcggcgaaggtagcagcaattttctggggctaaacggcggcgtaaacctgggagcatggcgttatcgtgactattctacatttaaccgtagcaccagtagtaatggagagacaaccagccagtggcaacacattagtggttttctggaacgcacgatcatctcgctgaaaagtgaactgacggtgggtgacagttataccagtggtgacgtgtttgacagcgttagcttccgtggtgttcagctggcctcagacgacaatatgttgccggacagcctaaaaggcttcgcccccacggtgcgcggtattgcaaaaagcaacgctcaggtgacgatcaaacaaaacggatacgttatttatcagacttacgtagcgcctggcgcctttgcaatagacgatctctttccgacatcctcaagcggggatttgacggtagaagtaaaagagcaggatggtgctattacctcctattctgtcccttattccgccgtcccgttactacagcgcgaaggtcgtctgaaatattctgccacagccgcgaagtaccgcaccagcaacgaacagcaagatcaagtctctttcacacaaggaacattaagctggggcttgccgcatggttttacgttgtatggcggcgcacagctgtctgacaactacaaggcaatggcgatcgggacgggggtcaatatgggccactggggcgcgctgtctgcggatgtcactcacgcccaaagtacgcttattgatgagaccgagcatagcggtcagtcattgcgtttgctttatgcaaaatcgttaaacgaaataggaactaacttccagttattgggctatcgctattcaacgtcaggctattacacctttacggatactacgtacaagcacatggatggctacaacagcaatccgctgaacgaggatgatgatgataacaacgatgtgccgcactggttcgactactacaacctctattacaccaagcgcggaaagttgcaggtcaatatttctcaacaacttggtggttttggctccatatatctcagcggaagccagcaaagttactggcataacgatgataaagatacgctggtgcagtttggttataacaccacctggaaggatattaatatcggtttgagctacaactacagccagatgtccggccaacccgtagccgacaaaatgattgcattcaacctgtcgttaccgatcggtaaatggctctcagcgcagggagcctcgtcgtcaaataacgcatttgcgacatacagcatgaaccacgataaccacggtagcgtcacccagaacgccgggatcagcggtactctgctggaaggcaataacctgagctacagcgttcagcagggctacggtaatcagggtacaggtaatagcggtaatgccagccttgcttatcagggcggatatggtaatgccaacgtaggttacagctacgacagcagtaattctcagcaggtgacctacggcgttgcgggcggcatcgtggcgcatcgacacggcattactctgagccagccgctaggggaaacgaatgtcctggttgaagcgccgggtgcggataacgttaaggttgaaaactccaccggcgtgaaaacggactggcgtggatatgctgttgtgcctttcgcaacgacctaccgtaaaaaccgtataggcctggacaccacaacattgggtgacaaagttgatcttgaggacacggtagcagatgttgttcctacaaaaggtgctctggttcgcgtctccttcaaggcccatgtaggtagccgtgcactgataacgttgctgcataataaccagcctgttccgtttggggcgaccgtcacgcgtgacgatggtactggcagcattgttggagaggatggacaggtttatctatccggcctggcgcaaaagggcacattcacggtgcagtggggagagggcagcaacatgacctgtaacgcaagctatcaacttcctgttgaagcagaaaatacagcgattacgcagatcaaattgatttgtcgctaa

SEQ ID NO: 167665 - DNA, 525 bp, Enterobacter cloacae
atgaaaaataatgtgttatgttttttcttgcttattttttctgtggcagggatatttccggctaaggcgagcgaaagtaccctgaccatctccggcgatgtggtggcaagcgtctgtgaggttgcttttacaaaaaaaatcactataggctcattttcaggtaaggattttccctctgtcggcagtaattctgcattcaaagcgatgaatattaatctctcaaattgttacagtaaattggcttcagtttcggttaagttttcgggtacgcccgatgctgacaatccagtattactcgctctgagcgaaactgaaacaggaacgacactcgctacaggtattggtattgaattgctggataacgggggcaaaaccataccttttaataagtccgaatcgaagacatttccattggatgagggagaaaatacgctctcctttctgttgcgttacaaatcaacaaaatatcctgtgacgcctggtgatgcgacagcggtgttattttttgatttatcatatcaatga

SEQ ID NO: 167666 - DNA, 528 bp, Enterobacter cloacae
atgattcaatgtaataagatacagtttatttcctggttagtgatgattttttgtggcctgtcacaggcccatgacggaacggtgaatattgcaggtgttattcaggataacacttgcgaaattgcttctgattcacaaaatttcgttgtggatatgggggtgatggcacaaaaacaattcaggaaagcaggagacagttcacccgataagtcattctccattaatttggaacattgcggaccggcggcaagtgaagccaccgttaccttttcgggcgttgcggattcactaaactctgatttattcgctattgacgtcagttcagattcagtcaatggtctggcactgggaatctatgacggtaacggtaagcctgtcccaccggggaaaaccagcacgggtgtagcactgaaaccggagcaggctgaggcggtattggatttctcggcgcgttatacggctgtaaaggacagcgttacggcgggaagtacgaatgtgacggtgacgtttgtcataaattatgagtga

SEQ ID NO: 167667 - DNA, 978 bp, Enterobacter cloacae
atgaatcgaaatatcttttttttccttattgcctttttgttttgtggttatagctatgctggttgtactccaggtggtcaaggccaggtagcagattttacctttaacgatcttaatatacaaagagatgtgccggtaggcaccgtgttattgcagaaggaggtttccgtcccggcgacggtaggtatctctgcatacgccggtgcatgcacgcaagagatgaagatgaattatgccggtgcaactaaaacatcactcgcctccgtctataatacaaacatcccgggcgtcggcattaaggtgtttacttatacccattcaggtgccggagcttacgattattttgaaaatccagggaagaataattctttctcagctgcggttggtatgagttcgtatacgtattggacagcaagtaatgttgcaaccgtttatttagtaaaaactggagatattacttcgggccgactggcggcaggcgaaataggccgtgtgaccaatttagaaacaagcactgttctctttaacataaatacatcgggagggaatattaactctttggcatgttcaattgaatcaggcaatggcttatcctttccgataggagacgtactcacaactgaattcaaaggggtgaattctactcctgataagacgagcacggtggatcttaagctggactgcaatgccgacgcaaatatcaatattaagcttaatggcgtacagaaccctgattcaaccgaaaagagtattctggcactcagtggcaatcagggccagaacggcgttgcagatggtgtaggcgttcagcttctttataatggcacgccgcttgaaatcaacaaactcattactttgaaaaaatcttccggcgggaaagaaagttttcctattaccgctcgctatattcaaactaaagaagcaattcgaccaggcgcagcaaatgccacggcagttctggaactcatttaccagtaa

SEQ ID NO: 167668 - DNA, 1716 bp, Enterobacter cloacae
atgaacacgctgacatcctctttgattacgctggcaaatatattgctaaacgctcgcacgatacgcgtgctgatactgtccactttcagcctttactggctggtgctactccatatcccctggcctaacaacggcgattacggcatgaacctgccgatgaacctgctctgctggggcgtgatgtccatgctgtcgctgctggtatggctttttctgcgtacggcaaccgtgagtattacacgcaccagcatactcatgctggcgagcgcggttctgtttacgctgccgatcctctggtctccttctgaaggcttgccgactgccctaccccggctggtcgggatctggggcggagtgatgtgttacgtgactctgcttcaggttcctcttcaggagaaagaaaccacagggattttttatctgctggctatcgctgccgttgtggaatgtctgatttcgctggcggggctttactgcccggcatatctccccttcccgctcaataacctggctgaaaattattctggctacgcaccgggtatatttcagcaactgaatgtcaccgcttcatttctggcgacggggctggtcgccctgctgtttgttcttgccgatgctcgatgcgtctgttaccgggttcgcgcagaatcgtatcgcctgctgtttatttgtgtcagcatcatagtgatatcggccacgctggttgtgtttcactcacgcaccggctggctcggcgggttaatcggcattctgtgcgtatcggtgatgttcagccacccgcgttttcgcgttcgaacgacaagtcgccgccgcctgctggtggtccttttgccgttcgcgggagggcttttaggcacgctgctgctgaatcagcctctggccgcatccctcgcgcacgaaagctccagcaatcagcggatgttaaccctggaatacacgctacgtatgatcggcgttcatccttggcggggctgggggttaggaatgtttgaacccgccttccagaattttatggccgcgctgccgttcgataatccaagtcgggaaatgatgcaacacccgcacaatgagacgctgtttatctgggcggagggcggcgtgatggcgctggcgggcgggctgtgtctcctgtggggctggataattcttttcctgaggcgaaaaagcctgtggcagtgggcggcactgctcaccaccttgccgattctgctgcacactcaggtggagtttccactctattattccgtggcgcactattttgccattctgattttaatggcctcggcagacggagaactccgcacatttcaggttcgcagttcgcggttacgttggccgctggtgttcatcgcactgtatggcttagtgctttctgcacagcttttttttgccagcattgtgctgggaaattttgagacgggcagacttgctttccctgagagcattaccggtttacacgtgccggaactcatgcagatgcgctatcagcgcgatcttagccagcttcatttgtggcatttcaaccggtcgggcgatatcgatgagctggaaaagtatgccgttgaaaacagggagtggattacattgcatatggtcgaggatgcctggaacgatcaggtcaatattatgtcctttttacagcaccagaacgaagctgagaaattaaaaatccaggcccaccggttaatgccatgggacgatcgttttaagccataa

SEQ ID NO: 167669 - DNA, 954 bp, Enterobacter cloacae
atgcctttagtacgttctgagcatgagctcgaattagcgaaagaattattagatgatattgaactgtcacgcttgaaagttgaacaactaatattaaaagcatctcgtttagcgaggctatgtggaagtgaggagtttcaaaattggcttggctacgaaatgagaggctactattcaaatgttgatttatcccttcgatacatgggacttacaggaagatggactaatagagagaaagaagagggttattggagcccgattgctcaaattgactcgttgattatggccaaaaccaccgaattggaatctatgacgacaccaaatgttagcggtatcgagtttgctaatacggtacttaccaatcatttaaatactagagcaacaatctccggaatgatatcaaaacttaccgggattagaagtcgggttttaggaattttgcatacgttcacgtccgaaatttattatgaaaaagaacttgattatctggcagagtcaatttttgaaaattacaaaaaagatgttgataatttaatttcaggaatttgtggtgatgttctacaacaaataccttccgttgttaacagattagctgaagaagaagatgagtcagtaagccaagcactcacaacagtaagacgaatcatagatagtttcgctgatacaatctttcctccctcagatgaaacttacgagattggaggaaataatttatccctcgatgcttcaaagcacctcaatcgcctgaatgcgtttgtacatcagagagttgaaagtaaatccagaagggataaaattcgccaaaatcttgccaatctttatggcagggtttcaacaggagtacatgctgatgtttcagtcgaagaagcaaagtcacttttcctaaactgctatctcctgctgggagaaatcttgcatataagcaaactagctaagattgaaaataatgattag

SEQ ID NO: 167670 - DNA, 1047 bp, Enterobacter cloacae
gtgatagctcgcgtcaccgctgtcatcgccgttgcccggcgtaacgtaatggtcgttggaatcaaaccagaccgagctgtagcgcactcccgcatctaccgacagtttctgcgtcagctgccagctggtttgcaggtaagggtcaacgttccacatcaggttacgttcgtttcgacgcttgtcacccttcacgccgtagtccggcacgccgttgttcatcacgaagttctcgtatccgcgacgatcttcgctcaggttttcgtagttcaggccggtagtaaacgtcaccggcaccagcagctcgccgcggtgcgtccagcgggtatcgataccctgataatgacgctgcatatcgatcacgccgccggagtgggaggctttcagctgcggctgatacggaatcgactggtactgcgtcatttcacgttcgccggcgtacatcatcacgctgaggtcgtcctgagtgctgagctgacgatcgtagcgcagaccggcctgggtctgcttgatggtcttgcgggtgttgtactgatcgccgcgcggagactgacgcggattgttctgccactcctgatagctcagcccgcccggatcgttggccttcatgtccacgctgttgaaaatcagcgtcagcttgctgacgtcgtcaatgcgcacgcccagtttggcgttagcgaggtttttccgcgcgccgctgtggtcgcggtagcctttggtggtgaagcgggtggtggaaacggtgtaatccacatcgcccgcgtgggtgccgtcacccatcgcgccggtggctttcatgccgtagcgccaggtaccgtagctgccgtaatagctgctggcttcaatggtaggcggctgctgaccggtctgggtgttgatgttaatcacgccgccggaggcgttgccgtacagggcagagaaggggccgcgcagcacttcaacgctctccacgctggagagatcgatgttagaggtctggccctgtccgtccggcatagtggcagggataccgtcgacatacatacggataccgcgcacgccaaacgttga

SEQ ID NO: 167671 - DNA, 249 bp, Enterobacter cloacae
atgagattgagcacagcgacgcgcatgaccgtcacaattcgcgcacgtagcgccgatttccgtgaaaccttgaatacgcggcgtgaaaaattctggcaccagactacgttgggtgaagtagtgaagcaaatagctgtcaggcataaattaaagatggcgctggtgcgggacctgatggacaagcctgtggatcatcttgaccagactaatgaaagcgacgccagctttgtgatgaagctggcacgatag

SEQ ID NO: 167672 - DNA, 168 bp, Enterobacter cloacae
atgacccgtaaactttcaatgcgtccatcattcaatctcgtaatttctgaaccgtacattactgtcgaagagttttgccaccgaactggttacaaagaaggtactgttcgcaagatgtaccgtgaaaatcggtcaaccgatttttccgaaagggggctttactattga

SEQ ID NO: 167673 - DNA, 606 bp, Enterobacter cloacae
ttgaaaatctcaacgaaagatcttacgaatcgtaaagcaccagttttaccagagggtagtaaagatcccattgaacgtatcgttcaagcatatggattttcattccgacaggcgctgtgccgccatttagatgtgtcacagagcacgatggctaaccgcataatgcgtgggaattttcctgctgatttggttctggtttgttcgatggaaacaggcacttcattggaatggctgacgtatggtcgcggtgattcaaacatcgcaaagcaagataaaacaccaacaaaaatcgaactaaaaaaaatcacaaatgggaaattttcatcatcggattgggttggctatgacgctcagctcttaccaagtgatgtaaaagaacctctgttagtacatttcgagaaagaaaattacctagtagataggactgccgctgagataactgatgggctgtggcttattgagattgataagctaattagcgttaaagagttgtaccattttcccggcggacgtatacgtgtagagaatggcaaagcatcatttgaatgtaaagcagatgatattaaagttcttggaaagattgttgccaaggctgagtttttataa

SEQ ID NO: 167674 - DNA, 903 bp, Enterobacter cloacae
atggatagtaacgttgaaaaaaatgaagacatatccgtcacaggtgttgctgaaaagacgaatttagaatctcttaaaacatgtttcgtaataatgccaatcgcggatatgaatggttatgaaacacgccactttgatagagtttatagtcatataatcaaacctgcctgcgataaagcaggattctctcctgttagggcagatgaggttagtagttcaaatttaatcgtactcgatattttgagaagaattgttgaatgtgatattgctatatgtgatttaagcggaagaaaccctaacgttatgtatgaacttgggctaaggcaggcattcaacaagaaaacagttttaattaaagacgacaaaactataagcccttttgatgttcaggcctttagatattgtgaatatgacattagtctcagaatcgataatgcatttaataacatatcatcaatcgaaaaggcgttaagatctacttctgctgctgatgaaagtgatgtaaattcaattgttcaactactgaaaatacaaccagcacaagttggtgaaaagacaattttaagttcaactgacacacttatcttagatgcaatcaacgacttaaacagtcgttttaacagtctgtcagataaacaatcctcaccacaaaaaataattaaactgatggatggcccaacaaaaacgggggagtctttcttgtatcaaatcaatacttataagcgagatgcatactataaaaactcatattttaaagcgggggaatatctaggtgattatgtagggattgataaagacccatcagggaaactgtgtcacgtttttaaaaataaaaacaaacttactttcattgaaaaagaatctcctgatttagaatttataaccgaagatcttgatttttaa

SEQ ID NO: 167675 - DNA, 3375 bp, Enterobacter cloacae
atggaaagaaaaaacgccaacattgacgatgttataaggacagttgaaaccgccagcgcaaaagagctggaagagcttgctggtatccgggaagctgttgaagatttgaaaggtgggcgagttgctactgttgatcctgtctctcgcagcgtgtcggcattaaatcacacaatcgaaaattcccggcctgactttgtggccaaagcgccatcagtagaccctattgttgacgcaatgaaacggcttaatttaggggacgtttctcgtgtagttcaggaagatgttgctcaacaggaacagcgggccaaatcaaccacaccaaatggtaaaaaacgacgcaggaaggctataccagaggatgtaaaggcgcaacggaccgaagcagccgaacacgctcgcgaaatgttcggtcaaaaaggcggtgcgcaaaaaagccaaaaccaacgcgatgcgcgtggtcgttttattggaaagtcagggagtaaggccgcagcggaagatgcccgtgctgaacgtgctgaaaaggccaggcgcaaagaggatgatgagcgtctaaatgctgaatcaggtttattaaaaaaactgtcaaaagtagctgaaggcataggtaacccttcagagactcgcgccgtcgatgcgttaggttatgccgttgctggtccattgtgggccgcagggaaggagcttggcgggatatcaaaagaagttggtggatcgcttaatggtgccagaaagtctattgccgatgtgattcgtggcaatgacgataacagccgtagaaaaggtttttttaggcgtaaatcgcaaaatagtgccgatgtcgttcaggttaacacccaaaaacggacggttcaggaacttcaggatcagaccagcgaaattaaagagggcaatgacaagattctcagcgcccttgatcagatagccaaaaacaccgggaaaaagaagggcggcttgctgtccaaattatttagcctgttagggaagggggccggtggcgtcgcgtcgttgttaatggggcgtggcatgctgaaaaaagctggagcactcgcttttggcgctctgggggcaaagaaacttgtaggaatgctacgcggtggtggcaagaagactctcgcccatgaaggcggagatttggctgcccgggcagcaggtaaacttggattaaaggcagttggtaaaggggcgttacgcgcaattcccctagtcggcacagtggctggaggtatttatgatgcggtaaccggttggaatgatacagaagcgcaacgtcgagcgtttgggcttaaatcaggacaagatccatcattccagcaaaaagccgcttatacgttagccaatgttcttgatttggggggactggtatctggtattagcagtgctattggtgatgttctcaaatcacttggatttgaggatatcggcaatatgttgcaatcattttcgacggaaagtattgcccaggccattgatagtgggattaccaacttagaaacatatatttctaaccttggcgacaccatttctaccaagttcgatgattacacagcaaagattggtgatgctgtttcagcatggtttagcgatacatctaataagctgcttgaaaagctggatgccatcaaagacttctttactgtcgataacctgaaacaggttttcagtgatgcaattgatagtgcaattgatttcattaagaacccagggaaacacattaaagaggcagctagtaatatttgggatggggttaaaaatttaccaggtaaagcattagatgcagcggttgatgccgttaaaaatacccctgcggcaatgattgtatcaaaaatacccaatccgatcggcgaggctaatgcgaaagaaatcactccagagttaaaagctccggttaatagccagcaggggacatctgattctaaagctgaatccgatgccaaacagactaatattgctgcccgcgtgataaatgcggccctggatatggcgaaagatagcaataaaacagttaaagaaactgctaatcagattatcaatgcaaatgccgtagaaacaggaaataaagcagcacaaacaattgatgctgccttgggccagtctgctacaggtaaggaggaagcattaagtgcatatgagatagataaacgtcgatttaacaatggcaaggatgtttctttgccaaaattaaatgctgccggataccaatggatttctgacaatgccgattattttgatgagcttgaacgtaagtatgggcttgaaaaagggattctgtcagcagttgcttccgcagagtctagtgcaggccagagaactggaaatccagtagacaaaaacgggaacaaactttcatctgcccttggggcttttcagatcactaaaggtacaagggaggatcttggactcagcgatgctgatgccatggatacacgaaaagcagctgatggtgccgccagatacctaagtatcctgatgaaccgttataacggtgatcagggtcgtgcaatagctgcctatcatgctggtatggggcatgttgataaggggagagtagtcgccggtaccggcgaatatgttactcgtgtcagagggtatcagcagatgctcaataatggtgccgtttatggctctaaggtagatcatagcgcaccagcaattcacgaaaagatacctgataacgctgttatcgatcagtctactggcctggcgtttacccctggtgatagcccgtttgagaaaggcggtctggtagacaaaattggcaatgctgttggtgttaacgatctggtcaacaaattcatgaatggccggggtatgcgtcgggaagtcgttcagggaacgctcgaagaacgtgcacgagggaaggggaccgcaacagcagctggcaatgtgtatgttgatactccgatgccagtcgaagaggcgcgtccggtggccagcaactcaagttactttgaccaactcggcgcacaaatggggattgatggactattcgataaactccgcaactcgccggggatgcggaaaaataatgtgcctgaaccagcctccacgtcccaggtgacgactgccgccaacgatttgcagcaaccaaccggtcgtatgcagatagacggacaggttattagtgaccttggcggctccggtgccaagccgacaatgcagttggctgataataccgtttcacttgatggtgaaacgaagcggctgtttgcgcagatgacctcattgcttgccaggattgaagagcacactaaagactcggcgaaaggccagggaactgtcgtaaaggtcagcacgcctcaaccgggcgttatgcgcacggtgccactgtcaattgatgatccgttgatgaatgactacgcgagagttgattga

SEQ ID NO: 167676 - DNA, 957 bp, Enterobacter cloacae
atggcaaacttgcaagaacagttaagaatagggcggctagctcaagaacaaatagcaagattgaatttgcaatcgttacttagtgattctgttaaaaaacagcttgcgaacatgacgagcttgagaagaataaatagcaagcatcgtgaatttcttgaaattctacagaaacaggccaaggtttatcccccgcatgatgcaaataaatacattcaaatgctaaggaagcaggcagaaattgctatgccgttacgaaaccagttcgagatgcttaataagcaagctggtttaaataacatgcaagcaatacttaatgaattgcgacaaaatgtaagtcataagatagatttaaacaatgaaataaaagaatcattaaaacaatataccctagcgcaaaaggcttcattacatcaaataatggagcaaagtctttcatcaattgcacaggcttatgtcgaaggtgctattgaaacatctcacaacgaaagtgatgttcaagacaaaggattaaataaatccagttcgacgttcattgattcatttaagtcgctccctcacccgcttcagtttattattatgtggcttttaacagaagtggtgcttggcgctattgctgattatgcaaaagaacaaatcttatcgcaaatacacaagacagaatcatattctgtatccctatatgaggatgcaccaatatcaaaacaaaaattaattaaagaaaacacagaaattaagtgggaagatctcaatggttttaggtttataactggtgataacgtaagattacatgtcagtccttctttaaatagtgaagtgattgaatgcattggcaaaaacacaattgttgctattttagataagaaagatcgtcaatggctttacgtgcaggttaaatcaggggatgagtttattactggttggattacacgaacatacacaaagcctcttaaggcttga

SEQ ID NO: 167677 - DNA, 507 bp, Enterobacter cloacae; identical to SEQ ID NO: 25250

SEQ ID NO: 167678 - DNA, 879 bp, Enterobacter cloacae
gtgagtatgcatcaagtcgtcagcttttcaggtggacgaacatcggcttatctcgttcatctgatggaagcacagcgaaaagctggcgctagcgtccatttcatttttatggataccggctgtgaacatcctctgacgtatcgctttattcgtgaggttgtgaagttctggaacgtaccgctaacggtgttgcaggtcgatataaatccagaacttgggcagccaaatggttatacggaatgggaaccaaaggatattcagacgcgaatgccggtgcttaaaccgtttatggacatggttaaaaagtacggtacgccatacatcggcggcgcgttctgtaccgacaggctaaaactcacccctttcacgaaatattgcgatgaccattttgggcgagggaattacatcacatggctcggtattcgtgcggacgaaccccgtaggctgaaaccgaaaccgggcgtccggtatcttgccgaactgtcagattttgataagtcggatgttatccggtggtggcgaaaacaaccttttgatttgcaaatcccggagcacctcgggaactgtgttttttgcatcaaaaagtcaacgcaaaagctggggcttgcatgtaaagacgaaccaggtctgatgcgggtttttaatgaactggttacaggcaaacacgtcagggatggtcatcgcagaacaggtaaagacgttatgtaccgtggccacctgacgcttgacgggattgccagaatgtatgccgacagtgactacagaaatttgtatcaggcgatggtgctggccaagcggtttgatactggttcgtgttccgaatcatgtgaaatctggggtgaccaattggagttgaaattcgaagaggtagtggaatga

SEQ ID NO: 167679 - DNA, 204 bp, Enterobacter cloacae
atgacaatcgtaaaaacccataccggtaccgtgatcaccaaagatggcccgaaggtaaaaaaactgcaccaaacagagcggatgtgggtcgttggcaaaaacgagttttaccacaaagaaactggacgccgccattttgcagaaaatacgcgccgccgactgctgttagacaccatcaagcctatcgaggtgaagcatgtttaa

SEQ ID NO: 167680 - DNA, 240 bp, Enterobacter cloacae
atgtttaaacagaacgaaaaagctatcgctcaaattgctgattatatcccgcgtgcgtgccggggtatgcagttgcaggaagccaaagcgcgcctggagaaaaaaattgcgctctatattgatgacggctgtgattccgccgttcttaacgcggcgttcgcaccagctcttaactgtcacactcgggagtcttttttttcgtgcatcgcagcgcaactccaccaaggaggcaaccagtga

SEQ ID NO: 167681 - DNA, 465 bp, Enterobacter cloacae
atgaccactattaccaataagaaacagtatcccagcgagcaatatcttaatgagctgatcaccaacatagagtttgccgcaagggcaccagttgaagtcgtgagagcaatggcagcagagctacagaagcggcgcgaagctgatagtgcagaaccagttgcttatattttcaaacatccggccgggaaattattctgggctttaacggatgaaagcaataaagagcaagcggacgttattcctgtttatgctgccgcgcctgcgtcggttgtgccggataatgcatcagagcctcttgcttatgcttacaaagagcttacgcctgagattatgcgcaaccatttagctgtattcgagcgatatggaatagccccaaacgatagcactaccacaattcaggcactgcgaatcgcgctggatggtatagagcggagcgacgccatgcttcagggtaaaggagggtga

SEQ ID NO: 167682 - DNA, 351 bp, Enterobacter cloacae
atgcacaataacgttctcaatgttagccgttcaattcagacaatcagagactgcaccagtgtggtggcatcaatcccattgcgaaacagcatagacgaactgcaaattcgtgtattgaatccgaatcaggctaataagcaattgcgctttattttgacgctgaaaagtgaaacagaggggataaagcacagcgtaaaagtgttttctgaggccattctgcttaatgggaagctccggcatctggtaaggccagaacgtcaatatcctgacgtcctggcgcgtgaaaaagaccttctttctgaagttcaggatagggtgatcgatttcgtcaaatgctatcccctgcattga

SEQ ID NO: 167683 - DNA, 1122 bp, Enterobacter cloacae
atgggcagtgaagtatatcaaagccaaaaatgcgaacttaaatattcgaaatctcaaatagaaaaagcagccagaaaaattagacatggttgtgagggcgcagagcgagaagaagcaattaaaatgattcaaaatttccgcgagcttcatttatatccattgatgctaatgaaaaatcatcttgatagggctgcaaaaaaagttgataaagagaataagattattgttgcaagacgcctaaaaagacttagcacaataattgataaactggagcgtccaagtcttgacggcggcgcaacaaataatgcaatagcccttactagaatgcaggatattggcggatgtagagctatagttagaaacatcgaacaactaaagaaactaaaagaccgactagttaaaagtcgctccaagcataaaatcttaaaggaatatgactatttaactccaaagccaagcggatatagtggcattcaccttgcatatagttgttttgatgaagaaaacggtaacaatccgtggagtaaaactaaaatcgaagtacaactaagaacagaactccaacatgcttgggcaacaagtctggagataatagatacacttgaaaatattaagctgaaaacttctaatgaaggtcaccctgagtggagaagatttttttatctttctggatgcctagttgctcatgatgaaggtgcctgtattcttgatgatgaaaccatcaaaaattatcaaacagagcttaaaacattggaggaggctttatctgttcgctcaaaattaagtacatatacatttgcaatgaagctgacatcagatgcaaacctaaagaaaagcctgcccaaaaaccataatggattctttttggtgaggatgagaaacgccataacaaaaaatggcaaggatactggaaagtttcttgtttctgtgaaaccttttaggaaaaaagaatcggaacaagccctccaggaacttaataaggatgatgcggatcctgaagtattaattgcggtgctgcttgccactaacaacattaaatctcttaaaaaggcttatcctaactattttgggtcaacaaatcagttcgggagattccttagcagacacattgatactgtgtaa

SEQ ID NO: 167684 - DNA, 285 bp, Enterobacter cloacae
atgcagattttgatttttttaatgtccattattagtggaacctatttatttcttactggagttaggcgtggagcttataagccatgttttttacattggcttgaagcatggctgcttgccataaaaggtggttttgttggtttttgtcttgcagaagttcagtggggaaactcatttttggatgtggttgcttttttgatatgtagttggaatagccattttgtattaagaataaccaaaatatgggtttttcacttgatttacgaatgtattggcaaattatga

SEQ ID NO: 167685 - DNA, 531 bp, Enterobacter cloacae
atgatgcagcatttaaaaaatattaagtctggaaatcctaaaacgaaagaacaatatcagctaacaaagaattttgatgttatctggttatggtccgaagacgataaaaactggtatgaggaagtgaaaaactttcagccagacacaataaagattgtttacgatgcaaataatattattgtcgccatcactaaagatgcctccacgcttaaccctgaaggttttagcgtcgttgaggttcctgatattacagccaaccgccgcgctgatgattcaggaaagtggatgtttaaggatggagctgtagttaaacggatttatacggcagacgaacagcaacaacaggccgaatcacaaaaggccgcattgctttccgaagctgaatcagtcatccagccgctggaacgcgctgtcaggctgaatatggcaacagacgaggaacgcacacgactggaagcatgggaacgctacagtgttctggtcagccgtgtggatacggcaaatcctgaatggccacaaaagcctgaataa

SEQ ID NO: 167686 - DNA, 441 bp, Enterobacter cloacae
atgcgaaaccagaatgtcatttttggtagaaacgcagtatcaacaagttctgcgcaggctttgttaagacaagaccatgcagaacgcaaattttttgtcggtggacttggtaactaccagtttggtttttacatgattaataactcaaggacagccaatggcaccgatggtcaggcgtacatggataataacggtaactggctttgtggctcgcaagttattcctggcaactatggcaattttgattccagatatgtgagagatgttcgcctgggtacgcgagttgttcaattgatggcgcgtggtggtcgttatgaaaaagccggacacgcaattaccggattaagaatcattggtgaagtagatggcgatgatgaagccatcttcaggccaatacaaaaatacatcaatggcacatggtataacgtcgcacaggtgtaa

SEQ ID NO: 167687 - DNA, 516 bp, Enterobacter cloacae
atgaaaaaccgcataatgattgtcggcggcggcacgggaggaaccattgttgccaacctgctggccagaaaattacgacgtgaaattgctgccggtcaggtagagctggtactgatttccgaatcaccggtgcactactacaaacccgcctttatgtacgtcgcctttaacctcttccatcatcatgagctggcccggcctgaacggcagttactgagtccggaaattcgatttattaccgataagattgagttgttcgattttaaacagcgtcgactgtacggtgccagtaagcaacattacgactgggatctgctggttatcgcaaccggctgcacgcctttcccgcaaaaaatccctggccttgccgaagcgggcgatcatttttatcaatacgcggcggcaagacaattagcgcataagctctccaccattaaaaaggggcgaatatttattaccgtctccttcccggaaacgccgaatgttcccccatcagtgcggcatcgcccccattga

SEQ ID NO: 167688 - DNA, 468 bp, Enterobacter cloacae
atgcttccattcatctttgtagagaaatttcccttgtacgatactgcagaagtatttgtcgtgcgaatagactcgactattgaacttacggaggagtttttgaagtctttgtattatttattatggtttcctggatactttggttttaattgggatgcgttgtatgactgcttgtgtgatcttagttggctaccatgcagaaaaatcgtgcttctacatgattccctacctcaaataccaaaagttgatttgcagatctaccttgagattttgagggattctgttcttgattggataaatgatgaggagcatgaattggaagtcgtgtttctcgcctctgaccgatcgttgattgaaagtttgattatgttaaaaaaatggactagcattgtgcgcgtcataaatgcctatcagcgaaaaagttgcagtggcagatataacttggctaagaataacggtaaatattag

SEQ ID NO: 167689 - DNA, 948 bp, Enterobacter cloacae
atgtatagcccttatttattcgctcgttcttcagagttgttaagtttaagagatattgcttccacagctcccgatgtaagaagattattacctatactagaacctgtaaatgctaatttatctagcttgtcaacttgcttggatatttggcatggcgatatagtagttataatgaacccatatcagaatgaattttctggtaacccacatgcagtacaagcattatatacacacatacaaggtttaatgaataccaaaccaaacataataattggtatattggtcacagcaagtacaaattttcaatcgctaatacaatatataaatagtaatcaaaatcgtagaattgctttaatatatgataatgcttctttgagtgatgctgagatatcatccttatcctcactttcttcagtgcattatcatgtaattttaaacaatactctccatcatcatcaatacggtttgctgccaataagtaaaattattgttgtaaatgattgttttaggaagctagctagaaacgcagattataatggaccggagccatttacaaatttaaatcaatatgtaggttcaaatttcttgggattcggagattataccattacaggaagagtttttgcccctggtggaggacaaccatcggctgttgcagcacatttaatatataaagagataacgagtaattctatttggattaggcattttgtatctgctaatacacaaagaggtggtgcagatgtggcaacaatgtttttagatgtatcagatcaaataacacagtttgttcctcagcatatcgatcagtttggaaataatattggactgggccattattatgattgtagcaatagacggcattctccaggtttggcgaaaaataaagagtatcaaatttcgcatcatattagttttatgttagatttgctgaatggtagaatataa

SEQ ID NO: 167690 - DNA, 795 bp, Enterobacter cloacae
atggcggcgatggcgtcgaaaacggcgaaggtggaggttgagaataactcgctggggatcggacagaaccaggaccgtattaaggatctatctcagtgtcaggggaatttgggttgcgaaaccggggttactgagaagtacaaacaactgaatgctgagcagcataagagtgttgttgaatgcaaaggtactcaggcctgcgttgataaggctaacgaagttggtggactacagacggcatatgcaaaccgtcttggcgaacttggtgataagcttcataacactggcaatctgactacggaagagaagcaggagtgggcttatcttcaggccgtgctaccgcaacttgaagcggacagaaatgcagctatccgcaatgcgctgatgtccggtgattcgaacgaagcgaaacaacttgccgttaactcactggcgcagacaattggaaccagtgccgcaggtatcgctgccgggattaataaaggtggaaaatatcagccaaatcatggtgctgtcgggaatatgaatgaatttctgaaacaacctgggttcggtagcgatgttaaaaatactgcacagaagtcaagtcaacagtatcaggggcaaagtgtttacaaagcaaccggagatattggcgactatattaagaaaggtgaccaattttatctggatgggcagcataaaaatcacattgaagtttttgataaaagaggcaattttagggttgtactgaatctggatggaacaatcaatgaatcaaagactaaagctgcggaaggaagaaaatttaaatga

SEQ ID NO: 167691 - DNA, 333 bp, Enterobacter cloacae
atgattgatattcttgaagagcttaaatgttgctttacaatgatttcacctgataaaaatactcaggaaaagctgagtatttcatattcatgtgaaaattatgatgattatgccaatgagtttaaattagcagtgacgttgttaagtcagacgatagagaaaaatgacaaaatagctattcaatgtgcactaactagggtcagagtagcttctttaaatctctctaatctttatctggatattattgatgatgctatattcatcaataaacatgattcatggccagatattccagagggttacaggcttccggattcatattctaaaaattga

SEQ ID NO: 167692 - DNA, 516 bp, Enterobacter cloacae
atggttagcccctgcttcaccgaaattagcccggcattcaccagttgcgggatattcagcttcagcccgctgccgctgatgattttccccccgctctggttagccagccttgcggaagcgagctgcaacgtttgtccaccctgcagcaggccgctattgtcgagggtattcgcgttcaggttcagagcggatgaggccactcttccggcgttattcatcaccggagcggtcaggtcgagagtattttcggcgagcacgctgccggaggccgtgttggtaaatgcgttattcagcgtcagggccagcgttcttgcagccagctggccgtcgttggtcaaggtatttcccatcagcgttaacccgttgcgggccgtcattttgccgctcgcgtggttatcggtacgcccggtaatggcaagcgttaaggcatcgctatccagagagccgctgttggtcaactggctggcattaagctgcagggctttctgcgccagcagcgcccctcctgcctgctga

SEQ ID NO: 167693 - DNA, 447 bp, Enterobacter cloacae
ttgctgagcggagatcgcgccagaattaaccagctgctgtacggtaatggacaggccgctgcctgcctgaagagtgccggaaagccggttggccagcgcaccgagattcagatccagcgccccgccgctttgcaaccagccgtcgttattcacgctgttgccgttaatactcagattacctgccgtgacgccgccgaaattagcaaactgcccggcgttcacgctgccggtctgctggctgacaagccgcccgtcggcgaggttagtaaacgtattgcggacattgaccgacagattgtccagccccgaaacctgcccctcgttgctccactccccggcgtcaatcgtcagcgttttgccctgaacgctgcccacgttatcaaactccgggctggtcagcgccagcgacgcttccgccagcagtacgccacctttctgattacttaa

SEQ ID NO: 167694 - DNA, 603 bp, Enterobacter cloacae
gtgaacgtcaacgcagcgctgccctgcaatacaccgctgttgctgatgctgtccgattgcaggttaagcctgcccgccgccagctgcccgctgttttcgaaagcgccagcgcgaatatcaaacccggcctggctgagtaacgttccgctgtttgccagcatgccgctgacgttcaggctagcgccttgctggccaagcagcgtcccctcgttattccagcttccggccttaacgttcagcgtctggccctgtagcgtgccggcgttatcacccttatcaccggcaagcgtcaaatcaccgccgcttaacagctgtccgccaatcaggttattaatcactctggcagcaggcgtctgcgcggagttagcacttctcagtcctgaggtctgtgccgcttgtcccaggatcgccagcccgttgttaccctgcaccagaccgctattattcaggatcccgacagccaggcgcgcattatctgccgccagcgtgccgctgttggttaacgtattgccgtcaaaagccagcgcctgggttgcaagcactttgcccgtgtcccggttggtcagagcgttttttaccgcgagggtcagcgtgtcgccctga

SEQ ID NO: 167695 - DNA, 762 bp, Enterobacter cloacae
atgccctggttgtcgagattatcgaggttaagcgtaagcccctgctgtgaaagcagcagcccctggttggtcaactgcggcagagtgagcgtcagcgccccgccggtaataatttgcccgccggtcttgttgttaagcacaagggttgatggcgtgagggagttcagcgccagcgcgctgttgccctgcagcaagccgacgttggtcagcaggttggtgatgatattcaccgaatctcccgctagcgtgccctggttattaaggctggccgcgttcagggtcagatctttttgtgccaccaggcgtgcattgccgcggttcacgacgtcgccggagaaacttagccccacgcgactgccttgtaacgttccctggttatccagggtggatccggaaaggaccagcgcctctttgacagacatcagccccagattgaccatctgcgggatggagagattcagcgagctgccgctaataatttgcccattcaccagattgttgagccgcggcgtgtgcagccccagcgcgctgtctccctgcaggatgccgttgttgtcgatctggccgctagtgagatcgacactctttgcggcaagcacgccgttattcgtcaggctggcgctttggctgctaagctcacgagccgccagcagcctgcccccgctctggttattcagctgttgcgcgacgttaagatttaacgctccggcagacaatgtgcccaggttgtcaaagctgccggtcgtcagcgtcatgtcctga

SEQ ID NO: 167696 - DNA, 357 bp, Enterobacter cloacae
ttgcccctgcattaccccaccattcgcgagctgaccagccttaagcgtcagctgtccgccggtaagcagtttcccacccgtcaggttgttcagcgtcggtgcggtaatcgacaacccaccgtcgccctgaagcacgccgcggttattcaggatattgaccgccagcgtggcattactcgccgccagctgacctgcgttatccagccgtgcggctgtcagggtcaagccctgctgagcgagcagtcgtccactctgttggttcgtcagctggttgccgatgttcaggcccagatcgcgcgcctgcacgatgccctggttgtcgagattatcgaggttaagcgtaagcccctgctgtga

SEQ ID NO: 167697 - DNA, 1047 bp, Enterobacter cloacae
gtgagtctggtttccggcagaaatcgcgacgttaccccccgtcgatcccaccgtactgaagctctggctctgggtggtgcccttctcacggagatcgtgcgtgcttttgctgctgccgatggtgaagccaatcccacccgagcccatcaggccggattttttctcttccttaaagcgccaggaggtgtcgctgttcgtggccgccacgatatcgacgttgttgcccgccttaagctgcacgtcgccatcgcccgccacggcggagccgaacacccgcaggttgttgcccgccaccacctgcacgttgtcgccgctcagcaaggagccggattcacgcgtcgcgctgtcctcctcgatggtgtgggtggttttcttgctgaggaaaccttttttggttttggtctgctctttgtagtgataatcgctttcggttgcggtattgagattgacgtcgcggcctgccgccacgccgatatcgcccttcgccgtcacctgcgcggcttcggtggtgacatcgcgtccggcgaggatttgagtattcgccccgctggcgatctcggttccctgctgacgcacggactggttgatctcgacttttttcttcgcgctgtacttatcgctggttgtggactctgccgccagcagatcgatatcccgtccggcctgcagccccacgcgatcctgggcggcaagcgccgcggcgttactgcgcagatcgcggcctgctgcaagcgtcagatcgtcgccagcgctaatgaccgtacgcgtattatccgtcttcagggaatccgttttcgcggtctggctgtggcggctattctgcgccacgtccagcaccagatcgttacccgcccaaagcgcagcgctgcctccagccgtcagattactgcccgtaacgttcagatcgcgacctgcctgcaggccaaggttgcccccgctggtgatcgtactgccctggttagtgacggtctcattgagattgcggccataacggtcacgcgtcaccagttgattccctgtaacagagatatcatccagcgcttttag

SEQ ID NO: 167698 - DNA, 588 bp, Enterobacter cloacae
atgttgctaaataaaatagtgaatgccttccatttatttttttcacaggttaagtataaaacctgtatgaaatcttttgggcatcgtagtaggattatctcgcccttactcattgcaaatccaaaatatattgaggttgggcagcgagttttaataagaaacggtttaaggctagaagttgttgaccctcaaaatgaggttgtcatcagtattggtgataatgtaaatattgaacagaattgtcatattattggtcgtgtaaaagtagctattggcaacaatgtaactattaccgggaattgttccattgttgatgtgagccatcccttcgaaaatattcatgatacaacaaaaattggtgaccgaatttcaaatattcaacggccagttaccataggtgatggttcttttattggttttggatcgcatatttctcccggtgttacgattggaaaaaattgcgtcattggtgctggttcagtagtgactaaatcaatacctgattattcggttgtcgcaggtgttccagccaagattataaagtattattcatttgaagagaataaatgggtcagcgtacgaagttga

SEQ ID NO: 167699 - DNA, 522 bp, Enterobacter cloacae
atgatcggtttactcaatcgtttgctattaaagttgaagttagcaacaaaattccgaaataaaattcaagtgggtgataatgtattcattcataagaaccccaccttcattgtgagatcgaatgaagatcgcaacggtatctttatccatgatggggtttatatcggcagagatgtaaacattcatacagcctctaagattgtgatatcaaaaaattgcgttattagtgattatgtttatataagcacgctagctcatggtatagatcctgaactggggcctatcctcacccagaaggatattgacaaagggcagatagttctcggtgagaacgtttttcttggtttcaatactaaaatcttgccaggagtaacactcggagaatggaccatcgtaggggcgggggctgttgtcacgaaatccttcccaggcttttgcgtagtagcaggtaacccagcccgcattatcaagatgtacaatcatagttcacatgagtgggaagcagtaaatgttgctaaataa

SEQ ID NO: 167700 - DNA, 894 bp, Enterobacter cloacae
gtgaaaaaagttggactcgttactgttttgttcaattctccaggtgtgctgcctgacttttattcgagtgttgaaaaacaaaaatatcagaacaagcatctttatattgtggataacagtacaaatcaggattcttttaacttaacgcaagaaattctcttgaggaaagacatagagtatacctatattaataatgacggaaacaatgttggggttgcgcaggccaacaaccaaggcattgaagaagctttaaaggatgggtgtgagtatatattactcactaataacgacctactttttgaacaggaagataccctcagcaaaatgatgagtgttgctgaggagggacaatacaaacttgtttcacctgtaatattcagttatccagaaaaaaaagtctggtacgcaggcgctttttttaataagaaaaaagctattgcccctcatctttttgagggagccgactacgatgaaatttacgctaatattccagaagagtgcgattatgcaccaacatgttttttacttgtacatgcttcgatgtttgccactataggtatgatggatgctcgttactttgcttattacgatgatactgattttctctatcgtgcaaacatagctggcagccgagttagaattattaatgaacctctagtgtttcataaggttagtacttctactgggggggggttaagtctatttggtgcatattatttgacaaggaatcgtatatttttcgccagaaaaaatattgaagctccttattatattgttagcgttttctttaccattgttacccggttggtctatccactttgtcgcaaaacgccatataaagtttataaggcttttgtcagggggattatcgacggactaatgttaaaaaaataa

SEQ ID NO: 167701 - DNA, 717 bp, Enterobacter cloacae
atgaagtcctgtcaggccagcggcggtaattgtgatggcattataaagaaatatgaggaactgagtacctctcagcaacagcagcttatcagagactgtgcgaccaatcctacgacttgccagcagaaatatggtgatgtgctggctgatagcatggcggtaaagcatgcactggataaagcactgggtcaggacattccggccaagatggcttatgacctgacagcaacatggatgcatcagatccaggctgatggagttatttccaccaacaaagtctcggaagctcttcagaaagagtatggactggatgcgattcaggctgatattgtagcgggtgcagcggcggcggctttcggaggaattagtaaggctgggaagggaagcgcaatacctgtacctacccctatgaaagctaataatgggttggtatataaatcgaatccaaaacacacgccgggtcagtcaagtaataggcctaacgctggtattgaacctcaagattcacttaagctttttgagcaatcaattccgagtacaaaacaatattcaaataaggaggttagatttgctgttgatagccaagggaatgtgcatcgctttgtgggtacgaatggcgagtatcattggaacggaagtactgcagataagaatgctttgactagtgaacaaataccaactgcaatccagaaacaattgggagtaagaataaaatga

SEQ ID NO: 167702 - DNA, 462 bp, Enterobacter cloacae
atgatttatggcgatccatttctttttgctctccagtttgacgttgttgaatgctggaacgatccggatgatatctggaaaaacggtctttttgctttatatattgaaggtaaaaaagtgtttgataccgtagacgcttttgagttacgaacgacgttcagcttttattcaaaggcaccaataaatcagctttttatcaatgatttagatgttagtgctggtgagctttacaacaatgcaaaagattattttcttggagacggtgaaaaattgattgatgggttatttgatatgacatgtgtccctatggaagataaccgttgctatctttactttatcaagacaagtgctggagatcggcttgtatggagtgctgattctagcgatcgaataaacgaaaaagttctcccgtcaggaacaatccttaatgtaattaatagattacaagattgtcatttataa

SEQ ID NO: 167703 - DNA, 321 bp, Enterobacter cloacae
gtgatacagcacgaaggactgagcaggccgctggaaccggcggagttttccgacagcaccttacgctttctgtgtctggcggtagcgctgctaagcccgcgcccaccggcgtttatcgcattgaacgaaccggaaaacagtcttcacccgcagatgctgcccgccctggcgagcttaatcgccgaggccagccgctacgcgcagatctggctcaccagccactcgccggagctggcgaagttgattgagaagcagaggtcgttctcgctgtaccagctgtcgatggcgaagggggagacgagggtggagaggctggggtaa

SEQ ID NO: 167704 - DNA, 741 bp, Enterobacter cloacae
gtgggaacccccacccgagatggcgcgaacagcacttccggcgctcaggtcgctcgaaagattccagccgctatttttagtgctgctgccgtatttctcgctgtctgtggaggtggtgatatcaacgtcgcgtttcgcatcgaggatcaccgtttcaccggccttagcctggctcccggcaatcaggatattgccgctgttgctgcctccctgtttaccggtggcagtcatctggatattgcctgcggcggcaagatggctgccgctgttaaactcgccctcgtagtgcgactcagaggaagagcgggtgcttcctgcggaaatggccatcatctggcctggtccgtcaagcgcgagcgcaccgccttccgcccccagccccttcactttatcgacggtgctgttgccactgttgcccttaccacgaacgatatcgcgcacgttacgcacagtgtcttcaaatggcgctttcacactgaccgtgacgccagacgatttggactcctgcttcatggactcagtggtcgtatcccgtccaggaaggatggcaatgctgtcgccagtgatatcgatatggccggttttgctggaggaatcatccttcgctcttccggcaaccacatctgccgcgctcaactggacgtcatttccggcgctgatgatgacattgccgccagcagtgcccaccgtgctgcgggcatcgctctgcgtcgtatttgccccctgtcgggtgctttttga

SEQ ID NO: 167705 - DNA, 642 bp, Enterobacter cloacae
atgggctggatggactctgttcatgaagaagttatttgcggaagtatttctgatgatgaaaatttctcaaaaataataaataaattatcaggaatcaaaaaaacatattctgataaacaattgtggatactgggggggcctccatgtcaaggattttctacggcaggaaatgcaagaacaatggatgatccaagaaactcactcttcatgcattataaatccctcttggatcagataaaaccaaacggttttatttttgaaaatgttgctggtctgttgaatatggaaaaaggcaaggtgtttgaaagggttaaagaagaactatcatcaaccatgaaaactatgaatgggtgggtattaaactctgaacattatgcaattcctcaacgccgaaaaagagttatattagtaggttcaaacgatcctttattttcaatcgaacctccaaaaaaaataacagagcaaaaggattcttgggtttctgttaaacatgcattatctgaccttcctcctttacagcatggtgaagatggaattggtaaatactatatccatcaacctgaaaatgactatcaactgttcatgagaggttatatcactgcttcagagtattataacaggaatgtaaagccctctttttaa

SEQ ID NO: 167706 - DNA, 252 bp, Enterobacter cloacae
atgcacaaggaaaaggaagccgttcaacctactacggtagattacttccagatatgcctgcatatactattaatacttattttaaccggcctggaaatggttgtcatatccactatgagcaaaatcgtgtcctatcccagagagaagcagcaagattgcaatcattcccagatgattttattttctgtggagggcaaacagcagttaatacccaaattggtaatgccgtacctccatttttggcttttttga

SEQ ID NO: 167707 - DNA, 432 bp, Enterobacter cloacae
atgttcggtgtcgcgactcagatcggccacgtcctgcttctggtttgccttgtcgcggatggtgagggagccctctgccacggcggcctgcgtggtgccttccttatggcctttattacccgcagcggagatcatgccgcccggcaggctgccctggaatttatccccgaagctgccgccgccgctcaggctgataccggagtgcgaggttttaaagtccgcttcgttgtggatatcgctgaagccgagcgttccggtatcgaggctgtttttgtccggcgtggcggtggacgcgataaccgcgccatcaagctgggtgtgatgccccacggtgatgtcgaagcccccgtccccggcatacagcccggtttgttcggccaccgaatcaaagcggctcttcatcttgtcctggctggcgttgatatagcctga

SEQ ID NO: 167708 - DNA, 558 bp, Enterobacter cloacae
atgaaaaaaaaaggtattgcgctcgatttcggttgcgggaaacttagatactcagaacaattggttgaaaaatttgattctgttacgtttcttgactcaagaaaacaaattgagagaaaccagatgataagaggcattaaaacatcagttattaactatgtatctagtcattataaaaaagctagcgtagttccttttgaagaagttcaaagcatagataataaatatgattttgtactttgttcaaacgtactttctgctataccatgtagaatgactatagataaagttctttcttctataaagtctttattaaaacatgatggtgaggcccttatagtcaatcaatataaaagctcttactttaagaggtatgaatcaggaattaaacatttatatggatatatttataggaactcttccagctcatcttattatggtttattagatgaatcttcagtcaggagtatttgtcaagataatggactttcaatcgtcaaatcatggagtagggaaggaagttcatacgtaattgtaagagttgaggataataactaa

SEQ ID NO: 167709 - DNA, 162 bp, Enterobacter cloacae
atgcagagggagggtcacgtaattttaattttcattcaaatgaaagtcattcttcacttcatcatgcaattcgactggtcagaggagttaggcgaccaaaagatggattctttctcagagcagaaagtttttataatgttgcaactgagattgatagtttag

SEQ ID NO: 167710 - DNA, 816 bp, Enterobacter cloacae
atgcgaagcgctcctaacgttaagcagttacccaaagatgtttttactgaagccattatttttgctggcgctgacgcttggagtcatgcaaaacattggcaggaagctgctggccctgcggcaggtgataatactccgcccgtttaccttgggccaaagcagctggctgaactgaacaacttgcgcattattgatgatggtcggcgttctgcgcgtgtataccttgctggcgacattgagccgataaaaatcaacgctatcgctgaaaagctggctttggctggggttaaggaagctcgattatttaaaggcattcctgaccgtgagccagagaactggagcaactatttaaccaggattcgtgacgaccaccagcgtggtgaaagtctggttgagatgttgtccgaaccggttcaatgccttccgttagacaagccagtgccaacgccaggggatgtctaccatccagatcacatcgactggaaacgagataaagttacgcaggaatgggttttccataaagcaaaaggcacagcggaaaatttatcaaggcttatgaaggcatatggcgttcgcgttcggtacaacgagttatcacgcgatgtcgagattagcgtgaacggcaacctgccagccggagacctcgcgcggaacgtgtccctgtcaaagattgaggacatttgccgcatcaacgattacccgtacacagcagcagccagccatctggatacggcagcagcaatctgtaaggcagcgcagcatgatgacggatggcgttctaacaccataagcgttgtcagtacagttgcaacataa

SEQ ID NO: 167711 - DNA, 282 bp, Enterobacter cloacae
atgaagaagctaacagttaaccaggctatcagtcgctacaacgcactgctgcgtaatcctgtgcgtcatctaactgtgggagaacttacagcacaacggatgttggcagcacaaacattgttattgctttgcatccaacgtggtgtaacgcgtccttggacgattatcagtagtcatgcagaaatggccgaaacactcgtcccgttccgtattagcgatgctgacgcatgggcaatgtatctcgaccttaagcgcgaggtgcaagatgcgaagcgctcctaa

SEQ ID NO: 167712 - DNA, 549 bp, Enterobacter cloacae
atgtcaaagtttacagagttgtgcacagcatatactgattttcggaacaaactttctgatactcgatttgctgcatttaacttttctggtcacgtgattaaaaattatttagattatcttgggattgataatgacgaagcatatagattaatcccgctagataaagatgaacaaccagatgcgaaatacacacccgctggggctactcatttaggggacgatgggttctggcatttagggtttatattgaccatttataaagacgctaatacttaccctcagtcacctttccaaattgatttcaaattcagaaaaaatgatgatgactcatatacatttggtgttgatagcatagattttgcaacaaaaatcacctctctccgtaaccccaatgaattcacacctgtatttgataaaattcaagagtgcattcttggtcatttcaaagaatttgaagacttccttattggtaggcatgacaagatgtcatccattggattcattcaagaaagtatttttgcgaaaatcaatagcgaaaaaaatgagtaa

SEQ ID NO: 167713 - DNA, 576 bp, Enterobacter cloacae
ttgatacttgatactcatgtgaataacgacgagttactggatagaatttgtcaagtatatggtttcactcaaaaaatccagctagcccggcacttcaatattgccgccagttccctgcaaaaccgctatacgcggggcactgtttcttatgatttcgccgtacagtgcgcactcgaaaccggagcaagcctgctatggcttcttacggggcaaggctctcaatatgatggcaaaccgtctccaacggatccgaaaacgatagattcattcactcttagtgatggaaaactcgaagaaaattcaccattgagtattgacgccagcttttttagcaagcaaatgacaaagggtattgctgttcgcgccgatggaaagctgcacttcatagaacaagatgcctcactttctgatggcctttggttggttgatattgagggggctaccagcatcagagaattgacgctcctacccggcaaaaagttacatgttgcgggcggcaaagtaccgtttgagtgcgggatagatgagataaaaacgattggccgtgtagtgggtgtatacagcgaggttaattga

SEQ ID NO: 167714 - DNA, 948 bp, Enterobacter cloacae
atgacattagtaagatctgaacatgagttagagttagccaaagagctcttagatgacattgagctgtccagacttaatgcagaggcgctattccttaaagctgcaaggttagcccgcttatgcggaaccgaagaatttaaaaagtggattggcttcgaaataagaggctatgtatcaaatgaagatacctcactgaaatttatgacaaaaacaggcagatggaccaatcgagaggaaaagaaagggtattgggctccgattgctcaaattgaagcaattataaattctcagaccttgaagttaaactcattaggaactcctaatgttagtggcgtttcaatggcctacccaatcatgaaagaacatcgcgacctcgtaaacaacgtttcaaactcaatctcgacctattcaggaattaagagccgagcgctgggtgttctacacgattttgtttcagccatatattatgaaaaagaactggaccatttagcagaatctattttcgagagatataaaaaagacatagacacattaatctcagatttgtgtgctgaagtgctccaacaaataccttccgtcgtaaatcggttagctgaaaaggatgaggagtcggtgagccaagctcttaccaccgtcagacgtataattgatagcttcgcagatgctatttttcctccaacggaagacacttacgagataggtggagaggcactaacactaggtccaagtcgacatctcaatcgcattaatgtttttgttcatcaacgaattgaaagcaaaggaagaaaggataagattcgccaaaatctaaaaaacctgtacgcccgagtctccaccggagttcatgctgacgtcacgattgaagaagcacaatctctttttctaaattgctatctattactcggtgaaatccttcacatagggactctagaaaagattgaaagatga

SEQ ID NO: 167715 - DNA, 987 bp, Enterobacter cloacae
atgggacaactcgtagacggcgtctggcaggatgtctggtatgacaccaaatccaccggtggacgctttaagcgctctgtttcggccttccgtaactggctgaccgccgacggcgcacccggcccgagcggcgaaggcggcttcgcggcggagaaagatcgttatcatctgtacgtttctctcgcctgtccgtgggcgcaccgcacgctgattgtgcgcaagcttaaaggcctcgaatcgttaattccggtttcggtggtcaacccgctgatgctggaaaacggctggacgttcgacagtgacttccctgccgcgacgggtgatgagctttatcatcacgatttcctgtatcagctctatctgcgcgccgatccgcactacaccggacgcgtaacggtgccggtgctgtgggacaagaaaaaccagacgatcgtcagcaatgaatccgctgaaatcattcgcatgttcaataccgcgtttgacgcgcacggcgcccgcgccggggattactacccggttgagctgcgcgagaaaattgacgagctgaacggctggatctacgacaacgtcaacaacggcgtctataaagcgggctttgccaccagtcaggaagcgtacgacgaagcggtcggcaacgtgtttggatccctggagcgcctggagcagatcctcggccagcatcgttatttaacgggcgatcgcctcaccgaagcagacatccgcctgtggacgacgctgatccgcttcgatccggtgtatgtcacccacttcaagtgcgacaagcatcgcatcagcgattatctgaacctgcacggtttcctgcgcgacatctatcagatgccggggattgcggagacggtcaattttgaccatattcgcacccattatttccgcagtcataagaccatcaacccaacgggcattatctccattggcccgtggcaggacctggatgaaccgcacgggcgcgacgtgcgtttcggataa

SEQ ID NO: 167716 - DNA, 1011 bp, Enterobacter cloacae
atgcaagttgttaaattatttttgctggttatcggtttgttttccggtgtatcaggatactgctgtaactatagttttattggttcaccctatactgttaactatggcaacatcgtggttcagcgggacctggcaataggccaacctatatctaatgaaatttatggcacattagctcaagcttatatatgtcaaactagtggctcggaaggttcaagtacaggtatgaaaagcgtaatactcccatataaatttacttcttccagtggagtcagggtttatcaaacaaatgttcccggcgtaggtatatccttcggctggtatgagcaaaccactgcaggtggagcgggattcacagggaataattatattcaaacaacggatactcaaatttattcatggaccagtaaccctggcgaagttgataactttaagttccagccaattatacgtttatggaaaacaggtaatattacctctggtgcgctatcagggcagatagcagcttttattgcatatactgcccagtacggcggtggctctcaagtcagcaatatacctatttatgcaggctcaggtagtattactcaagtggcatgttctattacaacaccaaacttagtatttccaataggtgatgtgcttgcatcaagttttgggagcagcatagggactacacctgctaatgcaagtaatattcagaacctcggcttgaattgtgatgctggtgcaaacattaacgtagcattaaatggaacgcaaaatcctgacgttggaacaacaagtatattagctttaacaaaccagggaagtgctgatgtggctaaaggcgttggtgtgcagcttttatataatggcagcccatttatattaaataaccgtattgtgctgaaaagatcgtcaggcggtcaggaaaccttccctcttaccgctcgttattatcagaccaaaacagccgttactaccggtaaggcaaatgcatcagcaacgttagatctcacttatcaatga

SEQ ID NO: 167717 - DNA, 144 bp, Enterobacter cloacae
atgaataccaaaatcataaccggtgccaacccggggataatatctgcactagggacaaaacccgtcgctgacattgacaaaataattgaacaaatttctccatttgcgacaagcttccgggctaaaaaaggcgaaatttggtaa

SEQ ID NO: 167718 - DNA, 849 bp, Enterobacter cloacae
atgcgtcaactcacccgaacgctactcacactgtttgctgctgtccttgccctgtggctggtcgtgggtttctggccgctttccaccgtcagccgttctgtgctcagcacctgtattctgctggtctgcggcgcggcgctatggcaccggtggcggcgtcgccagttcgtcataccggtaacggagcatgtcctgcccccggaagattttcagggtgcggtggtgctggcctgcggcgatacgaccagcctgttccctcccgataccgtttatcgtgaaacccgtcagggctggtacatacacgcgcaaaacgcagaacagctgccgctgctggcgcagcatctggcggctgtccgtccggcgctggtgtcgcaggtctcggtattgctggcgctgataccggaacagcagacgtcggaagaggcactggcgcagacgctccgtggctggcgacgcagtattacgcagtgccggaactggctgaacggtgttccgccggtatggagcgtggcctgggtgtcgccacctgaccttcactctaaagaagaggcgcagtggtttaccgtcacaccggagttaccgggcgtgcgggtgcggcagaacggacatgtcgccctgccggtgacggactggcagtgggagagcggcagccgcgcctcacgcctttatgacacgctgtggctggacagcatactggcgctgatggcgcaccacctcacccggccactcagcgccagacagggtgagcttcctgctgcacctccgggcgttcatccgactgcgcatccagaagtccacgcaggcgctcaagctggctcaccagcttcacgttctcaagcttcgtgttga

SEQ ID NO: 167719 - DNA, 744 bp, Enterobacter cloacae
atggctaaatactcagacgaattaagaggcgttgtccgcgcactttacctgcgccgctatacgcctaaagaaattgcatcagaattaaatctgccgaatgcgcggatcgtttactactgggcggagaaatataaatgggctgacctgctcagtttcgaaagtacagaggaggcaattgagcgccgttaccagctgttagcatcccgcgacaataaaacggacctggatttaaaagaaatggatttgcttattactcacgccacaaagctgcgcgcccagagcaataagcataaagaaaagctggcctccagccagggggaacggcaggcagctgcgcgaggggatagcgaggatgaaccgcgcggcaaacgcaagtacaagaaaaacgatatttcgtctctgacccaggaagattttgacacctgggcggacgaacatcttttcgaatatcagaaacacctgcgccgcaacattggccagctggtcaggaacatcctgaaaagtcgccagatcggtgcaacctggtactttgcgtttgaggcgttcgaaaacgcggtaatgacgggcgatccgcaaatattcctgtccgcgtccaaagcccaggcggaggtgttccggtcatacatcgtcaacattgccgaacagtatttcggtatcacgctgaccgggaatcagggatcaaaggcgaatagataccctgcacacgctgaacatcttcagcgtactcgttaccctgttctgtga

SEQ ID NO: 167720 - DNA, 297 bp, Enterobacter cloacae
atggaattgagtaagcaatttactaaagagcagttaatagaactggcgcaggatgatattgctgctatcagttccgctcttcaattgaacatgagcgatgaagcgaatgagcttctccaaaagtcgctggctaatcatgaaatcgcactagctgccctcaccatgccagaggtcgttccgcgcccggtgtttgatgttatttatcaggaatgtggcggttttgttgatagcgacgcaaatccgcaggttatttgggatgcttgccgcgcagccatgctcaaaggcggtgctaaatga

SEQ ID NO: 167721 - DNA, 720 bp, Enterobacter cloacae
atgggagccagttttggggtgggtccgggaggaatgagcggttctcagaaggtagaagagtcacgaaaagttgaaacagatgctcctgctcaaattatttatcgcatagataaaaatcgatacctgacgctggaaaactacatatcctgtgataggggtggacaagtatattacaatgactctcagaggggaataaaaacacacctgggatgggataacgatttttatgatttctcatatcgccggggaaataatattgcggcttatcaaggctctattattaatggggcggataatggttatctggcattccctggcgcatctaccagacaatattgtggtagtggaaggtcagaaacaggttgccctgtgtttttcttcttttcagcagatcatgggaacacatttatatataaaattgtagctatggaatacagcaccccagaacgttttagtcagcttaaagtagtagtagctaatgatggtgtttatctaagggatgagtctaaaacggaggatagctattctcgccctacaggtctcaatgaccttagctcagtgaataaattaaggttttctgacggcaatttaatcagtgtttatgatgactggcagaaaaaaattgatgagttagtgaaagaagaactgataagaaaaaaatgccctatgcaaacgagtatggacctagatttcatatattcgactatctcagaacattaa

SEQ ID NO: 167722 - DNA, 552 bp, Enterobacter cloacae
atgacttcaattttcacattttataagcctactaaaagtttctttttcagtgatatacaaagtaaaaaaagctatgagatgaattataaaaatatattttcccgatatgggtattatgatgatgaaggtaaaccactacttattcgctcacaccagccacggcaccttttaaacacaatagcccattatggtgaaatgtctgaactggatatagctaaatggtctggtcgtatcaatgcgaatcagaacagagtttataaccatgtgtcagaagaagatatgttagataaaatcaaagctattaaattgaataggagtaattactgtcaaagggagtcaatacccacaaatgaattgacaattgattttgataaccttaatcaaggtgcaatacacttaactgaatttggttactgtgtacataactatttaatcaagccttgtgcaaaaattaatcaggttattgagtgtgataatgaaacactgggcattaattcagtagatagaattagactgcaatctgtacgagagaaagaattaataagcttttga

SEQ ID NO: 167723 - DNA, 279 bp, Enterobacter cloacae
atgaataaagaaaccattaagtgcccattttgctttaaagaaagcgaatttggggtccgtgtttgcactggctgtcattccaagattagttatggcgaagtttcaggatgggctgctttgctaatagtatttattttattagctattacttacatcatactttatataagtcaaaatttattagtaggtatcattactttttttacattagtaattttaatgaaattatatattcgcaagaaatttgcacacagagctatttttacacatagaagctaa

SEQ ID NO: 167724 - DNA, 540 bp, Enterobacter cloacae
atggctaccagcaaaactaaactcagcgcagccatgctatccctcatcgccgctggcgcttcagctcctgtgctgtttgaccagttcatcagcgaaaaagaaggcaatgcgctggtggccgttgttgatccaggtggtgtctggtctttatgtcacggcgtgactgtcatcgatggcaggcgtgttgtaaaaggcatgacggccacagatgaacaatgccgcaaggttaacgctattgagcgtgataaggcattagcttgggttgatcgcaatatcaaagtgcctctgacggagccgcagaaggtaggtatcgcatccttctgcccgtacaacattggtccgggtaaatgcttcccttcgaccttctacaggcgcattaatgcaggcgaccgcataggtgcatgcgaggcaatccgctggtggattaaagacggcggccgcgattgcagactgactaaaggccagaagaacggttgctatggtcaggttgagcgccgggatcaggaaagcgcactgacatgctgggggatagaccagtga

SEQ ID NO: 167725 - DNA, 444 bp, Enterobacter cloacae
atgggtcgaccaagaaaaaacgttgaggtaccggggcaggaaactgctggtactgagacaaccaatatcgtggcggaagggcaattacttaattccacccctgttaaccagaccgttgctgatgcccaacgcgcagagcaggaagttatccagcagcgcgttgccagtctgctggacgatgccgctctcgctgagcgcaatactctgctgggtaccatcaacgagcagggcgcggccatcatcgcccgctttgaaacactgggttacaccgaccttgctgaccagcagctgaccgacaatctcgaattcctccagcttgtcaaaaaagccaccacggcggagcctgccgcgccgctgggctacgtgacgaacgacgagggcaaacgccagccggtgacgggtaagcccgttctgactgagcacggctggcacgttccgggctaa

SEQ ID NO: 167726 - DNA, 270 bp, Enterobacter cloacae
gtgaaaacttattacatccatccgatggcattcggtagcacgcaagacccaggccacggccatgtgcccgttgtacatgctgatgacttcgagaagctacgcgccaagctggaagccgcagagaagcggattgctgagctggaggcgcgcaaaccggatttatacctctgccgcgttaatcgtggtggtgaagagttgtattcaccatgcgggaaggattatccacgcggacgtggttacatcgccgccgcagccggtaaaggagagtga

SEQ ID NO: 167727 - DNA, 333 bp, Enterobacter cloacae
atgaataacaaagatttaatcaacgccggacacgctctggcaaaagccatcagcaatgctacgccgctgatcgagatcgcaaaaatggtttccaatctcgctacgcagctggatgttcaaatcgcacgttctaaccaattatcaatagcgctggaagccgcagagaagcggattgctgagctggaggagcgggaggtgacattacccgagcgctacgaagttgaaatgtatccaacgccttccccggatggggattggtattcacgcgaggatgttttggcggcgttagcagctgctggcctgaaggtcgccgcagccggtaaaggagagtaa

SEQ ID NO: 167728 - DNA, 369 bp, Enterobacter cloacae
atgggggtgattgtgactgcttacaacatcctcccgatgggaaagccgcgcatgacgcgtgcagataaatggaagaagcgcccggaagttatgcgttatcgggttttctgcgaccatgtccggctcctgggtgtcactatgcccgaatctaattcacacattaccttcattcttccaatgccaaaaagctggagtaagaagaagcgccagcagtttgatggtaagccacaccagagtaaacctgacttcgataatctagttaaagcactctccgatgccatttatgaagatgacgctcatatatgggatgcacggattacgaagctatggggtgaagtcggtcagataattatcaggaatatcgactga

SEQ ID NO: 167729 - DNA, 261 bp, Enterobacter cloacae
atgatggcgtgtcaggtagctgttaaccaaaaagaccatgatttccttgactgggattcttttgtgaattgcattgaagcgcatgcagcgttcgatctggaggttataaaagagcaaatagccacagattatggtgggattttgaaggggcgaattacggacccttgcatgcaacaggttcgaaatgcagttaatgtttctaaaaccatggttacgcgtcacaaaaaagcgatcctttctgctcttcaggaatatgaataa

SEQ ID NO: 167730 - DNA, 177 bp, Enterobacter cloacae
atgactaagacaatcatcgtaaccgcagaaatagatgttccggatcaggcaacagataaagatatttcagattgggtagacgttgagtacggccagtgtggtagccagaaattagataacccgtgtcgtggcgatgtgacggaagtaataaaccattcctggaaatttgagagctaa

SEQ ID NO: 167731 - DNA, 213 bp, Enterobacter cloacae
atgaataaggtcgaattgcttaagaagatatcggcactcgctactgaatgccacacgctagcctgtgagcttgatattggcgacgagcgaaccgaaatgttcgccatctacggtgtgctacacaatctcggtcgaaccggctacgccagacaggtaagtaaaaggataaatccccttttggcctcatctgaccacgttgaggatgatgattga

SEQ ID NO: 167732 - DNA, 210 bp, Enterobacter cloacae
atgcaacgcatgaaaattaaagaactggttgcagcggcatacgccagcttatccgaactgccacctgaaaaagcccagcttatttgtgagctggcaacgcgtctagacgtgacatttgcagctttaactgagtcgctggatcagcgtatgagcctcgacgcagaaattaaccaacttcgcaaaggcggtgcagcaggaggtgaaagatga

SEQ ID NO: 167733 - DNA, 201 bp, Enterobacter cloacae
atggatgagaagttagaagcgcttttagaaaaaattgctcgtctggagctggcagccaaacgagggttgcagttcaacgaagagattaagcctcatttaacacaaggccacattgtctcagtcgaatactgcaacacaacgttaaagcactgcgctctgttccgggaatggatcaacgagtgcttcggatcatcagaatag

SEQ ID NO: 167734 - DNA, 216 bp, Enterobacter cloacae
atgacaaccgacgaaattgaaaagtacttcggcagcattgaaaaagttgccgagtttttttgcattacaagcgaggcagtttaccaatggcgcaataggcctggccgcctcattcctaagggccgagcagctgaagctgcttaccgtactgaaggagggctgattttccatccagacctttacgaaaagcctaattccaatgaagtgacaaagtaa

SEQ ID NO: 167735 - DNA, 936 bp, Enterobacter cloacae
atgtgtataagagacaggtattattctcgtgtactttataaccatagtagatatagagatgcaataatattttgtgaagagcttattacccttttacaagggtatgaagaggttcctataaataggctttattttgttttgtcagaatcataccgtatggttagtgacagagaagaagcagttttaaatatggagaaagttcttgaggatgtaaaaggattagatacgtccgaaattgctgacgcacaccttgagttagctttagcatactataaaataggcaacttcccaaaagcgcaagtacatgctaaaaaagcaataggattatcgccaaaagggagcgcgctaagcctccagtgtcaggcaattttagcatcggaacttgtagatagtgaatgcaagaaaaaattatatagaatcgaaaagaaagctagaaggcaaaaatatacgtgggttgcgaataatatacttctgacgtttgcagatcaagaagatttaaatgaaaataaaataaaactctatgataaagtaattgaaacttcatcaagagggtataaccatataagggcaacgatttataaagctcatgccttaatggaaatgaataaacttcacttgctatctcccacggaaaagatttatttatatgacctttatggctacttgtttactcaacgtattcagtcaatgtttataaaactacatggggttttatggacaatgtttaagcgcgatgggaatgtttcgtcattagctagtttattgagatatagctctacaatatggcgtattgaaggtgacgttaaaaatgaaataaaatatctgaaagactgtagaggattcttgggcgacaagacaagtattaataacacattaatagttacagactatattgatgcgcgtcttgaagatttggaatcgttagataatgtttga

SEQ ID NO: 167736 - DNA, 510 bp, Enterobacter cloacae
atgagtggtaacttgtggagcacggctggaattccgcacaaagggtggttatgtgttgaggtaatcgatttgcgtgcagatggtacgccgtcagaagaaactgattatgcagtgtgccaaatgtgcggtaatgaaaggattcgttttgtccatgttatgacgcatcctgacctgagcgaaagattcgatgttggatgtgtatgtgccgagaaaatgagtgacgactatgaagggccaaagagaaaagagtcaaggcttcgtaatcgtgcggccagacgagctcgttggttgcagcgagcttggcgtatatcggcaaaaggtaatagctttcttaacatagaaaactacaacttagttgtgtaccctacgaaaactcagcgttggggctataagattggggatagatttagtccaaaaacatatgcgacggttaatgaagctaaacttgcgctgtttgatgatttttggagtgtaacgcaggaaaacgagggtatgtggtcatccgattaa

SEQ ID NO: 167737 - DNA, 456 bp, Enterobacter cloacae
atgagtgaatttaagccctttgacgaccggctcaatggtctgattactgccctgtcaccggctgcgcgccgtaagctggccggagagatagcaaaggagttgcgcaagtcgcaacagcaacgtatcaagctgcagaaagcaccggacggctcaccgtatgaggcgcgaaagcgtcagccgcttagggctaaaaccgggcggattaaacgggcgatgttccagaagctccgcacaagccggtacatgaaagccactggccgtgaaaacagcgcggtggtcgaattcaccggcaaagtgcagcgtattgcgcaagtccatcagtacgggctaaaagaccggcctaacccgcacagccgtgacgtgcaatatgaagagcgcccgttacttggttttagcaaggaagataataatcggatagaaataatattcttaaagtatatgggtggtgatttttga

SEQ ID NO: 167738 - DNA, 855 bp, Enterobacter cloacae
atgttagaggaatttatgaagtggcttagcacggtactaacatccgcagcactaataagtgccgtagtatatttctctcgatctacaatatccaaatacttaggtaaatctatagagcaccgtttcgataaaaaaatagaagcttttaaatccgaagtaagggataacgaaaaagaattcgaacaaattagagccttcatgggttctactcgtagagaaagggactcaacccttcaagccaaacgatttgaagctgcagaaattttaatgcgctcacgtcaaacctttggggaatttacaatatttgttgagtatcttaaaatgcttaagcttgaagagatactaaaaaacaaaaacgaccctaaaataactcaatttattaaaactcttactgaccctgtcgacattgatggaaaacttaagactattgcaaatattgacaaaacattacctgatttgtatctaagcgaaaaagttaaaaatcttttcaatatataccgctccataataatgaacgccgtaatgattatgaaactcctgagcatgtctggtttaaacataaaccaagacttgtttaaaaaagatgtcttaaaaaaaatgattatcgaatcagtcccaacatctgcgagtggctttgaaaaatacggtgatagctatgcatacctttggttagattacttccatgatcaaatcttaaaagaattgcgaaatgaattattagggatcaccagcatgtcaaatgacacagaagccgcaacacgtctagcacttgactcacgacaggcaaagataaaattgcatgaatctcttgtaaccaatggtctttcagaggatcttataaaaaccgacatatga

SEQ ID NO: 167739 - DNA, 816 bp, Enterobacter cloacae
atgaaaacgatgttacgcattgcctgtcttgctgcacctgtaatgttgaatgtggcgcaggcgtccacactgcaaccgggtaacctgatcattggctctgacctgacttatccgccttataatttccttaagcaggacaaaccggcgggttttgatactgagtttattgagttaattgcctccccgttaaagctgaaaccggtcgttaaagacacgcgtttcgccagcctgatccttggcttaaaaagcaataagttcgatgttatcgcttcaacactctatgtcacgccggagcgcgcgcagcaggtggattttctgccttatatgaaaaccggcggctctttattggtgatagccggctcggctttccagccgcagaagcccgaagacctgtgcggcaaacgggtggcatcaattaaaggcggagcctggattgcccgcctgaataaggtgtctaccgactactgccagtctaaaagccttggcgccatatcagtgcaagaattcccgacctcgccagaagcaactcaggccctgctgtcggcggcggttgatgtgcaatatgaggatgccgcagttgcaaaagcgacattagagaaaaccgggcagcgcctgaaaatttcctctcaacaaatgatctatcccgtggtggtggggctggcggtcaataaagacaaccctgaattattgaaggaactgaaagcatccttggcgcagagggtgagcgatggcagctaccgtgcgctgttgcagaagtacaacctgcaaatgccgggtgccgatgaaatatcgaaagcgctggcaggtagtctttga

SEQ ID NO: 167740 - DNA, 1509 bp, Enterobacter cloacae
atgcattttgactggcgttacctgataagtttattccactacgcagatttctggcgtgccagttggctggtagtgcaactgagcgtgatgacgtggctcgggggaattgtgctgggcttaggcgtggcgctggctaaacaatcgcgtaacaccctgttgcgaaatgcggcaggctgctacatctggttattccgcagcctgccgttgctggtgttactgatctttatttttaacctgccacaaattttcccgacaaccagcgggttactgtcgaatccattcgcagccggtttgctggcgctgattcttagcgaaaccgcctatattgcggaaatccatcgtggtggattgttgtcagttcagcgcgggcagtttgaagcaggacgggcgctggggctcaataatacccagatccggctaagcattattattccgcaggcattacgtatctctctaccaacgttggtgaatgaatttatcaccatcgtgaaaatgacttcgctggtgtcggttatctcgctgtcagaaatcctgatggtgggtgaacgcctttatactgacaacttcaaggtgatggagaccctgctggcggtggccttctattatgtgctgatcgttacgttgttcgagcgcctgtttggctggctggagcgccgctgggatgtgctgaatcgtaagcccgcaccgtttgatgtggcgcaggctcgcgccagcttgccagtacagcccgttgccacgcgcaaaagccacagcgcatcggcaaaaccgattttgaagttaactggtctcagtaagtccttcaatggcaagccggtactgaacaatatcaacctcagcgtgaaacctggtgaggtgatctccattattggcccgtcgggctcaggaaaaaccacgttgatccgcatgatcaatggtctggaaaaaatggatcagggtagtgttgagctgctgggacgtgcatttattcatgcaggacagcgcgaaaacgcactcccttaccgtgcccagataacccggcttggaatggtttttcagggcttcaacctgtttccccataagacagtgctggaaaacctgatgctggccccgcgactgcataacctcgataaccctaatgatctgtataagcgcagcctggccatgcttgataaagttggcatgctggaacacgctacgaaatacccccatcaattatcaggcggacagcaacagcgcgtggccatcgcccgtactctggtaatgaagcccgcagtggtgctttttgatgagccaacctcggcactcgatccggagcgagtcagcgaagtactacaggtgattgaaaagctggcggaagaggggatcaccatgctgattgtaacccacgagatgaggttcgcgttcaccatttccgaccgggtggtgtttatggagcaggggcgtatcgaaattgatgcgccgccggaagaaattcgccaaatgcgcaatcaccggatcctccgctttatcgacgatatggctacggcctga

SEQ ID NO: 167741 - DNA, 723 bp, Enterobacter cloacae
atgaaaggatctgccggggaatcaggcgcattgttcattgaaattcctgaacatattgatttaaccgggctgcctgcatttgagcgtatatccatcctgctgcgtgaaaacatcatcagcggcaatctggtagctgggcaggcgctgggcgaaattgaactggcggcattatgcgatagctcgcgtaacaccctacgtgaggcattgcgttttctgcatggcgaaggactggtgaattatcaccagaatcgcggggtctttgttcgtcagcttgataagcgcgatatccgcgacatattcaaagctcgccgccatctggaagtactggcgttaacggtcaacacgcctatcagcgattttcatctggcgcggatggaaaagcatctggataacgctgcgcaatcagcggcggcgtcggaatggcgcagcgtcggtacgcacagcctgcgatttcatcagagcatcgtacagatgctgggatgcgagcgttttaatgattttttcagtgtgttactcgcacagttgcgtctgttgttttgcagcggcgccggggagcgagatttccagttgccatggatcgcacgcgatcgccaaatcctggccttactgaaccagcaacaaagcgaggcagcctgccgtgcgctaatcgactatctcgattactcagaacgacagttaacgaccaactttagtcacccaattacctatggagaatcttactga

SEQ ID NO: 167742 - DNA, 837 bp, Enterobacter cloacae
atggcgaattatcctgcagcgtatcagagcacgtccggctcggcgttagacgttgaccgcgatttctacaaagcgcttgccgaaggcccgcgtgagcttatcacctctcatctgattccaattcgtactggctttgcctgggaagttcccgccggacatctattccggattaccacgccggaaggaccgcaggtaggggatttgaatatctggaaccgccgtgacccacgcgaaagaatgtgggtatcccgtacccgccaattacaacgggcgcacctgtcgacttacgatcgactctggtcgaatttgccgtttattcgtccgatagcgaccatcaccgcagattcgctggcggattatggtatcgacagcgacggcggccgcgtacatgacctgatgggaacacgttgcgatccctatgtaaataaattactgactggcgaagatttcgatttccattgccattccaacctggtacgcgctgtacagccctggggactgacagaatttgatgtccatgacgtgatgaatgtattccagtgcaccggcctgaatgacaatgaccagtattttatgaaagcctgcccggcgaagaagggtgattaccttgagtttttcgccgaaatcgatctgttatgtgcactttcaacttgtccgggcggcgatttgtcgctaccgatgtggggcgaagaggcgcaagacacgctgagggtctgccgtccgcttggggtggaaatttataagccgcaggcggacctggttgccaactggacgccgccggtttcaccggactaccgtggtaatcacggtatgcaactgaagccagttgcctggtaa

SEQ ID NO: 167743 - DNA, 1392 bp, Enterobacter cloacae
gtgaaagcacgtcagctggcaaaacgtgtcggcacgccgttagtggcaggaactcaggatccggttaacagcgtagatgacgtcatgaaatttgccgagcaatatggcctgccgctggtgatcatagccgcttatggtggtggcggacggggaatgaaagtggtatggcgaagagaggacattccagaactgtatgtctcagccgtgcgcgaagcggtgaccgcattcggccgtggcgaatgttttattgaacggtttttagacaggccgcgtcacattgaagcgcaggtgctggcagacaaatatggcaacgtacaggtgctaggcacgcgcgattgttcgttacagcgccgtaaccaaaagctgattgaagaagcgcccgcgccttttctcagtgatgaacaacgtcagcgtattcatgatgcagccagagagttgtgtcgcgaagcagcgtactgcggcgctggtaccgtcgagtttctgcttagcccggaaggggagttctccttccttgaggtcaatacccgcctgcaggttgaacacactgtgacggaagaaaccactggcattgaccttgtcatcgcccaactggagatcgcccggggcaaacggctggacaataccgaaactccgcctccgcacggccatgcttttgagtttcgtatcaatgccgaagatcctgcgcgtggatttcttcctgtttccggcacgatcagtgacttttcaccgccgtccggcattggtatccgtctggacagcggagtccggagcggttcgacagtgccgcccacttttgattctctgctggcaaaacttatcgtctgggcgccatcgcgcgaaatggcgcttgcgcgagctcgacgcgctcttgctgaattcaaaatagaagggctggcaagcgttcttcctttccaccgcgctgccctgcaggagccggatttcattaccgcgcctttttctgtgcatacacgctggattgaaactgattttgctgtcgatttaccgctggcagaccggacattgcctgcacgggaagaaagcctgacgtgtgtctggatagaactcgatggaaagcgtgttgccctggggctgccggattcgctgctgaatggcgttacacagccggatgcgcagcccgcacggcccttgcgggtgaacgcaggcgtggtagaagcccccatttcgggtgttttactgagctggcatgtcgaagaaagccagcaggttagcgaaggcgaccccatcgccatgatggaagcgatgaaaatggaaacgcagctctatgcgccctgcgctggtcgaattactcttcgggccgctgctggtgagatggtgacggcagggacaatgctggccgacatacacagagataccgatcccatggcgtcgtga

SEQ ID NO: 167744 - DNA, 309 bp, Enterobacter cloacae
atggtgccaaaaaacagggaaataacaatgctgctcacaaaacgcctgctcgccgccgccgcactactcagtctgccgctactggcgatggcgaataataacgctgaacttgggattatcgtgccctcagaactgttaactcagcgagggaccgggcaaccggcaccctgcttacaatgctgtctttatgccaatcaaagctacagcgaagggtcggttatcaaagccgaagggatcttgctgcaatgcgctcgtgataaacaggtattaagcactaacccgctgatttggcagcgggttaagccttaa

SEQ ID NO: 167745 - DNA, 651 bp, Enterobacter cloacae
atgagagaacctgcagagcctgtactgagtgaaatgattgctcaggcattacgtcagaaaattattgctggagagttactgcctggtgcccgcctctcggaaagggaattaaccagccagttggatatttcccgtaacacgttgcgtgaagtttttcgtttgcttacccaggaagggctgttgcgttaccagccaaaccggggcgtgtgtgtggcggtacccacagatgccgatatcatagatatttaccgcatccggcggttgattgaatgtgatgcattgcgtaatgcttacccataccacccggcgattaccatgatggagcgtgctgttaacgaggcgcgtcgcgctttgcgggaggaaaactggggggaggttggcaccgcgaatatgcaattccatgcagccattgtcgcactttcagacagtgagcgtctgatgcggctttaccagcatatttcagccgaattacgcctggcctttggtcaactggcagataaagagatgctgcattcaccctatgtggagaaaaacgcggggataattttgttgctgaaagcgggtgaaaacggtaacgccgctgccacccttgaaacctacctgaatatttctgaacgcactattctggctgcgctggcgcgcagccggtaa

SEQ ID NO: 167746 - DNA, 1245 bp, Enterobacter cloacae
atggcagttgataacatcaatcagcataaaagctttgttcaaaaccggcgttcatctcttctcgccgccatttttctgatggcgacttccgccattggcccgggttttattactcaaaccgccaccttcaccgccaccctgggtgtcgcattcgcgttcggtattctggcttctatcctgattgactttgtcgtacagcaaaatatctggcgcgtggtaaccctgacacaaatgaatgcagcagaggtagcaaaccgggcaataccgggcagtggctacctgttggctgtgttggttatctttggcggactggtgttcaacattggcaacatcgcgggcgccggtttagggctgaatgccttgtttggcttgagccctaaactgggtgggcttatcagcgcagctattgcgatttatatttttgcttcacgccgtgctggtgtagcgcttgaccgcatgcttattgcgctgggggttgtcatgatagtgctgacactctacgtggcactggtttcacacccaccattgggcatggcactgcgtgaaaccgtgttccccagcaatattaactttgcggcaatcaccactattgttggcggtactgtcgggggttacatcagttatgcgggtgctcaccgcctgctcgataagggcatcagcggcaaagaacacatcaaagaagtttcttcggcggccaaccgcgggattattgtggtcggcatcatgcgttatgtgctgtttctggctatttttggcgtggttgccagtggtgtcaccattgatctctccagccacaatgcaaacccggcttctcaggcattcctggccgcagccggtaatgtgggcctgcgtattttcggtattgtattgtgggccgcagcactttccagcgtggtaggcgccgcatggacatccgtttcttttatttccgttttccgcccggggattactgagcgccagcgcaatatcgccactctgatatttattgcattcactctggttgtgtatctgtgcctgggtacagcccccgcagctctgctggtgtttgctggcgggttcaatggcctggtgcttcccctggggttaactttattcctttgggttggctggcgccgggcagacctgatggacggttaccgttacccacgctggttgctctggctggggatgataacctgcatcatgacctggtatatggccatcatgtcggtttccactatttttaatttcctgaaaattgcataa

SEQ ID NO: 167747 - DNA, 774 bp, Enterobacter cloacae
atgaacaccattgatattaacagcgatcttggcgaaagctttggtcagtggcatatgggtgatgacgcacgcatgctgactgtggtgagtagcgcaaacattgcctgtgggttccatgccggtgacccggccgggatgcgggccacactcaaagccgccgcagccaaccaggtgtgttgtggcgctcatgtgggttacccggatatacagggctttggccgccgggaaatgaatatggcagatgacgacctgactgctagcgtaatttaccaaattggcgcactggcgggcctcgcccgtgcggcgggcaccagagtgagttatgtcaaaccccatggggcgttatacaacacaattgcacacgacaggcgccagggcatggcagtcattaatgcgattaaagactataacgccagtttaccactagtggtgcttgccggttctcctcttgcacagcttgctagcgagcaggggttgcaggttgtggctgaagcctttgccgaccgggcctaccatcaggacggtacgctagtttcacgccgggaagccggtgctgtgttgcacgatacacaggccattgccagccgtatggtgcaactggtgcgcgaaggcggtgtagtgtcagttgaaagtgtgttcacgcccatctctgcccaaagtatctgcgtgcatggtgattcccctggtgccgtcgagatggcaatcaaagtgcgggctgcactggagcaggaaggtatccaaattgcgcctttttgcccgggagaacagcaatga

SEQ ID NO: 167748 - DNA, 807 bp, Enterobacter cloacae
atgaacattaattaccctgcaacaccacaagcactggaagaggcggcacaggctcgcctgcgtattcgtaagggttacgacaaacccaccgccgggatggcgccaggcatgacccaagtgaatatgatagccctgccacgcgactgggcatttgattttctgctctacgcgcagcgcaacccacaaagttgcccggtgcttgatgtcctcgaagccgggcaatgccacactatgctggcagctggaggccgtgtggatacggacataccgcgttaccgggtatggcgtgatggtgaactggctaaagaagtgaccgatgcccgggaaatctggcaaagccacccggacctggtcacttttttgattggctgcagcttcacattcgaaacaccactgatgcaggcaggcattgatgtccgccatatcagcgaagattgcaatgtgccgatgtaccgaaccaatcgcccctgccgtgaagctggcaggctgaaaggcgaactggtggtctccatgcggccggttccggctcatcaggttgctgatgccgtcactattactgcccgttacccggccgtccatggcgcaccggtacatattggtgaaccgcaggcgctgggtattcaggacatcaacaaaccagactttggcgacccggtgacactccgccctggagaaatacctgtgttctgggcctgtggcgttaccccacaggcagcagtgatggcatcacgggtgccatttgctgtaagccatgcccctggccacatgtttatcaccgatattccgaacgccgcctggcaacaataa

SEQ ID NO: 167749 - DNA, 1584 bp, Enterobacter cloacae
gtgcgatttttaccttgcagcctgtccagttttttagtggagctgggcactcttgatgacacgctggctttgttcgccgccttgcaggctgcgccattgtcaggagtggaagagatcattcctgcagctcgtaccctgcttatccattttgacccaactctcacccagtgccaccagttatctgctgccattcgccagctcgacggacagatgcaagctcagcgcacaggtaaagtagtcaccatccccgttcagtatactggtgatgatgtggccgagatggcggaatacctcgggttgagtgttgaggcgctcattcagcgccacaccggctctttgtggcaggtggccttttgtggttttgcgccaggtttcgcttaccttgtttctcgtgaagccggtatccaggttccccgccgcgcaagcccccgcacccgtattccggctggttctgttgggcttgccggagaattcagcggtatttacccccacgcaagtcccggtggctggcaaataattggccgcaccacagaaacactgtttgccctggacaggcagccgcccgcgttattgcaacccggcatgcaagtgcagtttgtcgatgtcacgcgcgccccggtctgtgtgccggtggtaaaaccacagcccctccaacaatcagcttccggtagcgcagtgatgtcagtgatatcaccaggtttacaaaccctgtttcaggatgccgggcgcgcagggcagtcaagcatggggatatccccttcgggtgcacttgaccaggccgcttggcggcgcgccaactggctggttggcaaccctggtcacctgcccgcactggaaattactgccggtgggttcagagcccgtatttgtgccccaatggtcgttgcgctaacaggcgcgccctgcccggtcatggtcacccgtgcagacggcgcacattttaccgccagcacagaagcgccactggcacttgaagcaggcgaccagttacgactgggagcgccagcacgcggcgtgcgcagttacctggcacgccgtggcggctgggccgttacaccacaactgggcagtgcctcacgcgacacgctggcacaagttggcccggaaccgttacaggctggggttaaattgtatgcaggcaccacgccgccatacagtgcggtacagcctgctgtcatcggcctgccttcattaccggcacccggcgagaccatcacgctggatatcatccctgggccacgctgcgactggttcaacgacgaagcgctggaccggctcaccagccagtgctggcaagtcacgccacaatctaaccgcattggcctgcggttacagggcgagttaccgcttacacgcagtgacaaccgcgaattacccagtgaaggaacttgcattggtgccatccaggttccggcgaacgggcaaccggttctgtttctggccgaccacccgttaaccggtggttacccggtgattggtgctgtcgcccactaccatcttgatattgcgggccaactcccgcccaactgccagattcgctttcgggccattcacccttttactgtttttgaggagtataaataa

SEQ ID NO: 167750 - DNA, 1746 bp, Enterobacter cloacae
atgagcgctgttgctaccgttcccccacacaaagtgctcgtcgcgaaccggggcgaaattgcggttcgcattatccgggcctgccatgaatacggttttgccagtgtcgcggtctatgctgacccggacgtcgacagcctgcattgccgcctggctggtgaagcctgggcattacccgggtccagcccggcagagacttacctgaatatcgaacaactgatcgacgttgcccgccgcagtgaagccacaatggtgcacccaggttacggctttttgtctgagcgggctgaattcgcccgtgccgtggaagccgccgggcttatctggattggcccacgcccggaaaccatcgagcaattgggtgataaagtccaggcgcggaaaattgccatggcagttggtgcaccgctggttaaaggtacgccagacccggtttcttgcgcggaggacgttatccgctttgccgatgaacacggcctgcccgttgctatcaaggctgcctttggtggtggtgggcgcgggttgaaagtggcgtggtttcgggaggaaatcgccacactttaccagtcagccgtcagtgaagcgctgacagccttcgggcgcggggagtgttatgttgaacagtatctcgaccgcccgcgccatattgaagcgcaggttatcgccgacgagcagggccacgtagtcgtggtgggtacccgcgactgctctctgcaacgccgcaaccaaaaactggtagaagaagccccggcgccttttctcagtgctgaaatcgaagcacaaattgccagtgccgcgcagtccatttgccagcgtgccggttaccgcagcgcaggcacggtagagtttttgctgggtgccaatggtgtgttgtcgtttcttgaagtcaatacccgtttgcaggttgaacacccaataactgaagaaaccagcggtctggatctggtcaaagaacagctacgcgttgcccatgggttaccactgagtattaccacaccaccagtgccgcgtggccacgccattgaactgcggattaatgcagaagacccggcgaaaggttttctcccggtgccgggtacgattacccgctttgatctgccaggaggaccaggggtacgcgtggacagtggtgtcacccatggagacactatttctggcttctatgattcactgatggcgaaactggtcatttgggcaccagaccgcgaccaggcgctggcgcgtgcgcgccaggcagtcaaagcctttcgcatcgaaggagtggcatcagtgctgcctttccatgaagcggtactccattccccggattttactaaaagctttagtgttcatacgcgctggattgagactgatttttctgctgagcttgctgaacaggtacgccctttacccccaggtaactccccgctacaacgttgctggattgaaattgatgggcggcgccatcaactggctctcccggccagtttccaggctgcctccggtagtgctgttccggcaagtctggctgaaacaccccaggcattacaggttgccggtgcagtaactgcgcccatctccggcattgtgcagcgctggcttaaaacttccggcgaaaccgtcagtgaaggcgagactctagcagtaatggaagcaatgaagatggaagtaccggtacttgctgcccgcaacggagtgctgtcaatccagattgctgcaggagaaagctgccagcaggatggtgtgttgggtaaggttacgccctga

SEQ ID NO: 167751 - DNA, 294 bp, Enterobacter cloacae; identical to SEQ ID NO: 77242

SEQ ID NO: 167752 - DNA, 141 bp, Enterobacter cloacae; identical to SEQ ID NO: 36145

SEQ ID NO: 167753 - DNA, 228 bp, Enterobacter cloacae
atgttgatacaggtgggtgaactggcgaaacgtgccgggatcaccgtgcggactttgcatcactacgagcaaacagggctgttgttaccttctgccagaagcgcggcaggctaccggctttataacctggcggatgtgcagcgtctgcatatgatccagacgctggcaaaagccgggctggagcttgccgaaatcagggatttttggaacagcgttcgctgtcattag

SEQ ID NO: 167754 - DNA, 135 bp, Enterobacter cloacae
atgccttttacggaaaaaaaggaatggatgctattaaacgtagcacaggaatatcaggatgttattcaaaggggatacaccatcgtaacgcttgtttcgcctgagtatgtcacgccactaataatggttatttaa

SEQ ID NO: 167755 - DNA, 459 bp, Enterobacter cloacae
gtgattgcggaactgcttgaccacgcggacacccaaaacgcaggcgtttacatcaagaatatccccgagcatgtgaaaaagcttgatgaggcggttggcttccaattagcaccatacgctcaggcttttgtcggggtacttgtcgattcagagagagacgcgcatcgaggtaatgaccctaccagtcgtattcggaccgagatgggtcagggtgttggtacttgtggagaacatggcttttgtggtgccaatgttcctattccttgctacacctgcatgcattttcagccttggctggacggcccacatgaagatgtctatcaacgactgctcaacgaacgtgaacgggtgaaagagataactggcgacatccagattgctgccgtacttgatcgcagtattatcgcgctggcagatgtgatcatgcgttgtgcaaaacgtcgtgaagagcttagttaa

SEQ ID NO: 167756 - DNA, 1035 bp, Enterobacter cloacae
atggttgacatgaaagaggttattgaggtttcaagtctggatgacattgaatctttgttcgcaagattagatggtggcgaagagatacctatcgaaaggatcaagttcgacctcttcaacagtgtgaattttaagatttatggtgacccatctcgctacaacggaacgcttccctctgctctcgctcagggtttatgcgaattccaaactgaaatttataaagttttcacactaataaaatataaaactgacaaccttcaaaggttaaccggtaaagataaagaagaagcagagatcatctttaccattgatgaaggctgtactgatatacttgctgcattaactgatctttttgaagcattcggtaaagcatttgagaaggtaacgcacggcatgagccctggccaaaaaacattatgtctcttgtttgctgtcaccgttataggcggtgcgtgggttggcacgtcatacttagagaaaaaagccgaagtagaagtgaagcaagaagaaaccaagcttgaagaagtcaagattaaatcagaaaacgagcgcatgactatcctgagggacggaatgcttgaggcgattagagctaaagcaggcgtggatgccgtagagcgcgccgaagggattcaggagcatactgcaaaagcgtatacagggatattaaaaggcgcatctgatgctgacaaaattgtcatatcaggcgcaagcaccgttgaactgtctaacaaagaaatccacgagctaatcaagaatcctatcgaaaaagcaaaaaccgaagaacacaaccttgagttagtaatcgatggaattaaacgttcagccgataaaattacaattagctgccgcgagcctacaggggagtccacatttcctgtctctgttgacacttcctttatcgacgataaagacgagatagccttgctttttgatgcaatgaaagacaataagaccgtgaagattttaggcagctataaagttagagctggcgtgattgaacaaggtaatgcctcgtcaatatctgccccatga

SEQ ID NO: 167757 - DNA, 810 bp, Enterobacter cloacae
atgaaaattaccaaacaggaagtgcaagcagtttctggtttgagggctggctacaccctcggtcacgctgatgtgacaatcctcaatgagctggcgcgtatcgcgctggcatcgctcgaagcgcagcctgtaacggaatggaccaacgagcagtgcctggagttcctgtcgatcgctttccggcatgcgaaaattaaaggcgaccttgagtttgatgatatccgcctgggtgtgaagatggtcaattgtagccgcgccgccgtgcttcagggtaaagccgaacttgttaccgcgcatccagaactaactgtttggtacggctcaatgcctgaaacgaacggcaaaacaaactggacggcaatgctgcatcgtaaaggccatcacccgtgggaaggcatcacaatagaccgctcagagtatccagagcgcgtgcgatatgaagctgaccgcatgcgccatctgataggtgagctgactgatgagccggatattctggcttatgatgccgacgcacacagcgggtatgccgaacctgtaagccagcgtgatgagttgccgtatgacccgcaaattgccgcatacgagaaaatcatggagcaggctatcccggatggttacgcactggtgccggttgagccgacagaagacatgattgtcgcgggttttgagtccagaccggatgagtccttcagtaaatcggaagaatgggaggcctaccaaagaatgagtgggtgtgaacaggcagcgcaccgggctaagttgtgctgggcggccatgctcaaagcagcaccgcagcaggaggtgaagtga

SEQ ID NO: 167758 - DNA, 699 bp, Enterobacter cloacae
atgctttgtgttatttctttgacaaagatagcgattgttaagtgcaattctacaaagttagagaaattattaatgcgcttagtagttattatttctccgtttgctgtactttgtatgataacgggacccatgatgcttctaagggatccggtgctatcacctcgtgttctaatggcatttggaacagcatgttttttctttgctgttctggctgcttgggccttctcggcagcaaaaatctatagaaaattttgcggtgttttgtttacaatttacgctatctactttattggattttcgtatgcatatgcaaactctctaaacaatcaggaaaaatatgagaatgcaattattcagttaatgatgtctgatttgaacggtttagatcttaataactatgattatgttgcattcaatgggggggtgttgttgtctccagaagtcagaatggcagcgaaaaaataccctcttattaccaggttaatacagccgacaattaataatcagtggatatggggtcacacccagatgatgcatttcgattttgacaaaaagttccagagctttgactaccatatatcacttaaatctaatatttgtatgtataaacaggtaagaggctcaactcattacaacattttagttgataaagacaattctacagttgtgtttgatttcaaaaagactgcttgtaattag

SEQ ID NO: 167759 - DNA, 504 bp, Enterobacter cloacae
atgccgattatcgactaccccggttggctgccgctggcgcagaaggccagcaaaaacatgacgcttgataccgggttccagaccgatcagccagcggtcggcccggctatcttccagaaccttaccgacgacctgaaagtgacctggtctctgacgtggatcttcaccttggcggaagaccgagcatttcagcaatggttacgtagtcccaactatcttcacggcggtatttattggttcagaatgccgataaatcttggcggtagtggcttgcaagttcaggagcttcactttacgaaagatggtttccctgtccagaccaatatttctggcggagtggtgacctggacgggaaccgttattgccaaccacctgtacaacgccgatgacgagtttgacgacatcattgttgaactgccgccgccgtgggattcgtggctggatatcgttgtcacgggttatccggacgggcgcgatccggaatcactaccgagggtgccgtaa

SEQ ID NO: 167760 - DNA, 276 bp, Enterobacter cloacae
atggcagaggacactctccgcaacgccgggtttaccggtcgcgttatccgtatgcatgccagtaaaggcaagtatgcccgagcagagccgatatctgctctgtatgcccaggggcgtgtagctcaccgaggcagtctgtacgaggtcgaaaaccagttcatggaatacgtgccatccactgcgaaaaaatcacctgatcgcctcgacgctgcggtttacgcattgaccgaactatcagaaccacaatcactcggcatgttggtgcgctcgcgctga

SEQ ID NO: 167761 - DNA, 393 bp, Enterobacter cloacae
atgactacctctaattttatcagcaggatgatcggcgtgccatggtcgaaccgggcctgcacttttgaaaaggtcgattgctggggtctggtggtgttgtacttccgccacgtcctgggcaccgaactgcaccagacgccggactacgaagccggggctgacttcttcacctgctatcagggtgatgtgacgttctggcgcccggttgacaagccggttgagggcgggattttcgtcggctatcagggatcgcagcctgcgcatgtcggcctggtgctgaaccgccaggcgttgcacgcgcggggcgagggcggcagcgtgcgtatggactcgttgctggtcattcagcgagcattcaccaaagtggagtatttttcttatggcgctggttga

SEQ ID NO: 167762 - DNA, 393 bp, Enterobacter cloacae
atgactacctctgattttatcagcaggatgatcggcgtgccgtggtctaaccgcgcctgctcattcgaaaagactgattgctgggggctggttgtgctgtattaccgacatgtgctcgacattgagctacaccagacgccgggttacgaagccggggaggatttcttcacctgctatcagggagacgtcgttttctggcgcaaggtcgataaaccggtcgacggggggatatttgtcgggtaccgcggcgcgcaaccggcgcacgttggcctggtactgaaccggcaggcgctgcactcgcgtggagagaacggaagcgtgcgcatggactcgttgctggtcattcagcgggcattcaccaaagtggagtttttcgaatatggcgctggttga

SEQ ID NO: 167763 - DNA, 861 bp, Enterobacter cloacae
atgaaatatgaacaaagaatcgttgcatttattgatattttaggttttaaatcattacttgacggtactgtagaaaaggatggtaatgataatgaaaatgccattgatgcggtagtttctgcatacgaggaaatatacgatatatggaatctggacgaaaatccaagttttattgattctaaaccaactcaaagtaaaaaggtctcaattttttcagattgtgtagtggtttcttttgaagtagatcagccaagtgaagtgttttatactttactagaaataaaatggctgataatgcgacttatatcaagagggatgctttgtaggggagctgtctcaatggggaaatttatccatacagataggtatcttttcggtcctgcactggtggaagcatatatgcttgaatcaaaggcggcaatgtatcctagggttattttagaccattcagtgatcgaggcaggtattaataatcgaggtccacaccatagtatcagccaagaaaaagcatatgttgagtctttacttgagcaggattctgatggaatgtactatattgattatttcttcaaggctcaatcggagttagatgatcctgagaatgacttccctgcttatattgataatttagcaaatgtaatacgaaaagggttgatgggatcaagtcatcatagtaaagcagatttaagagtgaagttttcttggatgagagaacgctataaccgaatggtggaaattgtcacaaataaagaggctttgaatcagattagtagatcaagtgaaagtgagattgctgatttttataataaccttaagccgataagccctaataaatacaaaaactcatttgtgcggaagtga

SEQ ID NO: 167764 - DNA, 165 bp, Enterobacter cloacae
atgacccctaatattgcaatttctctgaacaaactgcacgtcactatggaacgctatagcgagctaactgggctgcctgttgtcaccctaaacgacataccagcagatggtcgattgcctcgtcatcgcctgcataaagataatgagaaatgctgcctttggtaa

SEQ ID NO: 167765 - DNA, 627 bp, Enterobacter cloacae
atgttcaatttttatcctgacaagacatttaacagaacggaagttatgagtcgaccaacacccgttcccgccatcaacggagtctatttttggtggttcaaagaaatcccgccgggcgttccaacagaaggttgcctaactcatgatgggctaactctgctttatgtgggtatttctcccgacaaaaaagggaaacctaatagtcgagccaatctcaaaacacgcatcaaaactcactacagcggaaatgccgaaggctctacgctaagacgaacgctaggtgttttgcttgcggcagtaagcaattatcccctccgtcgtgttggaaggggaaacagaacgacatttacccatgctggggaacaatggctcgatctttggatggaacagaatgcaaaagtatactgggtagcagacgaagaaccttgggtgctggaagaagcgttgataagaagtattccgctcccattaaacattcaaggtaacactcacccttttaagccaacgctctcagcaatgcgcagcaaagctatggcagaagccaaactgatggagattgcgaacgaaacaggattcagcagacgtaaggtcgtggagattgttgagcaagctgtgagggtagaataa

SEQ ID NO: 167766 - DNA, 927 bp, Enterobacter cloacae
atgaataaagctaaagtcgaaacagaaagtcatgaagaggcttgtttgacggtcgctgattacattgattttattttgcaatggaaagatgcaggtcgaagtccgaccgcattccgcggtcaggctaacatgaaatggataatcgaaccaaaattatttaggaaggatgtggcaatttatgataatgaagacaatgccatcagagatgtgatttccttagagccagccgaattttcgaatgataaaactatgtttgataagcttgtacgtatgcaacattttggcttgcctacaagattgttagatgtcacaacaaatccattaattgcattatggtttgcaacggaaagtattgtccttcccggaaaagaaatagatgatgctccccaagagcaagatgggcgcataatcgccttttatgttcctaaagaacgctcaaagtattatgatagtgatactgtcagttgcttgtctcatcttgcaagcctaaggtcagatcaaaaagaagagcttttcgagctcatcgattctgtaaaagaaaaacgcaaatttaatatttcttccgtcgtaaaatatctatgttatcagattggcatggaaaaacctcatttcaaacctcttattattcctcgtgatttactttatcccttatatgttaaaccaaagttaaataacaagcgaatcatagctcaatcaggcgcatttctattgtatggagctaaagattacaatcctgcggatagaaaaaatccaataaaagcaaaatatttcaaaattcccgcgaactctaaattaaaaatacgcgacgaattggctattttgggtataaacgagaggactttattccccgatattgaaagagcgactaaatttgttactcttcgttatcaaaatgaacttcgttcaaggcaggaatctctattctaa

SEQ ID NO: 167767 - DNA, 339 bp, Enterobacter cloacae
atgaaagaagctaatcaatacgagactgcgcacaaagaggacgcaacggtggcagaccgagaaaaaatcataatcgaagaattacgtgtcgaccctgactttgctgaactctatgtaaaaaccgcacttgaggagatcaacgaagatggcggtttagccggctttctcacagcgttacgccgagttattgaagctcgaggcgggattagtgaagttgctaaaaagacagggctggcccgacaaactattagcaaagcattatctataaaaggtaatccaacaatcaataccttaacgaagctgttatcagtggccggactaaagctgacgttaagataa

SEQ ID NO: 167768 - DNA, 1290 bp, Enterobacter cloacae
atggctacacttgagcgtattcatttcatcccgcacaatgttgaatgtctcaacaagaacgtaacttatacgtctagcaacagccggccttctcttgatggcttacctcagattttctgggctgattttaccccctggagggaggcaaatctgtgggctcttgaacgagcaacgagtggcgaatcttctcttaaaaccattagcagcaacatgaatggtcttttaaattacgccaggtttctggaatcgcatgacctacattggcttcaatttccagcccgaaaagctgagcgctgcttggtgctgtaccgtggtgcgttgattaaaatccgcaatgcaggttttatcagcccctctacagcgtcagaatatatgcgcaattgcatcatgttttatcggtgggtgaaacacaaagtgctccttgcaccacatgtagctctatggcgggataaaccttataccgtcaagttttttgaccgagtaggatttgagcgaacaataaacggaattacaaccgatctcagcattccgaatcgcaaacgacccggtcagaacctggaagatgggttgttacccgtgagtgataaggaccgtgaagctatcctggatttcgccagagagaatgctacgcctgaactctactttatgctctcacttggattctttaccggaatgcggcttggaagtatttgcgaccttaaaattcagactctagagaatgccattcctgacccatctgcaaaggggttactacgtatagcaattggtcctggcgtaacaccggcagtccatacaaaatttgacgtctcaggtcaaatttggatacctgaagccttgcgtgacgcattactggaatacgcaatggggttgaggcggatggaacgagtgatgaaggcttcgatcgagaatcatgacttgttatttcttactcgtttcggcaatacatatggtaggcgtcgatccgatcagtcatcagcagtgaatgtcgaaatgtcggagtttcgacggcggggagcaaaggctggattatcagtgcttcaaaaatttcgctttcaccagacacgatgcacgtttggtactgaactggcacgtttggcactttccagttgttctgatgttgctctggtaatagcgatggtgagcgatgctctactacatgcacctaattctgaagctactacgtttaaatacattcgatttatccaggctcagcctattaaggaatctctctctcatcactttatggtggcttttatcgggatcaatttgggggagcagaagaatggatag

SEQ ID NO: 167769 - DNA, 1722 bp, Enterobacter cloacae
atggatagttgcgaattcgatcttagcttcccgatgcttgaatacggtgccactgaaaccccctgggatctgaaaccatttcttttccgtggaggtgcatcggaaagagtaaagcgtgtggccctgcagatttctcaaggtgaattaggaagcatcttaactgaacgtattgaactagtgagactgttgcatgaacatctgactgctgatcttgccggtggtggtagccgattctctgtaaaaaataaaattcatgccttacgtacatttttctcctgggctgattcagaaggtttcgaccttagccttgaaactatacctaatatttttgttcgttggtcagaccatttacggcaccgccatctggtcgaacgaagtctcagcgaagccagcatttatgatttggccagacttacggctacgattcttgacagaattttgggtaggcaatcaagtcttagcaaaagtacgcgcgtacgcaaaccccgaggtaagggtaaggtacatctaagcaaagccgacaaacagtcccttcataatacctttctttttggacactttcttgcagacatatgtgattcgctgacggcggaagcaacggttgggccattgcctgtttgtatccggtttcgaacgggacaagtactggagcattggtcgggactaccccgcccggataagcttgcagcacgacttaccaaacctcggcatccttctgaaaaagagataaagcgtttaagacgtttagcttgggaagaagatcgaacattacgaacccgtcaatcattagttaatttacgtatacaaagtgagttactaattttcattgcccagactgggttaaatctgcaacaggctcatactttacgtcttgaacaatttcattatacaagccacctggatggctatcaggttcgtacttataaaaatcgacgtgaaggggaagtgctgttcgagattttttccgggtatcggaattggttacagcgctatcttgaatggcgttctgaatggtttgatgatgaaccggatggtctgctttttcctctcatgcgcagtggcggccgcatacaggaaaaggcaactcagttcgagcatattaaacgcattagccatgaacttggcgtacccatggtcacaccgcggcaactaagggggacgcgcattaattggttgcttcgcgagaccaggaatccaagtcaagttgcagagtgggctcaacatacaacagaaacgttgatacgggtatacgccgacccccatcctcaaacttccatgatagagattgctcgatttcatcagcaaacggatccgtttctttcccctccagcgcctggtagatgtgtttcggcctcgccagaatcactagacctcgcacctgataatgctccgcgtcccgattgtataaatgctgctggttgcttgttctgttcccagcacagggatatagaaagtgaagatcatgtatggtctctaagcagtttaagacaccttaaatcacttgagttagcacgttaccgtcccccaactttgcaactggcaacagtacatccagctcttgttgttattgacaggctgacagcaaaattaaggttttttgaagaaagtagcgaggtacgtagggtatgggttgaagaggcgtcagcacgaatcattgaaggaaattatcatccggcgtgggaaggcttcattcgactggcagaattacggcaaaatatatga

SEQ ID NO: 167770 - DNA, 2040 bp, Enterobacter cloacae
atgaagacaaatattctctccgaattaagactcagtatcgaatcacctttggctgcccatagcgcactaaattatcgcccgagtagctggcctcctttacatgactggccagtagttatagacgcaactggtcaggtggtgagccgctggggagatgctgtctggcgccttgatccctgggctggaaaggctctcactcttaatttcggcgatggtccaataaaaaaaaatgctgcagtaatcaatcatgataacgccaatttgctgcgtattgtcaccggttggtggctatacgggcccaacggttctcgtggatatcgaagcctgaaaactcgatttgatcaaattcgtcggatatttgttttgtgcacacaacaaggcattctggcatctgatttgcgtaaatatcctgaaatagcagaactcctcccgaatagactccagctatcccggaccaaagagcttatggcacttttgcatgaactttatgagaggagagaagatcttggttttatcttgcttgatcgtaaaggactgtcgcgtcttgcagcggctatcccagatcatcaaacgcaccagaccccctacatcccacctcgcatttggaactatcaaattacacgcctacgagcgtgtcttgatgattttatttctcatcgaaaacagattgaggaatgttttaggttttgcctggcggcatacgaacacaactctgcaagtcttcatggtaaagccagaaaggattcgttctatccatttcgaagaaattcagatggaacaaatggaaagatgactggcaacagatattatggaacatttatcgatacggcacatcgatttggtattgttgagctactgaatcgttggatagacgtgagtattgatgatattcgagttcagacattgagtcagtatttgaaactcgtaagttatgctggattaggctatttactgaattttagtctcatgcgagtcgaggagggatggaatttacgttcagattgcttgcacattgaacccgacccaagatttggcgacttttatctattaagaggacaaacaacaaaaacaatgtcagatgcggaggctttgtgggtgacatcttcttctgtaagcgtggcggttgaagcgcttcagacaattgcaaaccttaaggcagattgtagcttttccaaagaaatggttcgcgatcaaggaaaaattactggtctgtatttgtttgactacatgtttgaaccatggggaacgcaatttagcaaaagaaacccgattaatcgcccatcaatacccagctattcaagggttctctacttgttcaaaaaacttttggaccctgagcatttaagaattcaggcagaagattatcgattagctcgtctggtcactccagcattaagtgatgagttttccgtgggaaaaatatggccactggcatggcatcaactacgacgaactggcgctgtcaatatgcaagcatcaggtttggtcagcgatgcttcattgcagtttcaacttaagcatgttgcgaaagctatgagtctttactacgggcaaaatcattctcgtttacgattggaagaaaaagcccatgatttttatattcacaccatgtacgaaactttgggaaggcaactacagcaacttaccagcgagcggttcatcagtcctcacggggagaaaagaaaatcagatatagtccggctcatttcgacggatgatgcaagaaaagtgatcaatttgtccaggaaaggcgttgtggctcacagacctgtcttgctgggtgtttgcacaagccgaactccttgtccttatggaggaatagataacattgcgcgttgtggaggaggtgactctctttcagaacccaaaccatgtgcagacgtgctgttcgatccagaacaactacatgaggtcgaattgttagaggctatactggatgaacgcttggcttttgccgatgcagggagtcctttaaaagcctctctggaagcccagaaacgtagtgtggagaactatcgccgtgtcatctgtaaaaaataa

SEQ ID NO: 167771 - DNA, 498 bp, Enterobacter cloacae
atgaccgaatttcttggaaaactgttcgacaaggtttattcggaaagggatttcagcattaatgtcgccatatttgtcgccgggctcgccgggatgagttgctatctggtgcttcacgactctgtcctgacactgtttgcatttattatttcgttcccgatcgtcaagattattgccggaggatggcatcagcgtattttggcccgcaaaggcaaggccgttgcagagcagcagctggccgcgctttatgattctctgacggtcagtgaaaaagacgtggtgcagcactttgtggcgcacggcggcgccgtcatgacatgggggcaaatgaaccggcttgacgatccgcaaaccggagtggagtccttggcccggaggggtttattatgcacctccgtgtccgtggatggaatgcgggagaccttcgagctggacctgacgctttttacctttgcttaccgctggcgagcccctaataagatgggcagtactacatag

SEQ ID NO: 167772 - DNA, 552 bp, Enterobacter cloacae
atgcaaatcaaagacagtgaaaaacttattcttctcatgctatgcgatttgtatgacaaccatgatgttcagggggatatcgatcataactttattcgcgatgctattttcgaccagcagacctgggccattccctggaaattatccggcatccccttcgaaaaccaagaaacaccggctgaagtcaaatatgtatttgatattcttcaaatgtggagtctcattgagtatagttatgccgcgctgacggatgaggaaaaaaaccggcttgaggtggatgcggcaccgtttggccggaaccctgttttcatgggttttgacggtaataacgaaacggaattactggttgcagcggagttcatcataaataagcttcagcggtttgaacagtttaaaggtcgagacttgaattctcatgcaccaagcgtcgggaaatatgcaagaatgttgagggcctttaacatcgcgtttgaagacaacatgggtaacctgctttcggcagaacaactggccaccattctgaaagaacgtatccatccttccaaccgctga

SEQ ID NO: 167773 - DNA, 513 bp, Enterobacter cloacae
atggaaatgaatgatgttttgctttcgcgcatcgggacagtggtcacaatcctgtgcgccattgcgtcgctttacggatggcttcagtcgcgccgggccgcaacgcaggccgaatcggccgttaaacaaatacagtatcatcgcagtgtcaggcaggccgggacggttcatgccgcccttaacaacgccataaagtctctacggacagtaggactcggttgtaatgcagaaaaaattgtcggcattaaaatggagcccatcattgaggaaacagaactgttccttgagcagtttcaggcagcattttctgacccccatcttgccgataaaataaacgtgcatatagattcatttacggccgtggtcagacaacatatttcacacctttcagatgccgtttccccggaagataaattaaaggaaagtcggcaaatctatctgaaactgtcttcccttcaacctaaaatcggccggattgccgatgagtttacattcaacccaaaaggtgactga
